(19) United States
(12) Patent Application Publication
(10) Pub. No.: US 2020/0163878 A1
(43) Pub. Date: May 28, 2020

(54) LIPID NANOPARTICLE MRNA VACCINES

(71) Applicants: CureVac AG, Tubingen (DE); Acuitas Therapeutics Inc., Vancouver (CA)

(72) Inventors: Patrick BAUMHOF, Tubingen (DE); Mariola FOTIN-MLECZEK, Sindelfingen (DE); Regina HEIDENREICH, Tübingen (DE); Michael J. HOPE, Vancouver (CA); Edith JASNY, Stuttgart (DE); Sandra LAZZARO, Tübingen (DE); Paulo Jia Ching LIN, Vancouver (CA); Johannes LUTZ, Tübingen (DE); Barbara MUI, Vancouver (CA); Benjamin PETSCH, Tübingen (DE); Susanne RAUCH, Tübingen (DE); Kim Ellen SCHWENDT, Dettenhausen (DE); Ying TAM, Vancouver (CA)

(21) Appl. No.: 16/345,299

(22) PCT Filed: Oct. 26, 2017
(86) PCT No.: PCT/EP2017/077517

§ 371 Date: Apr. 26, 2019

(30) Foreign Application Priority Data
Oct. 26, 2016 (EP) PCT/EP2016/075843
Oct. 27, 2016 (EP) PCT/EP2016/075929
Jun. 9, 2017 (EP) PCT/EP2017/064066

(51) Int. Cl. A61K 9/127; A61K 39/39; A61K 9/19; A61P 37/02; A61K 31/7105; A61P 31/16; A61K 39/145; A61K 47/69; A61K 47/14

(52) U.S. Cl. CPC A61K 9/1272; A61K 39/39; A61K 9/19; A61P 37/02; B82Y 5/00; A61P 31/16; A61K 39/145; A61K 47/6929; A61K 47/14; A61K 31/7105

(57) ABSTRACT

The invention relates to mRNA comprising lipid nanoparticles and their medical uses. The lipid nanoparticles of the present invention comprise a cationic lipid according to formula (I), (II) or (III) and/or a PEG lipid according to formula (IV), as well as an mRNA compound comprising an mRNA sequence encoding an antigenic peptide or protein. The invention further relates to the use of said lipid nanoparticles as vaccines or medicaments, in particular with respect to influenza or rabies vaccination.

### BACKGROUND OF THE INVENTION

[0001] The present invention relates to mRNA comprising lipid nanoparticles useful as mRNA-based vaccines. Additionally, the present invention relates to a composition comprising the mRNA comprising lipid nanoparticles and the use of the mRNA comprising lipid nanoparticles or the composition for the preparation of a pharmaceutical composition, especially a vaccine, e.g. for use in the prophylaxis or treatment of infectious diseases, tumour or cancer diseases, allergies or autoimmune diseases. The present invention further describes a method of treatment or prophylaxis of the afore-mentioned diseases.

[0002] Gene therapy and genetic vaccination belong to the most promising and quickly developing methods of modern medicine. They may provide highly specific and individual options for therapy of a large variety of diseases.

[0003] Genetic vaccination allows evoking a desired immune response to selected antigens, such as characteristic components of bacterial surfaces, viral particles, tumour antigens or the like. Generally, vaccination is one of the pivotal achievements of modern medicine. However, effective vaccines are currently available only for a limited number of diseases. Accordingly, infections that are not preventable by vaccination still affect millions of people every year.

[0004] Commonly, vaccines may be subdivided into “first”, “second” and “third” generation vaccines. “First generation” vaccines are, typically, whole-organism vaccines. They are based on either live and attenuated or killed pathogens, e.g. viruses, bacteria or the like. The major drawback of live and attenuated vaccines is the risk for a reversion to life-threatening variants. Thus, although attenuated, such pathogens may still intrinsically bear unpredictable risks. Killed pathogens may not be as effective as desired for generating a specific immune response. In order to minimize these risks, “second generation” vaccines were developed. These are, typically, subunit vaccines, consisting of defined antigens or recombinant protein components which are derived from pathogens.

[0005] Genetic vaccines, i.e. vaccines for genetic vaccination, are usually understood as “third generation” vaccines. They are typically composed of genetically engineered nucleic acid molecules which allow expression of peptide or protein (antigen) fragments characteristic for a pathogen or a tumor antigen in vivo. Genetic vaccines are expressed upon administration to a patient after uptake by target cells. Expression of the administered nucleic acids results in production of the encoded proteins. In the event these proteins are recognized as foreign by the patient's immune system, an immune response is triggered.

[0006] DNA as well as RNA may be used as nucleic acid molecules for administration in the context of genetic vaccination. DNA is known to be relatively stable and easy to handle. However, the use of DNA bears the risk of undesired insertion of the administered DNA-fragments into the patient's genome potentially resulting mutagenic events such as in loss of function of the impaired genes. As a further risk, the undesired generation of anti-DNA antibodies has emerged. Another drawback is the limited expression level of the encoded peptide or protein that is achievable upon DNA administration because the DNA must enter the nucleus in order to be transcribed before the resulting mRNA can be translated. Among other reasons, the expression level of the administered DNA will be dependent on the presence of specific transcription factors which regulate DNA transcription. In the absence of such factors, DNA transcription will not yield satisfying amounts of RNA. As a result, the level of translated peptide or protein obtained is limited.

[0007] By using RNA instead of DNA for genetic vaccination, the risk of undesired genomic integration and generation of anti-DNA antibodies is minimized or avoided. However, RNA is considered to be a rather unstable molecular species which may readily be degraded by ubiquitous RNAses.

[0008] mRNA vaccines comprising antigen-encoding mRNA complexed to protamine are already described in the prior art (e.g. Petsch et al., Nat Biotechnol. 2012 December; 30(12):1210-6., Schnee et al., PLoS Negl Trop Dis. 2016 Jun. 23; 10(6):e0004746., EP1083232, WO2010/037539, WO2012/116811, WO2012/116810, and WO2015/024665). Also WO2016/176330 describes lipid nanoparticle compositions comprising nucleoside-modified RNA encoding different antigens.

[0009] Even if a lot of progress was made in the last years there is still a need in the art for providing an efficient method for mRNA vaccination, which allows eliciting an adaptive immune response, wherein the administration is not severely impaired by early degradation of the antigen or by an inefficient translation of the mRNA due to inefficient release of the mRNA in the cell. Furthermore, there is an urgent need to decrease the dose of mRNA vaccines to decrease potential safety concerns and to make the vaccines affordable for the third world.

[0010] There are many challenges associated with the delivery of nucleic acids to effect a desired response in a biological system. Nucleic acid based therapeutics, such as vaccines, have enormous potential but there remains a need for more effective delivery of nucleic acids to appropriate sites within a cell or organism in order to realize this potential.

[0011] However, two problems currently face the use of oligonucleotides in therapeutic contexts. First, free RNAs are susceptible to nuclease digestion in plasma. Second, free RNAs have limited ability to gain access to the intracellular compartment where the relevant translation machinery resides. Lipid nanoparticles formed from cationic lipids with other lipid components, such as neutral lipids, cholesterol, PEG, PEGylated lipids, and oligonucleotides have been used to block degradation of the RNAs in plasma and facilitate the cellular uptake of the oligonucleotides.

[0012] There remains a need for improved cationic lipids and lipid nanoparticles for the delivery of oligonucleotides. Preferably, these lipid nanoparticles would provide optimal drug:lipid ratios, protect the nucleic acid from degradation and clearance in serum, be suitable for systemic or local delivery, and provide intracellular delivery of the nucleic acid. In addition, these lipid-nucleic acid particles should be well-tolerated and provide an adequate therapeutic index, such that patient treatment at an effective dose of the nucleic acid is not associated with unacceptable toxicity and/or risk to the patient. The present invention provides these and related advantages.

### SUMMARY OF THE INVENTION

[0013] The present invention provides mRNA comprising lipid nanoparticles or pharmaceutical compositions comprising said nanoparticles as well as the uses thereof. mRNA comprising lipid nanoparticles according to the invention comprise:

[0014] (i) a cationic lipid with the formula (I):

[chemical structure]

[0015] or a pharmaceutically acceptable salt, tautomer or stereoisomer thereof, wherein R^{1a}, R^{1b}, R^{2a}, R^{2b}, R^{3a}, R^{3b}, R^{4a}, R^{4b}, R⁵, R⁶, R⁷, R⁸, R⁹, L¹, L², a, b, c, d and e are as defined herein;

[0016] and or

[0017] a cationic lipid with the formula (II):

[chemical structure]

[0018] or a pharmaceutically acceptable salt, tautomer, prodrug or stereoisomer thereof, wherein R^{1a}, R^{1b}, R^{2a}, R^{2b}, R^{3a}, R^{3b}, R^{4a}, R^{4b}, R⁵, R⁶, R⁷, R⁸, R⁹, L¹, L², G¹, G², G³, a, b, c and d are as defined herein;

[0019] and/or preferably

[0020] a cationic lipid with the formula III:

[chemical structure]

[0021] or a pharmaceutically acceptable salt, tautomer, prodrug or stereoisomer thereof, wherein R¹, R², R³, L¹, L², G¹, G², and G³ are as defined herein.

[0022] and/or a PEG lipid with the formula (IV)

[chemical structure]

[0023] wherein R⁸ and R⁹ are each independently a straight or branched, saturated or unsaturated alkyl chain containing from 10 to 30 carbon atoms, wherein the alkyl chain is optionally interrupted by one or more ester bonds;

[0024] and w has a mean value ranging from 30 to 60;

[0025] and optionally a neutral lipid and/or a steroid or sterioid analogue, wherein the mRNA compound is encapsulated in or associated with said lipid nanoparticle.

[0026] The present invention further provides for pharmaceutical compositions comprising said lipid nanoparticles, as well as methods for producing said nanoparticles. In a further aspect the invention relates to medical uses of the lipid nanoparticles or the pharmaceutical composition comprising the same.

[0027] In a further aspect, the invention relates to methods of medical prophylaxis or treatment using said mRNA comprising lipid nanoparticles.

### Definitions

[0028] For the sake of clarity and readability, the following scientific background information and definitions are provided. Any technical features disclosed thereby can be part of each and every embodiment of the invention. Additional definitions and explanations can be provided in the context of this disclosure.

[0029] Unless defined otherwise, or unless the specific context requires otherwise, all technical terms used herein have the same meaning as is commonly understood by a person skilled in the relevant technical field.

[0030] Unless the context indicates or requires otherwise, the words “comprise”, “comprises” and “comprising” and similar expressions are to be construed in an open and inclusive sense, as “including, but not limited to” in this description and in the claims.

[0031] The expressions, “one embodiment”, “an embodiment”, “a specific embodiment” and the like mean that a particular feature, property or characteristic, or a particular group or combination of features, properties or characteristics, as referred to in combination with the respective expression, is present in at least one of the embodiments of the invention. The occurrence of these expressions in various places throughout this description do not necessarily refer to the same embodiment. Moreover, the particular features, properties or characteristics may be combined in any suitable manner in one or more embodiments.

[0032] The singular forms “a”, “an” and “the” should be understood as to include plural references unless the context clearly dictates otherwise.

[0033] Percentages in the context of numbers should be understood as relative to the total number of the respective items. In other cases, and unless the context dictates otherwise, percentages should be understood as percentages by weight (wt.-%).

[0034] In the context of the invention, a “composition” refers to any type of composition in which the specified ingredients may be incorporated, optionally along with any further constituents, usually with at least one pharmaceutically acceptable carrier or excipient. Thus, the composition may be a dry composition such as a powder or granules, or a solid unit such as a lyophilised form or a tablet. Alternatively, the composition may be in liquid form, and each constituent may be independently incorporated in dissolved or dispersed (e.g. suspended or emulsified) form. In one of the preferred embodiments, the composition is formulated as a sterile solid composition, such as a powder or lyophilised form for reconstitution with an aqueous liquid carrier.

[0035] Such formulation is also preferred for those versions of the composition which comprise a nucleic acid cargo as described in further detail below.

[0036] As used herein, a “compound” means a chemical substance, which is a material consisting of molecules having essentially the same chemical structure and properties. For a small molecular compound, the molecules are typically identical with respect to their atomic composition and structural configuration. For a macromolecular or polymeric compound, the molecules of a compound are highly similar but not all of them are necessarily identical. For example, a segment of a polymer that is designated to consist of 50 monomeric units may also contain individual molecules with e.g. 48 or 53 monomeric units.

[0037] A lipidoid compound, also simply referred to as lipidoid, is a lipid-like compound, i.e. an amphiphilic compound with lipid-like physical properties. In the context of the present invention the term lipid is considered to encompass lipidoids.

[0038] Unless a different meaning is clear from the specific context, the term “cationic” means that the respective structure bears a positive charge, either permanently, or not permanently but in response to certain conditions such as pH. Thus, the term “cationic” covers both “permanently cationic” and “cationisable”.

[0039] As used herein, “permanently cationic” means that the respective compound, or group or atom, is positively charged at any pH value or hydrogen ion activity of its environment. Typically, the positive charge is results from the presence of a quaternary nitrogen atom. Where a compound carries a plurality of such positive charges, it may be referred to as permanently polycationic, which is a subcategory of permanently cationic.

[0040] Cationic component/compound: The term “cationic component/compound” typically refers to a charged molecule, which is positively charged (cation) at a pH value of typically about 1 to 9. In some embodiments, the cationic component/compound is preferably charged at a pH value of or below 9 (e.g. 5 to 9), of or below 8 (e.g. 5 to 8), of or below 7 (e.g. 5 to 7), most preferably at physiological pH values, e.g. about 7.3 to 7.4. Accordingly, a cationic peptide, protein, polysaccharide, lipid or polymer according to one embodiment of the present invention is positively charged under physiological conditions, particularly under physiological salt conditions of the cell in vivo. In another preferred embodiment, the lipid nanoparticle, the cationic peptide, protein, polysaccharide, lipid or polymer according to the present invention is uncharged, has a neutral charge or is respectively electrically neutral under physiological conditions, particularly under physiological salt conditions of the cell in vivo. A cationic peptide or protein preferably contains a larger number of cationic amino acids, e.g. a larger number of Arg, His, Lys or Orn than other amino acid residues (in particular more cationic amino acids than anionic amino acid residues like Asp or Glu) or contains blocks predominantly formed by cationic amino acid residues. The expression “cationic” may also refer to “polycationic” components/compounds.

[0041] The cationic component/compound may also refer to a cationic lipid capable of being positively charged. Exemplary cationic lipids include one or more amine group(s) which bear the positive charge. Preferred cationic lipids are ionizable such that they can exist in a positively charged or neutral form depending on pH. The ionization of the cationic lipid affects the surface charge of a lipid nanoparticle (LNP) under different pH conditions. This charge state can influence plasma protein absorption, blood clearance and tissue distribution (Semple, S. C., et al., Adv. Drug Deliv Rev 32:3-17 (1998)) as well as the ability to form non-bilayer structures (Hafez, I. M., et al., Gene Ther 8:1188-1196 (2001)) critical to the intracellular delivery of nucleic acids. As described elsewhere, the pKa of formulated cationic lipids is correlated with the effectiveness of LNPs for delivery of nucleic acids (see Jayaraman et al, Angewandte Chemie, International Edition (2012), 51(34), 8529-8533; Semple et al, Nature Biotechnology 28, 172-176 (2010)). In some embodiments of the present invention, the preferred range of pKa is about 5 to about 7.

[0042] In this context, the prefix “poly-” refers to a plurality of atoms or groups having the respective property in a compound. If put in parenthesis, the presence of a plurality is optional. For example, (poly)cationic means cationic and/or polycationic. However, the absence of the prefix should not be interpreted such as to exclude a plurality. For example, a polycationic compound is also a cationic compound and may be referred to as such.

[0043] “Cationisable” means that a compound, or group or atom, is positively charged at a lower pH and uncharged at a higher pH of its environment. Also in non-aqueous environments where no pH value can be determined, a cationisable compound, group or atom is positively charged at a high hydrogen ion concentration and uncharged at a low concentration or activity of hydrogen ions. It depends on the individual properties of the cationisable or polycationisable compound, in particular the pKₐ of the respective cationisable group or atom, at which pH or hydrogen ion concentration it is charged or uncharged. In diluted aqueous environments, the fraction of cationisable compounds, groups or atoms bearing a positive charge may be estimated using the so-called Henderson-Hasselbalch equation which is well-known to a person skilled in the art.

[0044] For example, in some embodiments, if a compound or moiety is cationisable, it is preferred that it is positively charged at a pH value of about 1 to 9, preferably 4 to 9, 5 to 8 or even 6 to 8, more preferably of a pH value of or below 9, of or below 8, of or below 7, most preferably at physiological pH values, e.g. about 7.3 to 7.4, i.e. under physiological conditions, particularly under physiological salt conditions of the cell in vivo. In other embodiments, it is preferred that the cationisable compound or moiety is predominantly neutral at physiological pH values, e.g. about 7.0-7.4, but becomes positively charged at lower pH values. In some embodiments, the preferred range of pKa for the cationisable compound or moiety is about 5 to about 7.

[0045] Nucleic acid: The term nucleic acid means any DNA- or RNA-molecule. The term may be used for a polynucleotide and/or oligonucleotide. Wherever herein reference is made to a nucleic acid or nucleic acid sequence encoding a particular protein and/or peptide, said nucleic acid or nucleic acid sequence, respectively, preferably also comprises regulatory sequences allowing in a suitable host, e.g. a human being, its expression, i.e. transcription and/or translation of the nucleic acid sequence encoding the particular protein or peptide.

[0046] Nucleoside modification: in the context of the present invention the term nucleoside modification refers to mRNA molecules or compounds comprising nucleosides, which are not usually part of mRNA, preferably non-natural nucleosides. In particular, the term preferably refers to mRNA nucleosides other than adenine, guanine, cytosine, uracil and in some cases thymine.

[0047] Peptide: A peptide is an oligomer or polymer of at least two amino acid monomers. Usually the monomers are linked by peptide bonds. The term “peptide” does not limit the length of the polymer chain of amino acids. In some embodiments of the present invention a peptide may for example contain less than 50 monomer units. Longer peptides are also called polypeptides, typically having 50 to 600 monomeric units, more specifically 50 to 300 monomeric units.

[0048] Protein: A protein typically consists of one or more peptides and/or polypeptides folded into a 3-dimensional form, facilitating a biological function.

[0049] Influenza pandemic or pandemic flu: An influenza pandemic can occur when a non-human (novel) influenza virus gains the ability for efficient and sustained human-to-human transmission and then spreads globally. Influenza viruses that have the potential to cause a pandemic are referred to as “influenza viruses with pandemic potential” or “pandemic influenza virus”.

[0050] Examples of influenza viruses with pandemic potential include avian influenza A (H5N1) and avian influenza A (H7N9), which are two different “bird flu” viruses. These are non-human viruses (i.e., they are novel among humans and circulate in birds in parts of the world) so there is little to no immunity against these viruses among people. Human infections with these viruses have occurred rarely, but if either of these viruses was to change in such a way that it was able to infect humans easily and spread easily from person to person, an influenza pandemic could result.

[0051] Vaccine for pandemic influenza/flu or pandemic influenza/flu vaccine: A vaccine directed against a pandemic influenza virus is called herein as a vaccine for pandemic influenza/flu or pandemic influenza/flu vaccine.

[0052] Flu/influenza season: Flu season is an annually recurring time period characterized by the prevalence of outbreaks of influenza (flu). The season occurs during the cold half of the year in each hemisphere. Influenza activity can sometimes be predicted and even tracked geographically. While the beginning of major flu activity in each season varies by location, in any specific location these minor epidemics usually take about 3 weeks to peak and another 3 weeks to significantly diminish. Flu vaccinations have been used to diminish the effects of the flu season; pneumonia vaccinations additionally diminishes the effects and complications of flu season. Since the Northern and Southern Hemisphere have winter at different times of the year, there are actually two flu seasons each year.

[0053] Vaccine for seasonal influenza/flu or seasonal influenza/flu vaccine: A vaccine directed against the seasonal occurring influenza viruses in a flu season is termed herein “vaccine for seasonal influenza/flu or seasonal influenza/flu vaccine”.

[0054] Immune system: The immune system may protect organisms from infection. If a pathogen breaks through a physical barrier of an organism and enters this organism, the innate immune system provides an immediate, but non-specific response. If pathogens evade this innate response, vertebrates possess a second layer of protection, the adaptive immune system. Here, the immune system adapts its response during an infection to improve its recognition of the pathogen. This improved response is then retained after the pathogen has been eliminated, in the form of an immunological memory, and allows the adaptive immune system to mount faster and stronger attacks each time this pathogen is encountered. According to this, the immune system comprises the innate and the adaptive immune system. Each of these two parts contains so called humoral and cellular components.

[0055] Immune response: An immune response may typically either be a specific reaction of the adaptive immune system to a particular antigen (so called specific or adaptive immune response) or an unspecific reaction of the innate immune system (so called unspecific or innate immune response). The invention relates to the core to specific reactions (adaptive immune responses) of the adaptive immune system. Particularly, it relates to adaptive immune responses to infections by viruses like e.g. Influenza viruses. However, this specific response can be supported by an additional unspecific reaction (innate immune response). Therefore, the invention also relates to a compound for simultaneous stimulation of the innate and the adaptive immune system to evoke an efficient adaptive immune response.

[0056] Adaptive immune system: The adaptive immune system is composed of highly specialized, systemic cells and processes that eliminate or prevent pathogenic growth. The adaptive immune response provides the vertebrate immune system with the ability to recognize and remember specific pathogens (to generate immunity), and to mount stronger attacks each time the pathogen is encountered. The system is highly adaptable because of somatic hypermutation (a process of increased frequency of somatic mutations), and V(D)J recombination (an irreversible genetic recombination of antigen receptor gene segments). This mechanism allows a small number of genes to generate a vast number of different antigen receptors, which are then uniquely expressed on each individual lymphocyte. Because the gene rearrangement leads to an irreversible change in the DNA of each cell, all of the progeny (offspring) of that cell will then inherit genes encoding the same receptor specificity, including the Memory B cells and Memory T cells that are the keys to long-lived specific immunity. Immune network theory is a theory of how the adaptive immune system works, that is based on interactions between the variable regions of the receptors of T cells, B cells and of molecules made by T cells and B cells that have variable regions.

[0057] Adaptive immune response: The adaptive immune response is typically understood to be antigen-specific. Antigen specificity allows for the generation of responses that are tailored to specific antigens, pathogens or pathogen-infected cells. The ability to mount these tailored responses is maintained in the body by “memory cells”. Should a pathogen infect the body more than once, these specific memory cells are used to quickly eliminate it. In this context, the first step of an adaptive immune response is the activation of naïve antigen-specific T cells or different immune cells able to induce an antigen-specific immune response by antigen-presenting cells. This occurs in the lymphoid tissues and organs through which naïve T cells are constantly passing. Cell types that can serve as antigen-presenting cells are inter alia dendritic cells, macrophages, and B cells. Each of these cells has a distinct function in eliciting immune responses. Dendritic cells take up antigens by phagocytosis and macropinocytosis and are stimulated by contact with e.g. a foreign antigen to migrate to the local lymphoid tissue, where they differentiate into mature dendritic cells. Macrophages ingest particulate antigens such as bacteria and are induced by infectious agents or other appropriate stimuli to express MHC molecules. The unique ability of B cells to bind and internalize soluble protein antigens via their receptors may also be important to induce T cells. Presenting the antigen on MHC molecules leads to activation of T cells which induces their proliferation and differentiation into armed effector T cells. The most important function of effector T cells is the killing of infected cells by CD8+ cytotoxic T cells and the activation of macrophages by Th1 cells which together make up cell-mediated immunity, and the activation of B cells by both Th2 and Th1 cells to produce different classes of antibody, thus driving the humoral immune response. T cells recognize an antigen by their T cell receptors which do not recognize and bind antigen directly, but instead recognize short peptide fragments e.g. of pathogen-derived protein antigens, which are bound to MHC molecules on the surfaces of other cells.

[0058] Cellular immunity/cellular immune response: Cellular immunity relates typically to the activation of macrophages, natural killer cells (NK), antigen-specific cytotoxic T-lymphocytes, and the release of various cytokines in response to an antigen. In a more general way, cellular immunity is not related to antibodies but to the activation of cells of the immune system. A cellular immune response is characterized e.g. by activating antigen-specific cytotoxic T-lymphocytes that are able to induce apoptosis in body cells displaying epitopes of an antigen on their surface, such as virus-infected cells, cells with intracellular bacteria, and cancer cells displaying tumor antigens; activating macrophages and natural killer cells, enabling them to destroy pathogens; and stimulating cells to secrete a variety of cytokines that influence the function of other cells involved in adaptive immune responses and innate immune responses.

[0059] Humoral immunity/humoral immune response: Humoral immunity refers typically to antibody production and the accessory processes that may accompany it. A humoral immune response may be typically characterized, e.g., by Th2 activation and cytokine production, germinal center formation and isotype switching, affinity maturation and memory cell generation. Humoral immunity also typically may refer to the effector functions of antibodies, which include pathogen and toxin neutralization, classical complement activation, and opsonin promotion of phagocytosis and pathogen elimination.

[0060] Innate immune system: The innate immune system, also known as non-specific immune system, comprises the cells and mechanisms that defend the host from infection by other organisms in a non-specific manner. This means that the cells of the innate system recognize and respond to pathogens in a generic way, but unlike the adaptive immune system, it does not confer long-lasting or protective immunity to the host. The innate immune system may be e.g. activated by ligands of pathogen-associated molecular patterns (PAMP) receptors, e.g. Toll-like receptors (TLRs) or other auxiliary substances such as lipopolysaccharides, TNF-alpha, CD40 ligand, or cytokines, monokines, lymphokines, interleukins or chemokines, IL-1, IL-2, IL-3, IL-4, IL-5, IL-6, IL-7, IL-8, IL-9, IL-10, IL-12, IL-13, IL-14, IL-15, IL-16, IL-17, IL-18, IL-19, IL-20, IL-21, IL-22, IL-23, IL-24, IL-25, IL-26, IL-27, IL-28, IL-29, IL-30, IL-31, IL-32, IL-33, IFN-alpha, IFN-beta, IFN-gamma, GM-CSF, G-CSF, M-CSF, LT-beta, TNF-alpha, growth factors, and hGH, a ligand of human Toll-like receptor TLR1, TLR2, TLR3, TLR4, TLR5, TLR6, TLR7, TLR8, TLR9, TLR10, a ligand of murine Toll-like receptor TLR1, TLR2, TLR3, TLR4, TLR5, TLR6, TLR7, TLR8, TLR9, TLR10, TLR11, TLR12 or TLR13, a ligand of a NOD-like receptor, a ligand of a RIG-I like receptor, an immunostimulatory nucleic acid, an immunostimulatory RNA (isRNA), a CpG-DNA, an antibacterial agent, or an anti-viral agent. Typically a response of the innate immune system includes recruiting immune cells to sites of infection, through the production of chemical factors, including specialized chemical mediators, called cytokines; activation of the complement cascade; identification and removal of foreign substances present in organs, tissues, the blood and lymph, by specialized white blood cells; activation of the adaptive immune system through a process known as antigen presentation; and/or acting as a physical and chemical barrier to infectious agents.

[0061] Adjuvant/adjuvant component: An adjuvant or an adjuvant component in the broadest sense is typically a (e.g. pharmacological or immunological) agent or composition that may modify, e.g. enhance, the efficacy of other agents, such as a drug or vaccine. Conventionally the term refers in the context of the invention to a compound or composition that serves as a carrier or auxiliary substance for immunogens and/or other pharmaceutically active compounds. It is to be interpreted in a broad sense and refers to a broad spectrum of substances that are able to increase the immunogenicity of antigens incorporated into or co-administered with an adjuvant in question. In the context of the present invention an adjuvant will preferably enhance the specific immunogenic effect of the active agents of the present invention. Typically, “adjuvant” or “adjuvant component” has the same meaning and can be used mutually. Adjuvants may be divided, e.g., into immuno potentiators, antigenic delivery systems or even combinations thereof.

[0062] The term “adjuvant” is typically understood not to comprise agents which confer immunity by themselves. An adjuvant assists the immune system unspecifically to enhance the antigen-specific immune response by e.g. promoting presentation of an antigen to the immune system or induction of an unspecific innate immune response. Furthermore, an adjuvant may preferably e.g. modulate the antigen-specific immune response by e.g. shifting the dominating Th2-based antigen specific response to a more Th1-based antigen specific response or vice versa. Accordingly, an adjuvant may favourably modulate cytokine expression/secretion, antigen presentation, type of immune response etc.

[0063] Immunostimulatory RNA: An immunostimulatory RNA (isRNA) in the context of the invention may typically be an RNA that is able to induce an innate immune response itself. It usually does not have an open reading frame and thus does not provide a peptide-antigen or immunogen but elicits an innate immune response e.g. by binding to a specific kind of Toll-like-receptor (TLR) or other suitable receptors. However, of course also mRNAs having an open reading frame and coding for a peptide/protein (e.g. an antigenic function) may induce an innate immune response.

[0064] Antigen: In the context of the present invention “antigen” refers typically to a substance which may be recognized by the immune system, preferably by the adaptive immune system, and is capable of triggering an antigen-specific immune response, e.g. by formation of antibodies and/or antigen-specific T cells as part of an adaptive immune response. Typically, an antigen may be or may comprise a peptide or protein which may be presented by the MHC to T-cells. In the sense of the present invention an antigen may be the product of translation of a provided nucleic acid molecule, preferably an mRNA as defined herein. In this context, also fragments, variants and derivatives of peptides and proteins comprising at least one epitope are understood as antigen.

[0065] Epitope (also called “antigen determinant”): T cell epitopes or parts of the proteins in the context of the present invention may comprise fragments preferably having a length of about 6 to about 20 or even more amino acids, e.g. fragments as processed and presented by MHC class I molecules, preferably having a length of about 8 to about 10 amino acids, e.g. 8, 9, or 10, (or even 11, or 12 amino acids), or fragments as processed and presented by MHC class II molecules, preferably having a length of about 13 or more amino acids, e.g. 13, 14, 15, 16, 17, 18, 19, 20 or even more amino acids, wherein these fragments may be selected from any part of the amino acid sequence. These fragments are typically recognized by T cells in form of a complex consisting of the peptide fragment and an MHC molecule.

[0066] B cell epitopes are typically fragments located on the outer surface of (native) protein or peptide antigens as defined herein, preferably having 5 to 15 amino acids, more preferably having 5 to 12 amino acids, even more preferably having 6 to 9 amino acids, which may be recognized by antibodies, i.e. in their native form.

[0067] Such epitopes of proteins or peptides may furthermore be selected from any of the herein mentioned variants of such proteins or peptides. In this context antigenic determinants can be conformational or discontinuous epitopes which are composed of segments of the proteins or peptides as defined herein that are discontinuous in the amino acid sequence of the proteins or peptides as defined herein but are brought together in the three-dimensional structure or continuous or linear epitopes which are composed of a single polypeptide chain.

[0068] Vaccine: A vaccine is typically understood to be a prophylactic or therapeutic material providing at least one antigen or antigenic function. The antigen or antigenic function may stimulate the body's adaptive immune system to provide an adaptive immune response.

[0069] Antigen-providing mRNA: An antigen-providing mRNA in the context of the invention may typically be an mRNA, having at least one open reading frame that can be translated by a cell or an organism provided with that mRNA. The product of this translation is a peptide or protein that may act as an antigen, preferably as an immunogen. The product may also be a fusion protein composed of more than one immunogen, e.g. a fusion protein that consist of two or more epitopes, peptides or proteins derived from the same or different virus-proteins, wherein the epitopes, peptides or proteins may be linked by linker sequences.

[0070] Artificial mRNA (sequence): An artificial mRNA (sequence) may typically be understood to be an mRNA molecule, that does not occur naturally. In other words, an artificial mRNA molecule may be understood as a non-natural mRNA molecule. Such mRNA molecule may be non-natural due to its individual sequence (which does not occur naturally) and/or due to other modifications, e.g. structural modifications of nucleotides which do not occur naturally. Typically, artificial mRNA molecules may be designed and/or generated by genetic engineering methods to correspond to a desired artificial sequence of nucleotides (heterologous sequence). In this context an artificial sequence is usually a sequence that may not occur naturally, i.e. it differs from the wild type sequence by at least one nucleotide. The term “wild type” may be understood as a sequence occurring in nature. Further, the term “artificial nucleic acid molecule” is not restricted to mean “one single molecule” but is, typically, understood to comprise an ensemble of identical molecules. Accordingly, it may relate to a plurality of identical molecules contained in an aliquot.

[0071] Bi-/multicistronic mRNA: mRNA, that typically may have two (bicistronic) or more (multicistronic) open reading frames (ORF) (coding regions or coding sequences). An open reading frame in this context is a sequence of several nucleotide triplets (codons) that can be translated into a peptide or protein. Translation of such an mRNA yields two (bicistronic) or more (multicistronic) distinct translation products (provided the ORFs are not identical). For expression in eukaryotes such mRNAs may for example comprise an internal ribosomal entry site (IRES) sequence.

[0072] Monocistronic mRNA: A monocistronic mRNA may typically be an mRNA, that comprises only one open reading frame (coding sequence or coding region). An open reading frame in this context is a sequence of several nucleotide triplets (codons) that can be translated into a peptide or protein.

[0073] 5′-CAP structure: A 5′-CAP is typically a modified nucleotide (CAP analogue), particularly a guanine nucleotide, added to the 5′-end of an mRNA molecule. Preferably, the 5′-CAP is added using a 5′-5′-triphosphate linkage (also named m7GpppN). Further examples of 5′-CAP structures include glyceryl, inverted deoxy abasic residue (moiety), 4′,5′ methylene nucleotide, 1-(beta-D-erythrofuranosyl) nucleotide, 4′-thio nucleotide, carbocyclic nucleotide, 1,5-anhydrohexitol nucleotide, L-nucleotides, alpha-nucleotide, modified base nucleotide, threo-pentofuranosyl nucleotide, acyclic 3′,4′-seco nucleotide, acyclic 3,4-dihydroxybutyl nucleotide, acyclic 3,5 dihydroxypentyl nucleotide, 3′-3′-inverted nucleotide moiety, 3′-3′-inverted abasic moiety, 3′-2′-inverted nucleotide moiety, 3′-2′-inverted abasic moiety, 1,4-butanediol phosphate, 3′-phosphoramidate, hexylphosphate, aminohexyl phosphate, 3′-phosphate, 3′phosphorothioate, phosphorodithioate, or bridging or non-bridging methylphosphonate moiety. These modified 5′-CAP structures may be used in the context of the present invention to modify the mRNA sequence of the inventive composition. Further modified 5′-CAP structures which may be used in the context of the present invention are CAP1 (additional methylation of the ribose of the adjacent nucleotide of m7GpppN), CAP2 (additional methylation of the ribose of the 2nd nucleotide downstream of the m7GpppN), cap3 (additional methylation of the ribose of the 3rd nucleotide downstream of the m7GpppN), cap4 (additional methylation of the ribose of the 4th nucleotide downstream of the m7GpppN), ARCA (anti-reverse CAP analogue), modified ARCA (e.g. phosphothioate modified ARCA), inosine, N1-methyl-guanosine, 2′-fluoro-guanosine, 7-deaza-guanosine, 8-oxo-guanosine, 2-amino-guanosine, LNA-guanosine, and 2-azido-guanosine.

[0074] In the context of the present invention, a 5′-CAP structure may also be formed in chemical RNA synthesis or RNA in vitro transcription (co-transcriptional capping) using cCAP analogues, or a CAP structure may be formed in vitro using capping enzymes (e.g., commercially available capping kits).

[0075] CAP analogue: A CAP analogue refers to a non-polymerizable di-nucleotide that has CAP functionality in that it facilitates translation or localization, and/or prevents degradation of the RNA molecule when incorporated at the 5′-end of the RNA molecule. Non-polymerizable means that the CAP analogue will be incorporated only at the 5′-terminus because it does not have a 5′ triphosphate and therefore cannot be extended in the 3′-direction by a template-dependent RNA polymerase.

[0076] CAP analogues include, but are not limited to, a chemical structure selected from the group consisting of m7GpppG, m7GpppA, m7GpppC; unmethylated CAP analogues (e.g., GpppG); dimethylated CAP analogue (e.g., m2,7GpppG), trimethylated CAP analogue (e.g., m2,2,7GpppG), dimethylated symmetrical CAP analogues (e.g., m7Gpppm7G), or anti reverse CAP analogues (e.g., ARCA; m7,2′OmeGpppG, m7,2′dGpppG, m7,3′OmeGpppG, m7,3′dGpppG and their tetraphosphate derivatives) (Stepinski et al., 2001. RNA 7(10):1486-95).

[0077] Further CAP analogues have been described previously (U.S. Pat. No. 7,074,596, WO2008/016473, WO2008/157688, WO2009/149253, WO2011/015347, and WO2013/059475). The synthesis of N7-(4-chlorophenoxyethyl) substituted dinucleotide CAP analogues has been described recently (Kore et al. (2013) Bioorg. Med. Chem. 21(15): 4570-4).

[0078] Poly (C) sequence: A poly-(C)-sequence is typically a long sequence of cytosine nucleotides, typically about 10 to about 200 cytosine nucleotides, preferably about 10 to about 100 cytosine nucleotides, more preferably about 10 to about 70 cytosine nucleotides or even more preferably about 20 to about 50 or even about 20 to about 30 cytosine nucleotides. A poly(C) sequence may preferably be located 3′ of the coding region comprised by a nucleic acid.

[0079] Poly-A-tail/sequence: A poly-A-tail also called “3′-poly(A) tail or poly(A) sequence” is typically a long sequence of adenosine nucleotides of up to about 400 adenosine nucleotides, e.g. from about 25 to about 400, preferably from about 50 to about 400, more preferably from about 50 to about 300, even more preferably from about 50 to about 250, most preferably from about 60 to about 250 adenosine nucleotides, added to the 3′-end of a RNA. Moreover, poly(A) sequences, or poly(A) tails may be generated in vitro by enzymatic polyadenylation of the RNA, e.g. using Poly(A)polymerases derived from E. coli or yeast.

[0080] Polyadenylation: Polyadenylation is typically understood to be the addition of a poly(A) sequence to a nucleic acid molecule, such as an RNA molecule, e.g. to a premature mRNA. Polyadenylation may be induced by a so called polyadenylation signal. This signal is preferably located within a stretch of nucleotides at the 3′-end of a nucleic acid molecule, such as an RNA molecule, to be polyadenylated. A polyadenylation signal typically comprises a hexamer consisting of adenine and uracil/thymine nucleotides, preferably the hexamer sequence AAUAAA. Other sequences, preferably hexamer sequences, are also conceivable. Polyadenylation typically occurs during processing of a pre-mRNA (also called premature-mRNA). Typically, RNA maturation (from pre-mRNA to mature mRNA) comprises the step of polyadenylation.

[0081] 3′-untranslated region (3′-UTR): A 3′-UTR is typically the part of an mRNA which is located between the protein coding region (i.e. the open reading frame) and the poly(A) sequence of the mRNA. A 3′-UTR of the mRNA is not translated into an amino acid sequence. The 3′-UTR sequence is generally encoded by the gene which is transcribed into the respective mRNA during the gene expression process. The genomic sequence is first transcribed into pre-mature mRNA, which comprises optional introns. The pre-mature mRNA is then further processed into mature mRNA in a maturation process. This maturation process comprises the steps of 5′-Capping, splicing the pre-mature mRNA to excise optional introns and modifications of the 3′-end, such as polyadenylation of the 3′-end of the pre-mature mRNA and optional endo- or exonuclease cleavages etc. In the context of the present invention, a 3′-UTR corresponds to the sequence of a mature mRNA which is located 3′ to the stop codon of the protein coding region, preferably immediately 3′ to the stop codon of the protein coding region, and which extends to the 5′-side of the poly(A) sequence, preferably to the nucleotide immediately 5′ to the poly(A) sequence. The term “corresponds to” means that the 3′-UTR sequence may be an RNA sequence, such as in the mRNA sequence used for defining the 3′-UTR sequence, or a DNA sequence which corresponds to such RNA sequence. In the context of the present invention, the term “a 3′-UTR of a gene”, such as “a 3′-UTR of an albumin gene”, is the sequence which corresponds to the 3′-UTR of the mature mRNA derived from this gene, i.e. the mRNA obtained by transcription of the gene and maturation of the pre-mature mRNA. The term “3′-UTR of a gene” encompasses the DNA sequence and the RNA sequence of the 3′-UTR.

[0082] 5′-untranslated region (5′-UTR): A 5′-UTR is typically understood to be a particular section of messenger RNA (mRNA). It is located 5′ of the open reading frame of the mRNA. Typically, the 5′-UTR starts with the transcriptional start site and ends one nucleotide before the start codon of the open reading frame. The 5′-UTR may comprise elements for controlling gene expression, also called regulatory elements. Such regulatory elements may be, for example, ribosomal binding sites or a 5′-Terminal Oligopyrimidine Tract. The 5′-UTR may be posttranscriptionally modified, for example by addition of a 5′-CAP. In the context of the present invention, a 5′-UTR corresponds to the sequence of a mature mRNA which is located between the 5′-CAP and the start codon. Preferably, the 5′-UTR corresponds to the sequence which extends from a nucleotide located 3′ to the 5′-CAP, preferably from the nucleotide located immediately 3′ to the 5′-CAP, to a nucleotide located 5′ to the start codon of the protein coding region, preferably to the nucleotide located immediately 5′ to the start codon of the protein coding region. The nucleotide located immediately 3′ to the 5′-CAP of a mature mRNA typically corresponds to the transcriptional start site. The term “corresponds to” means that the 5′-UTR sequence may be an RNA sequence, such as in the mRNA sequence used for defining the 5′-UTR sequence, or a DNA sequence which corresponds to such RNA sequence. In the context of the present invention, the term “a 5′-UTR of a gene”, such as “a 5′-UTR of a TOP gene”, is the sequence which corresponds to the 5′-UTR of the mature mRNA derived from this gene, i.e. the mRNA obtained by transcription of the gene and maturation of the pre-mature mRNA. The term “5′-UTR of a gene” encompasses the DNA sequence and the RNA sequence of the 5′-UTR.

[0083] 5′-Terminal Oligopyrimidine Tract (TOP): The 5′-terminal oligopyrimidine tract (TOP) is typically a stretch of pyrimidine nucleotides located at the 5′-terminal region of a nucleic acid molecule, such as the 5′-terminal region of certain mRNA molecules or the 5′-terminal region of a functional entity, e.g. the transcribed region, of certain genes. The sequence starts with a cytidine, which usually corresponds to the transcriptional start site, and is followed by a stretch of usually about 3 to 30 pyrimidine nucleotides. For example, the TOP may comprise 3, 4, 5, 6, 7, 8, 9, 10, 11, 12, 13, 14, 15, 16, 17, 18, 19, 20, 21, 22, 23, 24, 25, 26, 27, 28, 29, 30 or even more nucleotides. The pyrimidine stretch and thus the 5′-TOP ends one nucleotide 5′ to the first purine nucleotide located downstream of the TOP. Messenger RNA that contains a 5′-terminal oligopyrimidine tract is often referred to as TOP mRNA. Accordingly, genes that provide such messenger RNAs are referred to as TOP genes. TOP sequences have, for example, been found in genes and mRNAs encoding peptide elongation factors and ribosomal proteins.

[0084] TOP motif: In the context of the present invention, a TOP motif is a nucleic acid sequence which corresponds to a 5′-TOP as defined above. Thus, a TOP motif in the context of the present invention is preferably a stretch of pyrimidine nucleotides having a length of 3-30 nucleotides. Preferably, the TOP motif consists of at least 3 pyrimidine nucleotides, preferably at least 4 pyrimidine nucleotides, preferably at least 5 pyrimidine nucleotides, more preferably at least 6 nucleotides, more preferably at least 7 nucleotides, most preferably at least 8 pyrimidine nucleotides, wherein the stretch of pyrimidine nucleotides preferably starts at its 5′-end with a cytosine nucleotide. In TOP genes and TOP mRNAs, the TOP motif preferably starts at its 5′-end with the transcriptional start site and ends one nucleotide 5′ to the first purin residue in said gene or mRNA. A TOP motif in the sense of the present invention is preferably located at the 5′-end of a sequence which represents a 5′-UTR or at the 5′-end of a sequence which codes for a 5′-UTR. Thus, preferably, a stretch of 3 or more pyrimidine nucleotides is called “TOP motif” in the sense of the present invention if this stretch is located at the 5′end of a respective sequence, such as the inventive mRNA, the 5′-UTR element of the inventive mRNA, or the nucleic acid sequence which is derived from the 5′-UTR of a TOP gene as described herein. In other words, a stretch of 3 or more pyrimidine nucleotides which is not located at the 5′-end of a 5′-UTR or a 5′-UTR element but anywhere within a 5′-UTR or a 5′-UTR element is preferably not referred to as “TOP motif”.

[0085] TOP gene: TOP genes are typically characterised by the presence of a 5′-terminal oligopyrimidine tract. Furthermore, most TOP genes are characterized by a growth-associated translational regulation. However, also TOP genes with a tissue specific translational regulation are known. As defined above, the 5′-UTR of a TOP gene corresponds to the sequence of a 5′-UTR of a mature mRNA derived from a TOP gene, which preferably extends from the nucleotide located 3′ to the 5′-CAP to the nucleotide located 5′ to the start codon. A 5′-UTR of a TOP gene typically does not comprise any start codons, preferably no upstream AUGs (uAUGs) or upstream open reading frames (uORFs). Therein, upstream AUGs and upstream open reading frames are typically understood to be AUGs and open reading frames that occur 5′ of the start codon (AUG) of the open reading frame that should be translated. The 5′-UTRs of TOP genes are generally rather short. The lengths of 5′-UTRs of TOP genes may vary between 20 nucleotides up to 500 nucleotides, and are typically less than about 200 nucleotides, preferably less than about 150 nucleotides, more preferably less than about 100 nucleotides. Exemplary 5′-UTRs of TOP genes in the sense of the present invention are the nucleic acid sequences extending from the nucleotide at position 5 to the nucleotide located immediately 5′ to the start codon (e.g. the ATG) in the sequences according to SEQ ID NOs: 1-1363, SEQ ID NO: 1395, SEQ ID NO: 1421 and SEQ ID NO: 1422 of the international patent application WO2013/143700 or homologs or variants thereof, whose disclosure is incorporated herewith by reference. In this context a particularly preferred fragment of a 5′-UTR of a TOP gene is a 5′-UTR of a TOP gene lacking the 5′-TOP motif. The term “5′-UTR of a TOP gene” preferably refers to the 5′-UTR of a naturally occurring TOP gene.

[0086] Fragment of a nucleic acid sequence, particularly an mRNA: A fragment of a nucleic acid sequence consists of a continuous stretch of nucleotides corresponding to a continuous stretch of nucleotides in the full-length nucleic acid sequence which is the basis for the nucleic acid sequence of the fragment, which represents at least 20%, preferably at least 30%, more preferably at least 40%, more preferably at least 50%, even more preferably at least 60%, even more preferably at least 70%, even more preferably at least 80%, and most preferably at least 90% of the full-length nucleic acid sequence. Such a fragment, in the sense of the present invention, is preferably a functional fragment of the full-length nucleic acid sequence.

[0087] In this context, a “fragment of a nucleic acid sequence” e.g. a fragment of an mRNA sequence is preferably a nucleic acid sequence encoding a fragment of a protein or of a variant thereof as described herein. More preferably, the expression ‘fragment of a nucleic acid sequence’ refers to a nucleic acid sequence having a sequence identity of at least 5%, 10%, 20%, 30%, 40%, 50%, 60%, 70%, 80%, 85%, 86%, 87%, 88%, 89%, 90%, 91%, 92%, 93%, 94%, 95%, 96%, 97%, 98%, or 99%, preferably of at least 70%, more preferably of at least 80%, even more preferably at least 85%, even more preferably of at least 90% and most preferably of at least 95% or even 97%, with a respective full-length nucleic acid sequence.

[0088] Variant of a nucleic acid sequence, particularly an mRNA: A variant of a nucleic acid sequence refers to a variant of nucleic acid sequences which forms the basis of a nucleic acid sequence. For example, a variant nucleic acid sequence may exhibit one or more nucleotide deletions, insertions, additions and/or substitutions compared to the nucleic acid sequence from which the variant is derived. Preferably, a variant of a nucleic acid sequence is at least 40%, preferably at least 50%, more preferably at least 60%, more preferably at least 70%, even more preferably at least 80%, even more preferably at least 90%, most preferably at least 95% identical to the nucleic acid sequence the variant is derived from. Preferably, the variant is a functional variant. A “variant” of a nucleic acid sequence may have at least 70%, 75%, 80%, 85%, 90%, 95%, 98% or 99% nucleotide identity over a stretch of 10, 20, 30, 50, 75 or 100 nucleotide of such nucleic acid sequence.

[0089] Stabilized nucleic acid, preferably mRNA: A stabilized nucleic acid, preferably mRNA typically, exhibits a modification increasing resistance to in vivo degradation (e.g. degradation by an exo- or endo-nuclease) and/or ex vivo degradation (e.g. by the manufacturing process prior to vaccine administration, e.g. in the course of the preparation of the vaccine solution to be administered). Stabilization of RNA can, e.g., be achieved by providing a 5′-CAP-Structure, a Poly-A-Tail, or any other UTR-modification. It can also be achieved by chemical modification or modification of the G/C-content of the nucleic acid. Various other methods are known in the art and conceivable in the context of the invention.

[0090] RNA In vitro transcription: The terms “RNA in vitro transcription” or “in vitro transcription” relate to a process wherein RNA is synthesized in a cell-free system (in vitro). DNA, particularly plasmid DNA, is used as template for the generation of RNA transcripts. RNA may be obtained by DNA-dependent in vitro transcription of an appropriate DNA template, which according to the present invention is preferably a linearized plasmid DNA template. The promoter for controlling in vitro transcription can be any promoter for any DNA-dependent RNA polymerase. Particular examples of DNA-dependent RNA polymerases are the T7, T3, and SP6 RNA polymerases. A DNA template for in vitro RNA transcription may be obtained by cloning of a nucleic acid, in particular cDNA corresponding to the respective RNA to be in vitro transcribed, and introducing it into an appropriate vector for in vitro transcription, for example into plasmid DNA. In a preferred embodiment of the present invention the DNA template is linearized with a suitable restriction enzyme, before it is transcribed in vitro. The cDNA may be obtained by reverse transcription of mRNA or chemical synthesis. Moreover, the DNA template for in vitro RNA synthesis may also be obtained by gene synthesis.

[0091] Methods for in vitro transcription are known in the art (see, e.g., Geall et al. (2013) Semin. Immunol. 25(2): 152-159; Brunelle et al. (2013) Methods Enzymol. 530:101-14). Reagents used in said method typically include:
[0092] 1) a linearized DNA template with a promoter sequence that has a high binding affinity for its respective RNA polymerase such as bacteriophage-encoded RNA polymerases;
[0093] 2) ribonucleoside triphosphates (NTPs) for the four bases (adenine, cytosine, guanine and uracil);
[0094] 3) optionally a CAP analogue as defined above (e.g. m7G(5′)ppp(5′)G (m7G));
[0095] 4) a DNA-dependent RNA polymerase capable of binding to the promoter sequence within the linearized DNA template (e.g. T7, T3 or SP6 RNA polymerase);
[0096] 5) optionally a ribonuclease (RNase) inhibitor to inactivate any contaminating RNase;
[0097] 6) optionally a pyrophosphatase to degrade pyrophosphate, which may inhibit transcription;
[0098] 7) MgCl2, which supplies Mg2+ ions as a co-factor for the polymerase;
[0099] 8) a buffer to maintain a suitable pH value, which can also contain antioxidants (e.g. DTT), and/or polyamines such as spermidine at optimal concentrations.

[0100] Full-length protein: The term “full-length protein” as used herein typically refers to a protein that substantially comprises the entire amino acid sequence of the naturally occurring protein. Nevertheless, substitutions of amino acids e.g. due to mutation in the protein are also encompassed in the term full-length protein.

[0101] Fragments of proteins: “Fragments” of proteins or peptides in the context of the present invention may, typically, comprise a sequence of a protein or peptide as defined herein, which is, with regard to its amino acid sequence (or its encoded nucleic acid molecule), N-terminally and/or C-terminally truncated compared to the amino acid sequence of the original (native) protein (or its encoded nucleic acid molecule). Such truncation may thus occur either on the amino acid level or correspondingly on the nucleic acid level. A sequence identity with respect to such a fragment as defined herein may therefore preferably refer to the entire protein or peptide as defined herein or to the entire (coding) nucleic acid molecule of such a protein or peptide.

[0102] In this context a fragment of a protein may typically comprise an amino acid sequence having a sequence identity of at least 5%, 10%, 20%, 30%, 40%, 50%, 60%, 70%, 80%, 85%, 86%, 87%, 88%, 89%, 90%, 91%, 92%, 93%, 94%, 95%, 96%, 97%, 98%, or 99%, preferably of at least 70%, more preferably of at least 80%, even more preferably at least 85%, even more preferably of at least 90% and most preferably of at least 95% or even 97%, with an amino acid sequence of the respective naturally occurring full-length protein.

[0103] Fragments of proteins or peptides in the context of the present invention may furthermore comprise a sequence of a protein or peptide as defined herein, which has a length of for example at least 5 amino acids, preferably a length of at least 6 amino acids, preferably at least 7 amino acids, more preferably at least 8 amino acids, even more preferably at least 9 amino acids; even more preferably at least 10 amino acids; even more preferably at least 11 amino acids; even more preferably at least 12 amino acids; even more preferably at least 13 amino acids; even more preferably at least 14 amino acids; even more preferably at least 15 amino acids; even more preferably at least 16 amino acids; even more preferably at least 17 amino acids; even more preferably at least 18 amino acids; even more preferably at least 19 amino acids; even more preferably at least 20 amino acids; even more preferably at least 25 amino acids; even more preferably at least 30 amino acids; even more preferably at least 35 amino acids; even more preferably at least 50 amino acids; or most preferably at least 100 amino acids. For example such fragment may have a length of about 6 to about 20 or even more amino acids, e.g. fragments as processed and presented by MHC class I molecules, preferably having a length of about 8 to about 10 amino acids, e.g. 8, 9, or 10, (or even 6, 7, 11, or 12 amino acids), or fragments as processed and presented by MHC class II molecules, preferably having a length of about 13 or more amino acids, e.g. 13, 14, 15, 16, 17, 18, 19, 20 or even more amino acids, wherein these fragments may be selected from any part of the amino acid sequence. These fragments are typically recognized by T-cells in form of a complex consisting of the peptide fragment and an MHC molecule, i.e. the fragments are typically not recognized in their native form. Fragments of proteins or peptides may comprise at least one epitope of those proteins or peptides. Furthermore also domains of a protein, like the extracellular domain, the intracellular domain or the transmembrane domain and shortened or truncated versions of a protein may be understood to comprise a fragment of a protein.

[0104] Variants of proteins: “Variants” of proteins or peptides as defined in the context of the present invention may be generated, having an amino acid sequence which differs from the original sequence in one or more mutation(s), such as one or more substituted, inserted and/or deleted amino acid(s). Preferably, these fragments and/or variants have the same biological function or specific activity compared to the full-length native protein, e.g. its specific antigenic property. “Variants” of proteins or peptides as defined in the context of the present invention may comprise conservative amino acid substitution(s) compared to their native, i.e. non-mutated physiological, sequence. Those amino acid sequences as well as their encoding nucleotide sequences in particular fall under the term variants as defined herein. Substitutions in which amino acids, which originate from the same class, are exchanged for one another are called conservative substitutions. In particular, these are amino acids having aliphatic side chains, positively or negatively charged side chains, aromatic groups in the side chains or amino acids, the side chains of which can enter into hydrogen bridges, e.g. side chains which have a hydroxyl function. This means that e.g. an amino acid having a polar side chain is replaced by another amino acid having a likewise polar side chain, or, for example, an amino acid characterized by a hydrophobic side chain is substituted by another amino acid having a likewise hydrophobic side chain (e.g. serine (threonine) by threonine (serine) or leucine (isoleucine) by isoleucine (leucine)). Insertions and substitutions are possible, in particular, at those sequence positions which cause no modification to the three-dimensional structure or do not affect the binding region. Modifications to a three-dimensional structure by insertion(s) or deletion(s) can easily be determined e.g. using CD spectra (circular dichroism spectra) (Urry, 1985, Absorption, Circular Dichroism and ORD of Polypeptides, in: Modern Physical Methods in Biochemistry, Neuberger et al. (ed.), Elsevier, Amsterdam).

[0105] A “variant” of a protein or peptide may have at least 70%, 75%, 80%, 85%, 90%, 95%, 98% or 99% amino acid identity over a stretch of 10, 20, 30, 50, 75 or 100 amino acids of such protein or peptide.

[0106] Furthermore, variants of proteins or peptides as defined herein, which may be encoded by a nucleic acid molecule, may also comprise those sequences, wherein nucleotides of the encoding nucleic acid sequence are exchanged according to the degeneration of the genetic code, without leading to an alteration of the respective amino acid sequence of the protein or peptide, i.e. the amino acid sequence or at least part thereof may not differ from the original sequence in one or more mutation(s) within the above meaning.

[0107] Identity of a sequence: In order to determine the percentage to which two sequences are identical, e.g. nucleic acid sequences or amino acid sequences as defined herein, preferably the amino acid sequences encoded by a nucleic acid sequence of the polymeric carrier as defined herein or the amino acid sequences themselves, the sequences can be aligned in order to be subsequently compared to one another. Therefore, e.g. a position of a first sequence may be compared with the corresponding position of the second sequence. If a position in the first sequence is occupied by the same component (residue) as is the case at a position in the second sequence, the two sequences are identical at this position. If this is not the case, the sequences differ at this position. If insertions occur in the second sequence in comparison to the first sequence, gaps can be inserted into the first sequence to allow a further alignment. If deletions occur in the second sequence in comparison to the first sequence, gaps can be inserted into the second sequence to allow a further alignment. The percentage to which two sequences are identical is then a function of the number of identical positions divided by the total number of positions including those positions which are only occupied in one sequence. The percentage to which two sequences are identical can be determined using a mathematical algorithm. A preferred, but not limiting, example of a mathematical algorithm which can be used is the algorithm of Karlin et al. (1993), PNAS USA, 90:5873-5877 or Altschul et al. (1997), Nucleic Acids Res., 25:3389-3402. Such an algorithm is integrated in the BLAST program. Sequences which are identical to the sequences of the present invention to a certain extent can be identified by this program.

[0108] Derivative of a protein or peptide: A derivative of a peptide or protein is typically understood to be a molecule that is derived from another molecule, such as said peptide or protein. A “derivative” of a peptide or protein also encompasses fusions comprising a peptide or protein used in the present invention. For example, the fusion comprises a label, such as, for example, an epitope, e.g., a FLAG epitope or a V5 epitope. For example, the epitope is a FLAG epitope. Such a tag is useful for, for example, purifying the fusion protein.

[0109] Pharmaceutically effective amount: A pharmaceutically effective amount in the context of the invention is typically understood to be an amount that is sufficient to induce an immune response.

[0110] Carrier/polymeric carrier: A carrier in the context of the invention may typically be a compound that facilitates transport and/or complexation of another compound. Said carrier may form a complex with said other compound. A polymeric carrier is a carrier that is formed of a polymer.

[0111] Vehicle: An agent, e.g. a carrier, that may typically be used within a pharmaceutical composition or vaccine for facilitating administering of the components of the pharmaceutical composition or vaccine to an individual.

[0112] Jet injection: The term “jet injection”, as used herein, refers to a needle-free injection method, wherein a fluid containing at least one inventive mRNA sequence and, optionally, further suitable excipients is forced through an orifice, thus generating an ultra-fine liquid stream of high pressure that is capable of penetrating mammalian skin and, depending on the injection settings, subcutaneous tissue or muscle tissue. In principle, the liquid stream forms a hole in the skin, through which the liquid stream is pushed into the target tissue. Preferably, jet injection is used for intradermal, subcutaneous or intramuscular injection of the mRNA sequence according to the invention. In a preferred embodiment, jet injection is used for intramuscular injection of the mRNA sequence according to the invention. In a further preferred embodiment, jet injection is used for intradermal injection of the mRNA sequence according to the invention.

### DETAILED DESCRIPTION OF THE INVENTION

[0113] The present invention is based on the inventors' surprising finding that mRNA encoding at least one antigenic peptide or protein comprised in lipid nanoparticles (LNPs) induces very efficiently antigen-specific immune responses against the encoded antigenic peptide or protein at a very low dosages and dosing regimen which do not require frequent administration.

[0114] Further advantages of the inventive mRNA encoding at least one antigenic peptide or protein comprised in lipid nanoparticles (LNPs) are:
[0115] Induction of a strong humoral immune response
[0116] Induction of B-cell memory
[0117] Faster onset of immune protection
[0118] Longevity of the induced immune responses
[0119] Induction of broad cellular T-cell responses
[0120] Induction of a (local and transient) pro-inflammatory environment
[0121] No induction of systemic cytokine or chemokine response
[0122] Well tolarability, no side-effects, non toxic
[0123] Advantageous stability characteristics
[0124] Formulation compatible with many different antigens: larger antigen cocktails feasible based on the same (production) technology
[0125] No vector immunity, i.e. technology can be used to vaccinate the same subject multiple times against multiple (different) antigens
[0126] Speed, adaptability, simplicity and scalability of production

[0127] In particular, the invention relates to mRNA comprising lipid nanoparticles and uses thereof. In order to be suitable for the present invention, the lipid nanoparticles comprise at least:

[0128] (i) a cationic lipid and/or a PEG-lipid as defined below; and

[0129] (ii) an mRNA compound comprising an mRNA sequence encoding an antigenic peptide or protein.

[0130] The mRNA comprising lipid nanoparticle may comprise further compounds, such as one or more neutral lipids, steroids and combinations of said compounds. Suitable compounds will be described in detail below.

[0131] The mRNA compound comprising an mRNA sequence encoding an antigenic peptide or protein may be a mRNA molecule. In one embodiment of the invention, the mRNA compound is a natural and non-modified mRNA. Within the context of the present invention, natural and non-modified mRNA encompasses mRNA generated in vitro, without chemical modifications or changes in the sequence.

[0132] In an alternative embodiment of the invention, the mRNA compound comprises an artificial mRNA. In the context of the present invention artificial mRNA encompasses mRNA with chemical modifications, sequence modifications or non-natural sequences.

[0133] In a preferred embodiment of the invention, the mRNA compound does not comprise nucleoside modifications, in particular no base modifications. In a further embodiment, the mRNA compound does not comprise 1-methylpseudouridine modifications. In one preferred embodiment, the mRNA comprises only the naturally existing nucleosides. In a further preferred embodiment, the mRNA compound does not comprise any chemical modification and optionally comprises sequence modifications. In a further preferred embodiment of the invention the mRNA compound only comprises the naturally existing nucleosides adenine, uracil, guanine and cytosine.

[0134] According to certain embodiments of the present invention, the mRNA sequence is mono-, bi-, or multicistronic, preferably as defined herein. The coding sequences in a bi- or multicistronic mRNA preferably encode distinct peptides or proteins as defined herein or a fragment or variant thereof. Preferably, the coding sequences encoding two or more peptides or proteins may be separated in the bi- or multicistronic mRNA by at least one IRES (internal ribosomal entry site) sequence, as defined below. Thus, the term “encoding two or more peptides or proteins” may mean, without being limited thereto, that the bi- or even multicistronic mRNA, may encode e.g. at least two, three, four, five, six or more (preferably different) peptides or proteins or their fragments or variants within the definitions provided herein. More preferably, without being limited thereto, the bi- or even multicistronic mRNA, may encode, for example, at least two, three, four, five, six or more (preferably different) peptides or proteins as defined herein or their fragments or variants as defined herein. In this context, a so-called IRES (internal ribosomal entry site) sequence as defined above can function as a sole ribosome binding site, but it can also serve to provide a bi- or even multicistronic mRNA as defined above, which encodes several peptides or proteins which are to be translated by the ribosomes independently of one another. Examples of IRES sequences, which can be used according to the invention, are those from picornaviruses (e.g. FMDV), pestiviruses (CFFV), polioviruses (PV), encephalomyocarditis viruses (ECMV), foot and mouth disease viruses (FMDV), hepatitis C viruses (HCV), classical swine fever viruses (CSFV), mouse leukoma virus (MLV), simian immunodeficiency viruses (SIV) or cricket paralysis viruses (CrPV).

[0135] According to a further embodiment the at least one coding region of the mRNA sequence according to the invention may encode at least two, three, four, five, six, seven, eight and more peptides or proteins (or fragments and derivatives thereof) as defined herein linked with or without an amino acid linker sequence, wherein said linker sequence can comprise rigid linkers, flexible linkers, cleavable linkers (e.g., self-cleaving peptides) or a combination thereof. Therein, the peptides or proteins may be identical or different or a combination thereof. Particular peptide or protein combinations can be encoded by said mRNA encoding at least two peptides or proteins as explained herein (also referred to herein as “multi-antigen-constructs/mRNA”).

[0136] In a particular aspect of the invention, the lipid nanoparticles comprise an mRNA compound, comprising an mRNA sequence encoding an antigenic peptide or protein, or a fragment, variant or derivative thereof.

[0137] These antigenic peptides or proteins may be derived from pathogenic antigens, tumour antigens, allergenic antigens or autoimmune self-antigens, preferably as defined herein. In the context of the present invention, antigenic peptides or proteins preferably exclude luciferases.

[0138] Pathogenic Antigens:

[0139] Such pathogenic antigens are derived from pathogenic organisms, in particular bacterial, viral or protozoological (multicellular) pathogenic organisms, which evoke an immunological reaction by subject, in particular a mammalian subject, more particularly a human. More specifically, pathogenic antigens are preferably surface antigens, e.g. proteins (or fragments of proteins, e.g. the exterior portion of a surface antigen) located at the surface of the virus or the bacterial or protozoological organism.

[0140] Pathogenic antigens are peptide or protein antigens preferably derived from a pathogen associated with infectious disease which are preferably selected from antigens derived from the pathogens Acinetobacter baumannii, Anaplasma genus, Anaplasma phagocytophilum, Ancylostoma braziliense, Ancylostoma duodenale, Arcanobacterium haemolyticum, Ascaris lumbricoides, Aspergillus genus, Astroviridae, Babesia genus, Bacillus anthracis, Bacillus cereus, Bartonella henselae, BK virus, Blastocystis hominis, Blastomyces dermatitidis, Bordetella pertussis, Borrelia burgdorferi, Borrelia genus, Borrelia spp, Brucella genus, Brugia malayi, Bunyaviridae family, Burkholderia cepacia and other Burkholderia species, Burkholderia mallei, Burkholderia pseudomallei, Caliciviridae family, Campylobacter genus, Candida albicans, Candida spp, Chlamydia trachomatis, Chlamydophila pneumoniae, Chlamydophila psittaci, CD prion, Clonorchis sinensis, Clostridium botulinum, Clostridium difficile, Clostridium perfringens, Clostridium perfringens, Clostridium spp, Clostridium tetani, Coccidioides spp, coronaviruses, Corynebacterium diphtheriae, Coxiella burnetii, Crimean-Congo hemorrhagic fever virus, Cryptococcus neoformans, Cryptosporidium genus, Cytomegalovirus (CMV), Dengue viruses (DEN-1, DEN-2, DEN-3 and DEN-4), Dientamoeba fragilis, Ebolavirus (EBOV), Echinococcus genus, Ehrlichia chaffeensis, Ehrlichia ewingii, Ehrlichia genus, Entamoeba histolytica, Enterococcus genus, Enterovirus genus, Enteroviruses, mainly Coxsackie A virus and Enterovirus 71 (EV71), Epidermophyton spp, Epstein-Barr Virus (EBV), Escherichia coli O157:H7, O111 and O104:H4, Fasciola hepatica and Fasciola gigantica, FFI prion, Filarioidea superfamily, Flaviviruses, Francisella tularensis, Fusobacterium genus, Geotrichum candidum, Giardia intestinalis, Gnathostoma spp, GSS prion, Guanarito virus, Haemophilus ducreyi, Haemophilus influenzae, Helicobacter pylori, Henipavirus (Hendra virus Nipah virus), Hepatitis A Virus, Hepatitis B Virus (HBV), Hepatitis C Virus (HCV), Hepatitis D Virus, Hepatitis E Virus, Herpes simplex virus 1 and 2 (HSV-1 and HSV-2), Histoplasma capsulatum, HIV (Human immunodeficiency virus), Hortaea werneckii, Human bocavirus (HBoV), Human herpesvirus 6 (HHV-6) and Human herpesvirus 7 (HHV-7), Human metapneumovirus (hMPV), Human papillomavirus (HPV), Human parainfluenza viruses (HPIV), Japanese encephalitis virus, JC virus, Junin virus, Kingella kingae, Klebsiella granulomatis, Kuru prion, Lassa virus, Legionella pneumophila, Leishmania genus, Leptospira genus, Listeria monocytogenes, Lymphocytic choriomeningitis virus (LCMV), Machupo virus, Malassezia spp, Marburg virus, Measles virus, Metagonimus yokagawai, Microsporidia phylum, Molluscum contagiosum virus (MCV), Mumps virus, Mycobacterium leprae and Mycobacterium lepromatosis, Mycobacterium tuberculosis, Mycobacterium ulcerans, Mycoplasma pneumoniae, Naegleria fowleri, Necator americanus, Neisseria gonorrhoeae, Neisseria meningitidis, Nocardia asteroides, Nocardia spp, Onchocerca volvulus, Orientia tsutsugamushi, Orthomyxoviridae family (Influenza), Paracoccidioides brasiliensis, Paragonimus spp, Paragonimus westermani, Parvovirus B19, Pasteurella genus, Plasmodium genus, Pneumocystis jirovecii, Poliovirus, Rabies virus, Respiratory syncytial virus (RSV), Rhinovirus, rhinoviruses, Rickettsia akari, Rickettsia genus, Rickettsia prowazekii, Rickettsia rickettsii, Rickettsia typhi, Rift Valley fever virus, Rotavirus, Rubella virus, Sabia virus, Salmonella genus, Sarcoptes scabiei, SARS coronavirus, Schistosoma genus, Shigella genus, Sin Nombre virus, Hantavirus, Sporothrix schenckii, Staphylococcus genus, Staphylococcus genus, Streptococcus agalactiae, Streptococcus pneumoniae, Streptococcus pyogenes, Strongyloides stercoralis, Taenia genus, Taenia solium, Tick-borne encephalitis virus (TBEV), Toxocara canis or Toxocara cati, Toxoplasma gondii, Treponema pallidum, Trichinella spiralis, Trichomonas vaginalis, Trichophyton spp, Trichuris trichiura, Trypanosoma brucei, Trypanosoma cruzi, Ureaplasma urealyticum, Varicella zoster virus (VZV), Varicella zoster virus (VZV), Variola major or Variola minor, vCJD prion, Venezuelan equine encephalitis virus, Vibrio cholerae, West Nile virus, Western equine encephalitis virus, Wuchereria bancrofti, Yellow fever virus, Yersinia enterocolitica, Yersinia pestis, and Yersinia pseudotuberculosis.

[0141] In this context particularly preferred are antigens from the pathogens selected from Influenza virus, respiratory syncytial virus (RSV), Herpes simplex virus (HSV), human Papilloma virus (HPV), Human immunodeficiency virus (HIV), Plasmodium, Staphylococcus aureus, Dengue virus, Chlamydia trachomatis, Cytomegalovirus (CMV), Hepatitis B virus (HBV), Mycobacterium tuberculosis, Rabies virus, and Yellow Fever Virus.

[0142] Furthermore, the pathogenic antigen (antigen derived from a pathogen associated with infectious disease) may be preferably selected from the following antigens: Outer membrane protein A OmpA, biofilm associated protein Bap, transport protein MucK (Acinetobacter baumannii, Acinetobacter infections)); variable surface glycoprotein VSG, microtubule-associated protein MAPP15, trans-sialidase TSA (Trypanosoma brucei, African sleeping sickness (African trypanosomiasis)); HIV p24 antigen, HIV envelope proteins (Gp120, Gp41, Gp160), polyprotein GAG, negative factor protein Nef, trans-activator of transcription Tat (HIV (Human immunodeficiency virus), AIDS (Acquired immunodeficiency syndrome)); galactose-inhibitable adherence protein GIAP, 29 kDa antigen Eh29, Gal/GalNAc lectin, protein CRT, 125 kDa immunodominant antigen, protein M17, adhesin ADH112, protein STIRP (Entamoeba histolytica, Amoebiasis); Major surface proteins 1-5 (MSP1a, MSP1b, MSP2, MSP3, MSP4, MSP5), type IV secreotion system proteins (VirB2, VirB7, VirB11, VirD4) (Anaplasma genus, Anaplasmosis); protective Antigen PA, edema factor EF, lethal factor LF, the S-layer homology proteins SLH (Bacillus anthracis, Anthrax); acranolysin, phospholipase D, collagen-binding protein CbpA (Arcanobacterium haemolyticum, Arcanobacterium haemolyticum infection); nucleocapsid protein NP, glycoprotein precursor GPC, glycoprotein GP1, glycoprotein GP2 (Junin virus, Argentine hemorrhagic fever); chitin-protein layer proteins, 14 kDa surface antigen A14, major sperm protein MSP, MSP polymerization-organizing protein MPOP, MSP fiber protein 2 MFP2, MSP polymerization-activating kinase MPAK, ABA-1-like protein ALB, protein ABA-1, cuticulin CUT-1 (Ascaris lumbricoides, Ascariasis); 41 kDa allergen Asp v13, allergen Asp f3, major conidial surface protein rodlet A, protease Pep1p, GPI-anchored protein Gel1p, GPI-anchored protein Crf1p (Aspergillus genus, Aspergillosis); family VP26 protein, VP29 protein (Astroviridae, Astrovirus infection); Rhoptry-associated protein 1 RAP-1, merozoite surface antigens MSA-1, MSA-2 (a1, a2, b, c), 12D3, 11C5, 21B4, P29, variant erythrocyte surface antigen VESA1, Apical Membrane Antigen 1 AMA-1 (Babesia genus, Babesiosis); hemolysin, enterotoxin C, PXO1-51, glycolate oxidase, ABC-transporter, penicillin-bingdn protein, zinc transporter family protein, pseudouridine synthase Rsu, plasmid replication protein RepX, oligoendopeptidase F, prophage membrane protein, protein HemK, flagellar antigen H, 28.5-kDa cell surface antigen (Bacillus cereus, Bacillus cereus infection); large T antigen LT, small T antigen, capsid protein VP1, capsid protein VP2 (BK virus, BK virus infection); 29 kDa-protein, caspase-3-like antigens, glycoproteins (Blastocystis hominis, Blastocystis hominis infection); yeast surface adhesin WI-1 (Blastomyces dermatitidis, Blastomycosis); nucleoprotein N, polymerase L, matrix protein Z, glycoprotein GP (Machupo virus, Bolivian hemorrhagic fever); outer surface protein A OspA, outer surface protein OspB, outer surface protein OspC, decorin binding protein A DbpA, decorin binding protein B DbpB, flagellar filament 41 kDa core protein Fla, basic membrane protein A precursor BmpA (Immunodominant antigen P39), outer surface 22 kDa lipoprotein precursor (antigen IPLA7), variable surface lipoprotein vlsE (Borrelia genus, Borrelia infection); Botulinum neurotoxins BoNT/A1, BoNT/A2, BoNT/A3, BoNT/B, BoNT/C, BoNT/D, BoNT/E, BoNT/F, BoNT/G, recombinant botulinum toxin F He domain FHc (Clostridium botulinum, Botulism (and Infant botulism)); nucleocapsid, glycoprotein precursor (Sabia virus, Brazilian hemorrhagic fever); copper/Zinc superoxide dismutase SodC, bacterioferritin Bfr, 50S ribosomal protein RplL, OmpA-like transmembrane domain-containing protein Omp31, immunogenic 39-kDa protein M5 P39, zinc ABC transporter periplasmic zinc-binding protein znuA, periplasmic immunogenic protein Bp26, 30S ribosomal protein S12 RpsL, glyceraldehyde-3-phosphate dehydrogenase Gap, 25 kDa outer-membrane immunogenic protein precursor Omp25, invasion protein B lalB, trigger factor Tig, molecular chaperone DnaK, putative peptidyl-prolyl cis-trans isomerase SurA, lipoprotein Omp19, outer membrane protein MotY Omp16, conserved outer membrane protein D15, malate dehydrogenase Mdh, component of the Type-IV secretion system (T4SS) VirJ, lipoprotein of unknown function BAB1_0187 (Brucella genus, Brucellosis); members of the ABC transporter family (LolC, OppA, and PotF), putative lipoprotein releasing system transmembrane protein LolC/E, flagellin FliC, Burkholderia intracellular motility A BimA, bacterial Elongation factor-Tu EF-Tu, 17 kDa OmpA-like protein, boaA coding protein, boaB coding protein (Burkholderia cepacia and other Burkholderia species, Burkholderia infection); mycolyl-transferase Ag85A, heat-shock protein Hsp65, protein TB10.4, 19 kDa antigen, protein PstS3, heat-shock protein Hsp70 (Mycobacterium ulcerans, Buruli ulcer); norovirus major and minor viral capsid proteins VP1 and VP2, genome polyprotein, Sapoviurus capsid protein VP1, protein Vp3, geome polyprotein (Caliciviridae family, Calicivirus infection (Norovirus and Sapovirus)); major outer membrane protein PorA, flagellin FlaA, surface antigen CjaA, fibronectin binding protein CadF, aspartate/glutamate-binding ABC transporter protein Peb1A, protein FspA1, protein FspA2 (Campylobacter genus, Campylobacteriosis); glycolytic enzyme enolase, secreted aspartyl proteinases SAP1-10, glycophosphatidylinositol (GPI)-linked cell wall protein, protein Hyr1, complement receptor 3-related protein CR3-RP, adhesin Als3p, heat shock protein 90 kDa hsp90, cell surface hydrophobicity protein CSH (usually Candida albicans and other Candida species, Candidiasis); 17-kDa antigen, protein P26, trimeric autotransporter adhesins TAAs, Bartonella adhesin A BadA, variably expressed outer-membrane proteins Vomps, protein Pap3, protein HbpA, envelope-associated protease HtrA, protein OMP89, protein GroEL, protein LalB, protein OMP43, dihydrolipoamide succinyltransferase SucB (Bartonella henselae, Cat-scratch disease); amastigote surface protein-2, amastigote-specific surface protein SSP4, cruzipain, trans-sialidase TS, trypomastigote surface glycoprotein TSA-1, complement regulatory protein CRP-10, protein G4, protein G2, paraxonemal rod protein PAR2, paraflagellar rod component Par1, mucin-Associated Surface Proteins MPSP (Trypanosoma cruzi, Chagas Disease (American trypanosomiasis)); envelope glycoproteins (gB, gC, gE, gH, gI, gK, gL) (Varicella zoster virus (VZV), Chickenpox); major outer membrane protein MOMP, probable outer membrane protein PMPC, outer membrane complex protein B OmcB, heat shock proteins Hsp60 HSP10, protein IncA, proteins from the type III secretion system, ribonucleotide reductase small chain protein NrdB, plasmid protein Pgp3, chlamydial outer protein N CopN, antigen CT521, antigen CT425, antigen CT043, antigen TC0052, antigen TC0189, antigen TC0582, antigen TC0660, antigen TC0726, antigen TC0816, antigen TC0828 (Chlamydia trachomatis, Chlamydia); low calcium response protein E LCrE, chlamydial outer protein N CopN, serine/threonine-protein kinase PknD, acyl-carrier-protein S-malonyltransferase FabD, single-stranded DNA-binding protein Ssb, major outer membrane protein MOMP, outer membrane protein 2 Omp2, polymorphic membrane protein family (Pmp1, Pmp2, Pmp3, Pmp4, Pmp5, Pmp6, Pmp7, Pmp8, Pmp9, Pmp10, Pmp11, Pmp12, Pmp13, Pmp14, Pmp15, Pmp16, Pmp17, Pmp18, Pmp19, Pmp20, Pmp21) (Chlamydophila pneumoniae, Chlamydophila pneumoniae infection); cholera toxin B CTB, toxin coregulated pilin A TcpA, toxin coregulated pilin TcpF, toxin co-regulated pilus biosynthesis ptrotein F TcpF, cholera enterotoxin subunit A, cholera enterotoxin subunit B, Heat-stable enterotoxin ST, mannose-sensitive hemagglutinin MSHA, outer membrane protein U Porin ompU, Poring B protein, polymorphic membrane protein-D (Vibrio cholerae, Cholera); propionyl-CoA carboxylase PCC, 14-3-3 protein, prohibitin, cysteine proteases, glutathione transferases, gelsolin, cathepsin L proteinase CatL, Tegumental Protein 20.8 kDa TP20.8, tegumental protein 31.8 kDa TP31.8, lysophosphatidic acid phosphatase LPAP, (Clonorchis sinensis, Clonorchiasis); surface layer proteins SLPs, glutamate dehydrogenase antigen GDH, toxin A, toxin B, cysteine protease Cwp84, cysteine protease Cwp13, cysteine protease Cwp19, Cell Wall Protein CwpV, flagellar protein FliC, flagellar protein FIiD (Clostridium difficile, Clostridium difficile infection); rhinoviruses: capsid proteins VP1, VP2, VP3, VP4; coronaviruses: sprike proteins S, envelope proteins E, membrane proteins M, nucleocapsid proteins N (usually rhinoviruses and coronaviruses, Common cold (Acute viral rhinopharyngitis; Acute coryza)); prion protein Prp (CJD prion, Creutzfeldt-Jakob disease (CJD)); envelope protein Gc, envelope protein Gn, nucleocapsid proteins (Crimean-Congo hemorrhagic fever virus, Crimean-Congo hemorrhagic fever (CCHF)); virulence-associated DEAD-box RNA helicase VAD1, galactoxylomannan-protein GalXM, glucuronoxylomannan GXM, mannoprotein MP (Cryptococcus neoformans, Cryptococcosis); acidic ribosomal protein P2 CpP2, mucin antigens Muc1, Muc2, Muc3 Muc4, Muc5, Muc6, Muc7, surface adherence protein CP20, surface adherence protein CP23, surface protein CP12, surface protein CP21, surface protein CP40, surface protein CP60, surface protein CP15, surface-associated glycopeptides gp40, surface-associated glycopeptides gp15, oocyst wall protein AB, profilin PRF, apyrase (Cryptosporidium genus, Cryptosporidiosis); fatty acid and retinol binding protein-1 FAR-1, tissue inhibitor of metalloproteinase TIMP (TMP), cysteine proteinase ACEY-1, cysteine proteinase ACCP-1, surface antigen Ac-16, secreted protein 2 ASP-2, metalloprotease 1 MTP-1, aspartyl protease inhibitor API-1, surface-associated antigen SAA-1, adult-specific secreted factor Xa serine protease inhibitor anticoagulant AP, cathepsin D-like aspartic protease ARR-1 (usually Ancylostoma braziliense; multiple other parasites, Cutaneous larva migrans (CLM)); cathepsin L-like proteases, 53/25-kDa antigen, 8 kDa family members, cysticercus protein with a marginal trypsin-like activity TsAg5, oncosphere protein TSOL18, oncosphere protein TSOL45-1A, lactate dehydrogenase A LDHA, lactate dehydrogenase B LDHB (Taenia solium, Cysticercosis); pp65 antigen, membrane protein pp15, capsid-proximal tegument protein pp150, protein M45, DNA polymerase UL54, helicase UL105, glycoprotein gM, glycoprotein gN, glcoprotein H, glycoprotein B gB, protein UL83, protein UL94, protein UL99 (Cytomegalovirus (CMV), Cytomegalovirus infection); capsid protein C, premembrane protein prM, membrane protein M, envelope protein E (domain I, domain II, domain II), protein NS1, protein NS2A, protein NS2B, protein NS3, protein NS4A, protein 2K, protein NS4B, protein NS5 (Dengue viruses (DEN-1, DEN-2, DEN-3 and DEN-4)-Flaviviruses, Dengue fever); 39 kDa protein (Dientamoeba fragilis, Dientamoebiasis); diphtheria toxin precursor Tox, diphteria toxin DT, pilin-specific sortase SrtA, shaft pilin protein SpaA, tip pilin protein SpaC, minor pilin protein SpaB, surface-associated protein DIP1281 (Corynebacterium diphtheriae, Diphtheria); glycoprotein GP, nucleoprotein NP, minor matrix protein VP24, major matrix protein VP40, transcription activator VP30, polymerase cofactor VP35, RNA polymerase L (Ebolavirus (EBOV), Ebola hemorrhagic fever); prion protein (vCOD prion, Variant Creutzfeldt-Jakob disease (vCOD, nvCOD)); UvrABC system protein B, protein Flp1, protein Flp2, protein Flp3, protein TadA, hemoglobin receptor HgbA, outer membrane protein TdhA, protein CpsRA, regulator CpxR, protein SapA, 18 kDa antigen, outer membrane protein NcaA, protein LspA, protein LspA1, protein LspA2, protein LspB, outer membrane component DsrA, lectin DltA, lipoprotein Hip, major outer membrane protein OMP, outer membrane protein OmpA2 (Haemophilus ducreyi, Chancroid); aspartyl protease 1 Pep1, phospholipase B PLB, alpha-mannosidase 1 AMN1, glucanosyltransferase GEL1, urease URE, peroxisomal matrix protein Pmp1, proline-rich antigen Pra, humal T-cell reactive protein TcrP (Coccidioides immitis and Coccidioides posadasii, Coccidioidomycosis); allergen Tri r 2, heat shock protein 60 Hsp60, fungal actin Act, antigen Tri r2, antigen Tri r4, antigen Tri t1, protein IV, glycerol-3-phosphate dehydrogenase Gpd1, osmosensor HwSho1A, osmosensor HwSho1B, histidine kinase HwHhk7B, allergen Mala s 1, allergen Mala s 11, thioredoxin Trx Mala s 13, allergen Mala f, allergen Mala s (usually Trichophyton spp, Epidermophyton spp., Malassezia spp., Hortaea werneckii, Dermatophytosis); protein EG95, protein EG10, protein EG18, protein EgA31, protein EM18, antigen EPC1, antigen B, antigen 5, protein P29, protein 14-3-3, 8-kDa protein, myophilin, heat shock protein 20 HSP20, glycoprotein GP-89, fatty acid binding protein FAPB (Echinococcus genus, Echinococcosis); major surface protein 2 MSP2, major surface protein 4 MSP4, MSP variant SGV1, MSP variant SGV2, outer membrane protein OMP, outer membrane protein 19 OMP-19, major antigenic protein MAP1, major antigenic protein MAP1-2, major antigenic protein MAP1B, major antigenic protein MAP1-3, Erum2510 coding protein, protein GroEL, protein GroES, 30-kDA major outer membrane proteins, GE 100-kDa protein, GE 130-kDa protein, GE 160-kDa protein (Ehrlichia genus, Ehrlichiosis); secreted antigen SagA, sagA-like proteins SalA and SalB, collagen adhesin Scm, surface proteins Fms1 (EbpA(fm), Fms5 (EbpB(fm), Fms9 (EpbC(fm) and Fms10, protein EbpC(fm), 96 kDa immunoprotective glycoprotein G1 (Enterococcus genus, Enterococcus infection); genome polyprotein, polymerase 3D, viral capsid protein VP1, viral capsid protein VP2, viral capsid protein VP3, viral capsid protein VP4, protease 2A, protease 3C (Enterovirus genus, Enterovirus infection); outer membrane proteins OM, 60 kDa outer membrane protein, cell surface antigen OmpA, cell surface antigen OmpB (sca5), 134 kDa outer membrane protein, 31 kDa outer membrane protein, 29.5 kDa outer membrane protein, cell surface protein SCA4, cell surface protein Adr1 (RP827), cell surface protein Adr2 (RP828), cell surface protein SCA1, Invasion protein invA, cell division protein fts, secretion proteins sec 0family, virulence proteins virB, tlyA, tlyC, parvulin-like protein Pip, preprotein translocase SecA, 120-kDa surface protein antigen SPA, 138 kD complex antigen, major 100-kD protein (protein I), intracytoplasmic protein D, protective surface protein antigen SPA (Rickettsia prowazekii, Epidemic typhus); Epstein-Barr nuclear antigens (EBNA-1, EBNA-2, EBNA-3A, EBNA-3B, EBNA-3C, EBNA-leader protein (EBNA-LP)), latent membrane proteins (LMP-1, LMP-2A, LMP-2B), early antigen EBV-EA, membrane antigen EBV-MA, viral capsid antigen EBV-VCA, alkaline nuclease EBV-AN, glycoprotein H, glycoprotein gp350, glycoprotein gp110, glycoprotein gp42, glycoprotein gHgL, glycoprotein gB (Epstein-Barr Virus (EBV), Epstein-Barr Virus Infectious Mononucleosis); capsid protein VP2, capsid protein VP1, major protein NS1 (Parvovirus B19, Erythema infectiosum (Fifth disease)); pp65 antigen, glycoprotein 105, major capsid protein, envelope glycoprotein H, protein U51 (Human herpesvirus 6 (HHV-6) and Human herpesvirus 7 (HHV-7), Exanthem subitum); thioredoxin-glutathione reductase TGR, cathepsins L1 and L2, Kunitz-type protein KTM, leucine aminopeptidase LAP, cysteine proteinase Fas2, saposin-like protein-2 SAP-2, thioredoxin peroxidases TPx, Prx-1, Prx-2, cathepsin I cysteine proteinase CL3, protease cathepsin L CL1, phosphoglycerate kinase PGK, 27-kDa secretory protein, 60 kDa protein HSP35alpha, glutathione transferase GST, 28.5 kDa tegumental antigen 28.5 kDa TA, cathepsin B3 protease CatB3, Type I cystatin stefin-1, cathepsin L5, cathepsin Llg and cathepsin B, fatty acid binding protein FABP, leucine aminopeptidases LAP (Fasciola hepatica and Fasciola gigantica, Fasciolosis); prion protein (FFI prion, Fatal familial insomnia (FFI)); venom allergen homolog-like protein VAL-1, abundant larval transcript ALT-1, abundant larval transcript ALT-2, thioredoxin peroxidase TPX, vespid allergen homologue VAH, thiordoxin peroxidase 2 TPX-2, antigenic protein SXP (peptides N, N1, N2, and N3), activation associated protein-1 ASP-1, Thioredoxin TRX, transglutaminase BmTGA, glutathione-S-transferases GST, myosin, vespid allergen homologue VAH, 175 kDa collagenase, glyceraldehyde-3-phosphate dehydrogenase GAPDH, cuticular collagen Col-4, secreted larval acidic proteins SLAPs, chitinase CHI-1, maltose binding protein MBP, glycolytic enzyme fructose-1,6-bisphosphate aldolase Fba, tropomyosin TMY-1, nematode specific gene product OvB20, onchocystatin CPI-2, Cox-2 (Filarioidea superfamily, Filariasis); phospholipase C PLC, heat-labile enterotoxin B, Iota toxin component Ib, protein CPE1281, pyruvate ferredoxin oxidoreductase, elongation factor G EF-G, perfringolysin O Pfo, glyceraldehyde-3-phosphate dehydrogenase GapC, Fructose-bisphosphate aldolase Alf2, Clostridium perfringens enterotoxin CPE, alpha toxin AT, alpha toxoid ATd, epsilon-toxoid ETd, protein HP, large cytotoxin TpeL, endo-beta-N-acetylglucosaminidase Naglu, phosphoglyceromutase Pgm (Clostridium perfringens, Food poisoning by Clostridium perfringens); leukotoxin IktA, adhesion FadA, outer membrane protein RadD, high-molecular weight arginine-binding protein (Fusobacterium genus, Fusobacterium infection); phospholipase C PLC, heat-labile enterotoxin B, Iota toxin component Ib, protein CPE1281, pyruvate ferredoxin oxidoreductase, elongation factor G EF-G, perfringolysin O Pfo, glyceraldehyde-3-phosphate dehydrogenase GapC, fructose-bisphosphate aldolase Alf2, Clostridium perfringens enterotoxin CPE, alpha toxin AT, alpha toxoid ATd, epsilon-toxoid ETd, protein HP, large cytotoxin TpeL, endo-beta-N-acetylglucosaminidase Naglu, phosphoglyceromutase Pgm (usually Clostridium perfringens; other Clostridium species, Gas gangrene (Clostridial myonecrosis)); lipase A, lipase B, peroxidase Dec1 (Geotrichum candidum, Geotrichosis); prion protein (GSS prion, Gerstmann-Sträussler-Scheinker syndrome (GSS)); cyst wall proteins CWP1, CWP2, CWP3, variant surface protein VSP, VSP1, VSP2, VSP3, VSP4, VSP5, VSP6, 56 kDa antigen, pyruvate ferredoxin oxidoreductase PFOR, alcohol dehydrogenase E ADHE, alpha-giardin, alpha8-giardin, alpha1-guiardin, beta-giardin, cystein proteases, glutathione-S-transferase GST, arginine deiminase ADI, fructose-1,6-bisphosphat aldolase FBA, Giardia trophozoite antigens GTA (GTA1, GTA2), ornithine carboxyl transferase OCT, striated fiber-asseblin-like protein SALP, uridine phosphoryl-like protein UPL, alpha-tubulin, beta-tubulin (Giardia intestinalis, Giardiasis); members of the ABC transporter family (LolC, OppA, and PotF), putative lipoprotein releasing system transmembrane protein LolC/E, flagellin FliC, Burkholderia intracellular motility A BimA, bacterial Elongation factor-Tu EF-Tu, 17 kDa OmpA-like protein, boaA coding protein (Burkholderia mallei, Glanders); cyclophilin CyP, 24 kDa third-stage larvae protien GS24, excretion-secretion products ESPs (40, 80, 120 and 208 kDa) (Gnathostoma spinigerum and Gnathostoma hispidum, Gnathostomiasis); pilin proteins, minor pilin-associated subunit pilC, major pilin subunit and variants pilE, pilS, phase variation protein porA, Porin B PorB, protein TraD, Neisserial outer membrane antigen H.8, 70 kDa antigen, major outer membrane protein PI, outer membrane proteins PIA and PIB, W antigen, surface protein A NspA, transferrin binding protein TbpA, transferrin binding protein TbpB, PBP2, mtrR coding protein, ponA coding protein, membrane permease FbpBC, FbpABC protein system, LbpAB proteins, outer membrane protein Opa, outer membrane transporter FetA, iron-repressed regulator MpeR (Neisseria gonorrhoeae, Gonorrhea); outer membrane protein A OmpA, outer membrane protein C OmpC, outer membrane protein K17 OmpK17 (Klebsiella granulomatis, Granuloma inguinale (Donovanosis)); fibronectin-binding protein Sfb, fibronectin/fibrinogen-binding protein FBP54, fibronectin-binding protein FbaA, M protein type 1 Emm1, M protein type 6 Emm6, immunoglobulin-binding protein 35 Sib35, Surface protein R28 Spr28, superoxide dismutase SOD, C5a peptidase ScpA, antigen I/II AgI/II, adhesin AspA, G-related alpha2-macroglobulin-binding protein GRAB, surface fibrillar protein M5 (Streptococcus pyogenes, Group A streptococcal infection); C protein P3 antigen, arginine deiminase proteins, adhesin BibA, 105 kDA protein BPS, surface antigens c, surface antigens R, surface antigens X, trypsin-resistant protein R1, trypsin-resistant protein R3, trypsin-resistant protein R4, surface immunogenic protein Sip, surface protein Rib, Leucine-rich repeats protein LrrG, serine-rich repeat protein Srr-2, C protein alpha-antigen Bca, Beta antigen Bag, surface antigen Epsilon, alpha-like protein ALP1, alpha-like protein ALP5 surface antigen delta, alpha-like protein ALP2, alpha-like protein ALP3, alpha-like protein ALP4, Cbeta protein Bac (Streptococcus agalactiae, Group B streptococcal infection); transferrin-binding protein 2 Tbp2, phosphatase P4, outer membrane protein P6, peptidoglycan-associated lipoprotein Pal, protein D, protein E, adherence and penetration protein Hap, outer membrane protein 26 Omp26, outer membrane protein P5 (Fimbrin), outer membrane protein D15, outer membrane protein OmpP2, 5′-nucleotidase NucA, outer membrane protein P1, outer membrane protein P2, outer membrane lipoprotein Pcp, Lipoprotein E, outer membrane protein P4, fuculokinase FucK, [Cu,Zn]-superoxide dismutase SodC, protease HtrA, protein 0145, alpha-galactosylceramide (Haemophilus influenzae, Haemophilus influenzae infection); polymerase 3D, viral capsid protein VP1, viral capsid protein VP2, viral capsid protein VP3, viral capsid protein VP4, protease 2A, protease 3C (Enteroviruses, mainly Coxsackie A virus and Enterovirus 71 (EV71), Hand, foot and mouth disease (HFMD)); RNA polymerase L, protein L, glycoprotein Gn, glycoprotein Gc, nucleocapsid protein S, envelope glycoprotein G1, nucleoprotein NP, protein N, polyprotein M (Sin Nombre virus, Hantavirus, Hantavirus Pulmonary Syndrome (HPS)); heat shock protein HspA, heat shock protein HspB, citrate synthase GltA, protein UreB, heat shock protein Hsp60, neutrophil-activating protein NAP, catalase KatA, vacuolating cytotoxin VacA, urease alpha UreA, urease beta Ureb, protein Cpn10, protein groES, heat shock protein Hsp10, protein MopB, cytotoxicity-associated 10 kDa protein CAG, 36 kDa antigen, beta-lactamase HcpA, Beta-lactamase HcpB (Helicobacter pylori, Helicobacter pylori infection); integral membrane proteins, aggregation-prone proteins, O-antigen, toxin-antigens Stx2B, toxin-antigen Stx1B, adhesion-antigen fragment Int28, protein EspA, protein EspB, Intimin, protein Tir, protein IntC300, protein Eae (Escherichia coli O157:H7, O111 and O104:H4, Hemolytic-uremic syndrome (HUS)); RNA polymerase L, protein L, glycoprotein Gn, glycoprotein Gc, nucleocapsid protein S, envelope glycoprotein G1, nucleoprotein NP, protein N, polyprotein M (Bunyaviridae family, Hemorrhagic fever with renal syndrome (HFRS)); glycoprotein G, matrix protein M, nucleoprotein N, fusion protein F, polymerase L, protein W, proteinC, phosphoprotein p, non-structural protein V (Henipavirus (Hendra virus Nipah virus), Henipavirus infections); polyprotein, glycoproten Gp2, hepatitis A surface antigen HBAg, protein 2A, virus protein VP1, virus protein VP2, virus protein VP3, virus protein VP4, protein P1B, protein P2A, protein P3AB, protein P3D (Hepatitis A Virus, Hepatitis A); hepatitis B surface antigen HBsAg, Hepatitis B core antigen HbcAg, polymerase, protein Hbx, preS2 middle surface protein, surface protein L, large S protein, virus protein VP1, virus protein VP2, virus protein VP3, virus protein VP4 (Hepatitis B Virus (HBV), Hepatitis B); envelope glycoprotein E1 gp32 gp35, envelope glycoprotein E2 NS1 gp68 gp70, capsid protein C, core protein Core, polyprotein, virus protein VP1, virus protein VP2, virus protein VP3, virus protein VP4, antigen G, protein NS3, protein NS5A, (Hepatitis C Virus, Hepatitis C); virus protein VP1, virus protein VP2, virus protein VP3, virus protein VP4, large hepaptitis delta antigen, small hepaptitis delta antigen (Hepatitis D Virus, Hepatitis D); virus protein VP1, virus protein VP2, virus protein VP3, virus protein VP4, capsid protein E2 (Hepatitis E Virus, Hepatitis E); glycoprotein L UL1, uracil-DNA glycosylase UL2, protein UL3, protein UL4, DNA replication protein UL5, portal protein UL6, virion maturation protein UL7, DNA helicase UL8, replication origin-binding protein UL9, glycoprotein M UL10, protein UL11, alkaline exonuclease UL12, serine-threonine protein kinase UL13, tegument protein UL14, terminase UL15, tegument protein UL16, protein UL17, capsid protein VP23 UL18, major capsid protein VP5 UL19, membrane protein UL20, tegument protein UL21, Glycoprotein H (UL22), Thymidine Kinase UL23, protein UL24, protein UL25, capsid protein P40 (UL26, VP24, VP22A), glycoprotein B (UL27), ICP18.5 protein (UL28), major DNA-binding protein ICP8 (UL29), DNA polymerase UL30, nuclear matrix protein UL31, envelope glycoprotein UL32, protein UL33, inner nuclear membrane protein UL34, capsid protein VP26 (UL35), large tegument protein UL36, capsid assembly protein UL37, VP19C protein (UL38), ribonucleotide reductase (Large subunit) UL39, ribonucleotide reductase (Small subunit) UL40, tegument protein/virion host shutoff VHS protein (UL41), DNA polymerase processivity factor UL42, membrane protein UL43, glycoprotein C (UL44), membrane protein UL45, tegument proteins VP11/12 (UL46), tegument protein VP13/14 (UL47), virion maturation protein VP16 (UL48, Alpha-TIF), envelope protein UL49, dUTP diphosphatase UL50, tegument protein UL51, DNA helicase/primase complex protein UL52, glycoprotein K (UL53), transcriptional regulation protein IE63 (ICP27, UL54), protein UL55, protein UL56, viral replication protein ICP22 (IE68, US1), protein US2, serine/threonine-protein kinase US3, glycoprotein G (US4), glycoprotein J (US5), glycoprotein D (US6), glycoprotein I (US7), glycoprotein E (US8), tegument protein US9, capsid/tegument protein US10, Vmw21 protein (US11), ICP47 protein (IE12, US12), major transcriptional activator ICP4 (IE175, RS1), E3 ubiquitin ligase ICPO (IE110), latency-related protein 1 LRP1, latency-related protein 2 LRP2, neurovirulence factor RL1 (ICP34.5), latency-associated transcript LAT (Herpes simplex virus 1 and 2 (HSV-1 and HSV-2), Herpes simplex); heat shock protein Hsp60, cell surface protein H1C, dipeptidyl peptidase type IV DppIV, M antigen, 70 kDa protein, 17 kDa histone-like protein (Histoplasma capsulatum, Histoplasmosis); fatty acid and retinol binding protein-1 FAR-1, tissue inhibitor of metalloproteinase TIMP (TMP), cysteine proteinase ACEY-1, cysteine proteinase ACCP-1, surface antigen Ac-16, secreted protein 2 ASP-2, metalloprotease 1 MTP-1, aspartyl protease inhibitor API-1, surface-associated antigen SAA-1, surface-associated antigen SAA-2, adult-specific secreted factor Xa, serine protease inhibitor anticoagulant AP, cathepsin D-like aspartic protease ARR-1, glutathione S-transferase GST, aspartic protease APR-1, acetylcholinesterase AChE (Ancylostoma duodenale and Necator americanus, Hookworm infection); protein NS1, protein NP1, protein VP1, protein VP2, protein VP3 (Human bocavirus (HBoV), Human bocavirus infection); major surface protein 2 MSP2, major surface protein 4 MSP4, MSP variant SGV1, MSP variant SGV2, outer membrane protein OMP, outer membrane protein 19 OMP-19, major antigenic protein MAP1, major antigenic protein MAP1-2, major antigenic protein MAP1B, major antigenic protein MAP1-3, Erum2510 coding protein, protein GroEL, protein GroES, 30-kDA major outer membrane proteins, GE 100-kDa protein, GE 130-kDa protein, GE 160-kDa protein (Ehrlichia ewingii, Human ewingii ehrlichiosis); major surface proteins 1-5 (MSP1a, MSP1b, MSP2, MSP3, MSP4, MSP5), type IV secreotion system proteins VirB2, VirB7, VirB11, VirD4 (Anaplasma phagocytophilum, Human granulocytic anaplasmosis (HGA)); protein NS1, small hydrophobic protein NS2, SH protein, fusion protein F, glycoprotein G, matrix protein M, matrix protein M2-1, matrix protein M2-2, phosphoprotein P, nucleoprotein N, polymerase L (Human metapneumovirus (hMPV), Human metapneumovirus infection); major surface protein 2 MSP2, major surface protein 4 MSP4, MSP variant SGV1, MSP variant SGV2, outer membrane protein OMP, outer membrane protein 19 OMP-19, major antigenic protein MAP1, major antigenic protein MAP1-2, major antigenic protein MAP1B, major antigenic protein MAP1-3, Erum2510 coding protein, protein GroEL, protein GroES, 30-kDA major outer membrane proteins, GE 100-kDa protein, GE 130-kDa protein, GE 160-kDa protein (Ehrlichia chaffeensis, Human monocytic ehrlichiosis); replication protein E1, regulatory protein E2, protein E3, protein E4, protein E5, protein E6, protein E7, protein E8, major capsid protein L1, minor capsid protein L2 (Human papillomavirus (HPV), Human papillomavirus (HPV) infection); fusion protein F, hemagglutinin-neuramidase HN, glycoprotein G, matrix protein M, phosphoprotein P, nucleoprotein N, polymerase L (Human parainfluenza viruses (HPIV), Human parainfluenza virus infection); Hemagglutinin (HA), Neuraminidase (NA), Nucleoprotein (NP), M1 protein, M2 protein, NS1 protein, NS2 protein (NEP protein: nuclear export protein), PA protein, PB1 protein (polymerase basic 1 protein), PB1-F2 protein and PB2 protein (Orthomyxoviridae family, Influenza virus (flu)); genome polyprotein, protein E, protein M, capsid protein C (Japanese encephalitis virus, Japanese encephalitis); RTX toxin, type IV pili, major pilus subunit PilA, regulatory transcription factors PilS and PilR, protein sigma54, outer membrane proteins (Kingella kingae, Kingella kingae infection); prion protein (Kuru prion, Kuru); nucleoprotein N, polymerase L, matrix protein Z, glycoprotein GP (Lassa virus, Lassa fever); peptidoglycan-associated lipoprotein PAL, 60 kDa chaperonin Cpn60 (groEL, HspB), type IV pilin PilE, outer membrane protein MIP, major outer membrane protein MompS, zinc metalloproteinase MSP (Legionella pneumophila, Legionellosis (Legionnaires' disease, Pontiac fever)); P4 nuclease, protein WD, ribonucleotide reductase M2, surface membrane glycoprotein Pg46, cysteine proteinase CP, glucose-regulated protein 78 GRP-78, stage-specific S antigen-like protein A2, ATPase F1, beta-tubulin, heat shock protein 70 Hsp70, KMP-11, glycoprotein GP63, protein BT1, nucleoside hydrolase NH, cell surface protein B1, ribosomal protein P1-like protein P1, sterol 24-c-methyltransferase SMT, LACK protein, histone H1, SPB1 protein, thiol specific antioxidant TSA, protein antigen STI1, signal peptidase SP, histone H2B, surface antigen PSA-2, cystein proteinase b Cpb (Leishmania genus, Leishmaniasis); major membrane protein I, serine-rich antigen-45 kDa, 10 kDa caperonin GroES, HSP kDa antigen, amino-oxononanoate synthase AONS, protein recombinase A RecA, Acetyl-/propionyl-coenzyme A carboxylase alpha, alanine racemase, 60 kDa chaperonin 2, ESAT-6-like protein EcxB (L-ESAT-6), protein Lsr2, protein ML0276, Heparin-binding hemagglutinin HBHA, heat-shock protein 65 Hsp65, mycP1 or ML0041 coding protein, htrA2 or ML0176 coding protein, htrA4 or ML2659 coding protein, gcp or ML0379 coding protein, clpC or ML0235 coding protein (Mycobacterium leprae and Mycobacterium lepromatosis, Leprosy); outer membrane protein LipL32, membrane protein LIC10258, membrane protein LP30, membrane protein LIC12238, Ompa-like protein Lsa66, surface protein LigA, surface protein LigB, major outer membrane protein OmpL1, outer membrane protein LipL41, protein LigAni, surface protein LcpA, adhesion protein LipL53, outer membrane protein UpL32, surface protein Lsa63, flagellin FlaB1, membran lipoprotein LipL21, membrane protein pL40, leptospiral surface adhesin Lsa27, outer membrane protein OmpL36, outer membrane protein OmpL37, outer membrane protein OmpL47, outer membrane protein OmpL54, acyltransferase LpxA (Leptospira genus, Leptospirosis); listeriolysin O precursor Hly (LLO), invasion-associated protein Iap (P60), Listeriolysin regulatory protein PrfA, Zinc metalloproteinase Mpl, Phosphatidylinositol-specific phospholipase C PLC (PlcA, PlcB), O-acetyltransferase Oat, ABC-transporter permease Im.G_1771, adhesion protein LAP, LAP receptor Hsp60, adhesin LapB, haemolysin listeriolysin O LLO, protein ActA, Internalin A InlA, protein InlB (Listeria monocytogenes, Listeriosis); outer surface protein A OspA, outer surface protein OspB, outer surface protein OspC, decorin binding protein A DbpA, decorin binding protein B DbpB, flagellar filament 41 kDa core protein Fla, basic membrane protein A BmpA (Immunodominant antigen P39), outer surface 22 kDa lipoprotein precursor (antigen IPLA7), variable surface lipoprotein vlsE (usually Borrelia burgdorferi and other Borrelia species, Lyme disease (Lyme borreliosis)); venom allergen homolog-like protein VAL-1, abundant larval transcript ALT-1, abundant larval transcript ALT-2, thioredoxin peroxidase TPX, vespid allergen homologue VAH, thiordoxin peroxidase 2 TPX-2, antigenic protein SXP (peptides N, N1, N2, and N3), activation associated protein-1 ASP-1, thioredoxin TRX, transglutaminase BmTGA, glutathione-S-transferases GST, myosin, vespid allergen homologue VAH, 175 kDa collagenase, glyceraldehyde-3-phosphate dehydrogenase GAPDH, cuticular collagen Col-4, Secreted Larval Acidic Proteins SLAPs, chitinase CHI-1, maltose binding protein MBP, glycolytic enzyme fructose-1,6-bisphosphate aldolase Fba, tropomyosin TMY-1, nematode specific gene product OvB20, onchocystatin CPI-2, protein Cox-2 (Wuchereria bancrofti and Brugia malayi, Lymphatic filariasis (Elephantiasis)); glycoprotein GP, matrix protein Z, polymerase L, nucleoprotein N (Lymphocytic choriomeningitis virus (LCMV), Lymphocytic choriomeningitis); thrombospondin-related anonymous protein TRAP, SSP2 Sporozoite surface protein 2, apical membrane antigen 1 AMA1, rhoptry membrane antigen RMA1, acidic basic repeat antigen ABRA, cell-traversal protein PF, protein Pvs25, merozoite surface protein 1 MSP-1, merozoite surface protein 2 MSP-2, ring-infected erythrocyte surface antigen RESALiver stage antigen 3 LSA-3, protein Eba-175, serine repeat antigen 5 SERA-5, circumsporozoite protein CS, merozoite surface protein 3 MSP3, merozoite surface protein 8 MSP8, enolase PF10, hepatocyte erythrocyte protein 17 kDa HEP17, erythrocyte membrane protein 1 EMP1, protein Kbetamerozoite surface protein 4/5 MSP 4/5, heat shock protein Hsp90, glutamate-rich protein GLURP, merozoite surface protein 4 MSP-4, protein STARP, circumsporozoite protein-related antigen precursor CRA (Plasmodium genus, Malaria); nucleoprotein N, membrane-associated protein VP24, minor nucleoprotein VP30, polymerase cofactor VP35, polymerase L, matrix protein VP40, envelope glycoprotein GP (Marburg virus, Marburg hemorrhagic fever (MHF)); protein C, matrix protein M, phosphoprotein P, non-structural protein V, hemagglutinin glycoprotein H, polymerase L, nucleoprotein N, fusion protein F (Measles virus, Measles); members of the ABC transporter family (LolC, OppA, and PotF), putative lipoprotein releasing system transmembrane protein LolC/E, flagellin FliC, Burkholderia intracellular motility A BimA, bacterial Elongation factor-Tu EF-Tu, 17 kDa OmpA-like protein, boaA coding protein, boaB coding protein (Burkholderia pseudomallei, Melioidosis (Whitmore's disease)); pilin proteins, minor pilin-associated subunit pilC, major pilin subunit and variants pilE, pilS, phase variation protein porA, Porin B PorB, protein TraD, Neisserial outer membrane antigen H.8, 70 kDa antigen, major outer membrane protein PI, outer membrane proteins PIA and PIB, W antigen, surface protein A NspA, transferrin binding protein TbpA, transferrin binding protein TbpB, PBP2, mtrR coding protein, ponA coding protein, membrane permease FbpBC, FbpABC protein system, LbpAB proteins, outer membrane protein Opa, outer membrane transporter FetA, iron-repressed regulator MpeR, factor H-binding protein fHbp, adhesin NadA, protein NhbA, repressor FarR (Neisseria meningitidis, Meningococcal disease); 66 kDa protein, 22 kDa protein (usually Metagonimus yokagawai, Metagonimiasis); polar tube proteins (34, 75, and 170 kDa in Glugea, 35, 55 and 150 kDa in Encephalitozoon), kinesin-related protein, RNA polymerase II largest subunit, similar ot integral membrane protein YIPA, anti-silencing protein 1, heat shock transcription factor HSF, protein kinase, thymidine kinase, NOP-2 like nucleolar protein (Microsporidia phylum, Microsporidiosis); CASP8 and FADD-like apoptosis regulator, Glutathione peroxidase GPX1, RNA helicase NPH-II NPH2, Poly(A) polymerase catalytic subunit PAPL, Major envelope protein P43K, early transcription factor 70 kDa subunit VETFS, early transcription factor 82 kDa subunit VETFL, metalloendopeptidase G1-type, nucleoside triphosphatase I NPH1, replication protein A28-like MC134L, RNA polymease 7 kDa subunit RPO7 (Molluscum contagiosum virus (MCV), Molluscum contagiosum (MC)); matrix protein M, phosphoprotein P/V, small hydrophobic protein SH, nucleoprotein N, protein V, fusion glycoprotein F, hemagglutinin-neuraminidase HN, RNA polymerase L (Mumps virus, Mumps); Outer membrane proteins OM, cell surface antigen OmpA, cell surface antigen OmpB (sca5), cell surface protein SCA4, cell surface protein SCA1, intracytoplasmic protein D, crystalline surface layer protein SLP, protective surface protein antigen SPA (Rickettsia typhi, Murine typhus (Endemic typhus)); adhesin P1, adhesion P30, protein p116, protein P40, cytoskeletal protein HMW1, cytoskeletal protein HMW2, cytoskeletal protein HMW3, MPN152 coding protein, MPN426 coding protein, MPN456 coding protein, MPN-500 coding protein (Mycoplasma pneumoniae, Mycoplasma pneumonia); NocA, Iron dependent regulatory protein, VapA, VapD, VapF, VapG, caseinolytic protease, filament tip-associated 43-kDa protein, protein P24, protein P61, 15-kDa protein, 56-kDa protein (usually Nocardia asteroides and other Nocardia species, Nocardiosis); venom allergen homolog-like protein VAL-1, abundant larval transcript ALT-1, abundant larval transcript ALT-2, thioredoxin peroxidase TPX, vespid allergen homologue VAH, thiordoxin peroxidase 2 TPX-2, antigenic protein SXP (peptides N, N1, N2, and N3), activation associated protein-1 ASP-1, Thioredoxin TRX, transglutaminase BmTGA, glutathione-S-transferases GST, myosin, vespid allergen homologue VAH, 175 kDa collagenase, glyceraldehyde-3-phosphate dehydrogenase GAPDH, cuticular collagen Col-4, Secreted Larval Acidic Proteins SLAPs, chitinase CHI-1, maltose binding protein MBP, glycolytic enzyme fructose-1,6-bisphosphate aldolase Fba, tropomyosin TMY-1, nematode specific gene product OvB20, onchocystatin CPI-2, Cox-2 (Onchocerca volvulus, Onchocerciasis (River blindness)); 43 kDa secreted glycoprotein, glycoprotein gp0, glycoprotein gp75, antigen Pb27, antigen Pb40, heat shock protein Hsp65, heat shock protein Hsp70, heat shock protein Hsp90, protein P10, triosephosphate isomerase TPI, N-acetyl-glucosamine-binding lectin Paracoccin, 28 kDa protein Pb28 (Paracoccidioides brasiliensis, Paracoccidioidomycosis (South American blastomycosis)); 28-kDa cruzipain-like cystein protease Pw28CCP (usually Paragonimus westermani and other Paragonimus species, Paragonimiasis); outer membrane protein OmpH, outer membrane protein Omp28, protein PM1539, protein PM0355, protein PM1417, repair protein MutL, protein BcbC, prtein PM0305, formate dehydrogenase-N, protein PM0698, protein PM1422, DNA gyrase, lipoprotein PlpE, adhesive protein Cp39, heme aquisition system receptor HasR, 39 kDa capsular protein, iron-regulated OMP IROMP, outer membrane protein OmpA87, fimbrial protein Ptf, fimbrial subunit protein PtfA, transferrin binding protein Tbpl, esterase enzyme MesA, Pasteurella multocida toxin PMT, adhesive protein Cp39 (Pasteurella genus, Pasteurellosis); “filamentous hemagglutinin FhaB, adenylate cyclase CyaA, pertussis toxin subunit 4 precursor PtxD, pertactin precursor Prn, toxin subunit 1 PtxA, protein Cpn60, protein brkA, pertussis toxin subunit 2 precursor PtxB, pertussis toxin subunit 3 precursor PtxC, pertussis toxin subunit 5 precursor PtxE, pertactin Prn, protein Fim2, protein Fim3; “(Bordetella pertussis, Pertussis (Whooping cough)); “F1 capsule antigen, virulence-associated V antigen, secreted effector protein LcrV, V antigen, outer membrane protease Pla,secreted effector protein YopD, putative secreted protein-tyrosine phosphatase YopH, needle complex major subunit YscF, protein kinase YopO, putative autotransporter protein YapF, inner membrane ABC-transporter YbtQ (Irp7), putative sugar binding protein YP00612, heat shock protein 90 HtpG, putative sulfatase protein YdeN, outer-membrane lipoprotein carrier protein LolA, secretion chaperone YerA, putative lipoprotein YP00420, hemolysin activator protein HpmB, pesticin/yersiniabactin outer membrane receptor Psn, secreted effector protein YopE, secreted effector protein YopF, secreted effector protein YopK, outer membrane protein YopN, outer membrane protein YopM, Coagulase/fibrinolysin precursor Pla; “(Yersinia pestis, Plague); protein PhpA, surface adhesin PsaA, pneumolysin Ply, ATP-dependent protease Clp, lipoate-protein ligase LplA, cell wall surface anchored protein psrP, sortase SrtA, glutamyl-tRNA synthetase GltX, choline binding protein A CbpA, pneumococcal surface protein A PspA, pneumococcal surface protein C PspC, 6-phosphogluconate dehydrogenase Gnd, iron-binding protein PiaA, Murein hydrolase LytB, proteon LytC, protease A1 (Streptococcus pneumoniae, Pneumococcal infection); major surface protein B, kexin-like protease KEX1, protein A12, 55 kDa antigen P55, major surface glycoprotein Msg (Pneumocystis jirovecii, Pneumocystis pneumonia (PCP)); genome polyprotein, polymerase 3D, viral capsid protein VP1, viral capsid protein VP2, viral capsid protein VP3, viral capsid protein VP4, protease 2A, protease 3C (Poliovirus, Poliomyelitis); protein Nfa1, exendin-3, secretory lipase, cathepsin B-like protease, cysteine protease, cathepsin, peroxiredoxin, protein Cry1Ac (usually Naegleria fowleri, Primary amoebic meningoencephalitis (PAM)); agnoprotein, large T antigen, small T antigen, major capsid protein VP1, minor capsid protein Vp2 (JC virus, Progressive multifocal leukoencephalopathy); low calcium response protein E LCrE, chlamydial outer protein N CopN, serine/threonine-protein kinase PknD, acyl-carrier-protein S-malonyltransferase FabD, single-stranded DNA-binding protein Ssb, major outer membrane protein MOMP, outer membrane protein 2 Omp2, polymorphic membrane protein family (Pmp1, Pmp2, Pmp3, Pmp4, Pmp5, Pmp6, Pmp7, Pmp8, Pmp9, Pmp10, Pmp11, Pmp12, Pmp13, Pmp14, Pmp15, Pmp16, Pmp17, Pmp18, Pmp19, Pmp20, Pmp21) (Chlamydophila psittaci, Psittacosis); outer membrane protein P1, heat shock protein B HspB, peptide ABC transporter, GTP-binding protein, protein IcmB, ribonuclease R, phosphatas SixA, protein DsbD, outer membrane protein TolC, DNA-binding protein PhoB, ATPase DotB, heat shock protein B HspB, membrane protein Com1, 28 kDa protein, DNA-3-methyladenine glycosidase I, pouter membrane protein OmpH, outer membrane protein AdaA, glycine cleavage system T-protein (Coxiella burnetii, Q fever); nucleoprotein N, large structural protein L, phophoprotein P, matrix protein M, glycoprotein G (Rabies virus, Rabies); fusionprotein F, nucleoprotein N, matrix protein M, matrix protein M2-1, matrix protein M2-2, phophoprotein P, small hydrophobic protein SH, major surface glycoprotein G, polymerase L, non-structural protein 1 NS1, non-structural protein 2 NS2 (Respiratory syncytial virus (RSV), Respiratory syncytial virus infection); genome polyprotein, polymerase 3D, viral capsid protein VP1, viral capsid protein VP2, viral capsid protein VP3, viral capsid protein VP4, protease 2A, protease 3C (Rhinovirus, Rhinovirus infection); outer membrane proteins OM, cell surface antigen OmpA, cell surface antigen OmpB (sca5), cell surface protein SCA4, cell surface protein SCA1, protein PS120, intracytoplasmic protein D, protective surface protein antigen SPA (Rickettsia genus, Rickettsial infection); outer membrane proteins OM, cell surface antigen OmpA, cell surface antigen OmpB (sca5), cell surface protein SCA4, cell surface protein SCA1, intracytoplasmic protein D (Rickettsia akari, Rickettsialpox); envelope glycoprotein GP, polymerase L, nucleoprotein N, non-structural protein NSS (Rift Valley fever virus, Rift Valley fever (RVF)); outer membrane proteins OM, cell surface antigen OmpA, cell surface antigen OmpB (sca5), cell surface protein SCA4, cell surface protein SCA1, intracytoplasmic protein D (Rickettsia rickettsii, Rocky mountain spotted fever (RMSF)); non-structural protein 6 NS6, non-structural protein 2 NS2, intermediate capsid protein VP6, inner capsid protein VP2, non-structural protein 3 NS3, RNA-directed RNA polymerase L, protein VP3, non-structural protein 1 NS1, non-structural protein 5 NS5, outer capsid glycoprotein VP7, non-structural glycoprotein 4 NS4, outer capsid protein VP4; (Rotavirus, Rotavirus infection); polyprotein P200, glycoprotein E1, glycoprotein E2, protein NS2, capsid protein C (Rubella virus, Rubella); chaperonin GroEL (MopA), inositol phosphate phosphatase SopB, heat shock protein HslU, chaperone protein DnaJ, protein TviB, protein IroN, flagellin FliC, invasion protein SipC, glycoprotein gp43, outer membrane protein LamB, outer membrane protein PagC, outer membrane protein TolC, outer membrane protein NmpC, outer membrane protein FadL, transport protein SadA, transferase WgaP, effector proteins SifA, SteC, SseL, SseJ and SseF (Salmonella genus, Salmonellosis); “protein 14, non-structural protein NS7b, non-structural protein NS8a, protein 9b, protein 3a, nucleoprotein N, non-structural protein NS3b, non-structural protein NS6, protein 7a, non-structural protein NS8b, membrane protein M, envelope small membrane protein EsM, replicase polyprotein 1a, spike glycoprotein S, replicase polyprotein lab; SARS coronavirus, SARS (Severe Acute Respiratory Syndrome)); serin protease, Atypical Sarcoptes Antigen 1 ASA1, glutathione S-transferases GST, cystein protease, serine protease, apolipoprotein (Sarcoptes scabiei, Scabies); glutathione S-transferases GST, paramyosin, hemoglbinase SM32, major egg antigen, 14 kDa fatty acid-binding protein Sm14, major larval surface antigen P37, 22.6 kDa tegumental antigen, calpain CANP, triphospate isomerase Tim, surface protein 9B, outer capsid protein VP2, 23 kDa integral membrane protein Sm23, Cu/Zn-superoxide dismutase, glycoprotein Gp, myosin (Schistosoma genus, Schistosomiasis (Bilharziosis)); 60 kDa chaperonin, 56 kDa type-specific antigen, pyruvate phosphate dikinase, 4-hydroxybenzoate octaprenyltransferase (Orientia tsutsugamushi, Scrub typhus); dehydrogenase GuaB, invasion protein Spa32, invasin IpaA, invasin IpaB, invasin IpaC, invasin IpaD, invasin IpaH, invasin IpaJ (Shigella genus, Shigellosis (Bacillary dysentery)); protein P53, virion protein US10 homolog, transcriptional regulator IE63, transcriptional transactivator IE62, protease P33, alpha trans-inducing factor 74 kDa protein, deoxyuridine 5′-triphosphate nucleotidohydrolase, transcriptional transactivator IE4, membrane protein UL43 homolog, nuclear phosphoprotein UL3 homolog, nuclear protein UL4 homolog, replication origin-binding protein, membrane protein 2, phosphoprotein 32, protein 57,DNA polymerase processivity factor, portal protein 54, DNA primase, tegument protein UL14 homolog, tegument protein UL21 homolog, tegument protein UL55 homolog,tripartite terminase subunit UL33 homolog,tripartite terminase subunit UL15 homolog, capsid-binding protein 44, virion-packaging protein 43 (Varicella zoster virus (VZV), Shingles (Herpes zoster)); truncated 3-beta hydroxy-5-ene steroid dehydrogenase homolog, virion membrane protein A13, protein A19, protein A31, truncated protein A35 homolog, protein A37.5 homolog, protein A47, protein A49, protein A51, semaphorin-like protein A43, serine proteinase inhibitor 1, serine proteinase inhibitor 2, serine proteinase inhibitor 3, protein A6, protein B15, protein C1, protein C5, protein C6, protein F7, protein F8, protein F9, protein F11, protein F14, protein F15, protein F16 (Variola major or Variola minor, Smallpox (Variola)); adhesin/glycoprotein gp70, proteases (Sporothrix schenckii, Sporotrichosis); heme-iron binding protein IsdB, collagen adhesin Cna, clumping factor A ClfA, protein MecA, fibronectin-binding protein A FnbA, enterotoxin type A EntA, enterotoxin type B EntB, enterotoxin type C EntC1, enterotoxin type C EntC2, enterotoxin type D EntD, enterotoxin type E EntE, Toxic shock syndrome toxin-1 TSST-1, Staphylokinase, Penicillin binding protein 2a PBP2a (MecA), secretory antigen SssA (Staphylococcus genus, Staphylococcal food poisoning); heme-iron binding protein IsdB, collagen adhesin Cna, clumping factor A ClfA, protein MecA, fibronectin-binding protein A FnbA, enterotoxin type A EntA, enterotoxin type B EntB, enterotoxin type C EntC1, enterotoxin type C EntC2, enterotoxin type D EntD, enterotoxin type E EntE, Toxic shock syndrome toxin-1 TSST-1, Staphylokinase, Penicillin binding protein 2a PBP2a (MecA), secretory antigen SssA (Staphylococcus genus e.g. aureus, Staphylococcal infection); antigen Ss-IR, antigen NIE, strongylastacin, Na+-K+ ATPase Sseat-6, tropomysin SsTmy-1, protein LEC-5, 41 kDa aantigen P5, 41-kDa larval protein, 31-kDa larval protein, 28-kDa larval protein (Strongyloides stercoralis, Strongyloidiasis); glycerophosphodiester phosphodiesterase GlpQ (Gpd), outer membrane protein TmpB, protein Tp92, antigen TpF1, repeat protein Tpr, repeat protein F TprF, repeat protein G TprG, repeat protein I TprI, repeat protein J TprJ, repeat protein K TprK, treponemal membrane protein A TmpA, lipoprotein, 15 kDa Tpp15, 47 kDa membrane antigen, miniferritin TpF1, adhesin Tp0751, lipoprotein TP0136, protein TpN17, protein TpN47, outer membrane protein TP0136, outer membrane protein TP0155, outer membrane protein TP0326, outer membrane protein TP0483, outer membrane protein TP0956 (Treponema pallidum, Syphilis); Cathepsin L-like proteases, 53/25-kDa antigen, 8 kDa family members, cysticercus protein with a marginal trypsin-like activity TsAg5, oncosphere protein TSOL18, oncosphere protein TSOL45-1A, lactate dehydrogenase A LDHA, lactate dehydrogenase B LDHB (Taenia genus, Taeniasis); tetanus toxin TetX, tetanus toxin C TTC, 140 kDa S layer protein, flavoprotein beta-subunit CT3, phospholipase (lecithinase), phosphocarrier protein HPr (Clostridium tetani, Tetanus (Lockjaw)); genome polyprotein, protein E, protein M, capsid protein C (Tick-borne encephalitis virus (TBEV), Tick-borne encephalitis); 58-kDa antigen, 68-kDa antigens, Toxocara larvae excretory-secretory antigen TES, 32-kDa glycoprotein, glycoprotein TES-70, glycoprotein GP31, excretory-secretory antigen TcES-57, perienteric fluid antigen Pe, soluble extract antigens Ex, excretory/secretory larval antigens ES, antigen TES-120, polyprotein allergen TBA-1, cathepsin L-like cysteine protease c-cpl-1, 26-kDa protein (Toxocara canis or Toxocara cati, Toxocariasis (Ocular Larva Migrans (OLM) and Visceral Larva Migrans (VLM))); microneme proteins (MIC1, MIC2, MIC3, MIC4, MIC5, MIC6, MIC7, MIC8), rhoptry protein Rop2, rhoptry proteins (Rop1, Rop2, Rop3, Rop4, Rop5, Rop6, Rop7, Rop16, Rjop17), protein SRi,surface antigen P22, major antigen p24, major surface antigen p30, dense granule proteins (GRA1, GRA2, GRA3, GRA4, GRA5, GRA6, GRA7, GRA8, GRA9, GRA10), 28 kDa antigen, surface antigen SAG1, SAG2 related antigen, nucleoside-triphosphatase 1, nucleoside-triphosphatase 2, protein Stt3, HesB-like domain-containing protein, rhomboid-like protease 5, toxomepsin 1 (Toxoplasma gondii, Toxoplasmosis); 43 kDa secreted glycoprotein, 53 kDa secreted glycoprotein, paramyosin, antigen Ts21, antigen Ts87, antigen p46000, TSL-1 antigens, caveolin-1 CAV-1, 49 kDa newborn larva antigen, prosaposin homologue, serine protease, serine proteinase inhibitor, 45-kDa glycoprotein Gp45 (Trichinella spiralis, Trichinellosis); Myb-like transcriptional factors (Myb1, Myb2, Myb3), adhesion protein AP23, adhesion protein AP33, adhesin protein AP33-3, adhesins AP51, adhesin AP65, adhesion protein AP65-1, alpha-actinin, kinesin-associated protein, teneurin, 62 kDa proteinase, subtilisin-like serine protease SUB1, cysteine proteinase gene 3 CP3, alpha-enolase Enol, cysteine proteinase CP30, heat shock proteins (Hsp70, Hsp60), immunogenic protein P270, (Trichomonas vaginalis, Trichomoniasis); beta-tubulin, 47-kDa protein, secretory leucocyte-like proteinase-1 SLP-1, 50-kDa protein TT50, 17 kDa antigen, 43/47 kDa protein (Trichuris trichiura, Trichuriasis (Whipworm infection)); protein ESAT-6 (EsxA), 10 kDa filtrate antigen EsxB, secreted antigen 85-B FBPB, fibronectin-binding protein A FbpA (Ag85A), serine protease PepA, PPE family protein PPE18, fibronectin-binding protein D FbpD, immunogenic protein MPT64, secreted protein MPT51, catalase-peroxidase-peroxynitritase T KATG, periplasmic phosphate-binding lipoprotein PSTS3 (PBP-3, Phos-1), iron-regulated heparin binding hemagglutinin Hbha, PPE family protein PPE14, PPE family protein PPE68, protein Mtb72F, protein Apa, immunogenic protein MPT63, periplasmic phosphate-binding lipoprotein PSTS1 (PBP-1), molecular chaperone DnaK, cell surface lipoprotein Mpt83, lipoprotein P23, phosphate transport system permease protein pstA, 14 kDa antigen, fibronectin-binding protein C FbpC1, Alanine dehydrogenase TB43, Glutamine synthetase 1, ESX-1 protein, protein CFP10, TB10.4 protein, protein MPT83, protein MTB12, protein MTB8, Rpf-like proteins, protein MTB32, protein MTB39, crystallin, heat-shock protein HSP65, protein PST-S(usually Mycobacterium tuberculosis, Tuberculosis); outer membrane protein FobA, outer membrane protein FobB, intracellular growth locus IgIC1, intracellular growth locus IgIC2, aminotransferase Wbt1, chaperonin GroEL, 17 kDa major membrane protein TUL4, lipoprotein LpnA, chitinase family 18 protein, isocitrate dehydrogenase, Nif3 family protein, type IV pili glycosylation protein, outer membrane protein tolC, FAD binding family protein, type IV pilin multimeric outer membrane protein, two component sensor protein KdpD, chaperone protein DnaK, protein ToIQ (Francisella tularensis, Tularemia); “MB antigen, urease, protein GyrA, protein GyrB, protein ParC, protein ParE, lipid associated membrane proteins LAMP, thymidine kinase TK, phospholipase PL-A1, phospholipase PL-A2, phospholipase PL-C, surface-expressed 96-kDa antigen; “(Ureaplasma urealyticum, Ureaplasma urealyticum infection); non-structural polyprotein, structural polyprotein, capsid protein CP, protein E1, protein E2, protein E3, protease P1, protease P2, protease P3 (Venezuelan equine encephalitis virus, Venezuelan equine encephalitis); glycoprotein GP, matrix protein Z, polymerase L, nucleoprotein N (Guanarito virus, Venezuelan hemorrhagic fever); polyprotein, protein E, protein M, capsid protein C, protease NS3, protein NS1, protein NS2A, protein AS2B, brotein NS4A, protein NS4B, protein NS5 (West Nile virus, West Nile Fever); cpasid protein CP, protein E1, protein E2, protein E3, protease P2 (Western equine encephalitis virus, Western equine encephalitis); genome polyprotein, protein E, protein M, capsid protein C, protease NS3, protein NS1, protein NS2A, protein AS2B, protein NS4A, protein NS4B, protein NS5 (Yellow fever virus, Yellow fever); putative Yop targeting protein YobB, effector protein YopD, effector protein YopE, protein YopH, effector protein YopJ, protein translocation protein YopK, effector protein YopT, protein YpkA, flagellar biosyntheses protein FlhA, peptidase M48, potassium efflux system KefA, transcriptional regulatoer RovA, adhesin Ifp, translocator portein LcrV, protein PcrV, invasin Inv, outer membrane protein OmpF-like porin, adhesin YadA, protein kinase C, phospholipase C1, protein PsaA, mannosyltransferase-like protein WbyK, protein YscU, antigen YPMa (Yersinia pseudotuberculosis, Yersinia pseudotuberculosis infection); effector protein YopB, 60 kDa chaperonin, protein WbcP, tyrosin-protein phosphatase YopH, protein YopQ, enterotoxin, Galactoside permease, reductaase NrdE, protein YasN, Invasin Inv, adhesin YadA, outer membrane porin F OmpF, protein UspA1, protein EibA, protein Hia, cell surface protein Ail, chaperone SycD, protein LcrD, protein LcrG, protein LcrV, protein SycE, protein YopE, regulator protein TyeA, protein YopM, protein YopN, protein YopO, protein YopT, protein YopD, protease ClpP, protein MyfA, protein FilA, and protein PsaA (Yersinia enterocolitica, Yersiniosis).

[0143] The brackets in the preceding section indicate the particular pathogen or the family of pathogens of which the antigen(s) is/are derived and the infectious disease with which the pathogen is associated.

[0144] Influenza:

[0145] In a particularly preferred embodiment of the first aspect of the invention the mRNA compound comprises a mRNA sequence comprises a coding region, encoding at least one antigenic peptide or protein derived from hemagglutinin (HA), neuraminidase (NA), nucleoprotein (NP), matrix protein 1 (M1), matrix protein 2 (M2), non-structural protein 1 (NS1), non-structural protein 2 (NS2), nuclear export protein (NEP), polymerase acidic protein (PA), polymerase basic protein PB1, PB1-F2, or polymerase basic protein 2 (PB2) of an influenza virus or a fragment or variant thereof.

[0146] In this context, the amino acid sequence of the at least one antigenic peptide or protein may be selected from any peptide or protein derived from hemagglutinin (HA), neuraminidase (NA), nucleoprotein (NP), matrix protein 1 (M1), matrix protein 2 (M2), non-structural protein 1 (NS1), non-structural protein 2 (NS2), nuclear export protein (NEP), polymerase acidic protein (PA), polymerase basic protein PB1, PB1-F2, or polymerase basic protein 2 (PB2) of an influenza virus or a fragment or variant or from any synthetically engineered influenza virus peptide or protein.

[0147] In a preferred embodiment of the present invention the coding region encodes at least one antigenic peptide or protein derived from hemagglutinin (HA) and/or neuraminidase (NA) of an influenza virus or a fragment or variant thereof. In this context the hemagglutinin (HA) and the neuraminidase (NA) may be chosen from the same influenza virus or from different influenza viruses.

[0148] In this context it is particularly preferred that the at least one coding region encodes at least one full-length protein of hemagglutinin (HA), neuraminidase (NA), nucleoprotein (NP), matrix protein 1 (M1), matrix protein 2 (M2), non-structural protein 1 (NS1), non-structural protein 2 (NS2), nuclear export protein (NEP), polymerase acidic protein (PA), polymerase basic protein PB1, PB1-F2, or polymerase basic protein 2 (PB2) of an influenza virus or a variant thereof.

[0149] In particularly preferred embodiments the at least one coding region encodes at least one full-length protein of hemagglutinin (HA), and/or at least one full-length protein of neuraminidase (NA) of an influenza virus or a variant thereof.

[0150] The term “full-length protein” as used herein typically refers to a protein that substantially comprises the entire amino acid sequence of the naturally occurring protein. As used herein, the term “full-length protein” preferably relates to the full-length sequence of a protein as indicated in the sequence listing of the present invention i.e. to an amino acid sequence as defined by any one of the SEQ ID NOs listed in the sequence listing (SEQ ID NOs: 1-30504 or SEQ ID NO: 224269 or SEQ ID NO: 224309) or to an amino acid provided in the database under the respective database accession number.

[0151] Preferred Sequences of the Present Invention:

[0152] In this context it is further preferred that the at least one coding sequence of the mRNA sequence of the present invention encodes at least one antigenic peptide or protein which is derived from

[0153] a hemagglutinin (HA) protein of an influenza A virus; or

[0154] a hemagglutinin (HA) protein of an influenza B virus; or

[0155] a neuraminidase (NA) protein of an influenza A virus; or

[0156] a neuraminidase (NA) protein of an influenza B virus; or

[0157] or a fragment or variant thereof, wherein the hemagglutinin (HA) protein of an influenza A virus or the hemagglutinin (HA) protein of an influenza B virus or the neuraminidase (NA) protein of an influenza A virus or the neuraminidase (NA) protein of an influenza B virus is selected from the hemagglutinin (HA) proteins or the neuraminidase (NA) proteins as listed in the sequence listing of the present invention.

[0158] The sequence listing discloses all influenza A or influenza B virus hemagglutinin (HA) proteins and all influenza A or influenza B virus neuraminidase (NA) proteins which are preferred in the present invention. Each preferred antigenic peptide or protein and its coding sequence can be identified with the data element shown under the numeric identifier <223>. In other words, each preferred hemagglutinin (HA) or neuraminidase (NA) sequence from an influenza A or B virus can be identified through the specific database accession number (i.e. a GenBank Protein or Nucleic Acid Accession No.) by reading through the sequence listing entries under numeric identifier <223>.

[0159] In sum, each preferred sequence is depicted by its GenBank Protein or Nucleic Acid Accession No. which again is depicted with seven distinct preferred SEQ ID NO in the sequence listing (protein, nucleic acid wild type, nucleic acid optimizations 1 to 5). This is apparent from the numeric identifier <223>.

[0160] I.e. the first consecutive entry of a specific GenBank Protein or Nucleic Acid Accession No. in the sequence listing under numeric identifier <223> indicates the SEQ ID NO: corresponding to the respective AMINO ACID SEQUENCE (i.e. Protein Sequence wild type SEQ ID NO).

[0161] Further, the second consecutive entry of a GenBank Protein or Nucleic Acid Accession No. in the sequence listing under numeric identifier <223> corresponds to the NUCLEIC ACID SEQUENCE of the wild type mRNA encoding the protein (i.e. Nucleotide Sequence wild type SEQ ID NO).

[0162] Further, the next five consecutive entries of a GenBank Protein or Nucleic Acid Accession No. in the sequence listing under numeric identifier <223> provide the SEQ ID NOs corresponding to five different MODIFIED/OPTIMIZED NUCLEIC ACID SEQUENCES of the sequences as described herein that encode the protein preferably having the amino acid sequence as defined by the first consecutive entry for a specific GenBank Protein or Nucleic Acid Accession No. in the sequence listing (i.e. Optimized Nucleotide Sequence SEQ ID NO).

[0163] Accordingly, a reference to a specific GenBank Protein or Nucleic Acid Accession No equals to a reference to the block of seven sequences as described above (protein=1, nucleic acid=2, optimized sequences=3-7).

[0164] One example would be the first GenBank Protein or Nucleic Acid Accession No. which is mentioned in the sequence listing, i.e. under SEQ ID NO:1 numeric identifier <223>: AAA16879. If Accession No. AAA16879 is searched throughout the sequence listing it is apparent that, as described above, seven SEQ ID NO are connected to this Accession No.: SEQ ID NO:1, SEQ ID NO:32013, SEQ ID NO:64025, SEQ ID NO:96037, SEQ ID NO:128049, SEQ ID NO:160061, and SEQ ID NO:192073.

[0165] In accordance with the above explanation,

[0166] for SEQ ID NO:1, the numeric identifier <223> reads “derived and/or modified protein sequence (wt) from hemagglutinin_InfluenzaA_AAA16879”;

[0167] for SEQ ID NO: 32013, the numeric identifier <223> reads “derived and/or modified CDS sequence (wt) from hemagglutinin_InfluenzaA_AAA16879”;

[0168] for SEQ ID NO: 64025, the numeric identifier <223> reads “derived and/or modified CDS sequence (opt1) from hemagglutinin_InfluenzaA_AAA16879”;

[0169] for SEQ ID NO: 96037, the numeric identifier <223> reads “derived and/or modified CDS sequence (opt2) from hemagglutinin_InfluenzaA_AAA16879”;

[0170] for SEQ ID NO: 128049, the numeric identifier <223> reads “derived and/or modified CDS sequence (opt3) from hemagglutinin_InfluenzaA_AAA16879”;

[0171] for SEQ ID NO: 160061, the numeric identifier <223> reads “derived and/or modified CDS sequence (opt4) from hemagglutinin_InfluenzaA_AAA16879”; and

[0172] for SEQ ID NO: 192073, the numeric identifier <223> reads “derived and/or modified CDS sequence (opt5) from hemagglutinin_InfluenzaA_AAA16879”.

[0173] Therefore, a reference to AAA16879 equals to a reference to the seven sequences as described above (protein=1^{st} sequence, nucleic acid=2^{nd} sequence, five different optimized sequences=3^{rd}-7^{th} sequence).

[0174] A second example would be the second GenBank Protein or Nucleic Acid Accession No. which is mentioned in the sequence listing, i.e. under SEQ ID NO:2 numeric identifier <223>: “AAA16880”. Accession No. AAA16880 is connected to these seven sequences in the sequence listing: SEQ ID NOs:2 (protein), 32014 (nucleic acid wild type), 64026 (optimization 1), 96038 (optimization 2), 128050 (optimization 3), 160062 (optimization 4), and 192074 (optimization 5). Accordingly, a reference to AAA16880 equals to a reference to the seven sequences as described above.

[0175] A further illustration of this circumstance can be seen in exemplary FIGS. 20-24, which show the structure of the sequence listing by exemplifying hemagglutinin (HA) proteins and neuraminidase (NA) proteins of influenza A and B viruses and glycoproteins of Rabies virus:
[0176] exemplary hemagglutinin (HA) proteins of influenza A virus (FIG. 20);
[0177] exemplary hemagglutinin (HA) proteins of influenza B virus (FIG. 21);
[0178] exemplary neuraminidase (NA) proteins of influenza A virus (FIG. 22);
[0179] exemplary neuraminidase (NA) proteins of influenza B virus (FIG. 23);
[0180] exemplary glycoproteins of Rabies virus (FIG. 24).

[0181] Reference is made herein to the content of FIGS. 20-24 of PCT/EP2016/075843 filed on Oct. 26, 2016, i.e. the priority application of the present international patent application, which is incorporated herein by reference.

[0182] In specific embodiments the influenza virus peptide or protein is derived from an influenza A, B or C virus (strain).

[0183] The influenza A virus may be selected from influenza A viruses characterized by a hemagglutinin (HA) selected from the group consisting of H1, H2, H3, H4, H5, H6, H7, H8, H9, H10, H11, H12, H13, H14, H15, H16, H17 and H18. Preferably the influenza A virus is selected from an influenza virus characterized by a hemagglutinin (HA) selected from the group consisting of H1, H3, H5 or H9.

[0184] Furthermore, particularly preferred are influenza A viruses characterized by a neuraminidase (NA) selected from the group consisting of N1, N2, N3, N4, N5, N6, N7, N8, N9, N10, and N11. Most preferably the influenza A virus is characterized by a neuraminidase (NA) selected from the group consisting of N1, N2, and N8.

[0185] In particularly preferred embodiments the influenza A virus is selected from the group consisting of H1N1, H1N2, H2N2, H3N1, H3N2, H3N8, H5N1, H5N2, H5N3, H5N8, H5N9, H7N1, H7N2, H7N3, H7N4, H7N7, H7N9, H9N2, H10N8, and H10N7, preferably from H1N1, H3N2, H5N1, and H5N8.

[0186] In this context it is particularly preferred that the at least one coding region of the inventive mRNA sequence encodes at least one antigenic peptide or protein derived from hemagglutinin (HA) and/or at least one antigenic peptide or protein derived from neuraminidase (NA) of an influenza A virus selected from the group consisting of H1N1, H1N2, H2N2, H3N1, H3N2, H3N8, H5N1, H5N2, H5N3, H5N8, H5N9, H7N1, H7N2, H7N3, H7N4, H7N7, H7N9, H9N2, H10N8 and H10N7, preferably from H1N1, H3N2, H5N1, H5N8 or a fragment or variant thereof.

[0187] In the context of the present invention a fragment of a protein or a variant thereof encoded by the at least one coding region of the mRNA sequence according to the invention may typically comprise an amino acid sequence having a sequence identity of at least 5%, 10%, 20%, 30%, 40%, 50%, 60%, 70%, 80%, 85%, 86%, 87%, 88%, 89%, 90%, 91%, 92%, 93%, 94%, 95%, 96%, 97%, 98%, or 99%, preferably of at least 70%, more preferably of at least 80%, even more preferably at least 85%, even more preferably of at least 90% and most preferably of at least 95% or even 97%, with an amino acid sequence of the respective naturally occurring full-length protein or a variant thereof, preferably according to SEQ ID NOs: 1-30504.

[0188] In specific embodiments the antigenic peptide or protein is derived from a hemagglutinin (HA) protein of an influenza A virus according to SEQ ID NOs: 1-14031.

[0189] In this context it is further preferred that the at least one coding sequence of the mRNA sequence of the present invention encodes at least one antigenic peptide or protein which is derived from a hemagglutinin (HA) protein of an influenza A virus, or a fragment or variant thereof, wherein the hemagglutinin (HA) protein of an influenza A virus is selected from the hemagglutinin (HA) proteins listed in the sequence listing (see SEQ ID NOs: 1-32012 or SEQ ID NO: 224269 or SEQ ID NO: 224309 and explanation under the section “Preferred sequences of the present invention”). Therein, each hemagglutinin (HA) is identified by the database accession number of the corresponding protein (see sequence listing numeric identifier <223> which indicates the Protein or Nucleic Acid Accession No. (GenBank)). If the respective Protein or Nucleic Acid Accession No. (GenBank) is searched further on in the sequence listing, the next SEQ ID NO: which show said Protein or Nucleic Acid Accession No. (GenBank) under numeric identifier <223> corresponding to the nucleic acid sequence of the wild type mRNA encoding said protein. If again the respective Protein or Nucleic Acid Accession No. (GenBank) is searched further on in the sequence listing, the next five SEQ ID NOs which show the respective Protein or Nucleic Acid Accession No. under numeric identifier <223> correspond to five modified/optimized nucleic acid sequences of the mRNAs as described herein that encode the protein preferably having the respective amino acid sequence as mentioned before (first entry having the respective Protein or Nucleic Acid Accession No. (GenBank)).

[0190] Particularly preferred in this context are the following HA protein sequences:

[0191] HA protein of influenza A/Vietnam/1203/2004 (H5N1) (SEQ ID NOs: 13861-13871)
[0192] HA protein of influenza A/Vietnam/1194/2004 (H5N1); (SEQ ID NOs: 13859-13860)
[0193] HA protein of influenza A/Hong Kong/4801/2014 (H3N2) (SEQ ID NOs: 13853-13856)
[0194] HA protein of influenza A/Netherlands/602/2009 (H1N1) (SEQ ID NOs: 13848-13850)
[0195] HA protein of influenza A/California/07/2009 (H1N1) (SEQ ID NOs: 13836-13844)
[0196] HA protein of influenza A/Michigan/45/2015 (H1N1) (SEQ ID NOs: 13845-13847)

[0197] In specific embodiments the antigenic peptide or protein is derived from a hemagglutinin (HA) protein of an influenza B virus according to SEQ ID NOs: 26398-28576.

[0198] In this context it is further preferred that the at least one coding sequence of the mRNA sequence of the present invention encodes at least one antigenic peptide or protein which is derived from a hemagglutinin (HA) protein of an influenza B virus, or a fragment or variant thereof, wherein the hemagglutinin (HA) protein of an influenza B virus is selected from the hemagglutinin (HA) proteins listed in the sequence listing (see SEQ ID NOs: 1-32012 or SEQ ID NO: 224269 or SEQ ID NO: 224309 and explanation under the section “Preferred sequences of the present invention”). Therein, each hemagglutinin (HA) is identified by the database accession number of the corresponding protein (see sequence listing numeric identifier <223> which indicates the Protein or Nucleic Acid Accession No. (GenBank)). If the respective Protein or Nucleic Acid Accession No. (GenBank) is searched further on in the sequence listing, the next SEQ ID NO: which show said Protein or Nucleic Acid Accession No. (GenBank) under numeric identifier <223> corresponding to the nucleic acid sequence of the wild type mRNA encoding said protein. If again the respective Protein or Nucleic Acid Accession No. (GenBank) is searched further on in the sequence listing, the next five SEQ ID NOs which show the respective Protein or Nucleic Acid Accession No. under numeric identifier <223> correspond to five modified/optimized nucleic acid sequences of the mRNAs as described herein that encode the protein preferably having the respective amino acid sequence as mentioned before (first entry having the respective Protein or Nucleic Acid Accession No. (GenBank)). Particularly preferred in this context are the following HA protein sequences:
[0199] HA protein of influenza B/Phuket/3037/2013 (EPI540671; SEQ ID NOs: 28530-28532)
[0200] HA protein of influenza B/Brisbane/60/2008 (SEQ ID NOs: 28524-28529)

[0201] In further specific embodiments the antigenic peptide or protein is derived from a neuraminidase (NA) protein of an influenza A virus according to SEQ ID NOs: 14032-26397, 224309, or 224310.

[0202] In this context it is further preferred that the at least one coding sequence of the mRNA sequence of the present invention encodes at least one antigenic peptide or protein which is derived from a neuraminidase (NA) protein of an influenza A virus, or a fragment or variant thereof, wherein the neuraminidase (NA) protein of an influenza A virus is selected from the neuraminidase (NA) proteins listed in the sequence listing (see SEQ ID NOs: 1-32012 or SEQ ID NO: 224269 or SEQ ID NO: 224309 and explanation under the section “Preferred sequences of the present invention”). Therein, each neuraminidase (NA) is identified by the database accession number of the corresponding protein (see sequence listing numeric identifier <223> which indicates the Protein or Nucleic Acid Accession No. (GenBank)). If the respective Protein or Nucleic Acid Accession No. (GenBank) is searched further on in the sequence listing, the next SEQ ID NO: which show said Protein or Nucleic Acid Accession No. (GenBank) under numeric identifier <223> corresponding to the nucleic acid sequence of the wild type mRNA encoding said protein. If again the respective Protein or Nucleic Acid Accession No. (GenBank) is searched further on in the sequence listing, the next five SEQ ID NOs which show the respective Protein or Nucleic Acid Accession No. under numeric identifier <223> correspond to five modified/optimized nucleic acid sequences of the mRNAs as described herein that encode the protein preferably having the respective amino acid sequence as mentioned before (first entry having the respective Protein or Nucleic Acid Accession No. (GenBank)).

[0203] Particularly preferred in this context are the following NA protein sequences:
[0204] NA protein of influenza A/Hong Kong/4801/2014 (H3N2): SEQ ID NOs: 26251-26254
[0205] NA protein of influenza A/California/7/2009 (H1N1)pdm09: SEQ ID NOs: 26238-26243
[0206] NA protein of influenza A/Vietnam/1194/2004 (H5N1): SEQ ID NOs: 224310
[0207] NA protein of influenza A/Vietnam/1203/2004) (H5N1): SEQ ID NOs: 26255-26257
[0208] NA protein of influenza A/Netherlands/602/2009 (H1N1): SEQ ID NOs: 26246-26250
[0209] NA protein of influenza A/Michigan/45/2015 (H1N1) (SEQ ID NOs: 26244-26245)

[0210] In further specific embodiments the antigenic peptide or protein is derived from a neuraminidase (NA) protein of an influenza B virus according to SEQ ID NOs: 28577-30504.

[0211] In this context it is further preferred that the at least one coding sequence of the mRNA sequence of the present invention encodes at least one antigenic peptide or protein which is derived from a neuraminidase (NA) protein of an influenza B virus, or a fragment or variant thereof, wherein the neuraminidase (NA) protein of an influenza B virus is selected from the neuraminidase (NA) proteins listed in the sequence listing (see SEQ ID NOs: 1-32012 or SEQ ID NO: 224269 or SEQ ID NO: 224309 and explanation under the section “Preferred sequences of the present invention”). Therein, each neuraminidase (NA) is identified by the database accession number of the corresponding protein (see sequence listing numeric identifier <223> which indicates the Protein or Nucleic Acid Accession No. (GenBank)). If the respective Protein or Nucleic Acid Accession No. (GenBank) is searched further on in the sequence listing, the next SEQ ID NO: which show said Protein or Nucleic Acid Accession No. (GenBank) under numeric identifier <223> corresponding to the nucleic acid sequence of the wild type mRNA encoding said protein. If again the respective Protein or Nucleic Acid Accession No. (GenBank) is searched further on in the sequence listing, the next five SEQ ID NOs which show the respective Protein or Nucleic Acid Accession No. under numeric identifier <223> correspond to five modified/optimized nucleic acid sequences of the mRNAs as described herein that encode the protein preferably having the respective amino acid sequence as mentioned before (first entry having the respective Protein or Nucleic Acid Accession No. (GenBank)).

[0212] Particularly preferred in this context are the following NA protein sequences:
[0213] NA protein of influenza B/Brisbane/60/2008: SEQ ID NOs: 30455-30460
[0214] NA protein of influenza B/Phuket/3037/2013: SEQ ID NOs: 30461-30462

[0215] Furthermore, in this context the coding region encoding at least one antigenic peptide or protein derived from hemagglutinin (HA) and/or neuraminidase (NA) of an influenza virus or a fragment, variant or derivative thereof, may be selected from any nucleic acid sequence comprising a coding region encoding hemagglutinin (HA) or neuraminidase (NA) derived from any influenza virus isolate or a fragment or variant thereof.

[0216] In a preferred embodiment, the present invention thus provides an mRNA sequence comprising at least one coding region, wherein the coding region encoding hemagglutinin (HA) of an influenza A virus comprises or consists any one of the nucleic acid sequences as disclosed in the sequence listing, (i.e. SEQ ID NOs: 32013-46043; 64025-78055, 224085-224106, 96037-110067, 128049-142079, 160061-174091, 192073-206103; see above explanation and explanation under the section “Preferred sequences of the present invention”) or a fragment or variant of any one of these sequences.

[0217] In these context it is particularly preferred that the mRNA sequence according to the invention comprises at least one coding region encoding hemagglutinin (HA) of an influenza A virus comprising an RNA sequence selected from RNA sequences being identical or at least 50%, 60%, 70%, 80%, 85%, 86%, 87%, 88%, 89%, 90%, 91%, 92%, 93%, 94%, 95%, 96%, 97%, 98%, or 99% identical to the RNA sequences as disclosed in the sequence listing, see above explanation and explanation under the section “Preferred sequences of the present invention”, (SEQ ID NOs: 32013-46043; 64025-78055, 224085-224106, 96037-110067, 128049-142079, 160061-174091, 192073-206103) or a fragment or variant thereof.

[0218] In particularly preferred embodiments the mRNA sequence comprises at least one coding region encoding hemagglutinin (HA) of an influenza A virus comprising an RNA sequence selected from the following RNA sequences:
[0219] mRNA encoding HA protein of influenza A/Vietnam/1203/2004 (H5N1), preferably mRNA sequences according to SEQ ID NOs: 45873-45883, 77885-77895, 109897-109907, 141909-141919, 173921-173931, 205933-205943.
[0220] mRNA encoding HA protein of influenza A/Vietnam/1194/2004 (H5N1), preferably mRNA sequences according to SEQ ID NOs: 45871, 45872, 77883, 77884, 109895, 109896, 141907, 141908, 173919, 173920, 205931, 205932.
[0221] mRNA encoding HA protein of influenza A/Hong Kong/4801/2014 (H3N2) preferably mRNA sequences according to SEQ ID NOs: 45865-45868, 77877-77877, 109889-109889, 141901-141901, 173913-173913, 205925-205925.
[0222] mRNA encoding HA protein of influenza A/Netherlands/602/2009 (H1N1) preferably mRNA sequences according to SEQ ID NOs: 45860-45862, 77872-77874, 109884-109886, 173908-173910, 205920-205922.
[0223] mRNA encoding HA protein of influenza A/California/07/2009 (H1N1) preferably mRNA sequences according to SEQ ID NOs: 45848-45856, 77860-77868, 109872-109880, 141884-141892, 173896-173904, 205908-205916
[0224] mRNA encoding HA protein of influenza A/Michigan/45/2015 (H1N1) preferably mRNA sequences according to SEQ ID NOs: 45857-45859, 77869-77871, 109881-109883, 141893-141895, 173905-173907, 205917-205919.

[0225] In a preferred embodiment, the present invention thus provides an mRNA sequence comprising at least one coding region, wherein the coding region encoding hemagglutinin (HA) of an influenza B virus comprises or consists any one of the nucleic acid sequences as disclosed in the sequence listing having a numeric identifier <223> which starts with “derived and/or modified CDS sequence (wt)” or “derived and/or modified CDS sequence (opt1)”, “derived and/or modified CDS sequence (opt2)”, “derived and/or modified CDS sequence (opt3)”, “derived and/or modified CDS sequence (opt4)”, or “derived and/or modified CDS sequence (opt5)”, or respectively “column B” or “column C” of Table 2 or FIGS. 21 of PCT/EP2016/075843, SEQ ID NOs: 58410-60588, 90422-92600, 224107-224112, 122434-124612, 154446-156624, 186458-188636, 218470-220648 or of a fragment or variant of any one of these sequences.

[0226] In these context it is particularly preferred that the mRNA sequence according to the invention comprises at least one coding region encoding hemagglutinin (HA) of an influenza B virus comprising an RNA sequence selected from RNA sequences being identical or at least 50%, 60%, 70%, 80%, 85%, 86%, 87%, 88%, 89%, 90%, 91%, 92%, 93%, 94%, 95%, 96%, 97%, 98%, or 99% identical to the RNA sequences as disclosed in the sequence listing having a numeric identifier <223> which starts with “derived and/or modified CDS sequence (wt)” or “derived and/or modified CDS sequence (opt1)”, “derived and/or modified CDS sequence (opt2)”, “derived and/or modified CDS sequence (opt3)”, “derived and/or modified CDS sequence (opt4)”, or “derived and/or modified CDS sequence (opt5)”, or respectively “column B” or “column C” of Table 2 or FIGS. 21 of PCT/EP2016/075843, SEQ ID NOs: 58410-60588, 90422-92600, 224107-224112, 122434-124612, 154446-156624, 186458-188636, 218470-220648 or of a fragment or variant of any one of these sequences

[0227] In particularly preferred embodiments the mRNA sequence comprises at least one coding region encoding hemagglutinin (HA) of an influenza B virus comprising an RNA sequence selected from the following RNA sequences:
[0228] mRNA encoding HA protein of influenza B/Phuket/3037/2013 preferably mRNA sequences according to SEQ ID NOs: 60542-60544, 92554-92556, 124566-124568, 156578-156580, 188590-188592, 220602-220604.
[0229] mRNA encoding HA protein of influenza B/Brisbane/60/2008 (GI: 223950973; FJ766840.1) preferably mRNA sequences according to SEQ ID NOs: 60536-60541, 92548-92553, 124560-124565, 156572-156577, 188584-188589, 220596-220601.

[0230] In a preferred embodiment, the present invention thus provides an mRNA sequence comprising at least one coding region, wherein the coding region encoding neuraminidase (NA) of an influenza A virus comprises or consists any one of the nucleic acid sequences as disclosed in the sequence listing having a numeric identifier <223> which starts with “derived and/or modified CDS sequence (wt)” or “derived and/or modified CDS sequence (opt1)”, “derived and/or modified CDS sequence (opt2)”, “derived and/or modified CDS sequence (opt3)”, “derived and/or modified CDS sequence (opt4)”, or “derived and/or modified CDS sequence (opt5)”, or respectively “column B” or “column C” of Table 3 or FIGS. 22 of PCT/EP2016/075843, SEQ ID NOs: 46044-58409, 224311, 224312, 78056-90421, 224113, 224313-224317, 110068-122433, 142080-154445, 174092-186457, 206104-218469 or of a fragment or variant of any one of these sequences.

[0231] In these context it is particularly preferred that the mRNA sequence according to the invention comprises at least one coding region encoding neuraminidase (NA) of an influenza A virus comprising an RNA sequence selected from RNA sequences being identical or at least 50%, 60%, 70%, 80%, 85%, 86%, 87%, 88%, 89%, 90%, 91%, 92%, 93%, 94%, 95%, 96%, 97%, 98%, or 99% identical to the RNA sequences as disclosed in the sequence listing having a numeric identifier <223> which starts with “derived and/or modified CDS sequence (wt)” or “derived and/or modified CDS sequence (opt1)”, “derived and/or modified CDS sequence (opt2)”, “derived and/or modified CDS sequence (opt3)”, “derived and/or modified CDS sequence (opt4)”, or “derived and/or modified CDS sequence (opt5)”, or respectively “column B” or “column C” of Table 3 or FIGS. 22 of PCT/EP2016/075843, SEQ ID NOs: 46044-58409, 224311, 224312, 78056-90421, 224113, 224313-224317, 110068-122433, 142080-154445, 174092-186457, 206104-218469 or of a fragment or variant of any one of these sequences.

[0232] In particularly preferred embodiments the mRNA sequence comprises at least one coding region encoding neuraminidase (NA) of an influenza A virus comprising an RNA sequence selected from the following RNA sequences:
[0233] mRNA encoding NA protein of influenza A/Hong Kong/4801/2014 (H3N2): SEQ ID NOs: 58263-58266, 90275-90278, 122287-122290, 154299-154302, 186311-186314, 218323-218326.
[0234] mRNA encoding NA protein of influenza A/California/7/2009 (H1N1)pdm09: SEQ ID NOs: 58250-58255, 90262-90267, 122274-122279, 154286-154291, 186298-186303, 218310-218315.
[0235] mRNA encoding NA protein of influenza A/Vietnam/1194/2004 (H5N1): SEQ ID NO: 224312.
[0236] mRNA encoding NA protein of influenza A/Vietnam/1203/2004) (H5N1): SEQ ID NOs: 58267-58269, 90279-90281, 122291-122293, 154303-154305, 186315-186317, 218327-218329.
[0237] mRNA encoding NA protein of influenza A/Michigan/45/2015 (H1N1) preferably mRNA sequences according to SEQ ID NOs: 58256-58257, 90268-90269, 122280-122281, 154292-154293, 186304-186305, 218316-218317.
[0238] mRNA encoding NA protein of influenza A/Netherlands/602/2009 (H1N1) preferably mRNA sequences according to SEQ ID NOs: 58258-58262, 90270-90274, 122282-122286, 154294-154298, 186306-186310, 218318-218322.

[0239] In a preferred embodiment, the present invention thus provides an mRNA sequence comprising at least one coding region, wherein the coding region encoding neuraminidase (NA) of an influenza B virus comprises or consists any one of the nucleic acid sequences as disclosed in the sequence listing having a numeric identifier <223> which starts with “derived and/or modified CDS sequence (wt)” or “derived and/or modified CDS sequence (opt1)”, “derived and/or modified CDS sequence (opt2)”, “derived and/or modified CDS sequence (opt3)”, “derived and/or modified CDS sequence (opt4)”, or “derived and/or modified CDS sequence (opt5)”, or respectively “column B” or “column C” of Table 4 or FIGS. 23 of PCT/EP2016/075843, SEQ ID NOs: 60589-62516, 92601-94528, 124613-126540, 156625-158552, 188637-190564, 220649-222576 or of a fragment or variant of any one of these sequences.

[0240] In these context it is particularly preferred that the mRNA sequence according to the invention comprises at least one coding region encoding neuraminidase (NA) of an influenza B virus comprising an RNA sequence selected from RNA sequences being identical or at least 50%, 60%, 70%, 80%, 85%, 86%, 87%, 88%, 89%, 90%, 91%, 92%, 93%, 94%, 95%, 96%, 97%, 98%, or 99% identical to the RNA sequences as disclosed in the sequence listing having a numeric identifier <223> which starts with “derived and/or modified CDS sequence (wt)” or “derived and/or modified CDS sequence (opt1)”, “derived and/or modified CDS sequence (opt2)”, “derived and/or modified CDS sequence (opt3)”, “derived and/or modified CDS sequence (opt4)”, or “derived and/or modified CDS sequence (opt5)”, or respectively “column B” or “column C” of Table 4 or FIGS. 23 of PCT/EP2016/075843, SEQ ID NOs: 60589-62516, 92601-94528, 124613-126540, 156625-158552, 188637-190564, 220649-222576 or of a fragment or variant of any one of these sequences.

[0241] In particularly preferred embodiments the mRNA sequence comprises at least one coding region encoding neuraminidase (NA) of an influenza B virus comprising an RNA sequence selected from the following RNA sequences:
[0242] mRNA encoding NA protein of influenza B/Brisbane/60/2008 (GI: 223950973; FJ766840.1): SEQ ID NOs: 62467-62472, 94479-94484, 126491-126496, 158503-158508, 190515-190520, 222527-222532.
[0243] mRNA encoding NA protein of influenza B/Phuket/3073/2013): SEQ ID NOs: 62473-62474, 94485-94486, 126497-126498, 158509-158510, 190521-190522, 222533-222534.

[0244] Rabies:

[0245] In a particularly preferred embodiment of the first aspect of the invention the mRNA compound comprising an mRNA sequence comprises a coding region, encoding at least one antigenic peptide or protein derived from glycoprotein G of a Rabies virus or a fragment or variant thereof.

[0246] In this context, the amino acid sequence of the at least one antigenic peptide or protein may be selected from any peptide or protein derived from a glycoprotein of a Rabies virus or a fragment or variant or from any synthetically engineered Rabies virus peptide or protein.

[0247] In a preferred embodiment of the present invention the coding region encodes at least one antigenic peptide or protein derived from a glycoprotein of a Rabies virus or a fragment or variant thereof.

[0248] In this context it is particularly preferred that the at least one coding region encodes at least one full-length protein of a glycoprotein of a Rabies virus or a variant thereof.

[0249] As used herein, the term “full-length protein” preferably relates to the full-length sequence of protein indicated in the sequence listing of the present invention. More preferably, the term “full-length protein” preferably refers to an amino acid sequence as defined by any one of the SEQ ID NOs listed in the sequence listing (SEQ ID NOs: 30505-32012) or to an amino acid provided in the database under the respective database accession number.

[0250] In this context it is further preferred that the at least one coding sequence of the mRNA sequence of the present invention encodes at least one antigenic peptide or protein which is derived from a glycoprotein of a Rabies virus, or a fragment or variant thereof, wherein the glycoprotein of a Rabies virus is selected from the glycoprotein of a Rabies virus proteins listed in the sequence listing (see SEQ ID NOs: 1-32012 or SEQ ID NO: 224269 or SEQ ID NO: 224309 and explanation under the section “Preferred sequences of the present invention”). Therein, each glycoprotein of a Rabies virus is identified by the database accession number of the corresponding protein (see sequence listing numeric identifier <223> which indicates the Protein or Nucleic Acid Accession No. (GenBank)). If the respective Protein or Nucleic Acid Accession No. (GenBank) is searched further on in the sequence listing, the next SEQ ID NO: which show said Protein or Nucleic Acid Accession No. (GenBank) under numeric identifier <223> corresponding to the nucleic acid sequence of the wild type mRNA encoding said protein. If again the respective Protein or Nucleic Acid Accession No. (GenBank) is searched further on in the sequence listing, the next five SEQ ID NOs which show the respective Protein or Nucleic Acid Accession No. under numeric identifier <223> correspond to five modified/optimized nucleic acid sequences of the mRNAs as described herein that encode the protein preferably having the respective amino acid sequence as mentioned before (first entry having the respective Protein or Nucleic Acid Accession No. (GenBank)).

[0251] Particularly preferred in this context are the following glycoprotein sequences: SEQ ID NOs: 31986, 31073, 31102.

[0252] Furthermore, in this context the coding region encoding at least one antigenic peptide or protein derived from glycoprotein of a Rabies virus or a fragment, variant or derivative thereof, may be selected from any nucleic acid sequence comprising a coding region encoding glycoprotein derived from any Rabies virus isolate or a fragment or variant thereof.

[0253] In a preferred embodiment, the present invention thus provides an mRNA sequence comprising at least one coding region, wherein the coding region encoding glycoprotein of a Rabies virus comprises or consists any one of the nucleic acid sequences disclosed in the sequence listing (see explanation above; preferably SEQ ID NOs: 62517-64024; 224270, 224274, 94529-96036, 224271-224273, 126541-128048, 158553-160060, 190565-192072, 222577-224084) or a fragment or variant of any one of these sequences.

[0254] In these context it is particularly preferred that the mRNA sequence according to the invention comprises at least one coding region encoding a glycoprotein derived from any Rabies virus comprising an RNA sequence selected from RNA sequences being identical or at least 50%, 60%, 70%, 80%, 85%, 86%, 87%, 88%, 89%, 90%, 91%, 92%, 93%, 94%, 95%, 96%, 97%, 98%, or 99% identical to the RNA sequences as disclosed in the sequence listing (see explanation above; preferably SEQ ID NOs: 62517-64024; 224270, 224274, 94529-96036, 224271-224273, 126541-128048, 158553-160060, 190565-192072, 222577-224084) or a fragment or variant thereof.

[0255] In particularly preferred embodiments the mRNA sequence comprises at least one coding region encoding glycoprotein of a Rabies virus (RABV-G) comprising an RNA sequence selected from the following RNA sequences:

[0256] mRNA encoding glycoprotein of Rabies virus (Pasteur strain), preferably mRNA sequences according to SEQ ID NOs: 63998, 96010, 128022, 160034, 192046, 224058.

[0257] Ebola:

[0258] Ebola virus: Ebolaviruses and the genetically-related Marburgviruses are human pathogens that cause severe diseases. Ebolaviruses and Marburgviruses are filoviruses, which are enveloped viruses featuring a negative-stranded RNA genome. The family of Filoviridae comprises three genera: Ebolavirus, Marburgvirus and Cuevavirus. The genus of Cuevaviruses as well as Marburgviruses include only one species, i.e. Lloviu cuevavirus (Lloviu virus—LLOV) and Marburg marburgvirus, respectively, which is subdivided in Marburg virus (MARV) and Ravn virus (RAVV). The genus of Ebolaviruses comprises five known species, i.e. Bundibugyo ebolavirus (Bundibugyo virus—BDBV), Reston ebolavirus (Reston virus—RESTV), Sudan ebolavirus (Sudan virus—SUDV), Taï Forest ebolavirus (Tai Forest virus—TAFV) (=Côte d'Ivoire ebolavirus), and Zaire ebolavirus (Ebola virus—EBOV). While Cuevaviruses have been isolated from bats and their potential as a pathogen in humans remains unknown, both Ebolaviruses and Marburgviruses are human pathogens that cause Ebolavirus disease (EVD) and Marburgvirus disease, respectively, characterised by haemorrhagic fever and an extremely high mortality rate. In the context of the present invention, any virus, virus member, virus strain, virus type, virus sub-type, virus isolate, virus variant, or virus serotype or genetic reassortant of a virus belonging to or being related to or being derived from viruses of the families and genera listed above are considered to be a “Ebola virus”.

[0259] In a particularly preferred embodiment of the first aspect of the invention the mRNA compound comprising an mRNA sequence comprises a coding region, encoding at least one antigenic peptide or protein derived from the glycoprotein (GP) and/or the matrix protein 40 (VP40) and/or the nucleoprotein (NP) of a virus of the genus Ebolavirus or Marburgvirus or a fragment, variant or derivative thereof.

[0260] In this context, the amino acid sequence of the at least one antigenic peptide or protein may be selected from any peptide or protein derived from glycoprotein (GP) and/or the matrix protein 40 (VP40) and/or the nucleoprotein (NP) a glycoprotein of an Ebola virus or a fragment or variant or from any synthetically engineered Ebola virus peptide or protein.

[0261] In a preferred embodiment of the present invention the coding region encodes at least one antigenic peptide or protein derived from a glycoprotein of an Ebola virus or a fragment or variant thereof. In this context it is particularly preferred that the at least one coding region encodes at least one full-length protein of a glycoprotein of an Ebola virus or a variant thereof.

[0262] Particularly preferred in this context are the following Ebola glycoprotein amino acid sequences: SEQ ID NOs: 1 to 6 of the patent application WO2016097065, or fragments or variants of these sequences. In this context, SEQ ID NOs: 1 to 6 of WO2016097065 and the disclosure relating to SEQ ID NOs: 1 to 6 of WO2016097065 are incorporated herein by reference.

[0263] Particularly preferred in this context are the following Ebola VP40 amino acid sequences: SEQ ID NOs: 7 to 12 of the patent application WO2016097065, or fragments or variants of these sequences. In this context, SEQ ID NOs: 7 to 12 of WO2016097065 and the disclosure relating to SEQ ID NOs: 7 to 12 of WO2016097065 are incorporated herein by reference.

[0264] Particularly preferred in this context are the following Ebola NP amino acid sequences: SEQ ID NOs: 13 to 18 of the patent application WO2016097065, or fragments or variants of these sequences. In this context, SEQ ID NOs: 13 to 18 of WO2016097065 and the disclosure relating to SEQ ID NOs: 13 to 18 of WO2016097065 are incorporated herein by reference.

[0265] In a preferred embodiment, the present invention provides an mRNA sequence comprising at least one coding region, wherein the coding region encoding an antigenic peptide or protein as specified herein of a Ebola virus comprises or consists any one of the nucleic acid sequences according to SEQ ID NOs: 20 to 27 of the patent application WO2016097065, or fragments or variants of these sequences. In this context, SEQ ID NOs: 20 to 27 of WO2016097065 and the disclosure relating to SEQ ID NOs: 20 to 27 of WO2016097065 are incorporated herein by reference.

[0266] In particularly preferred embodiments the mRNA sequence comprises at least one coding region encoding glycoprotein of a Ebola virus. In particularly preferred embodiments the mRNA sequence comprises at least one coding region encoding VP40 of a Ebola virus. In particularly preferred embodiments the mRNA sequence comprises at least one coding region encoding NP of a Ebola virus.

[0267] In particularly preferred embodiments the mRNA sequence comprises at least one coding region encoding an antigenic peptide or protein of an Ebola virus comprising an RNA sequence selected from the following RNA sequences:
[0268] mRNA encoding GP protein of Ebola virus: SEQ ID NOs: 37-39 of the patent application WO2016097065, or fragments or variants of these sequences. In this context, SEQ ID NOs: 37-39 of WO2016097065 and the disclosure relating to SEQ ID NOs: 37-39 of WO2016097065 are incorporated herein by reference.
[0269] mRNA encoding VP40 of Ebola virus: SEQ ID NOs: 40-42 of the patent application WO2016097065, or fragments or variants of these sequences. In this context, SEQ ID NOs: 40-42 of WO2016097065 and the disclosure relating to SEQ ID NOs: 40-42 of WO2016097065 are incorporated herein by reference.
[0270] mRNA encoding NP of Ebola virus: SEQ ID NOs: 43-44 of the patent application WO2016097065, or fragments or variants of these sequences. In this context, SEQ ID NOs: 43-44 of WO2016097065 and the disclosure relating to SEQ ID NOs: 43-44 of WO2016097065 are incorporated herein by reference.

[0271] Particularly preferred is the mRNA sequence comprising a coding sequence encoding GP according to SEQ ID NO: 224362.

[0272] Tumour Antigens:

[0273] Preferably, the at least one coding sequence of the mRNA compound comprising an mRNA sequence according to the invention encodes a tumor antigen, preferably as defined herein, or a fragment or variant thereof, wherein the tumor antigen is preferably selected from the group consisting of 1A01_HLA-A/m; 1A02; 5T4; ACRBP; AFP; AKAP4; alpha-actinin-_4/m; alpha-methylacyl-coenzyme_A_racemase; ANDR; ART-4; ARTC1/m; AURKB; B2MG; B3GN5; B4GN1; B7H4; BAGE-1; BASI; BCL-2; bcr/abl; beta-catenin/m; BING-4; BIRC7; BRCA1/m; BY55; calreticulin; CAMEL; CASP-8/m; CASPA; cathepsin_B; cathepsin_L; CD1A; CD1B; CD1C; CD1D; CD1E; CD20; CD22; CD276; CD33; CD3E; CD3Z; CD44_Isoform_1; CD44_Isoform_6; CD4; CD52; CD55; CD56; CD80; CD86; CD8A; CDC27/m; CDE30; CDK4/m; CDKN2A/m; CEA; CEAM6; CH3L2; CLCA2; CML28; CML66; COA-1/m; coactosin-like_protein; collagen_XXIII; COX-2; CP1B1; CSAG2; CT45A1; CT55; CT-_9/BRD6; CTAG2_Isoform_LAGE-1A; CTAG2_Isoform_LAGE-1B; CTCFL; Cten; cyclin_B1; cyclin_D1; cyp-B; DAM-10; DEP1A; E7; EF1A2; EFTUD2/m; EGFR; EGLN3; ELF2/m; EMMPRIN; EpCam; EphA2; EphA3; ErbB3; ERBB4; ERG; ETV6; EWS; EZH2; FABP7; FCGR3A_Version_1; FCGR3A_Version_2; FGF5; FGFR2; fibronectin; FOS; FOXP3; FUT1; G250; GAGE-1; GAGE-2; GAGE-3; GAGE-4; GAGE-5; GAGE-6; GAGE7b; GAGE-8_(GAGE-2D); GASR; GnT-V; GPC3; GPNMB/m; GRM3; HAGE; hepsin; Her2/neu; HLA-A2/m; homeobox_NKX3.1; HOM-TES-85; HPG1; HS71A; HS71B; HST-2; hTERT; iCE; IF2B3; IL10; IL-13Ra2; IL2-RA; IL2-RB; IL2-RG; IL-5; IMP3; ITA5; ITB1; ITB6; kallikrein-2; kallikrein-4; KI20A; KIAA0205; KIF2C; KK-LC-1; LDLR; LGMN; LIRB2; LY6K; MAGA5; MAGA8; MAGAB; MAGE-A10; MAGE-A12; MAGE-A1; MAGE-A2; MAGE-A3; MAGE-A4; MAGE-A6; MAGE-A9; MAGE-B10; MAGE-B16; MAGE-B17; MAGE-_B1; MAGE-B2; MAGE-B3; MAGE-B4; MAGE-B5; MAGE-B6; MAGE-C1; MAGE-C2; MAGE-C3; MAGE-D1; MAGE-D2; MAGE-D4; MAGE-_E1; MAGE-E1_(MAGE1); MAGE-E2; MAGE-F1; MAGE-H1; MAGEL2; mammaglobin_A; MART-1/melan-A; MART-2; MC1_R; M-CSF; mesothelin; MITF; MMP1_1; MMP7; MUC-1; MUM-1/m; MUM-2/m; MYCN; MYO1A; MYO1B; MYO1C; MYO1D; MYO1E; MYO1F; MYO1G; MYO1H; NA17; NA88-A; Neo-PAP; NFYC/m; NGEP; NPM; NRCAM; NSE; NUF2; NY-ESO-1; OA1; OGT; OS-9; osteocalcin; osteopontin; p53; PAGE-4; PAI-1; PAI-2; PAP; PATE; PAX3; PAX5; PD1L1; PDCD1; PDEF; PECA1; PGCB; PGFRB; Pim-1_-Kinase; Pin-1; PLAC1; PMEL; PML; POTEF; POTE; PRAME; PRDX5/m; PRM2; prostein; proteinase-3; PSA; PSB9; PSCA; PSGR; PSM; PTPRC; RAB8A; RAGE-1; RARA; RASH; RASK; RASN; RGS5; RHAMM/CD168; RHOC; RSSA; RU1; RU2; RUNX1; S-100; SAGE; SART-_1; SART-2; SART-3; SEPR; SERPINB5; SIA7F; SIA8A; SIAT9; SIRT2/m; SOX10; SP17; SPNXA; SPXN3; SSX-1; SSX-2; SSX3; SSX-4; ST1A1; STAG2; STAMP-1; STEAP-1; Survivin-2B; survivin; SYCP1; SYT-SSX-1; SYT-SSX-2; TARP; TCRg; TF2AA; TGFB1; TGFR2; TGM-4; TIE2; TKTL1; TPI/m; TRGV11; TRGV9; TRPC1; TRP-p8; TSG10; TSPY1; TVC_(TRGV3); TX101; tyrosinase; TYRP1; TYRP2; UPA; VEGFR1; WT1; and XAGE1.

[0274] Further antigens useful for the present invention are shown herein below (gene names followed by bracket with protein accession NOs):

[0275] 1A01_HLA-A/m (UniProtKB: P30443); 1A02 (UniProtKB: P01892); 5T4 (UniProtKB: Q13641); ACRBP (UniProtKB: Q8NEB7); AFP (UniProtKB: P02771); AKAP4 (UniProtKB: Q5JQC9); alpha-actinin-_4/m (UniProtKB: B4DSX0); alpha-actinin-_4/m (UniProtKB: B4E337); alpha-actinin-_4/m (UniProtKB: 043707); alpha-methylacyl-coenzyme A_racemase (UniProtKB: AOA024RE16); alpha-methylacyl-coenzyme A_racemase (UniProtKB: A8KAC3); ANDR (UniProtKB: P10275); ART-4 (UniProtKB: Q9ULX3); ARTCi/m (UniProtKB: P52961); AURKB (UniProtKB: Q96GD4); B2MG (UniProtKB: P61769); B3GN5 (UniProtKB: Q9BYG0); B4GN1 (UniProtKB: Q00973); B7H4 (UniProtKB: Q7Z7D3); BAGE-1 (UniProtKB: Q13072); BASI (UniProtKB: P35613); BCL-2 (UniProtKB: A9QXG9); bcr/abl (UniProtKB: A9UEZ4); bcr/abl (UniProtKB: A9UEZ7); bcr/abl (UniProtKB: A9UEZ8); bcr/abl (UniProtKB: A9UEZ9); bcr/abl (UniProtKB: A9UF00); bcr/abl (UniProtKB: A9UF01); bcr/abl (UniProtKB: A9UF03); bcr/abl (UniProtKB: A9UF04); bcr/abl (UniProtKB: A9UF05); bcr/abl (UniProtKB: A9UF06); bcr/abl (UniProtKB: A9UF08); beta-catenin/m (UniProtKB: P35222); beta-catenin/m (UniProtKB: Q8WYA6); BING-4 (UniProtKB: 015213); BIRC7 (UniProtKB: Q96CA5); BRCA1/m (UniProtKB: AOA024R1V0); BRCA1/m (UniProtKB: AOA024R1V7); BRCA1/m (UniProtKB: AOA024RIZ8); BRCA1/m (UniProtKB: AOA068BFX7); BRCA1/m (UniProtKB: C6YB45); BRCA1/m (UniProtKB: C6YB47); BRCA1/m (UniProtKB: G3XAC3); BY55 (UniProtKB: 095971); calreticulin (UniProtKB: B4DHR1); calreticulin (UniProtKB: B4E2Y9); calreticulin (UniProtKB: P27797); calreticulin (UniProtKB: Q96L12); CAMEL (UniProtKB: 095987); CASP-8/m (UniProtKB: Q14790); CASPA (UniProtKB: Q92851-4); cathepsin_B (UniProtKB: AOA024R374); cathepsin_B (UniProtKB: P07858); cathepsin_L (UniProtKB: AOA024R276); cathepsin_L (UniProtKB: P07711); cathepsin_L (UniProtKB: Q9HBQ7); CD1A (UniProtKB: P06126); CD1B (UniProtKB: P29016); CD1C (UniProtKB: P29017); CD1D (UniProtKB: P15813); CD1E (UniProtKB: P15812); CD20 (UniProtKB: P11836); CD22 (UniProtKB: 060926); CD22 (UniProtKB: P20273); CD22 (UniProtKB: Q0EAF5); CD276 (UniProtKB: Q5ZPR3); CD33 (UniProtKB: B4DF51); CD33 (UniProtKB: P20138); CD33 (UniProtKB: Q546G0); CD3E (UniProtKB: P07766); CD3Z (UniProtKB: P20963); CD44_Isoform_1 (UniProtKB: P16070); CD44_Isoform_6 (UniProtKB: P16070-6); CD4 (UniProtKB: P01730); CD52 (UniProtKB: P31358); CD52 (UniProtKB: Q6IBD0); CD52 (UniProtKB: V9HWN9); CD55 (UniProtKB: B1AP15); CD55 (UniProtKB: D3DT85); CD55 (UniProtKB: D3DT86); CD55 (UniProtKB: P08174); CD56 (UniProtKB: P13591); CD80 (UniProtKB: A0N0P2); CD80 (UniProtKB: P33681); CD86 (UniProtKB: P42081); CD8A (UniProtKB: P01732); CDC27/m (UniProtKB: G5EA36); CDC27/m (UniProtKB: P30260); CDE30 (UniProtKB: P28908); CDK4/m (UniProtKB: AOA024RBB6); CDK4/m (UniProtKB: P11802); CDK4/m (UniProtKB: Q6LC83); CDK4/m (UniProtKB: Q96BE9); CDKN2A/m (UniProtKB: D1LYX3); CDKN2A/m (UniProtKB: G3XAG3); CDKN2A/m (UniProtKB: K7PML8); CDKN2A/m (UniProtKB: L8E941); CDKN2A/m (UniProtKB: Q8N726); CEA (RefSeq: NP_004354); CEAM6 (UniProtKB: P40199); CH3L2 (UniProtKB: Q15782); CLCA2 (UniProtKB: Q9UQC9); CML28 (UniProtKB: Q9NQT4); CML66 (UniProtKB: Q96RS6); COA-1/m (UniProtKB: Q5T124); coactosin-like_protein (UniProtKB: Q14019); collagen_XXIII (UniProtKB: L8EAS4); collagen_XXIII (UniProtKB: Q86Y22); COX-2 (UniProtKB: Q6ZYK7); CP1B1 (UniProtKB: Q16678); CSAG2 (UniProtKB: Q9Y5P2-2); CSAG2 (UniProtKB: Q9Y5P2); CT45A1 (UniProtKB: Q5HYN5); CT55 (UniProtKB: Q8WUE5); CT-_9/BRD6 (UniProtKB: Q58F21); CTAG2_Isoform_LAGE-1A (UniProtKB: 075638-2); CTAG2_Isoform_LAGE-1B (UniProtKB: 075638); CTCFL (UniProtKB: Q8NI51); Cten (UniProtKB: Q8IZW8); cyclin_B1 (UniProtKB: P14635); cyclin_D1 (UniProtKB: P24385); cyp-B (UniProtKB: P23284); DAM-10 (UniProtKB: P43366); DEP1A (UniProtKB: Q5TB30); E7 (UniProtKB: P03129); E7 (UniProtKB: P06788); E7 (UniProtKB: P17387); E7 (UniProtKB: P06429); E7 (UniProtKB: P27230); E7 (UniProtKB: P24837); E7 (UniProtKB: P21736); E7 (UniProtKB: P26558); E7 (UniProtKB: P36831); E7 (UniProtKB: P36833); E7 (UniProtKB: Q9QCZ1); E7 (UniProtKB: Q81965); E7 (UniProtKB: Q80956); EF1A2 (UniProtKB: Q05639); EFTUD2/m (UniProtKB: Q15029); EGFR (UniProtKB: A0A0B4J1Y5); EGFR (UniProtKB: E7BSV0); EGFR (UniProtKB: L0R6G1); EGFR (UniProtKB: P00533-2); EGFR (UniProtKB: P00533); EGFR (UniProtKB: Q147T7); EGFR (UniProtKB: Q504U8); EGFR (UniProtKB: Q8NDU8); EGLN3 (UniProtKB: Q9H6Z9); ELF2/m (UniProtKB: B7Z720); EMMPRIN (UniProtKB: Q54A51); EpCam (UniProtKB: P16422); EphA2 (UniProtKB: P29317); EphA3 (UniProtKB: P29320); EphA3 (UniProtKB: Q6P4R6); ErbB3 (UniProtKB: B3KWG5); ErbB3 (UniProtKB: B4DGQ7); ERBB4 (UniProtKB: Q15303); ERG (UniProtKB: P11308); ETV6 (UniProtKB: P41212); EWS (UniProtKB: Q01844); EZH2 (UniProtKB: F2YMM1); EZH2 (UniProtKB: G3XAL2); EZH2 (UniProtKB: L0R855); EZH2 (UniProtKB: Q15910); EZH2 (UniProtKB: S4S3R8); FABP7 (UniProtKB: 015540); FCGR3A_Version_1 (UniProtKB: P08637); FCGR3A_Version_2 (CCDS: CCDS1232.1); FGF5 (UniProtKB: P12034); FGF5 (UniProtKB: Q60518); FGFR2 (UniProtKB: P21802); fibronectin (UniProtKB: AOA024R5I6); fibronectin (UniProtKB: AOA024RB01); fibronectin (UniProtKB: AOA024RDT9); fibronectin (UniProtKB: AOA024RDV5); fibronectin (UniProtKB: A6NH44); fibronectin (UniProtKB: A8K6A5); fibronectin (UniProtKB: B2R627); fibronectin (UniProtKB: B3KXM5); fibronectin (UniProtKB: B4DIC5); fibronectin (UniProtKB: B4DN21); fibronectin (UniProtKB: B4DS98); fibronectin (UniProtKB: B4DTH2); fibronectin (UniProtKB: B4DTK1); fibronectin (UniProtKB: B4DU16); fibronectin (UniProtKB: B7Z3W5); fibronectin (UniProtKB: B7Z939); fibronectin (UniProtKB: G5E9X3); fibronectin (UniProtKB: Q9H382); FOS (UniProtKB: P01100); FOXP3 (UniProtKB: Q9BZS1); FUT1 (UniProtKB: P19526); G250 (UniProtKB: Q16790); GAGE-1 (Genbank: AAA82744); GAGE-2 (UniProtKB: Q6NT46); GAGE-3 (UniProtKB: Q13067); GAGE-4 (UniProtKB: Q13068); GAGE-5 (UniProtKB: Q13069); GAGE-6 (UniProtKB: Q13070); GAGE7b (UniProtKB: 076087); GAGE-8_(GAGE-2D) (UniProtKB: Q9UEU5); GASR (UniProtKB: P32239); GnT-V (UniProtKB: Q09328); GPC3 (UniProtKB: I6QTG3); GPC3 (UniProtKB: P51654); GPC3 (UniProtKB: Q8IYG2); GPNMB/m (UniProtKB: AOA024RA55); GPNMB/m (UniProtKB: Q14956); GPNMB/m (UniProtKB: Q8IXJ5); GPNMB/m (UniProtKB: Q96F58); GRM3 (UniProtKB: Q14832); HAGE (UniProtKB: Q9NXZ2); hepsin (UniProtKB: B2ZDQ2); hepsin (UniProtKB: P05981); Her2/neu (UniProtKB: B4DTR1); Her2/neu (UniProtKB: L8E8G2); Her2/neu (UniProtKB: P04626); Her2/neu (UniProtKB: Q9UK79); HLA-A2/m (UniProtKB: Q95387); HLA-A2/m (UniProtKB: Q9MYF8); homeobox_NKX3.1 (UniProtKB: Q99801); HOM-TES-85 (UniProtKB: B2RBQ6); HOM-TES-85 (UniProtKB: Q9P127); HPG1 (Pubmed: 12543784); HS71A (UniProtKB: P0DMV8); HS71B (UniProtKB: P0DMV9); HST-2 (UniProtKB: P10767); hTERT (UniProtKB: 094807); iCE (UniProtKB: 000748); IF2B3 (UniProtKB: 000425); IL10 (UniProtKB: P22301); IL-13Ra2 (UniProtKB: Q14627); IL2-RA (UniProtKB: P01589); IL2-RB (UniProtKB: P14784); IL2-RG (UniProtKB: P31785); IL-5 (UniProtKB: P05113); IMP3 (UniProtKB: Q9NV31); ITA5 (UniProtKB: P08648); ITB1 (UniProtKB: P05556); ITB6 (UniProtKB: P18564); kallikrein-2 (UniProtKB: AOA024R4J4); kallikrein-2 (UniProtKB: AOA024R4N3); kallikrein-2 (UniProtKB: B0AZU9); kallikrein-2 (UniProtKB: B4DU77); kallikrein-2 (UniProtKB: P20151); kallikrein-2 (UniProtKB: Q6T774); kallikrein-2 (UniProtKB: Q6T775); kallikrein-4 (UniProtKB: A0A0C4DFQ5); kallikrein-4 (UniProtKB: Q5BQA0); kallikrein-4 (UniProtKB: Q96PTO); kallikrein-4 (UniProtKB: Q96PT1); kallikrein-4 (UniProtKB: Q9Y5K2); KI20A (UniProtKB: 095235); KIAA0205 (UniProtKB: Q92604); KIF2C (UniProtKB: Q99661); KK-LC-1 (UniProtKB: Q5H943); LDLR (UniProtKB: P01130); LGMN (UniProtKB: Q99538); LIRB2 (UniProtKB: Q8N423); LY6K (UniProtKB: Q17RY6); MAGA5 (UniProtKB: P43359); MAGA8 (UniProtKB: P43361); MAGAB (UniProtKB: P43364); MAGE-A10 (UniProtKB: AOA024RC14); MAGE-A12 (UniProtKB: P43365); MAGE-A1 (UniProtKB: P43355); MAGE-A2 (UniProtKB: P43356); MAGE-A3 (UniProtKB: P43357); MAGE-A4 (UniProtKB: AOA024RC12); MAGE-A4 (UniProtKB: P43358); MAGE-A4 (UniProtKB: Q1RN33); MAGE-A6 (UniProtKB: A8K072); MAGE-A6 (UniProtKB: P43360); MAGE-A6 (UniProtKB: Q6FHI5); MAGE-A9 (UniProtKB: P43362); MAGE-B10 (UniProtKB: Q96LZ2); MAGE-B16 (UniProtKB: A2A368); MAGE-B17 (UniProtKB: A8MXT2); MAGE-B1 (UniProtKB: Q96TG1); MAGE-B2 (UniProtKB: 015479); MAGE-B3 (UniProtKB: 015480); MAGE-B4 (UniProtKB: 015481); MAGE-B5 (UniProtKB: Q9BZ81); MAGE-B6 (UniProtKB: Q8N7X4); MAGE-C1 (UniProtKB: 060732); MAGE-C2 (UniProtKB: Q9UBF1); MAGE-C3 (UniProtKB: Q8TD91); MAGE-D1 (UniProtKB: Q9Y5V3); MAGE-D2 (UniProtKB: Q9UNF1); MAGE-D4 (UniProtKB: Q96JG8); MAGE-_E1 (UniProtKB: Q6IAI7); MAGE-E1_(MAGE1) (UniProtKB: Q9HCI5); MAGE-E2 (UniProtKB: Q8TD90); MAGE-F1 (UniProtKB: Q9HAY2); MAGE-H1 (UniProtKB: Q9H213); MAGEL2 (UniProtKB: Q9UJ55); mammaglobin_A (UniProtKB: Q13296); mammaglobin_A (UniProtKB: Q6NX70); MART-1/melan-A (UniProtKB: Q16655); MART-2 (UniProtKB: Q5VTY9); MC1_R (UniProtKB: Q01726); MC1_R (UniProtKB: Q1JUL4); MC1_R (UniProtKB: Q1JUL6); MC1_R (UniProtKB: Q1JUL8); MC1_R (UniProtKB: Q1JUL9); MC1_R (UniProtKB: Q1JUM0); MC1_R (UniProtKB: Q1JUM2); MC1_R (UniProtKB: Q1JUM3); MC1_R (UniProtKB: Q1JUM4); MC1_R (UniProtKB: Q1JUM5); MC1_R (UniProtKB: Q6UR92); MC1_R (UniProtKB: Q6UR94); MC1_R (UniProtKB: Q6UR95); MC1_R (UniProtKB: Q6UR96); MC1_R (UniProtKB: Q6UR97); MC1_R (UniProtKB: Q6UR98); MC1_R (UniProtKB: Q6UR99); MC1_R (UniProtKB: Q6URA0); MC1_R (UniProtKB: Q86YW1); MC1_R (UniProtKB: V9Q5S2); MC1_R (UniProtKB: V9Q671); MC1_R (UniProtKB: V9Q783); MC1_R (UniProtKB: V9Q7F1); MC1_R (UniProtKB: V9Q8N1); MC1_R (UniProtKB: V9Q977); MC1_R (UniProtKB: V9Q9P5); MC1_R (UniProtKB: V9Q9R8); MC1_R (UniProtKB: V9QAE0); MC1_R (UniProtKB: V9QAR2); MC1_R (UniProtKB: V9QAW3); MC1_R (UniProtKB: V9QB02); MC1_R (UniProtKB: V9QB58); MC1_R (UniProtKB: V9QBY6); MC1_R (UniProtKB: V9QC17); MC1_R (UniProtKB: V9QC66); MC1_R (UniProtKB: V9QCQ4); MC1_R (UniProtKB: V9QDF4); MC1_R (UniProtKB: V9QDN7); MC1_R (UniProtKB: V9QDQ6); M-CSF (UniProtKB: P09603); mesothelin (UniProtKB: Q13421); MITF (UniProtKB: 075030-8); MITF (UniProtKB: 075030-9); MITF (UniProtKB: 075030); MMP1_1 (UniProtKB: B3KQS8); MMP7 (UniProtKB: P09237); MUC-1 (Genbank: AAA60019); MUM-1/m (RefSeq: NP_116242); MUM-2/m (UniProtKB: Q9Y5R8); MYCN (UniProtKB: P04198); MYO1A (UniProtKB: Q9UBC5); MYO1B (UniProtKB: 043795); MYO1C (UniProtKB: 000159); MYO1D (UniProtKB: 094832); MYO1E (UniProtKB: Q12965); MYO1F (UniProtKB: 000160); MYO1G (UniProtKB: B0I1T2); MYO1H (RefSeq: NP_001094891); NA17 (UniProtKB: Q3V5L5); NA88-A (Pubmed: 10790436); Neo-PAP (UniProtKB: Q9BWT3); NFYC/m (UniProtKB: Q13952); NGEP (UniProtKB: Q6IWH7); NPM (UniProtKB: P06748); NRCAM (UniProtKB: Q92823); NSE (UniProtKB: P09104); NUF2 (UniProtKB: Q9BZD4); NY-ESO-1 (UniProtKB: P78358); OA1 (UniProtKB: P51810); OGT (UniProtKB: 015294); OS-9 (UniProtKB: B4DH11); OS-9 (UniProtKB: B4E321); OS-9 (UniProtKB: B7Z8E7); OS-9 (UniProtKB: Q13438); osteocalcin (UniProtKB: P02818); osteopontin (UniProtKB: AOA024RDE2); osteopontin (UniProtKB: AOA024RDE6); osteopontin (UniProtKB: AOA024RDJ0); osteopontin (UniProtKB: B7Z351); osteopontin (UniProtKB: F2YQ21); osteopontin (UniProtKB: P10451); p53 (UniProtKB: P04637); PAGE-4 (UniProtKB: 060829); PAI-1 (UniProtKB: P05121); PAI-2 (UniProtKB: P05120); PAP (UniProtKB: Q06141); PAP (UniProtKB: Q53S56); PATE (UniProtKB: Q8WXA2); PAX3 (UniProtKB: P23760); PAX5 (UniProtKB: Q02548); PD1L1 (UniProtKB: Q9NZQ7); PDCD1 (UniProtKB: Q15116); PDEF (UniProtKB: 095238); PECA1 (UniProtKB: P16284); PGCB (UniProtKB: Q96GW7); PGFRB (UniProtKB: P09619); Pim-1_-Kinase (UniProtKB: AOA024RD25); Pin-1 (UniProtKB: 015428); Pin-1 (UniProtKB: Q13526); Pin-1 (UniProtKB: Q49AR7); PLAC1 (UniProtKB: Q9HBJ0); PMEL (UniProtKB: P40967); PML (UniProtKB: P29590); POTEF (UniProtKB: A5A3E0); POTE (UniProtKB: Q86YR6); PRAME (UniProtKB: AOA024R1E6); PRAME (UniProtKB: P78395); PRDX5/m (UniProtKB: P30044); PRM2 (UniProtKB: P04554); prostein (UniProtKB: Q96JT2); proteinase-3 (UniProtKB: D6CHE9); proteinase-3 (UniProtKB: P24158); PSA (UniProtKB: P55786); PSB9 (UniProtKB: P28065); PSCA (UniProtKB: D3DWI6); PSCA (UniProtKB: 043653); PSGR (UniProtKB: Q9H255); PSM (UniProtKB: Q04609); PTPRC (RefSeq: NP_002829); RAB8A (UniProtKB: P61006); RAGE-1 (UniProtKB: Q9UQ07); RARA (UniProtKB: P10276); RASH (UniProtKB: P01112); RASK (UniProtKB: P01116); RASN (UniProtKB: P01111); RGS5 (UniProtKB: 015539); RHAMM/CD168 (UniProtKB: 075330); RHOC (UniProtKB: P08134); RSSA (UniProtKB: P08865); RU1 (UniProtKB: Q9UHJ3); RU2 (UniProtKB: Q9UHG0); RUNX1 (UniProtKB: Q01196); S-100 (UniProtKB: V9HW39); SAGE (UniProtKB: Q9NXZ1); SART-_1 (UniProtKB: 043290); SART-2 (UniProtKB: Q9UL01); SART-3 (UniProtKB: Q15020); SEPR (UniProtKB: Q12884); SERPINB5 (UniProtKB: P36952); SIA7F (UniProtKB: Q969X2); SIA8A (UniProtKB: Q92185); SIAT9 (UniProtKB: Q9UNP4); SIRT2/m (UniProtKB: AOA024ROG8); SIRT2/m (UniProtKB: Q8IXJ6); SOX10 (UniProtKB: P56693); SP17 (UniProtKB: Q15506); SPNXA (UniProtKB: Q9NS26); SPXN3 (UniProtKB: Q5MJ09); SSX-1 (UniProtKB: Q16384); SSX-2 (UniProtKB: Q16385); SSX3 (UniProtKB: Q99909); SSX-4 (UniProtKB: 060224); ST1A1 (UniProtKB: P50225); STAG2 (UniProtKB: Q8N3U4-2); STAMP-1 (UniProtKB: Q8NFT2); STEAP-1 (UniProtKB: AOA024RA63); STEAP-1 (UniProtKB: Q9UHE8); Survivin-2B (UniProtKB: 015392-2); survivin (UniProtKB: 015392); SYCP1 (UniProtKB: AOA024ROI2); SYCP1 (UniProtKB: B7ZLS9); SYCP1 (UniProtKB: Q15431); SYCP1 (UniProtKB: Q3MHC4); SYT-SSX-1 (UniProtKB: A4PIV7); SYT-SSX-1 (UniProtKB: A4PIV8); SYT-SSX-2 (UniProtKB: A4PIV9); SYT-SSX-2 (UniProtKB: A4PIW0); TARP (UniProtKB: Q0VGM3); TCRg (UniProtKB: A2JGV3); TF2AA (UniProtKB: P52655); TGFB1 (UniProtKB: P01137); TGFR2 (UniProtKB: P37173); TGM-4 (UniProtKB: B2R7D1); TIE2 (UniProtKB: Q02763); TKTL1 (UniProtKB: P51854); TPI/m (UniProtKB: P60174); TRGV11 (UniProtKB: Q99601); TRGV9 (UniProtKB: A4D1X2); TRGV9 (UniProtKB: Q99603); TRGV9 (UniProtKB: Q99604); TRPC1 (UniProtKB: P48995); TRP-p8 (UniProtKB: Q7Z2W7); TSG10 (UniProtKB: Q9BZW7); TSPY1 (UniProtKB: Q01534); TVC_(TRGV3) (Genbank: M13231.1); TX101 (UniProtKB: Q9BY14-2); tyrosinase (UniProtKB: AOA024DBG7); tyrosinase (UniProtKB: L8B082); tyrosinase (UniProtKB: L8B086); tyrosinase (UniProtKB: L8B0B9); tyrosinase (UniProtKB: 075767); tyrosinase (UniProtKB: P14679); tyrosinase (UniProtKB: U3M8NO); tyrosinase (UniProtKB: U3M9D5); tyrosinase (UniProtKB: U3M9J2); TYRP1 (UniProtKB: P17643); TYRP2 (UniProtKB: P40126); UPA (UniProtKB: Q96NZ9); VEGFR1 (UniProtKB: B5A924); WT1 (UniProtKB: A0A0H5AUY0); WT1 (UniProtKB: P19544); WT1 (UniProtKB: Q06250); XAGE1 (UniProtKB: Q9HD64).

[0276] Checkpoint Inhibitors

[0277] Negative regulatory T cell surface molecules were discovered, which are upregulated in activated T cells in order to dampen their activity, thus reducing the effectiveness of said activated T cells in the killing of tumor cells. These inhibitory molecules were termed negative co-stimulatory molecules due to their homology to the T cell co-stimulatory molecule CD28. These proteins, also referred to as immune checkpoint proteins, function in multiple pathways including the attenuation of early activation signals, competition for positive costimulation and direct inhibition of antigen presenting cells (Bour-Jordan et al., 2011. Immunol Rev. 241(1):180-205).

[0278] In the context of the present invention, a checkpoint modulator is typically a molecule, such as a protein (e.g. an antibody), a dominant negative receptor, a decoy receptor, or a ligand or a fragment or variant thereof, which modulates the function of an immune checkpoint protein, e.g. it inhibits or reduces the activity of checkpoint inhibitors (or inhibitory checkpoint molecules) or it stimulates or enhances the activity of checkpoint stimulators (or stimulatory checkpoint molecules). Therefore, checkpoint modulators as defined herein, influence the activity of checkpoint molecules.

[0279] In this context, inhibitory checkpoint molecules are defined as checkpoint inhibitors and can be used synonymously. In addition, stimulatory checkpoint molecules are defined as checkpoint stimulators and can be used synonymously.

[0280] Preferably, the checkpoint modulator is selected from agonistic antibodies, antagonistic antibodies, ligands, dominant negative receptors, and decoy receptors or combinations thereof.

[0281] Methods for generating and using mRNA-encoded antibodies are known in the art (e.g. WO2008/083949 or PCT/EP2017/060226).

[0282] Preferred inhibitory checkpoint molecules that may be inhibited by a checkpoint modulator in the context of the invention are PD-1, PD-L1, CTLA-4, PD-L2, LAG3, TIM3/HAVCR2, 2B4, A2aR, B7H3, B7H4, BTLA, CD30, CD160, CD155, GAL9, HVEM, IDO1, IDO2, KIR, LAIR1 and VISTA.

[0283] Preferred stimulatory checkpoint molecules that may be stimulated by a checkpoint modulator in the context of the invention are CD2, CD27, CD28, CD40, CD137, CD226, CD276, GITR, ICOS, OX40 and CD70.

[0284] According to a preferred embodiment, the pharmaceutical composition or vaccine comprising RNAs of the invention is for use as described herein, wherein the use comprises—as an additional pharmaceutically active ingredient—a checkpoint modulator selected from the group consisting of the checkpoint modulator is selected from the group consisting of a PD-1 inhibitor, a PD-L1 inhibitor, a PD-L2 inhibitor, a CTLA-4 inhibitor, a LAG3 inhibitor, a TIM3 inhibitor, a TIGIT-inhibitor, an OX40 stimulator, a 4-1BB stimulator, a CD40L stimulator, a CD28 stimulator and a GITR stimulator.

[0285] According to a preferred embodiment, the checkpoint modulator as used herein targets a member of the PD-1 pathway. Members of the PD-1 pathway are typically proteins, which are associated with PD-1 signaling. On the one hand, this group comprises proteins, which induce PD-1 signaling upstream of PD-1 as e.g. the ligands of PD-1, PD-L1 and PD-L2, and the signal transduction receptor PD-1. On the other hand, this group comprises signal transduction proteins downstream of PD-1 receptor. Particularly preferred as members of the PD-1 pathway in the context of the present invention are PD-1, PD-L1 and PD-L2.

[0286] In the context of the present invention, a PD-1 pathway antagonist (or PD-1 inhibitor) is preferably defined herein as a compound capable to impair the PD-1 pathway signaling, preferably signaling mediated by the PD-1 receptor. Therefore, the PD-1 pathway antagonist may be any antagonist directed against any member of the PD-1 pathway capable of antagonizing PD-1 pathway signaling.

[0287] In a preferred embodiment, the checkpoint modulator used herein is a PD-1 inhibitor or a PD-L1 inhibitor, wherein the PD-1 inhibitor is preferably an antagonistic antibody directed against PD-1 and the PD-L1 inhibitor is preferably an antagonistic antibody directed against PD-L1.

[0288] In this context, the antagonist may be an antagonistic antibody as defined herein, targeting any member of the PD-1 pathway, preferably an antagonistic antibody directed against PD-1 receptor, PD-L1 or PD-L2. Such an antagonistic antibody may also be encoded by a nucleic acid. Also, the PD-1 pathway antagonist may be a fragment of the PD-1 receptor blocking the activity of PD1 ligands. B7-1 or fragments thereof may act as PD1-antagonizing ligands as well. Additionally, a PD-1 pathway antagonist may be a protein comprising (or a nucleic acid coding for) an amino acid sequence capable of binding to PD-1 but preventing PD-1 signaling, e.g. by inhibiting PD-1 and B7-H1 or B7-DL interaction (WO 2014/127917; WO2012062218).

[0289] Particularly preferred are the anti-PD1 antibodies Nivolumab (MDX-1106/BMS-936558/ONO-4538), (Brahmer et al., 2010. J Clin Oncol. 28(19):3167-75; PMID: 20516446); Pidilizumab (CT-011), (Berger et al., 2008. Clin Cancer Res. 14(10):3044-51; PMID: 18483370); Pembrolizumab (MK-3475, SCH 900475); AMP-224, and MEDI0680 (AMP-514).

[0290] Particularly preferred are also the anti-PD-L1 antibodies MDX-1105/BMS-936559 (Brahmer et al. 2012. N Engl J Med. 366(26):2455-65; PMID: 22658128); atezolizumab (MPDL3280A/RG7446); durvalumab (MEDI4736); and avelumab (MSB0010718).

[0291] According to another embodiment, the checkpoint modulator used herein is an OX40 stimulator. OX40 is a member of the TNFR-superfamily of receptors, and is expressed on the surface of antigen-activated mammalian CD4+ and CD8+T lymphocytes. OX40 ligand (OX40L, also known as gp34, ACT-4-L, and CD252) is a protein that specifically interacts with the OX40 receptor. The term OX40L includes the entire OX40 ligand, soluble OX40 ligand, and fusion proteins comprising a functionally active portion of OX40 ligand covalently linked to a second moiety, e.g., a protein domain. Also included within the definition of OX40L are variants which vary in amino acid sequence from naturally occurring OX40L, but which retain the ability to specifically bind to the OX40 receptor. Further included within the definition of OX40L are variants thereof, which enhance the biological activity of OX40. An OX40 agonist is a molecule which induces or enhances the biological activity of OX40, e.g. signal transduction mediated by OX40. An OX40 agonist is preferably defined herein as a binding molecule capable of specific binding to OX40. Therefore, the OX40 agonist may be any agonist binding to OX40 and capable of stimulating OX40 signaling. In this context, the OX40 agonist may be an agonistic antibody binding to OX40.

[0292] OX40 agonists and anti-0X40 monoclonal antibodies are described in WO1995/021251, WO1995/012673 and WO1995/21915. Particularly preferred is the anti-0X40 antibody 9B12, a murine anti-0X40 monoclonal antibody directed against the extracellular domain of human OX40 (Weinberg et al., 2006. J. Immunother. 29(6):575-585).

[0293] In another embodiment, the checkpoint modulator as used herein is an antagonistic antibody is selected from the group consisting of anti-CTLA4, anti-PD1, anti-PD-L1, anti-Vista, anti-Tim-3, anti-TIGIT, anti-LAG-3, and anti-BTLA.

[0294] Preferably, an anti-CTLA4 antibody that may be used as a checkpoint modulator is directed against Cytotoxic T lymphocyte antigen-4 (CTLA-4). CTLA-4 is mainly expressed within the intracellular compartment of T cells. After a potent or long-lasting stimulus to a naïve T cell via the T cell receptor (TCR), CTLA-4 is transported to the cell surface and concentrated at the immunological synapse. CTLA-4 then competes with CD28 for CD80/CD86 and down-modulates TCR signaling via effects on Akt signaling. Thus CTLA-4 functions physiologically as a signal dampener (Weber, J. 2010. Semin. Oncol. 37(5):430-9).

[0295] In preferred embodiments, the pharmaceutical composition or vaccine comprising RNAs of the invention is for use as described herein, wherein the use comprises—as an additional pharmaceutically active ingredient—a CTLA4 antagonist, which is preferably an antagonistic antibody directed against CTLA4 (anti-CTLA4 antibody). The term ‘CTLA4 antagonist’ as used herein comprises any compound, such as an antibody, that antagonizes the physiological function of CTLA4. In the context of the present invention, the term ‘anti-CTLA4 antibody’ may refer to an antagonistic antibody directed against CTLA4 (or a functional fragment or variant of said antibody) or to a nucleic acid, preferably an RNA, encoding said antagonistic antibody (or a functional fragment thereof). A functional fragment or variant of an anti-CTLA4 antibody preferably acts as a CTLA4 antagonist. More preferably, the term ‘anti-CTLA4 antibody’ refers to a monoclonal antibody directed against CTLA4 (or a functional fragment or variant of such an antibody) or to a nucleic acid encoding a monoclonal antibody directed against CTLA4 (or a functional fragment or variant of such an antibody). The term ‘anti-CTLA4 antibody’ as used herein may refer to the heavy or light antibody chain, respectively, or also refer to both antibody chains (heavy and light chain), or to a fragment or variant of any one of these chains. Preferably, the fragment or variant of an anti-CTLA4 antibody as used herein is a functional fragment or variant, preferably as described herein.

[0296] Particularly preferred are the anti-CTLA-4 antibodies ipilimumab (Yervoy®), tremelimumab, and AGEN-1884. Further preferred anti-CTLA4 antibodies as used herein comprise BMS 734016; BMS-734016; BMS734016; MDX 010; MDX 101; MDX-010; MDX-101; MDX-CTLA-4; MDX-CTLA4; MDX010; Winglore; and Yervoy, or a functional fragment or variant of any one of these antibodies.

[0297] According to a further embodiment, the checkpoint modulator as used herein is at least one antibody described in Table 1 or a fragment or variant thereof

TABLE 1
Antibodies directed against checkpoint molecμles

| Name | Target |
|---|---|
| Urelumab | 4-1BB/CD137 |
| PF-05082566 | 4-1BB/CD137 |
| 8H9 | B7-H3 |
| Enoblituzumab | B7-H3 |
| Ipilimumab | CD152/CTLA-4 |
| Ticilimumab (=tremelimumab) | CD152/CTLA-4 |
| Tremelimumab | CD152/CTLA-4 |
| Varlilumab | CD27 |
| Teneliximab | CD40 |
| Vorsetuzumab mafodotin | CD70 |
| Lirilumab | KIR2D |
| GSK-3174998 | OX40 |
| MEDI-6469 | OX40 |
| MEDI-6383 | OX40 |
| MEDI-0562 | OX40 |
| PF-04518600 | OX40 |
| RG-7888 | OX40 |
| PF-06801591 | PD-1 |
| BGBA-317 | PD-1 |
| MEDI-0680 | PD-1 |
| MK-3475 | PD-1 |
| Nivolumab | PD-1 |
| PDR-001 | PD-1 |
| Pembrolizumab | PD-1 |
| Pidilizumab | PD-1 |
| REGN-2810 | PD-1 |
| SHR-1210 | PD-1 |
| TSR-042 | PD-1 |
| MDX-1106 | PD-1 |
| Merck 3745 | PD-1 |
| CT-011 | PD-1 |
| MEDI-0680 | PD-1 |
| PDR001 | PD-1 |
| REGN2810 | PD-1 |
| BGB-108 | PD-1 |
| BGB-A317 | PD-1 |
| AMP-224 | PD-1 |
| Atezolizumab | PD-L1 (CD274) |
| Avelumab | PD-L1 (CD274) |
| BMS-936559 | PD-L1 (CD274) |
| Durvalumab | PD-L1 (CD274) |
| MEDI-4736 | PD-L1 (CD274) |
| MPDL33280A | PD-L1 (CD274) |
| YW243.55.S70 | PD-L1 (CD274) |
| MDX-1105 | PD-L1 (CD274) |
| MSB0010718C | PD-L1 (CD274) |

[0298] Standard Therapy

[0299] More preferably, the subject receiving the pharmaceutical composition or vaccine comprising RNAs of the invention, the combination thereof or the pharmaceutical composition or vaccine comprising said RNA(s) is a patient suffering from a tumor or cancer disease as described herein and who received or receives chemotherapy (e.g. first-line or second-line chemotherapy), radiotherapy, chemoradiation (combination of chemotherapy and radiotherapy), kinase inhibitors, antibody therapy and/or checkpoint modulators (e.g. CTLA4 inhibitors, PD1 pathway inhibitors), or a patient, who has achieved partial response or stable disease after having received one or more of the treatments specified above. More preferably, the subject is a patient suffering from a tumor or cancer disease as described herein and who received or receives a compound conventionally used in any of these diseases as described herein, more preferably a patient who receives or received a checkpoint modulator.

[0300] The following compounds are preferred compounds which preferably are used in standard therapies and can be applied in combination with the pharmaceutical compositions or vaccines comprising RNAs of the invention: Cetuximab (Erbitux), paclitaxel albumin bound (Abraxane), (gimeracil+oteracil+tegafur) (TS-1), Docetaxel (Docetaxel, Doxel, Taxotere, Docetaxel An, Docel, Nanoxel M, Tautax, Docetaxel-AS, Docetaxel-M, Qvidadotax, Relidoce, Taxelo, Oncodocel, Doxotel, Pacancer, Docetrust, Dodetax, Dodabur, Soulaxcin, Taxedol, Docefim, Docetaxel, Ribodocel, Critidoc, Asodoc, Chemodoc, Docelibbs, Docenat, Dincilezan, Dostradixinol, Docefrez, Camitotic, Oncotaxel, Somatixel, Belotaxel, Qvidadotax, Taxceus, Cetadocure, Docetaxel CT, Tevaxter, Docirena, Eurotere, Axtere, Celotax, Taxanit, Drobanos, Cetado, Doxocad, Taxceus, Egidox, Tedocad, Docecad, Docelex, Docetax, Docetaxel, Docetere, Dotax, Taxuba, Monotaxel, Taceedo, Detaxl, Docet, Docetaxel, Ferdotax, Wintaxel), (tegafur+uracil) (Uft, Uft E, Tefudex, Unitoral, Luporal, Tagracil), Fluorouracil (5-FU), (gimeracil+oteracil+tegafur) ODT (TS-1 Combination OD), bleomycin sulfate (Tecnomicina, Cinaleo, Bleomycin, Bloicin-S, Bonar, Bleocin, Bleomycin Sulfate, Bleo, Bleocel, Bleotex, Oncobleo, Bleonco, Bleosol, Lyoble, Bleomycin Sulfate, Blenamax, Bleomycin, Blenoxane, Bleomicina, Bleomycine Bellon, Bleoprim), carboplatin (Carboplatin, Platamine CS, Carbaccord, Carboplatina, Carboplatino, Paraplatin, Carbosin, Tecnocarb, Carbomerck, Paract, Carboplatine CTRS, Carboplatine Intsel Chimos, Carboplatin, Carbokem, Carbotinol, Fauldcarbo, Evocarb, Citoplatina, Platin), ciprofloxacin (Hypoflox, Ufexil), ciprofloxacin hydrochloride (Ciprofloxacin Pharma, Prodin, Ciproxin), cisplatin (Cisplatin, Stritin, Ifapla, Accocit, Unistin, Cancertin, Cisplan, Citoplax, Nuoxin, Placis, Cisplatino, Displanor, Randa, Cispla, Fauldcispla, Briplatin, Platinex, Platinol, Platinex, Riboplatin, Cisplatine, Platistine CS, Platosin, Accocit, Cisplatino) cyclophosphamide (Endoxan, Cyclophosphamide), doxifluridine (Doxifluridine, May Vladimir), doxorubicin (Doxorubicin Hydrochloride, Adriamycin RDF, Doxorubicin, Doxorubicin PFS), epirubicin, hydrochloride (Brecila, Cloridrato De Epirrubicina, Epirubicin, Farmorubicina, Nuovodox, Adnexa, 4-Eppedo, Favicin), fluorouracil (Agicil, Fluorouracil, Fauldfluor, Oncourcil, Flocil, 5 Flucel), folic acid+methotrexate (Truxofol), human adenovirus type 5 (recombinant) (Oncorine), hydroxyurea (Oxyrea, Durea, Myelostat, Riborea, Unidrea, Ondrea, Hydran, Leukocel, Hydroxyurea, Hydrea), ifosfamide (Holoxan, Ifosfamide EG), levamisole (Zirsol), methotrexate Methotrexate (Tratoben, Methotrexate, Fresexate, Neometho, Fauldmetro, Methotrexate Sodium, Methocel, Hytas, Methaccord, Methofill, Metotrexato, Traxacord, Plastomet, Tevatrex, Metrex, Caditrex, Carditrex, Vibzi, Imutrex, Biotrexate, Methorex, Mexate, Neotrexate, Oncotrex, Remtrex, Trixilem, Hi-Trex, Metorex, Trex, Unitrexate, Ebetrexac, Fauldexato, Lantarel, Maxtrex, Miantrex CS, Rheumatrex, Folex, Folex PFS, Abitrexate, Tevametho, Trexall, Emthexate, Abitrexate, Meadow), mitomycin (Mitomycin C, Mitomycin, Mitonco, Lyomit), nedaplatin (Jiebaishu, Aoxianda, Aqupla), nimesulide (Nimulid), nimotuzumab (Biomab EGFR, Laedemab), nitrofurantoin (Furatsilin), ofloxacin (Entof), paclitaxel (Paclitaxel, Taxol), peplomycin sulfate (Pepleo), picibanil (Picibanil), pirarubicin (Pirarubicin Hydrochloride, Therarubicin, Pinorubin), sodium glycididazole (CMNa), tegafur (Utefos, Icarus, Futraful, Tegafur Gimeracil Oteracil Potassium), temoporfin (Foscan), topotecan hydrochloride (Topotecan), ubenimex (Ubenimex), vinblastine sulfate (Vinblastine, Vblastin), vincristine sulfate (Vincristine, Vincristine Sulfate, Vincristin, Sutivin, vindesine sulfate (Eldisine), carboplatin (Carboplatine Qualimed, Carboplatine, Carboplatino, Carboplatin), cisplatin (Cisplatin), docetaxel (Kamdocon, Naltoxater, Docetaxel), fluorouracil (Fluorouracil, Fluorouracile, Fluorouracil), methotrexate (Methotrexate Sodium, Mexate, Mexate Aq, Biometrox, Medsatrexate, Otaxem), vincristine sulfate (Oncovin), fluorouracil, sunitinib malate, acitretin, fibrin sealant, cetuximab, cetuximab, erlotinib, cisplatin; docetaxel; fluorouracil, undisclosed anti-cancer drug, gefitinib, pravastatin sodium, sirolimus, undisclosed chemotherapy, cisplatin; docetaxel; fluorouracil, sirolimus, fluorouracil; undisclosed taxane, methyl aminolevulinate hydrochloride, cisplatin; docetaxel; fluorouracil, erlotinib hydrochloride, cetuximab, imiquimod, undisclosed Chinese herbal medicine, aspirin; enalapril maleate, undisclosed chemotherapy, cetuximab, (gimeracil+oteracil+tegafur); carboplatin; cisplatin, cisplatin; fluorouracil; nimotuzumab, carboplatin; paclitaxel albumin bound, cisplatin; nedaplatin, bleomycin, nedaplatin, cisplatin; paclitaxel, paclitaxel albumin bound, (gimeracil+oteracil+tegafur), bleomycin; undisclosed chemotherapy, apatinib; docetaxel, undisclosed immunomodulatory supplement, BCM-95, aminolevulinic acid hydrochloride, nedaplatin, cisplatin; palifermin, cetuximab, gefitinib, bevacizumab, belagenpumatucel-L, cisplatin; tirapazamine, cisplatin; tirapazamine, cisplatin; gemcitabine; paclitaxel; topotecan; vinorelbine, cisplatin; fluorouracil, panitumumab, carboplatin; docetaxel; gemcitabine hydrochloride; vinorelbine tartrate, amifostine; fluorouracil, cisplatin; fluorouracil, carboplatin; paclitaxel, tirapazamine, cisplatin; epoetin alfa, figitumumab, melphalan; tumor necrosis factor alf, cisplatin, cisplatin; fluorouracil, cisplatin; undisclosed chemotherapy, docetaxel, contusugene ladenovec, cisplatin; fluorouracil; paclitaxel, docetaxel, human papillomavirus [serotypes 16, 18] (bivalent) vaccine, isotretinoin, cisplatin; fluorouracil, misonidazole, paclitaxel, palifermin, endostatin, pilocarpine, cisplatin; docetaxel; filgrastim; fluorouracil; paclitaxel, cisplatin; docetaxel; filgrastim; fluorouracil; paclitaxel, cisplatin; irinotecan hydrochloride, cisplatin; gemcitabine, cisplatin; epirubicin; fluorouracil; undisclosed chemotherapy, methyl aminolevulinate hydrochloride, carboplatin; paclitaxel, carbogen; carbon dioxide; niacinamide, cisplatin; fluorouracil, talimogene laherparepvec, epoetin alfa, cisplatin; fluorouracil; panitumumab, cisplatin; fluorouracil, cisplatin; fluorouracil, aldesleukin, cisplatin; fluorouracil, cisplatin; paclitaxel, cisplatin; fluorouracil, fluorouracil; leucovorin; lobaplatin, cisplatin, cisplatin; ethyl mercaptan; ifosfamide; mesna; mitolactol, doxorubicin; levamisole, (tegafur+uracil), cisplatin; fluorouracil, cisplatin; vinorelbine, carboplatin; cisplatin; gemcitabine hydrochloride, Corynebacterium parvum; doxorubicin, capecitabine; cisplatin; fluorouracil; paclitaxel, fluorouracil; leucovorin; methotrexate, rAd-p53, cetuximab; cisplatin; docetaxel, PV-10, methyl aminolevulinate hydrochloride, cisplatin; fluorouracil, paclitaxel; topotecan hydrochloride, carboplatin; cisplatin; paclitaxel, cisplatin; topotecan hydrochloride, cisplatin; etoposide, docetaxel; fluorouracil, aspirin, cisplatin; gemcitabine, Lactobacillus brevis CD2, cisplatin; docetaxel, fosbretabulin tromethamine, panitumumab, fluorouracil, paclitaxel, carboplatin; cisplatin; docetaxel; fluorouracil, fluorouracil, erlotinib hydrochloride, cisplatin; undisclosed chemotherapy; vinorelbine, (gimeracil+oteracil+tegafur); carboplatin, cetuximab, contusugene ladenovec, cetuximab, methyl aminolevulinate hydrochloride, cyclophosphamide, (gimeracil+oteracil+tegafur); cisplatin, paclitaxel albumin bound, carboplatin; paclitaxel, cisplatin; gemcitabine, capecitabine; cisplatin, docetaxel, Z-100, cisplatin; ifosfamide; paclitaxel, nimotuzumab, irinotecan hydrochloride, celecoxib; methotrexate, Nutrison, carboplatin; cisplatin; fluorouracil; paclitaxel, cisplatin; paclitaxel, cisplatin; docetaxel; vinorelbine, paclitaxel, (gimeracil+oteracil+tegafur); cisplatin, carboplatin; paclitaxel, methyl aminolevulinate hydrochloride, Aibin, cisplatin; fluorouracil, porfimer sodium, carboplatin; cisplatin; tocotrienol; vinorelbine, (gimeracil+oteracil+tegafur); cisplatin; paclitaxel, docetaxel, ipilimumab, cisplatin, VB-4847, celecoxib; thalidomide, cisplatin; epirubicin; fluorouracil, cisplatin; fluorouracil, fluorouracil, carboplatin; paclitaxel, cetuximab; cisplatin; docetaxel, autologous cytokine induced killer cells, cisplatin; docetaxel; fluorouracil, cisplatin; epirubicin; fluorouracil, tergenpumatucel-L, cetuximab; cisplatin; docetaxel, Elental, cisplatin; nimotuzumab; paclitaxel, eicosapentaenoic acid; undisclosed nutritional supplement, palbociclib, pembrolizumab (Keytruda), nimotuzumab, apatorsen and dacomitinib.

[0301] Tumor Indications

[0302] As used herein, the terms “tumor”, “cancer” or “cancer disease” refer to a malignant disease, which is preferably selected from the group consisting of Adenocystic carcinoma (Adenoid cystic carcinoma), Adrenocortical carcinoma, AIDS-related cancers, AIDS-related lymphoma, Anal cancer, Appendix cancer, Astrocytoma, Basal cell carcinoma, Bile duct cancer, Bladder cancer, Bone cancer, Osteosarcoma/Malignant fibrous histiocytoma, Brainstem glioma, Brain tumor, cerebellar astrocytoma, cerebral astrocytoma/malignant glioma, ependymoma, medulloblastoma, supratentorial primitive neuroectodermal tumors, visual pathway and hypothalamic glioma, Breast cancer, Bronchial adenomas/carcinoids, Burkitt lymphoma, childhood Carcinoid tumor, gastrointestinal Carcinoid tumor, Carcinoma of unknown primary, primary Central nervous system lymphoma, childhood Cerebellar astrocytoma, childhood Cerebral astrocytoma/Malignant glioma, Cervical cancer, Childhood cancers, Chronic lymphocytic leukemia, Colon Cancer, Cutaneous T-cell lymphoma including Mycosis Fungoides and Sezary Syndrome, Desmoplastic small round cell tumor, Endometrial cancer, Ependymoma, Esophageal cancer, Ewing's sarcoma in the Ewing family of tumors, Childhood Extracranial germ cell tumor, Extragonadal Germ cell tumor, Extrahepatic bile duct cancer, Intraocular melanoma, Retinoblastoma, Gallbladder cancer, Gastric (Stomach) cancer, Gastrointestinal Carcinoid Tumor, Gastrointestinal stromal tumor (GIST), extracranial, extragonadal, or ovarian Germ cell tumor, Gestational trophoblastic tumor, Glioma of the brain stem, Childhood Cerebral Astrocytoma, Childhood Visual Pathway and Hypothalamic Glioma, Gastric carcinoid, Hairy cell leukemia, Head and neck cancer, Heart cancer, Hepatocellular (liver) cancer, Hodgkin lymphoma, Human Papilloma Virus (HPV)-related cancer, Hypopharyngeal cancer, childhood Hypothalamic and visual pathway glioma, Intraocular Melanoma, Islet Cell Carcinoma (Endocrine Pancreas), Kaposi sarcoma, Kidney cancer (renal cell cancer), Laryngeal Cancer, Lip and Oral Cavity Cancer, Liposarcoma, Liver Cancer, Non-Small Cell Lung Cancer, Small Cell Lung Cancer, Lymphomas, AIDS-related Lymphoma, Burkitt Lymphoma, Hodgkin Lymphoma, Non-Hodgkin Lymphomas, Primary Central Nervous System Lymphoma, Malignant Fibrous Histiocytoma of Bone/Osteosarcoma, Childhood Medulloblastoma, Melanoma, Intraocular (Eye) Melanoma, Merkel Cell Carcinoma, Adult Malignant Mesothelioma, Childhood Mesothelioma, Head or Neck Cancer, Mouth Cancer, Childhood Multiple Endocrine Neoplasia Syndrome, Multiple Myeloma/Plasma Cell Neoplasm, Multiple Myeloma (Cancer of the Bone-Marrow), Nasal cavity and paranasal sinus cancer, Nasopharyngeal carcinoma, Neuroblastoma, Oral Cancer, Oropharyngeal cancer, Osteosarcoma/malignant fibrous histiocytoma of bone, Ovarian cancer, Ovarian epithelial cancer (Surface epithelial-stromal tumor), Ovarian germ cell tumor, Ovarian low malignant potential tumor, Pancreatic cancer, islet cell Pancreatic cancer, Paranasal sinus and nasal cavity cancer, Parathyroid cancer, Penile cancer, Pharyngeal cancer, Pheochromocytoma, Pineal astrocytoma, Pineal germinoma, childhood Pineoblastoma and supratentorial primitive neuroectodermal tumors, Pituitary adenoma, Plasma cell neoplasia/plasmocytoma/Multiple myeloma, Pleuropulmonary blastoma, Primary central nervous system lymphoma, Prostate cancer, Rectal cancer, Renal cell carcinoma (kidney cancer), Cancer of the Renal pelvis and ureter, Retinoblastoma, childhood Rhabdomyosarcoma, Salivary gland cancer, Sarcoma of the Ewing family of tumors, Kaposi Sarcoma, soft tissue Sarcoma, uterine Sarcoma, Skin cancer (nonmelanoma), Skin cancer (melanoma), Merkel cell Skin carcinoma, Small intestine cancer, Squamous cell carcinoma, metastatic Squamous neck cancer with occult primary, soft tissue sarcoma (STS), childhood Supratentorial primitive neuroectodermal tumor, Testicular cancer (seminoma and non-seminoma), Throat cancer, childhood Thymoma, Thymoma and Thymic carcinoma, Thyroid cancer, childhood Thyroid cancer, Transitional cell cancer of the renal pelvis and ureter, gestational Trophoblastic tumor, Urethral cancer, endometrial Uterine cancer, Uterine sarcoma, Vaginal cancer, childhood Visual pathway and hypothalamic glioma, Vulvar cancer, and childhood Wilms tumor (kidney cancer).

[0303] Allergenic Antigens:

[0304] Antigens associated with allergy or allergic disease (allergens or allergenic antigens) are preferably derived from a source selected from the list consisting of:

[0305] Acarus spp (Aca s 1, Aca s 10, Aca s 10.0101, Aca s 13, Aca s 13.0101, Aca s 2, Aca s 3, Aca s 7, Aca s 8), Acanthocybium spp (Aca so 1), Acanthocheilonema spp (Aca v 3, Aca v 3.0101), Acetes spp (Ace ja 1), Actinidia spp (Act a 1, Act c 1, Act c 10, Act c 10.0101, Act c 2, Act c 4, Act c 5, Act c 5.0101, Act c 8, Act c 8.0101, Act c Chitinase, Act d 1, Act d 1.0101, Act d 10, Act d 10.0101, Act d 10.0201, Act d 11, Act d 11.0101, Act d 2, Act d 2.0101, Act d 3, Act d 3.0101, Act d 3.02, Act d 4, Act d 4.0101, Act d 5, Act d 5.0101, Act d 6, Act d 6.0101, Act d 7, Act d 7.0101, Act d 8, Act d 8.0101, Act d 9, Act d 9.0101, Act d Chitinase, Act e 1, Act e 5), Acyrthosiphon spp (Acy pi 7, Acy pi 7.0101, Acy pi 7.0102), Adenia spp (Ade v RIP), Aedes spp (Aed a 1, Aed a 1.0101, Aed a 2, Aed a 2.0101, Aed a 3, Aed a 3.0101, Aed a 4, Aed a 7, Aed a 7.0101, Aed a 7.0102, Aed a 7.0103, Aed a 7.0104, Aed a 7.0105, Aed a 7.0106, Aed a 7.0107, Aed a 7.0108, Aed a 7.0109, Aed a 7.0110, Aed a 7.0111, Aed al 1, Aed al 3, Aed al 37 kD, Aed v 37 kD, Aed v 63 kD), Aegilops spp (Aeg ta 28, Aeg ta alpha_Gliadin, Aeg um 28, Aeg un 28), Aethaloperca spp (Aet ro 1), Agropyron spp (Agr c 7), Agrostis spp (Agr ca 1, Agr ca 5, Agr g 1, Agr g 4, Agr s 5), Agrobacterium spp (Agr sp CP4 EPSPS), Ailuropoda spp (Ail me Phosvitin, Ail me TCTP), Aix spp (Aix ga 1, Aix sp 1), Aleuroglyphus spp (Ale o 1, Ale o 10, Ale o 10.0101, Ale o 10.0102, Ale o 13, Ale o 14, Ale o 2, Ale o 20, Ale o 3, Ale o 5, Ale o 7, Ale o 8, Ale o 9), Allium spp (All a 3, All a Alliin lyase, All c 3, All c 30 kD, All c 4, All c Alliin lyase, All p Alliin lyase, All s Alliin lyase), Alnus spp (Aln g 1, Aln g 1.0101, Aln g 1/Bet v 1/Cor a 1 TPC7, Aln g 1/Bet v 1/Cor a 1 TPC9, Aln g 2, Aln g 4, Aln g 4.0101), Alopochen spp (Alo ae 1), Alopecurus spp (Alo p 1, Alo p 5), Alternaria spp (Alt a 1, Alt a 1.0101, Alt a 1.0102, Alt a 10, Alt a 10.0101, Alt a 12, Alt a 12.0101, Alt a 13, Alt a 13.0101, Alt a 2, Alt a 3, Alt a 3.0101, Alt a 4, Alt a 4.0101, Alt a 5, Alt a 5.0101, Alt a 6, Alt a 6.0101, Alt a 7, Alt a 7.0101, Alt a 70 kD, Alt a 8, Alt a 8.0101, Alt a 9, Alt a MnSOD, Alt a NTF2, Alt a TCTP, Alt ar 1, Alt arg 1, Alt b 1, Alt bl 1, Alt br 1, Alt c 1, Alt ca 1, Alt ce 1, Alt ch 1, Alt ci 1, Alt co 1, Alt cr 1, Alt ct 1, Alt cu 1, Alt cy 1, Alt d 1, Alt du 1, Alt e 1, Alt et 1, Alt eu 1, Alt ga 1, Alt gr 1, Alt j 1, Alt I 1, Alt lo 1, Alt m 1, Alt me 1, Alt mi 1, Alt mo 1, Alt o 1, Alt p 1, Alt ph 1, Alt po 1, Alt ps 1, Alt r 1, Alt s 1, Alt se 1, Alt sm 1, Alt so 1, Alt su 1, Alt t 1, Alt te 1, Alt to 1), Amaranthus spp (Ama r 2, Ama r 2.0101, Ama v 2, Ama v 2.0101, Ama v 2.0201), Ambrosia spp (Amb a 1, Amb a 1.0101, Amb a 1.0201, Amb a 1.0202, Amb a 1.0301, Amb a 1.0302, Amb a 1.0303, Amb a 1.0304, Amb a 1.0305, Amb a 1.0401, Amb a 1.0402, Amb a 1.0501, Amb a 1.0502, Amb a 10, Amb a 10.0101, Amb a 3, Amb a 3.0101, Amb a 4, Amb a 4.0101, Amb a 5, Amb a 5.0101, Amb a 6, Amb a 6.0101, Amb a 7, Amb a 7.0101, Amb a 8, Amb a 8.0101, Amb a 8.0102, Amb a 9, Amb a 9.0101, Amb a 9.0102, Amb a CPI, Amb p 1, Amb p 5, Amb p 5.0101, Amb p 5.0201, Amb t 5, Amb t 5.0101, Amb t 8), Ammothea spp (Amm h 7, Amm h 7.0101), Anadara spp (Ana br 1), Ananas spp (Ana c 1, Ana c 1.0101, Ana c 2, Ana c 2.0101, Ana c 2.0101 (MUXF3)), Anas spp (Ana ca 1), Anarhichas spp (Ana I 1), Anacardium spp (Ana o 1, Ana o 1.0101, Ana o 1.0102, Ana o 2, Ana o 2.0101, Ana o 3, Ana o 3.0101), Anas spp (Ana p 1, Ana p 2, Ana p 3), Anguilla spp (Ang a 1, Ang j 1), Anisakis spp (Ani s 1, Ani s 1.0101, Ani s 10, Ani s 10.0101, Ani s 11, Ani s 11.0101, Ani s 12, Ani s 12.0101, Ani s 2, Ani s 2.0101, Ani s 24 kD, Ani s 3, Ani s 3.0101, Ani s 4, Ani s 4.0101, Ani s 5, Ani s 5.0101, Ani s 6, Ani s 6.0101, Ani s 7, Ani s 7.0101, Ani s 8, Ani s 8.0101, Ani s 9, Ani s 9.0101, Ani s CCOS3, Ani s Cytochrome B, Ani s FBPP, Ani s NADHDS4L, Ani s NARaS, Ani s PEPB, Ani s Troponin), Annona spp (Ann c Chitinase), Anopheles spp (Ano da 17, Ano da 17.0101, Ano da 27, Ano da 27.0101, Ano da 7, Ano da 7.0101, Ano g 7, Ano g 7.0101), Anser spp (Ans a 1, Ans a 2, Ans a 3, Ans in 1), Anthoxanthum spp (Ant o 1, Ant o 1.0101, Ant o 12, Ant o 13, Ant o 2, Ant o 4, Ant o 5, Ant o 6, Ant o 7), Apis spp (Api c 1, Api c 1.0101, Api c 10, Api c 2, Api c 4, Api d 1, Api d 1.0101, Api d 4, Api fl 4), Apium spp (Api g 1, Api g 1.0101, Api g 1.0201, Api g 2, Api g 2.0101, Api g 3, Api g 3.0101, Api g 4, Api g 4.0101, Api g 5, Api g 5.0101, Api g 6, Api g 6.0101), Apis spp (Api m 1, Api m 1.0101, Api m 10, Api m 10.0101, Api m 11, Api m 11.0101, Api m 11.0201, Api m 13 kD, Api m 2, Api m 2.0101, Api m 3, Api m 3.0101, Api m 4, Api m 4.0101, Api m 5, Api m 5.0101, Api m 6, Api m 6.0101, Api m 7, Api m 7.0101, Api m 8, Api m 8.0101, Api m 9, Api m 9.0101, Api m A1-A2, Api m A1-A2-A3, Api m Apalbumin 1, Api m Apalbumin 2, Api me 1, Api me 4), Arachis spp (Ara d 2, Ara d 6, Ara f 3, Ara f 4, Ara h 1, Ara h 1.0101, Ara h 10, Ara h 10.0101, Ara h 10.0102, Ara h 11, Ara h 11.0101, Ara h 2, Ara h 2.0101, Ara h 2.0102, Ara h 2.0201, Ara h 2.0202, Ara h 3, Ara h 3.0101, Ara h 4, Ara h 4.0101, Ara h 5, Ara h 5.0101, Ara h 6, Ara h 6.0101, Ara h 7, Ara h 7.0101, Ara h 7.0201, Ara h 7.0202, Ara h 8, Ara h 8.0101, Ara h 8.0201, Ara h 9, Ara h 9.0101, Ara h 9.0201, Ara h Agglutinin, Ara h Oleosin 18 kD, Ara i 2, Ara i 6), Arabidopsis spp (Ara t 3, Ara t 8, Ara t GLP), Archosargus spp (Arc pr 1), Archaeopotamobius spp (Arc s 8, Arc s 8.0101), Aequipecten spp (Arg i 1), Argas spp (Arg r 1, Arg r 1.0101), Ariopsis spp (Ari fe 1), Armoracia spp (Arm r HRP), Arrhenatherum spp (Arr e 1, Arr e 5), Artemisia spp (Art a 1, Art ap 1), Artemia spp (Art fr 1, Art fr 1.0101, Art fr 5, Art fr 5.0101), Arthrobacter spp (Art gl CO), Achorion spp (Art gy 7), Artocarpus spp (Art h 17 kD, Art h 4), Arthrospira spp (Art p1 beta_Phycocyanin), Artemisia spp (Art v 1, Art v 1.0101, Art v 1.0102, Art v 1.0103, Art v 1.0104, Art v 1.0105, Art v 1.0106, Art v 1.0107, Art v 2, Art v 2.0101, Art v 3, Art v 3.0101, Art v 3.0201, Art v 3.0202, Art v 3.0301, Art v 4, Art v 4.0101, Art v 4.0201, Art v 47 kD, Art v 5, Art v 5.0101, Art v 6, Art v 6.0101, Art v 60 kD), Arthroderma spp (Art va 4), Ascaris spp (Asc 1 3, Asc 1 3.0101, Asc 1 3.0102, Asc I 34 kD, Asc s 1, Asc s 1.0101, Asc s 3, Asc s 3.0101, Asc s GST), Aspergillus spp (Asp aw Glucoamylase, Asp c 22, Asp f 1, Asp f 1.0101, Asp f 10, Asp f 10.0101, Asp f 11, Asp f 11.0101, Asp f 12, Asp f 12.0101, Asp f 13, Asp f 13.0101, Asp f 15, Asp f 15.0101, Asp f 16, Asp f 16.0101, Asp f 17, Asp f 17.0101, Asp f 18, Asp f 18.0101, Asp f 2, Asp f 2.0101, Asp f 22, Asp f 22.0101, Asp f 23, Asp f 23.0101, Asp f 27, Asp f 27.0101, Asp f 28, Asp f 28.0101, Asp f 29, Asp f 29.0101, Asp f 3, Asp f 3.0101, Asp f 34, Asp f 34.0101, Asp f 4, Asp f 4.0101, Asp f 5, Asp f 5.0101, Asp f 56 kD, Asp f 6, Asp f 6.0101, Asp f 7, Asp f 7.0101, Asp f 8, Asp f 8.0101, Asp f 99, Asp f 9.0101, Asp f AfCalAp, Asp f AT_V, Asp f Catalase, Asp f Chitosanase, Asp f CP, Asp f DPPV, Asp f FDH, Asp f gamma_Actin, Asp f Glucosidase, Asp f GPI, Asp f GST, Asp f GT, Asp f IAO, Asp f IPMI, Asp f LPL1, Asp f LPL3, Asp f Mannosidase, Asp f MDH, Asp f PL, Asp f PUP, Asp f RPS3, Asp f SXR, Asp fl 13, Asp fl 13.0101, Asp fl 18, Asp fl 2, Asp fl 21, Asp fl 3, Asp fl 4, Asp fl 7, Asp fl 8, Asp fl 9, Asp me Seaprose, Asp n 14, Asp n 14.0101, Asp n 18, Asp n 18.0101, Asp n 25, Asp n 25.0101, Asp n 30, Asp n Glucoamylase, Asp n Hemicellulase, Asp n Pectinase, Asp o 13, Asp o 13.0101, Asp o 21, Asp o 21.0101, Asp o 3, Asp o 4, Asp o 7, Asp o 8, Asp o Lactase, Asp o Lipase, Asp oc 13, Asp r 1, Asp sa AP, Asp sp Glucoamylase, Asp sp Glucoseoxidase, Asp sp PL, Asp sp PME, Asp sy 13, Asp v 13, Asp v 13.0101, Asp v Catalase A, Asp v Enolase, Asp v GAPDH, Asp v MDH, Asp v SXR), Asparagus spp (Aspa o 1, Aspa o 1.01, Aspa o 1.02, Aspa o 17 kD, Aspa o 4), Aspergillus spp (Aspe ni 2, Aspe ni 3, Aspe ni 4, Aspe ni 7, Aspe ni 8, Aspe ni 9), Avena spp (Ave s 1, Ave s 12, Ave s 13, Ave s 2, Ave s 4, Ave s 5, Ave s 7), Babylonia spp (Bab ja 1), Bacillus spp (Bac al Subtilisin, Bac cl Subtilisin, Bac I Subtilisin, Bac li aA, Bac li Subtilisin), Bactrocera spp (Bac ol 27, Bac ol 27.0101), Bacillus spp (Bac sp aA1, Bac sp aA3, Bac sp Decarboxylase, Bac st amyM, Bac su Subtilisin, Bac t Cry1Ab, Bac t Cry1Fa, Bac t Cry3Bb1, Bac t Cry9c), Bagre spp (Bag ma 1), Balistes spp (Bal ca 1), Balanus spp (Bal r 1, Bal r 1.0101), Beauveria spp (Bea b Aid, Bea b Enol, Bea b f2, Bea b Hex), Bertholletia spp (Ber e 1, Ber e 1.0101, Ber e 2, Ber e 2.0101), Beryx spp (Ber sp 1), Betula spp (Bet ab 1, Bet al 1, Bet ch 1, Bet co 1, Bet da 1, Bet gr 1, Bet hu 1, Bet le 1, Bet me 1, Bet n 1, Bet p 1, Bet pa 1, Bet po 1, Bet pu 1, Bet pu 2, Bet pu 4, Bet pu 6, Bet pu 7, Bet sc 1, Bet ut 1, Bet v 1, Bet v 1 B1-B1-B1, Bet v 1 fv Mal 4x, Bet v 1.0101, Bet v 1.0102, Bet v 1.0103, Bet v 1.0201, Bet v 1.0301, Bet v 1.0401, Bet v 1.0402, Bet v 1.0501, Bet v 1.0601, Bet v 1.0602, Bet v 1.0701, Bet v 1.0801, Bet v 1.0901, Bet v 1.1001, Bet v 1.1101, Bet v 1.1201, Bet v 1.1301, Bet v 1.1401, Bet v 1.1402, Bet v 1.1501, Bet v 1.1502, Bet v 1.1601, Bet v 1.1701, Bet v 1.1801, Bet v 1.1901, Bet v 1.2001, Bet v 1.2101, Bet v 1.2201, Bet v 1.2301, Bet v 1.2401, Bet v 1.2501, Bet v 1.2601, Bet v 1.2701, Bet v 1.2801, Bet v 1.2901, Bet v 1.3001, Bet v 1.3101, Bet v 2, Bet v 2.0101, Bet v 3, Bet v 3.0101, Bet v 4, Bet v 4.0101, Bet v 6, Bet v 6.0101, Bet v 6.0102, Bet v 7, Bet v 7.0101, Bet v 8, Bet v Glucanase), Beta spp (Beta v 1, Beta v 1.0101, Beta v 2, Beta v 2.0101), Blattella spp (Bla g 1, Bla g 1.0101, Bla g 1.0102, Bla g 1.0103, Bla g 1.0201, Bla g 1.0202, Bla g 2, Bla g 2.0101, Bla g 2.0201, Bla g 36 kD, Bla g 4, Bla g 4.0101, Bla g 4.0201, Bla g 5, Bla g 5.0101, Bla g 5.0201, Bla g 6, Bla g 6.0101, Bla g 6.0201, Bla g 6.0301, Bla g 7, Bla g 7.0101, Bla g 8, Bla g 8.0101, Bla g 9, Bla g Enolase, Bla g GSTD1, Bla g RACK1, Bla g TPI, Bla g Trypsin, Bla g Vitellogenin), Blatta spp (Bla o 1, Bla o 7), Blomia spp (Blo t 1, Blo t 1.0101, Blo t 1.0201, Blo t 10, Blo t 10.0101, Blo t 10.0102, Blo t 11, Blo t 11.0101, Blo t 12, Blo t 12.0101, Blo t 12.0102, Blo t 13, Blo t 13.0101, Blo t 14, Blo t 15, Blo t 18, Blo t 19, Blo t 19.0101, Blo t 2, Blo t 2.0101, Blo t 2.0102, Blo t 2.0103, Blo t 20, Blo t 21, Blo t 21.0101, Blo t 3, Blo t 3.0101, Blo t 4, Blo t 4.0101, Blo t 5, Blo t 5.0101, Blo t 6, Blo t 6.0101, Blo t 7, Blo t 8, Blo t 9, Blo t HSP70), Bombus spp (Bom ar 4, Bom hy 4, Bom p 1, Bom p 1.0101, Bom p 2, Bom p 3, Bom p 4, Bom p 4.0101, Bom t 1, Bom t 1.0101, Bom t 4, Bom t 4.0101), Bombyx spp (Bomb m 1, Bomb m 1.0101, Bomb m 7, Bomb m 7.0101, Bomb m 7.0102, Bomb m 7.0103, Bomb m 7.0104, Bomb m 7.0105, Bomb m 7.0106), Boophilus spp (Boo m 1, Boo m 7, Boo m 7.0101), Bos spp (Bos d 2, Bos d 2.0101, Bos d 2.0102, Bos d 2.0103, Bos d 3, Bos d 3.0101, Bos d 4, Bos d 4.0101, Bos d 5, Bos d 5.0101, Bos d 5.0102, Bos d 6, Bos d 6 (MDA), Bos d 6.0101, Bos d 7, Bos d 7.0101, Bos d 8, Bos d 8 alphaS1, Bos d 8 alphaS2, Bos d 8 beta, Bos d 8 kappa, Bos d alpha2I, Bos d alpha2I.0101, Bos d Chymosin, Bos d Fibrin, Bos d Gelatin, Bos d HG, Bos d Insulin, Bos d Lactoferrin, Bos d Lactoperoxidase, Bos d Myoglobin, Bos d OBP, Bos d OSCP, Bos d Phosvitin, Bos d PLA2, Bos d PRVB, Bos d Thrombin, Bos d TI, Bos gr ALA, Bos gr Myoglobin), Bothrops spp (Bot as 1, Bot at 1), Bouteloua spp (Bou g 1), Biting spp (Bov ov 1), Brama spp (Bra du 1), Brassica spp (Bra j 1, Bra j 1.0101, Bra n 1, Bra n 1.0101, Bra n 4, Bra n 7, Bra n 8, Bra n PG, Bra ni 8, Bra o 3, Bra o 3.0101, Bra r 1, Bra r 1.0101, Bra r 2, Bra r 2.0101, Bra r 3, Bra r 4, Bra r 7), Bromus spp (Bro a 1, Bro a 4), Brosme spp (Bro br 1), Bromus spp (Bro i 1, Bro i 5, Bro i 7), Brugia spp (Bru m 3, Bru m 3.0101, Bru m Bm33), Bubalus spp (Bub b ALA, Bub b BLG, Bub b Casein, Bub b Casein alphaS1, Bub b Casein alphaS2, Bub b Casein beta, Bub b Casein kappa), Caenorhabditis spp (Cae b 3, Cae b 3.0101, Cae br 3, Cae br 3.0101, Cae e 3, Cae e 3.0101, Cae e 3.0102, Cae re 13, Cae re 13.0101), Cajanus spp (Caj c 1), Caligus spp (Cal cl 1, Cal cl 1.0101, Cal cl 1.0102), Calamus spp (Cal le 1), Callinectes spp (Cal s 2), Camelus spp (Cam d ALA, Cam d Casein, Cam d Casein alphaS1, Cam d Casein alphaS2, Cam d Casein beta, Cam d Casein kappa), Camponotus spp (Cam fl 7, Cam fl 7.0101), Canis spp (Can f 1, Can f 1.0101, Can f 2, Can f 2.0101, Can f 3, Can f 3.0101, Can f 4, Can f 4.0101, Can f 5, Can f 5.0101, Can f 6, Can f 6.0101, Can f Feld1-like, Can f Homs2-like, Can f Phosvitin, Can f TCTP), Canthidermis spp (Can ma 1), Cancer spp (Can mg 2, Can p 1), Cannabis spp (Can s 3), Candida spp (Cand a 1, Cand a 1.0101, Cand a 3, Cand a 3.0101, Cand a CAAP, Cand a CyP, Cand a Enolase, Cand a FPA, Cand a MnSOD, Cand a PGK, Cand b 2, Cand b 2.0101, Cand b FDH, Cand r Lipase), Capsicum spp (Cap a 1, Cap a 1.0101, Cap a 17 kD, Cap a 2, Cap a 2.0101, Cap a 30 kD, Cap a Glucanase, Cap ch 17 kD), Caprella spp (Cap e 1), Capra spp (Cap h ALA, Cap h BLG, Cap h Casein, Cap h Casein alphaS1, Cap h Casein alphaS2, Cap h Casein beta, Cap h Casein kappa, Cap h GSA), Capitulum spp (Cap m 1), Carassius spp (Car au 1), Carpinus spp (Car b 1, Car b 1.0101, Car b 1.0102, Car b 1.0103, Car b 1.0104, Car b 1.0105, Car b 1.0106, Car b 1.0107, Car b 1.0108, Car b 1.0109, Car b 1.0110, Car b 1.0111, Car b 1.0112, Car b 1.0113, Car b 1.0201, Car b 1.0301, Car b 1.0302, Car b 2, Car b 4), Caranx spp (Car cr 1), Carya spp (Car i 1, Car i 1.0101, Car i 2, Car i 4, Car i 4.0101), Carcinus spp (Car ma 2), Caryota spp (Car mi 2), Carica spp (Car p 1, Car p Chitinase, Car p Chymopapain, Car p Endoproteinase), Castanea spp (Cas c 24 kD, Cas s 1, Cas s 1.0101, Cas s 1.0102, Cas s 1.0103, Cas s 2, Cas s 5, Cas s 5.0101, Cas s 8, Cas s 8.0101, Cas s 9, Cas s 9.0101), Catharanthus spp (Cat r 1, Cat r 1.0101, Cat r 17 kD, Cat r 2), Caulolatilus spp (Cau ch 1), Cavia spp (Cav p 1, Cav p 1.0101, Cav p 2, Cav p 2.0101, Cav p 3, Cav p 3.0101, Cav p Gelatin, Cav p GSA), Centropristis spp (Cen s 1), Cephalopholis spp (Cep so 1), Charybdis spp (Cha f 1, Cha f 1.0101), Chaetodipterus spp (Cha fa 1), Chamaecyparis spp (Cha o 1, Cha o 1.0101, Cha o 2, Cha o 2.0101), Chenopodium spp (Che a 1, Che a 1.0101, Che a 2, Che a 2.0101, Che a 3, Che a 3.0101), Chironomus spp (Chi k 1, Chi k 10, Chi k 10.0101), Chinchilla spp (Chi I 21 kD_a, Chi I 21 kD_b), Chionoecetes spp (Chi o 1, Chi o 1.0101, Chi o 2, Chi o 4, Chi o 6, Chi o alpha_Actin, Chi o SERCA), Chironomus spp (Chi t 1, Chi t 1.0101, Chi t 1.0201, Chi t 2, Chi t 2.0101, Chi t 2.0102, Chi t 3, Chi t 3.0101, Chi t 4, Chi t 4.0101, Chi t 5, Chi t 5.0101, Chi t 6, Chi t 6.0101, Chi t 6.0201, Chi t 7, Chi t 7.0101, Chi t 8, Chi t 8.0101, Chi t 9, Chi t 9.0101), Chlamys spp (Chl n 1), Chloephaga spp (Chl pi 1), Chortoglyphus spp (Cho a 10), Chrysomela spp (Chr tr 7, Chr tr 7.0101), Cicer spp (Cic a 2S Albumin, Cic a Albumin), Cichorium spp (Cic i 1), Cimex spp (Cim I Nitrophorin), Citrus spp (Cit I 1, Cit I 3, Cit I 3.0101), Citrullus spp (Cit la 2, Cit la MDH, Cit la TPI), Citrus spp (Cit r 3, Cit r 3.0101, Cit s 1, Cit s 1.0101, Cit s 2, Cit s 2.0101, Cit s 3, Cit s 3.0101, Cit s 3.0102, Cit s IFR), Cladosporium spp (Cla c 14, Cla c 14.0101, Cla c 9, Cla c 9.0101, Cla h 1, Cla h 10, Cla h 10.0101, Cla h 12, Cla h 12.0101, Cla h 2, Cla h 2.0101, Cla h 42 kD, Cla h 5, Cla h 5.0101, Cla h 6, Cla h 6.0101, Cla h 7, Cla h 7.0101, Cla h 8, Cla h 8 CSP, Cla h 8.0101, Cla h 9, Cla h 9.0101, Cla h abH, Cla h GST, Cla h HCh1, Cla h HSP70, Cla h NTF2, Cla h TCTP), Clostridium spp (Clo hi Collagenase, Clo t Toxoid), Clupea spp (Clu h 1, Clu h 1.0101, Clu h 1.0201, Clu h 1.0301), Cocos spp (Coc n 2, Coc n 4, Coc n 5), Coccidioides spp (Coc po 8), Coffea spp (Cof a 1, Cof a 1.0101), Columba spp (Col I PSA), Coprinus spp (Cop c 1, Cop c 1.0101, Cop c 2, Cop c 2.0101, Cop c 3, Cop c 3.0101, Cop c 4, Cop c 5, Cop c 5.0101, Cop c 6, Cop c 7, Cop c 7.0101), Corylus spp (Cor a 1, Cor a 1.0101, Cor a 1.0102, Cor a 1.0103, Cor a 1.0104, Cor a 1.0201, Cor a 1.0301, Cor a 1.0401, Cor a 1.0402, Cor a 1.0403, Cor a 1.0404, Cor a 10, Cor a 10.0101, Cor a 11, Cor a 11.0101, Cor a 12, Cor a 12.0101, Cor a 13, Cor a 13.0101, Cor a 14, Cor a 14.0101, Cor a 2, Cor a 2.0101, Cor a 2.0102, Cor a 8, Cor a 8.0101, Cor a 9, Cor a 9.0101), Corynebacterium spp (Cor d Toxoid), Corylus spp (Cor he 1), Coryphaena spp (Cor hi 1), Coriandrum spp (Cor s 1, Cor s 11 kD, Cor s 2), Cotoneaster spp (Cot I 3), Crangon spp (Cra c 1, Cra c 1.0101, Cra c 2, Cra c 2.0101, Cra c 4, Cra c 4.0101, Cra c 5, Cra c 5.0101, Cra c 6, Cra c 6.0101, Cra c 8, Cra c 8.0101), Crassostrea spp (Cra g 1), Cricetus spp (Cri c HSA), Crivellia spp (Cri pa 1), Crocus spp (Cro s 1, Cro s 1.0101, Cro s 2, Cro s 2.0101, Cro s 3, Cro s 3.01, Cro s 3.02), Cryptomeria spp (Cry j 1, Cry j 1.0101, Cry j 1.0102, Cry j 1.0103, Cry j 2, Cry j 2.0101, Cry j 2.0102, Cryj 3, Cryj 3.1, Cryj 3.2, Cryj 3.3, Cryj 3.4, Cryj 3.5, Cryj 3.6, Cryj 3.7, Cryj 3.8, Cryj 4, Cryj AP, Cry j Chitinase, Cry j CPA9, Cry j IFR, Cry j LTP, Cry j P1-P2), Cryphonectria spp (Cry p AP), Ctenocephalides spp (Cte f 1, Cte f 1.0101, Cte f 2, Cte f 2.0101, Cte f 3, Cte f 3.0101), Ctenopharyngodon spp (Cte id 1), Cucumis spp (Cuc m 1, Cuc m 1.0101, Cuc m 2, Cuc m 2.0101, Cuc m 3, Cuc m 3.0101, Cuc m Lec17, Cuc m MDH), Cucurbita spp (Cuc ma 18 kD, Cuc ma 2, Cuc p 2, Cuc p AscO), Cucumis spp (Cuc s 2), Culicoides spp (Cul n 1, Cul n 10, Cul n 11, Cul n 2, Cul n 3, Cul n 4, Cul n 5, Cul n 6, Cul n 7, Cul n 8, Cul n 9, Cul n HSP70), Culex spp (Cul q 28 kD, Cul q 35 kD, Cul q 7, Cul q 7.0101, Cul q 7.0102), Culicoides spp (Cul so 1), Cuminum spp (Cum c 1, Cum c 2), Cupressus spp (Cup a 1, Cup a 1.0101, Cup a 1.02, Cup a 2, Cup a 3, Cup a 4, Cup a 4.0101, Cup s 1, Cup s 1.0101, Cup s 1.0102, Cup s 1.0103, Cup s 1.0104, Cup s 1.0105, Cup s 3, Cup s 3.0101, Cup s 3.0102, Cup s 3.0103, Cup s 8), Cochliobolus spp (Cur I 1, Cur I 1.0101, Cur I 2, Cur I 2.0101, Cur I 3, Cur I 3.0101, Cur I 4, Cur I 4.0101, Cur I ADH, Cur I GST, Cur I MnSOD, Cur I Oryzin, Cur I Trx, Cur I ZPS1), Cyanochen spp (Cya cy 1), Cynoscion spp (Cyn ar 1), Cynosurus spp (Cyn cr 1, Cyn cr 5), Cynodon spp (Cyn d 1, Cyn d 1.0101, Cyn d 1.0102, Cyn d 1.0103, Cyn d 1.0104, Cyn d 1.0105, Cyn d 1.0106, Cyn d 1.0107, Cyn d 1.0201, Cyn d 1.0202, Cyn d 1.0203, Cyn d 1.0204, Cyn d 10, Cyn d 11, Cyn d 12, Cyn d 12.0101, Cyn d 13, Cyn d 15, Cyn d 15.0101, Cyn d 2, Cyn d 22, Cyn d 22.0101, Cyn d 23, Cyn d 23.0101, Cyn d 24, Cyn d 24.0101, Cyn d 4, Cyn d 5, Cyn d 6, Cyn d 7, Cyn d 7.0101), Cynoscion spp (Cyn ne 1), Cynomys spp (Cyn sp Lipocalin), Cyprinus spp (Cyp c 1, Cyp c 1.01, Cyp c 1.02), Daboia spp (Dab ru 1), Dactylis spp (Dac g 1, Dac g 1.01, Dac g 1.0101, Dac g 1.02, Dac g 12, Dac g 13, Dac g 2, Dac g 2.0101, Dac g 3, Dac g 3.0101, Dac g 4, Dac g 4.0101, Dac g 5, Dac g 5.0101, Dac g 7), Dama spp (Dam d CSA), Danio spp (Dan re 1, Dan re 2, Dan re alpha2I, Dan re CK), Dasyatis spp (Das ak 1, Das am 1, Das sa 1), Daucus spp (Dau c 1, Dau c 1.0101, Dau c 1.0102, Dau c 1.0103, Dau c 1.0104, Dau c 1.0105, Dau c 1.0201, Dau c 1.0301, Dau c 3, Dau c 4, Dau c 4.0101, Dau c CyP), Decapterus spp (Dec ru 1), Dendronephthya spp (Den n 1, Den n 1.0101), Dermatophagoides spp (Der f 1, Der f 1.0101, Der f 1.0102, Der f 1.0103, Der f 1.0104, Der f 1.0105, Der f 1.0106, Der f 1.0107, Der f 1.0108, Der f 1.0109, Der f 1.0110, Der f 10, Der f 10.0101, Der f 10.0102, Der f 11, Der f 11.0101, Der f 13, Der f 13.0101, Der f 14, Der f 14.0101, Der f 15, Der f 15.0101, Der f 16, Der f 16.0101, Der f 17, Der f 17.0101, Der f 18, Der f 18.0101, Der f 2, Der f 2.0101, Der f 2.0102, Der f 2.0103, Der f 2.0104, Der f 2.0105, Der f 2.0106, Der f 2.0107, Der f 2.0108, Der f 2.0109, Der f 2.0110, Der f 2.0111, Der f 2.0112, Der f 2.0113, Der f 2.0114, Der f 2.0115, Der f 2.0116, Der f 2.0117, Der f 20, Der f 21, Der f 22, Der f 22.0101, Der f 3, Der f 3.0101, Der f 4, Der f 5, Der f 6, Der f 6.0101, Der f 7, Der f 7.0101, Der f 8, Der f 9, Der f HSP70), Dermanyssus spp (Der g 10, Der g 10.0101), Dermatophagoides spp (Der m 1, Der m 1.0101, Der p 1, Der p 1.0101, Der p 1.0102, Der p 1.0103, Der p 1.0104, Der p 1.0105, Der p 1.0106, Der p 1.0107, Der p 1.0108, Der p 1.0109, Der p 1.0110, Der p 1.0111, Der p 1.0112, Der p 1.0113, Der p 1.0114, Der p 1.0115, Der p 1.0116, Der p 1.0117, Der p 1.0118, Der p 1.0119, Der p 1.0120, Der p 1.0121, Der p 1.0122, Der p 1.0123, Der p 1.0124, Der p 10, Der p 10.0101, Der p 10.0102, Der p 10.0103, Der p 11, Der p 11.0101, Der p 13, Der p 14, Der p 14.0101, Der p 15, Der p 18, Der p 2, Der p 2.0101, Der p 2.0102, Der p 2.0103, Der p 2.0104, Der p 2.0105, Der p 2.0106, Der p 2.0107, Der p 2.0108, Der p 2.0109, Der p 2.0110, Der p 2.0111, Der p 2.0112, Der p 2.0113, Der p 2.0114, Der p 2.0115, Der p 20, Der p 20.0101, Der p 21, Der p 21.0101, Der p 23, Der p 23.0101, Der p 3, Der p 3.0101, Der p 4, Der p 4.0101, Der p 5, Der p 5.0101, Der p 5.0102, Der p 6, Der p 6.0101, Der p 7, Der p 7.0101, Der p 8, Der p 8.0101, Der p 9, Der p 9.0101, Der p 9.0102, Der p P1-P2, Der p P2-P1, Der s 1, Der s 2, Der s 3), Dianthus spp (Dia c RIP), Dicranopteris spp (Dic I 2S Albumin), Diospyros spp (Dio k 17 kD, Dio k 4, Dio k IFR), Dioscorea spp (Dio p TSP), Diplodus spp (Dip ho 1), Distichlis spp (Dis s 1, Dis s 7), Ditrema spp (Dit te 1), Dolichovespula spp (Dol a 1, Dol a 2, Dol a 5, Dol a 5.0101), Dolichos spp (Dol b Agglutinin), Dolichovespula spp (Dol m 1, Dol m 1.0101, Dol m 1.02, Dol m 2, Dol m 2.0101, Dol m 5, Dol m 5.0101, Dol m 5.02), Drosophila spp (Dro an 7, Dro an 7.0101, Dro er 7, Dro er 7.0101, Dro er 7.0102, Dro gr 7, Dro gr 7.0101, Dro gr 7.0102, Dro m 7, Dro m 7.0101, Dro m 7.0102, Dro m 7.0103, Dro m 7.0104, Dro m 7.0105, Dro m 7.0106, Dro m 7.0107, Dro m 7.0108, Dro m 7.0109, Dro m 7.0110, Dro m 7.0111, Dro m 7.0112, Dro m 7.0113, Dro m 9, Dro m MnSOD, Dro mo 7, Dro mo 7.0101, Dro pp 7, Dro pp 7.0101, Dro se 7, Dro se 7.0101, Dro si 7, Dro si 7.0101, Dro si 7.0102, Dro vi 7, Dro vi 7.0101, Dro wi 7, Dro wi 7.0101, Dro y 7, Dro y 7.0101, Dro y 7.0102, Dro y 7.0103), Echium spp (Ech p Cytochrome C), Elaeis spp (Ela g 2, Ela g Bd31 kD), Elops spp (Elo sa 1), Embellisia spp (Emb a 1, Emb i 1, Emb nz 1, Emb t 1), Engraulis spp (Eng e 1), Enteroctopus spp (Ent d 1), Epinephelus spp (Epi bl 1, Epi co 1, Epi fl 1, Epi mc 1, Epi mo 1), Epicoccum spp (Epi p 1, Epi p 1.0101, Epi p 12 kD, Epi p GST), Epinephelus spp (Epi po 1, Epi un 1), Equisetum spp (Equ a 17 kD), Equus spp (Equ as 4, Equ as DSA, Equ bu 4, Equ c 1, Equ c 1.0101, Equ c 2, Equ c 2.0101, Equ c 2.0102, Equ c 3, Equ c 3.0101, Equ c 4, Equ c 4.0101, Equ c 5, Equ c 5.0101, Equ c ALA, Equ c BLG, Equ c Casein, Equ c Casein beta, Equ c Casein kappa, Equ c PRVB, Equ he 4, Equ z ZSA), Erimacrus spp (Eri i 1, Eri i 1.0101, Eri i 1.0102), Eriocheir spp (Eri s 1, Eri s 1.0101, Eri s 2), Erwinia spp (Erw ch Asparaginase), Escherichia spp (Esc c Asparaginase, Esc c beta GAL), Esox spp (Eso I 1), Euphausia spp (Eup p 1, Eup p 1.0101), Euphasia spp (Eup s 1, Eup s 1.0101), Euroglyphus spp (Eur m 1, Eur m 1.0101, Eur m 1.0102, Eur m 1.0103, Eur m 10, Eur m 14, Eur m 14.0101, Eur m 2, Eur m 2.0101, Eur m 2.0102, Eur m 3, Eur m 3.0101, Eur m 4, Eur m 4.0101), Evynnis spp (Evy j 1), Fagopyrum spp (Fag e 1, Fag e 1.0101, Fag e 10 kD, Fag e 19 kD, Fag e 2, Fag e 2.0101, Fag e TI), Fagus spp (Fag s 1, Fag s 1.0101, Fag s 2, Fag s 4), Fagopyrum spp (Fag t 1, Fag t 10 kD, Fag t 2, Fag t 2.0101), Felis spp (Fel d 1, Fel d 1.0101, Fel d 2, Fel d 2.0101, Fel d 3, Fel d 3.0101, Fel d 4, Fel d 4.0101, Fel d 5, Fel d 5.0101, Fel d 6, Fel d 6.0101, Fel d 7, Fel d 7.0101, Fel d 8, Fel d 8.0101, Fel d IgG), Fenneropenaeus spp (Fen c 1, Fen c 2, Fen me 1, Fen me 1.0101), Festuca spp (Fes e 1, Fes e 13, Fes e 4, Fes e 5, Fes e 7, Fes p 1, Fes p 13, Fes p 4, Fes p 4.0101, Fes p 5, Fes r 1, Fes r 5), Ficus spp (Fic c 17 kD, Fic c 4, Fic c Ficin), Foeniculum spp (Foe v 1, Foe v 2), Forsythia spp (For s 1), Forcipomyia spp (For t 1, For t 1.0101, For t 2, For t 2.0101, For t 7, For t FPA, For t Myosin, For t TPI), Fragaria spp (Fra a 1, Fra a 1.0101, Fra a 3, Fra a 3.0101, Fra a 3.0102, Fra a 3.0201, Fra a 3.0202, Fra a 3.0203, Fra a 3.0204, Fra a 3.0301, Fra a 4, Fra a 4.0101, Fra c 1), Fraxinus spp (Fra e 1, Fra e 1.0101, Fra e 1.0102, Fra e 1.0201, Fra e 12, Fra e 2, Fra e 3, Fra e 9), Fragaria spp (Fra v 1), Fusarium spp (Fus c 1, Fus c 1.0101, Fus c 2, Fus c 2.0101, Fus c 3, Fus s 1, Fus s 45 kD, Fus sp Lipase), Gadus spp (Gad c 1, Gad c 1.0101, Gad c APDH, Gad m 1, Gad m 1.0101, Gad m 1.0102, Gad m 1.0201, Gad m 1.0202, Gad m 45 kD, Gad m Gelatin, Gad ma 1), Gallus spp (Gal d 1, Gal d 1.0101, Gal d 2, Gal d 2.0101, Gal d 3, Gal d 3.0101, Gal d 4, Gal d 4.0101, Gal d 5, Gal d 5.0101, Gal d 6, Gal d 6.0101, Gal d Apo I, Gal d Apo VI, Gal d GPI, Gal d HG, Gal d IgY, Gal d L-PGDS, Gal d Ovomucin, Gal d Phosvitin, Gal d PRVB, Gal la 4), Galleria spp (Gal m 18 kD, Gal m 24 kD), Gallus spp (Gal so 4), Gammarus spp (Gam s TM), Gelonium spp (Gel m RIP), Geothelphusa spp (Geo de 1), Glossina spp (Glo m 5, Glo m 5.0101, Glo m 7, Glo m 7.0101, Glo m 7.0102, Glo m 7.0103), Glycine spp (Gly a Bd30K, Gly ar Bd30K, Gly ca Bd30K, Gly cl Bd30K, Gly cu Bd30K, Gly cy Bd30K), Glycyphagus spp (Gly d 10, Gly d 10.0101, Gly d 13, Gly d 2, Gly d 2.0101, Gly d 2.0201, Gly d 2.03, Gly d 2/Lep d 2 L1, Gly d 2/Lep d 2 L2, Gly d 2/Lep d 2 L3, Gly d 2/Lep d 2 L4, Gly d 2/Lep d 2 R1, Gly d 2/Lep d 2 R2, Gly d 2/Lep d 2 R3, Gly d 2/Lep d 2 R4, Gly d 2/Lep d 2 R5, Gly d 20, Gly d 3, Gly d 5, Gly d 5.01, Gly d 5.02, Gly d 7, Gly d 8), Glycine spp (Gly f Bd30K, Gly I Bd30K, Gly m 1, Gly m 1.0101, Gly m 1.0102, Gly m 2, Gly m 2.0101, Gly m 2S Albumin, Gly m 3, Gly m 3.0101, Gly m 3.0102, Gly m 39 kD, Gly m 4, Gly m 4.0101, Gly m 5, Gly m 5.0101, Gly m 5.0201, Gly m 5.0301, Gly m 5.0302, Gly m 50 kD, Gly m 6, Gly m 6.0101, Gly m 6.0201, Gly m 6.0301, Gly m 6.0401, Gly m 6.0501, Gly m 68 kD, Gly m Agglutinin, Gly m Bd28K, Gly m Bd30K, Gly m Bd60K, Gly m CPI, Gly m EAP, Gly m TI, Gly mi Bd30K, Gly s Bd30K, Gly t Bd30K, Gly to Bd30K), Gossypium spp (Gos h Vicilin), Haemophilus spp (Hae in P6), Haemaphysalis spp (Hae I 7, Hae I 7.0101, Hae q 7, Hae q 7.0101), Haliotis spp (Hal a 1, Hal d 1, Hal di 1, Hal di PM, Hal m 1, Hal m 1.0101, Hal r 1, Hal r 49 kD, Hal ru 1), Harmonia spp (Har a 1, Har a 1.0101, Har a 2, Har a 2.0101), Harpegnathos spp (Har sa 7, Har sa 7.0101, Har sa 7.0102), Helianthus spp (Hel a 1, Hel a 1.0101, Hel a 2, Hel a 2.0101, Hel a 2S Albumin, Hel a 3, Hel a 3.0101, Hel a 4), Helix spp (Hel ap 1, Hel as 1, Hel as 1.0101), Heligmosomoides spp (Hel p 3, Hel p 3.0101), Helianthus spp (Hel tu 1), Hemanthias spp (Hem le 1), Hemifusus spp (Hem t 1), Heterodera spp (Het g 3, Het g 3.0101), Hevea spp (Hev b 1, Hev b 1.0101, Hev b 10, Hev b 10.0101, Hev b 10.0102, Hev b 10.0103, Hev b 11, Hev b 11.0101, Hev b 11.0102, Hev b 12, Hev b 12.0101, Hev b 13, Hev b 13.0101, Hev b 14, Hev b 14.0101, Hev b 2, Hev b 2.0101, Hev b 3, Hev b 3.0101, Hev b 4, Hev b 4.0101, Hev b 5, Hev b 5.0101, Hev b 6, Hev b 6.01, Hev b 6.02, Hev b 6.0202, Hev b 6.03, Hev b 7, Hev b 7.01, Hev b 7.02, Hev b 7.D2, Hev b 7.S2, Hev b 8, Hev b 8.0101, Hev b 8.0102, Hev b 8.0201, Hev b 8.0202, Hev b 8.0203, Hev b 8.0204, Hev b 9, Hev b 9.0101, Hev b Citrate binding Protein, Hev b GAPDH, Hev b HSP80, Hev b IFR, Hev b Proteasome subunit, Hev b Rotamase, Hev b SPI, Hev b Trx, Hev b UDPGP), Hexagrammos spp (Hex ot 1), Hippoglossus spp (Hip h 1), Hippoglossoides spp (Hip pl 1), Hippoglossus spp (Hip st 1), Hirudo spp (Hir me Hirudin), Holcus spp (Hol I 1, Hol I 1.0101, Hol I 1.0102, Hol I 2, Hol I 4, Hol I 5, Hol I 5.0101, Hol I 5.0201), Holocnemus spp (Hol p1 9, Hol p1 Hemocyanin), Homarus spp (Hom a 1, Hom a 1.0101, Hom a 1.0102, Hom a 1.0103, Hom a 3, Hom a 3.0101, Hom a 4, Hom a 6, Hom a 6.0101, Hom g 1, Hom g 2), Homo spp (Hom s 1, Hom s 1.0101, Hom s 2, Hom s 2.0101, Hom s 3, Hom s 3.0101, Hom s 4, Hom s 4.0101, Hom s 5, Hom s 5.0101, Hom s AAT, Hom s ACTH, Hom s Adalimumab, Hom s ALA, Hom s alpha_Actin, Hom s alpha-Galactosidase, Hom s APDH, Hom s Arylsulfatase B, Hom s Casein, Hom s CyP A, Hom s CyP B, Hom s CyP C, Hom s DSF70, Hom s DSG3, Hom s eIF6, Hom s Etanercept, Hom s Factor IX, Hom s Factor VII, Hom s Factor VIII, Hom s G-CSF, Hom s Glucocerebrosidase, Hom s Glucosidase, Hom s HLA-DR-alpha, Hom s HSA, Hom s Iduronidase, Hom s Idursulfase, Hom s IgA, Hom s Insulin, Hom s Lactoferrin, Hom s Laminin gamma_2, Hom s MnSOD, Hom s Oxytocin, Hom s P2, Hom s Phosvitin, Hom s Profilin, Hom s PSA, Hom s RP1, Hom s TCTP, Hom s TL, Hom s TPA, Hom s TPO, Hom s Transaldolase, Hom s Trx, Hom s Tubulin-alpha, Hom s/Mus m Basiliximab, Hom s/Mus m Cetuximab, Hom s/Mus m Cetuximab (Gal-Gal), Hom s/Mus m Infliximab, Hom s/Mus m Natalizumab, Hom s/Mus m Omalizumab, Hom s/Mus m Palivizumab, Hom s/Mus m Rituximab, Hom s/Mus m Tocilizumab, Hom s/Mus m Trastuzumab), Hoplostethus spp (Hop a 1), Hordeum spp (Hor v 1, Hor v 12, Hor v 12.0101, Hor v 13, Hor v 14, Hor v 15, Hor v 15.0101, Hor v 16, Hor v 16.0101, Hor v 17, Hor v 17.0101, Hor v 18 kD, Hor v 2, Hor v 21, Hor v 21.0101, Hor v 28, Hor v 33, Hor v 4, Hor v 5, Hor v 5.0101, Hor v BDAI, Hor v BTI), Humicola spp (Hum in Cellulase), Humulus spp (Hum j 1, Hum j 1.0101, Hum j 10 kD, Hum j 2), Huso spp (Hus h 1), Hylocereus spp (Hyl un LTP), Hymenocephalus spp (Hym st 1), Hyperoglyphe spp (Hyp by 1), Hypophthalmichthys spp (Hyp mo 1), Hypophthalmichthy spp (Hyp no 1), Ictalurus spp (Ict fu 1, Ict p 1), Imperata spp (Imp c 4, Imp c 5, Imp c VIIIel), Ixodes spp (Ixo r 2, Ixo sc 7, Ixo sc 7.0101), Jasus spp (Jas la 1, Jas la 1.0101, Jas la 1.0102), Juglans spp (Jug ca 1, Jug ca 2, Jug ci 1, Jug ci 2, Jug n 1, Jug n 1.0101, Jug n 2, Jug n 2.0101, Jug r 1, Jug r 1.0101, Jug r 2, Jug r 2.0101, Jug r 3, Jug r 3.0101, Jug r 4, Jug r 4.0101, Jug r 5), Juniperus spp (Jun a 1, Jun a 1.0101, Jun a 1.0102, Jun a 2, Jun a 2.0101, Jun a 3, Jun a 3.0101, Jun c 1, Jun o 1, Jun o 4, Jun o 4.0101, Jun r 3, Jun r 3.1, Jun r 3.2, Jun v 1, Jun v 1.0101, Jun v 1.0102, Jun v 3, Jun v 3.0101, Jun v 3.0102, Jun v 4), Katsuwonus spp (Kat p 1), Kyphosus spp (Kyp se 1), Lachnolaimus spp (Lac ma 1), Lachesis spp (Lac mu 1), Lactuca spp (Lac s 1, Lac s 1.0101), Lagocephalus spp (Lag la 1), Larus spp (Lar a 1, Lar a 2, Lar a 3), Larimichthys spp (Lar po 1), Lates spp (Lat c 1), Lateolabrax spp (Lat ja 1), Lathyrus spp (Lat oc Agglutinin), Leiostomus spp (Lei xa 1), Lens spp (Len c 1, Len c 1.0101, Len c 1.0102, Len c 1.0103, Len c 2, Len c 2.0101, Len c 3, Len c 3.0101, Len c Agglutinin), Leopardus spp (Leo p 1), Lepidoglyphus spp (Lep d 10, Lep d 10.0101, Lep d 12, Lep d 13, Lep d 13.0101, Lep d 2, Lep d 2.0101, Lep d 2.0102, Lep d 2.0201, Lep d 2.0202, Lep d 3, Lep d 39 kD, Lep d 5, Lep d 5.0101, Lep d 5.0102, Lep d 5.0103, Lep d 7, Lep d 7.0101, Lep d 8, Lep d alpha Tubulin), Lepomis spp (Lep gi 1), Leptomelanosoma spp (Lep i 1), Lepomis spp (Lep ma 1), Lepisma spp (Lep s 1, Lep s 1.0101, Lep s 1.0102), Lepeophtheirus spp (Lep sa 1, Lep sa 1.0101, Lep sa 1.0102, Lep sa 1.0103), Leptailurus spp (Lep se 1), Lepidorhombus spp (Lep w 1, Lep w 1.0101), Lethocerus spp (Let in 7, Let in 7.0101, Let in 7.0102), Leuciscus spp (Leu ce 1), Lewia spp (Lew in 1), Ligustrum spp (Lig v 1, Lig v 1.0101, Lig v 1.0102, Lig v 2), Lilium spp (Lil I 2, Lil I PG), Limanda spp (Lim fe 1), Limnonectes spp (Lim m 1), Limulus spp (Lim p 1, Lim p 1.0101, Lim p 2, Lim p LPA), Liposcelis spp (Lip b 1, Lip b 1.0101), Litchi spp (Lit c 1, Lit c 1.0101, Lit c IFR, Lit c TPI), Lithobates spp (Lit ca 1), Litopenaeus spp (Lit se 1, Lit v 1, Lit v 1.0101, Lit v 2, Lit v 2.0101, Lit v 3, Lit v 3.0101, Lit v 4, Lit v 4.0101), Filiaria spp (Loa lo 3, Loa lo 3.0101), Lobotes spp (Lob su 1), Locusta spp (Loc m 7, Loc m 7.0101), Loligo spp (Lol b 1, Lol e 1), Lolium spp (Lol m 2, Lol m 5, Lol p 1, Lol p 1.0101, Lol p 1.0102, Lol p 1.0103, Lol p 10, Lol p 11, Lol p 11.0101, Lol p 12, Lol p 13, Lol p 2, Lol p 2.0101, Lol p 3, Lol p 3.0101, Lol p 4, Lol p 4.0101, Lol p 5, Lol p 5.0101, Lol p 5.0102, Lol p 7, Lol p CyP, Lol p FT, Lol p Legumin), Lonomia spp (Lon o 7, Lon o 7.0101), Lophodytes spp (Lop cu 1), Lophonetta spp (Lop sp 1), Lupinus spp (Lup a 1, Lup a alpha_Conglutin, Lup a delta_Conglutin, Lup a gamma_Conglutin, Lup an 1, Lup an 1.0101, Lup an alpha_Conglutin, Lup an delta_Conglutin, Lup an gamma_Conglutin, Lup I 17 kD), Lutjanus spp (Lut a 1, Lut c 1, Lut cy 1, Lut gr 1, Lut gu 1, Lut jo 1), Lutraria spp (Lut p 1), Lutjanus spp (Lut pu 1, Lut sy 1), Lycopersicon spp (Lyc e 1, Lyc e 1.0101, Lyc e 11S Globulin, Lyc e 2, Lyc e 2.0101, Lyc e 2.0102, Lyc e 3, Lyc e 3.0101, Lyc e 4, Lyc e 4.0101, Lyc e ARP60S, Lyc e Chitinase, Lyc e Glucanase, Lyc e Peroxidase, Lyc e PG, Lyc e PME, Lyc e PR23, Lyc e Vicilin), Maconellicoccus spp (Mac h 7, Mac h 7.0101), Macruronus spp (Mac ma 1, Mac n 1), Maclura spp (Mac po 17 kD), Macrobrachium spp (Mac ro 1, Mac ro 1.0101, Mac ro Hemocyanin), Macropus spp (Macr s Gelatin), Malus spp (Mal d 1, Mal d 1.0101, Mal d 1.0102, Mal d 1.0103, Mal d 1.0104, Mal d 1.0105, Mal d 1.0106, Mal d 1.0107, Mal d 1.0108, Mal d 1.0109, Mal d 1.0201, Mal d 1.0202, Mal d 1.0203, Mal d 1.0204, Mal d 1.0205, Mal d 1.0206, Mal d 1.0207, Mal d 1.0208, Mal d 1.0301, Mal d 1.0302, Mal d 1.0303, Mal d 1.0304, Mal d 1.0401, Mal d 1.0402, Mal d 1.0403, Mal d 2, Mal d 2.0101, Mal d 3, Mal d 3.0101, Mal d 3.0102, Mal d 3.0201, Mal d 3.0202, Mal d 3.0203, Mal d 4, Mal d 4.0101, Mal d 4.0102, Mal d 4.0201, Mal d 4.0202, Mal d 4.0301, Mal d 4.0302), Malpighia spp (Mal g 4, Mal g Hevein), Malus spp (Mal p 1), Malassezia spp (Mala f 2, Mala f 2.0101, Mala f 3, Mala f 3.0101, Mala f 4, Mala f 4.0101, Mala g 10, Mala s 1, Mala s 1.0101, Mala s 10, Mala s 10.0101, Mala s 11, Mala s 11.0101, Mala s 12, Mala s 12.0101, Mala s 13, Mala s 13.0101, Mala s 5, Mala s 5.0101, Mala s 6, Mala s 6.0101, Mala s 7, Mala s 7.0101, Mala s 8, Mala s 8.0101, Mala s 9, Mala s 9.0101), Manihot spp (Man e 5, Man e 5.0101, Man e FPA, Man e GAPDH), Mangifera spp (Man i 1, Man i 14 kD, Man i 2, Man i 3, Man i 3.01, Man i 3.02, Man i Chitinase), Marsupenaeus spp (Mar j 1, Mar j 1.0101, Mar j 2, Mar j 4), Matricaria spp (Mat c 17 kD), Mecopoda spp (Mec e 7), Megalobrama spp (Meg am 2, Meg am CK), Megathura spp (Meg c Hemocyanin), Megalops spp (Meg sp 1), Melanogrammus spp (Mel a 1), Meleagris spp (Mel g 1, Mel g 2, Mel g 3, Mel g PRVB, Mel g TSA), Melicertus spp (Mel I 1), Menticirrhus spp (Men am 1), Mercurialis spp (Mer a 1, Mer a 1.0101), Merluccius spp (Mer ap 1, Mer au 1, Mer bi 1, Mer ca 1, Mer ga 1, Mer hu 1), Merlangius spp (Mer me 1), Merluccius spp (Mer mr 1, Mer pa 1, Mer po 1, Mer pr 1, Mer se 1), Meriones spp (Mer un 23 kD), Metarhizium spp (Met a 30), Metapenaeopsis spp (Met ba 1), Metapenaeus spp (Met e 1, Met e 1.0101, Met e 2), Metasequoia spp (Met gl 2), Metapenaeus spp (Met j 1, Met j 2), Metanephrops spp (Met ja 1), Metapenaeopsis spp (Met la 1), Metanephrops spp (Met t 2), Micromesistius spp (Mic po 1), Micropogonias spp (Mic un 1), Mimachlamys spp (Mim n 1), Momordica spp (Mom c RIP), Morus spp (Mor a 17 kD, Mor a 4), Morone spp (Mor am 1), Morus spp (Mor n 3, Mor n 3.0101), Morone spp (Mor sa 1, Mor sc 1), Mugil spp (Mug c 1), Muraenolepis spp (Mur mi 1), Musa spp (Mus a 1, Mus a 1.0101, Mus a 2, Mus a 2.0101, Mus a 3, Mus a 3.0101, Mus a 4, Mus a 4.0101, Mus a 5, Mus a 5.0101, Mus a 5.0102), Mus spp (Mus m 1, Mus m 1.0101, Mus m 1.0102, Mus m 2, Mus m Gelatin, Mus m IgG, Mus m MSA, Mus m Muromonab, Mus m Phosvitin), Mustela spp (Mus p 17 kD), Musa spp (Mus xp 1, Mus xp 2, Mus xp 5), Mycteroperca spp (Myc bo 1, Myc mi 1, Myc ph 1), Myceliophthora spp (Myc sp Laccase), Myrmecia spp (Myr p 1, Myr p 1.0101, Myr p 2, Myr p 2.0101, Myr p 2.0102, Myr p 3, Myr p 3.0101), Mytilus spp (Myt e 1, Myt g 1, Myt g PM), Myzus spp (Myz p 7, Myz p 7.0101), Nemorhedus spp (Nae go Hya), Necator spp (Nec a Calreticulin), Nemipterus spp (Nem vi 1), Neosartorya spp (Neo fi 1, Neo fi 22), Neochen spp (Neo ju 1), Neoscona spp (Neo n 7, Neo n 7.0101), Nephelium spp (Nep I GAPDH), Nephrops spp (Nep n 1, Nep n DF9), Neptunea spp (Nep po 1, Nep po 1.0101), Nicotiana spp (Nic t 8, Nic t Osmotin, Nic t Villin), Nimbya spp (Nim c 1, Nim s 1), Nippostrongylus spp (Nip b Agl), Nycticebus spp (Nyc c 1), Octopus spp (Oct f 1, Oct I 1, Oct v 1, Oct v 1.0101, Oct v PM), Ocyurus spp (Ocy ch 1), Olea spp (Ole e 1, Ole e 1.0101, Ole e 1.0102, Ole e 1.0103, Ole e 1.0104, Ole e 1.0105, Ole e 1.0106, Ole e 1.0107, Ole e 10, Ole e 10.0101, Ole e 11, Ole e 11.0101, Ole e 11.0102, Ole e 12, Ole e 13, Ole e 2, Ole e 2.0101, Ole e 3, Ole e 3.0101, Ole e 36 kD, Ole e 4, Ole e 4.0101, Ole e 5, Ole e 5.0101, Ole e 6, Ole e 6.0101, Ole e 7, Ole e 7.0101, Ole e 8, Ole e 8.0101, Ole e 9, Ole e 9.0101), Ommastrephes spp (Omm b 1, Omm b 1.0101), Oncorhynchus spp (Onc ke 1, Onc ke 18 kD, Onc ke alpha2I, Onc ke Vitellogenin, Onc m 1, Onc m 1.0101, Onc m 1.0201, Onc m alpha2I, Onc m Protamine, Onc m Vitellogenin, Onc ma 1, Onc ma FPA, Onc ma FSA, Onc ma TPI, Onc n 1), Onchocerca spp (Onc o 3, Onc o 3.0101), Oncorhynchus spp (Onc ts 1), Onchocerca spp (Onc v 3, Onc v 3.0101), Oratosquilla spp (Ora o 1, Ora o 1.0101), Oreochromis spp (Ore a 1, Ore mo 1, Ore mo 2, Ore mo FPA, Ore mo SCAF7145, Ore ni 1, Ore ni 18 kD, Ore ni 45 kD), Ornithonyssus spp (Orn sy 10, Orn sy 10.0101, Orn sy 10.0102), Oryctolagus spp (Ory c 1, Ory c 1.0101, Ory c 2, Ory c Casein, Ory c Phosvitin, Ory c RSA), Oryza spp (Ory s 1, Ory s 1.0101, Ory s 11, Ory s 12, Ory s 12.0101, Ory s 13, Ory s 14, Ory s 17 kD, Ory s 19 kD, Ory s 2, Ory s 23, Ory s 3, Ory s 7, Ory s aA_TI, Ory s GLP52, Ory s GLP63, Ory s Glyoxalase I, Ory s NRA), Ostrya spp (Ost c 1, Ost c 1.0101), Ovis spp (Ovi a ALA, Ovi a BLG, Ovi a Casein, Ovi a Casein alphaS1, Ovi a Casein alphaS2, Ovi a Casein beta, Ovi a Casein kappa, Ovi a Phosvitin, Ovi a SSA), Pachycondyla spp (Pac c 3), Pagrus spp (Pag m 1, Pag pa 1), Pampus spp (Pam ar 1, Pam c 1), Pandalus spp (Pan b 1, Pan b 1.0101), Pangasius spp (Pan bo 1), Pandalus spp (Pan e 1, Pan e 1.0101, Pan e 4), Panulirus spp (Pan h 1, Pan hy 1), Pangasius spp (Pan hy 18 kD, Pan hy 45 kD), Panulirus spp (Pan j 1), Panthera spp (Pan I 1, Pan o 1, Pan p 1), Panulirus spp (Pan s 1, Pan s 1.0101), Panthera spp (Pan t 1), Pan spp (Pan tr TCTP), Papaver spp (Pap s 17 kD, Pap s 2, Pap s 34 kD), Papilio spp (Pap xu 7, Pap xu 7.0101, Pap xu 7.0102), Paralichthys spp (Par a 1), Parasilurus spp (Par as 1, Par c 1), Paralithodes spp (Par c 1.0101, Par c 1.0102, Par f 1), Parthenium spp (Par h 1), Parietaria spp (Par j 1, Par j 1.0101, Par j 1.0102, Par j 1.0103, Par j 1.0201, Par j 2, Par j 2.0101, Par j 2.0102, Par j 3, Par j 3.0101, Par j 3.0102, Par j 4, Par j 4.0101, Par j J1-J2), Paralichthys spp (Par le 1), Parietaria spp (Par m 1, Par o 1, Par o 1.0101), Paralichthys spp (Par ol 1, Par ol alpha2I), Parahucho spp (Par pe Vitellogenin), Passiflora spp (Pas e Chitinase, Pas e Hevein), Paspalum spp (Pas n 1, Pas n 1.0101, Pas n 13), Patinopecten spp (Pat y 1), Pediculus spp (Ped h 7, Ped h 7.0101), Penaeus spp (Pen a 1, Pen a 1.0101, Pen a 1.0102, Pen a 1.0102 (103-117), Pen a 1.0102 (109-123), Pen a 1.0102 (1-15), Pen a 1.0102 (115-129), Pen a 1.0102 (121-135), Pen a 1.0102 (127-141), Pen a 1.0102 (13-27), Pen a 1.0102 (133-147), Pen a 1.0102 (139-153), Pen a 1.0102 (145-159)), Farfantepenaeus spp (Pen a 1.0102 (151-165)), Penaeus spp (Pen a 1.0102 (157-171), Pen a 1.0102 (163-177), Pen a 1.0102 (169-183), Pen a 1.0102 (175-189), Pen a 1.0102 (181-195), Pen a 1.0102 (187-201), Pen a 1.0102 (193-207), Pen a 1.0102 (19-33), Pen a 1.0102 (199-213), Pen a 1.0102 (205-219), Pen a 1.0102 (211-225), Pen a 1.0102 (217-231), Pen a 1.0102 (223-237), Pen a 1.0102 (229-243)), Farfantepenaeus spp (Pen a 1.0102 (235-249)), Penaeus spp (Pen a 1.0102 (241-255), Pen a 1.0102 (247-261), Pen a 1.0102 (253-267), Pen a 1.0102 (25-39), Pen a 1.0102 (259-273), Pen a 1.0102 (265-279), Pen a 1.0102 (270-284), Pen a 1.0102 (31-45), Pen a 1.0102 (37-51), Pen a 1.0102 (43-57), Pen a 1.0102 (49-63)), Farfantepenaeus spp (Pen a 1.0102 (55-69)), Penaeus spp (Pen a 1.0102 (61-75), Pen a 1.0102 (67-81), Pen a 1.0102 (7-21), Pen a 1.0102 (73-87), Pen a 1.0102 (79-93), Pen a 1.0102 (85-99), Pen a 1.0102 (91-105), Pen a 1.0102 (97-111), Pen a 1.0103), Penicillium spp (Pen b 13, Pen b 13.0101, Pen b 26, Pen b 26.0101, Pen c 1, Pen c 13, Pen c 13.0101, Pen c 18, Pen c 19, Pen c 19.0101, Pen c 2, Pen c 22, Pen c 22.0101, Pen c 24, Pen c 24.0101, Pen c 3, Pen c 3.0101, Pen c 30, Pen c 30.0101, Pen c 32, Pen c 32.0101, Pen c MnSOD, Pen ch 13, Pen ch 13.0101, Pen ch 18, Pen ch 18.0101, Pen ch 20, Pen ch 20.0101, Pen ch 31, Pen ch 31.0101, Pen ch 33, Pen ch 33.0101, Pen ch 35, Pen ch 35.0101, Pen ch MnSOD), Penaeus spp (Pen i 1, Pen i 1.0101, Pen m 1, Pen m 1.0101, Pen m 1.0102, Pen m 2, Pen m 2.0101, Pen m 3, Pen m 3.0101, Pen m 4, Pen m 4.0101, Pen m 6, Pen m 6.0101), Penicillium spp (Pen o 18, Pen o 18.0101), Penaeus spp (Pena o 1, Pena o 1.0101), Periplaneta spp (Per a 1, Per a 1.0101, Per a 1.0102, Per a 1.0103, Per a 1.0104, Per a 1.0105, Per a 1.0201, Per a 10, Per a 10.0101, Per a 2, Per a 3, Per a 3.0101, Per a 3.0201, Per a 3.0202, Per a 3.0203, Per a 4, Per a 5, Per a 6, Per a 6.0101, Per a 7, Per a 7.0101, Per a 7.0102, Per a 7.0103, Per a 9, Per a 9.0101, Per a Cathepsin, Per a FABP, Per a Trypsin, Per f 1, Per f 7, Per f 7.0101), Perna spp (Per v 1), Persea spp (Pers a 1, Pers a 1.0101, Pers a 4), Petroselinum spp (Pet c 1, Pet c 2, Pet c 3), Phalaris spp (Pha a 1, Pha a 1.0101, Pha a 5, Pha a 5.0101, Pha a 5.02, Pha a 5.03, Pha a 5.04), Phaseolus spp (Pha v 3, Pha v 3.0101, Pha v 3.0201, Pha v aAI, Pha v aAI.0101, Pha v Chitinase, Pha v PHA, Pha v Phaseolin), Phleum spp (Phl p 1, Phl p 1.0101, Phi p 1.0102, Phi p 11, Phi p 11.0101, Phi p 12, Phi p 12.0101, Phi p 12.0102, Phi p 12.0103, Phi p 13, Phl p 13.0101, PhI p 2, Phi p 2.0101, Phi p 3, Phi p 3.0101, PhI p 3.0102, Phi p 4, Phi p 4.0101, Phi p 4.0102, Phl p 4.0201, Phl p 4.0202, Phl p 4.0203, Phl p 4.0204, Phl p 5, Phl p 5.0101, Phl p 5.0102, Phl p 5.0103, Phl p 5.0104, Phl p 5.0105, Phl p 5.0106, Phl p 5.0107, Phl p 5.0108, Phl p 5.0109, Phl p 5.0201, Phl p 5.0202, Phl p 5.0203, Phl p 5.0204, Phl p 5.0205, Phl p 5.0206, Phl p 5.0207, Phl p 6, Phl p 6.0101, Phl p 6.0102, Phl p 7, Phl p 7.0101, Phl p P1-P2-P5-P6, Phl p P2-P6, Phl p P5-P1, Phl p P6-P2), Phoenix spp (Pho d 2, Pho d 2.0101, Pho d 40 kD, Pho d 90 kD), Phodopus spp (Pho s 21 kD), Phoma spp (Pho t 1), Phragmites spp (Phr a 1, Phr a 12, Phr a 13, Phr a 4, Phr a 5), Phytolacca spp (Phy a RIP), Pimpinella spp (Pim a 1, Pim a 2), Pinna spp (Pin a 1), Piper spp (Pip n 14 kD, Pip n 28 kD), Pisum spp (Pis s 1, Pis s 1.0101, Pis s 1.0102, Pis s 2, Pis s 2.0101, Pis s 5, Pis s Agglutinin, Pis s Albumin), Pistacia spp (Pis v 1, Pis v 1.0101, Pis v 2, Pis v 2.0101, Pis v 2.0201, Pis v 3, Pis v 3.0101, Pis v 4, Pis v 4.0101, Pis v 5, Pis v 5.0101), Platanus spp (Pla a 1, Pla a 1.0101, Pla a 2, Pla a 2.0101, Pla a 3, Pla a 3.0101, Pla a 8), Platichthys spp (Pla f 1), Plantago spp (Pla I 1, Pla I 1.0101, Pla I 1.0102, Pla I 1.0103, Pla I Cytochrome C), Platanus spp (Pla oc 1, Pla or 1, Pla or 1.0101, Pla or 2, Pla or 2.0101, Pla or 3, Pla or 3.0101, Pla or 4, Pla or CyP, Pla r 1), Plectropomus spp (Pie ar 1), Pleospora spp (Pie h 1), Plectropomus spp (Pie le 1), Plodia spp (Plo i 1, Plo i 1.0101, Plo i 2, Plo i 2.0101), Poa spp (Poa p 1, Poa p 1.0101, Poa p 10, Poa p 12, Poa p 13, Poa p 2, Poa p 4, Poa p 5, Poa p 5.0101, Poa p 6, Poa p 7), Polistes spp (Pol a 1, Pol a 1.0101, Pol a 2, Pol a 2.0101, Pol a 5, Pol a 5.0101, Pol d 1, Pol d 1.0101, Pol d 1.0102, Pol d 1.0103, Pol d 1.0104, Pol d 4, Pol d 4.0101, Pol d 5, Pol d 5.0101, Pol e 1, Pol e 1.0101, Pol e 2, Pol e 4, Pol e 4.0101, Pol e 5, Pol e 5.0101, Pol f 5, Pol f 5.0101, Pol g 1, Pol g 1.0101, Pol g 2, Pol g 4, Pol g 5, Pol g 5.0101, Pol he MLT, Pol m 5, Pol m 5.0101), Polypedilum spp (Pol n 1), Pollicipes spp (Pol po 1), Pollachius spp (Pol vi 1), Polybia spp (Poly p 1, Poly p 1.0101, Poly p 2, Poly p 5, Poly s 5, Poly s 5.0101), Pomatomus spp (Pom sa 1), Pongo spp (Pon ab HSA), Pontastacus spp (Pon I 4, Pon I 4.0101, Pon I 7, Pon I 7.0101), Portunus spp (Por s 1, Por s 1.0101, Por s 1.0102, Por tr 1, Por tr 1.0101), Protortonia spp (Pro ca 38 kD), Procumbarus spp (Pro cl 1, Pro cl 1.0101, Pro cl 21 kD), Prosopis spp (Pro j 20 kD), Prunus spp (Pru ar 1, Pru ar 1.0101, Pru ar 3, Pru ar 3.0101, Pru av 1, Pru av 1.0101, Pru av 1.0201, Pru av 1.0202, Pru av 1.0203, Pru av 2, Pru av 2.0101, Pru av 3, Pru av 3.0101, Pru av 4, Pru av 4.0101, Pru c 1, Pru d 1, Pru d 2, Pru d 3, Pru d 3.0101, Pru d 4, Pru du 1, Pru du 2, Pru du 2S Albumin, Pru du 3, Pru du 3.0101, Pru du 4, Pru du 4.0101, Pru du 4.0102, Pru du 5, Pru du 5.0101, Pru du 6, Pru du 6.0101, Pru du 6.0201, Pru du Conglutin, Pru p 1, Pru p 1.0101, Pru p 2, Pru p 2.0101, Pru p 2.0201, Pru p 2.0301, Pru p 3, Pru p 3.0101, Pru p 3.0102, Pru p 4, Pru p 4.0101, Pru p 4.0201, Pru sa 3), Psilocybe spp (Psi c 1, Psi c 1.0101, Psi c 2, Psi c 2.0101), Psoroptes spp (Pso o 1, Pso o 10, Pso o 10.0101, Pso o 11, Pso o 13, Pso o 14, Pso o 2, Pso o 21, Pso o 3, Pso o 5, Pso o 7), Puma spp (Pum c 1), Punica spp (Pun g 3), Pyrus spp (Pyr c 1, Pyr c 1.0101, Pyr c 3, Pyr c 3.0101, Pyr c 4, Pyr c 4.0101, Pyr c 5, Pyr c 5.0101, Pyr py 2), Quercus spp (Que a 1, Que a 1.0101, Que a 1.0201, Que a 1.0301, Que a 1.0401, Que a 2, Que a 4), Rachycentron spp (Rac ca 1), Rana spp (Ran e 1, Ran e 1.0101, Ran e 2, Ran e 2.0101), Ranina spp (Ran ra 1), Rangifer spp (Ran t BLG), Rattus spp (Rat n 1, Rat n 1.0101, Rat n Casein, Rat n Gelatin, Rat n IgG, Rat n Phosvitin, Rat n RSA, Rat n Transferrin), Rhizomucor spp (Rhi m AP), Rhizopus spp (Rhi nv Lipase, Rhi o Lipase), Rhomboplites spp (Rho au 1), Rhodotorula spp (Rho m 1, Rho m 1.0101, Rho m 2, Rho m 2.0101), Ricinus spp (Ric c 1, Ric c 1.0101, Ric c 2, Ric c 3, Ric c 8, Ric c RIP), Rivulus spp (Riv ma 1), Robinia spp (Rob p 2, Rob p 4, Rob p Glucanase), Rosa spp (Ros r 3), Roystonea spp (Roy e 2), Rubus spp (Rub i 1, Rub i 1.0101, Rub i 3, Rub i 3.0101, Rub i Chitinase, Rub i CyP), Saccharomyces spp (Sac c Carboxypeptidase Y, Sac c CyP, Sac c Enolase, Sac c Glucosidase, Sac c Invertase, Sac c MnSOD, Sac c P2, Sac c Profilin), Salvelinus spp (Sal f 1), Salsola spp (Sal k 1, Sal k 1.0101, Sal k 1.0201, Sal k 1.0301, Sal k 1.0302, Sal k 2, Sal k 2.0101, Sal k 3, Sal k 3.0101, Sal k 4, Sal k 4.0101, Sal k 4.0201, Sal k 5, Sal k 5.0101), Salvelinus spp (Sal le Vitellogenin), Salmo spp (Sal s 1, Sal s 1.0101, Sal s 1.0201, Sal s 2, Sal s 2.0101, Sal s Gelatin), Sambucus spp (Sam n 1), Sander spp (San lu 1), Saponaria spp (Sap o RIP), Sardinops spp (Sar m 1), Sarkidiornis spp (Sar ml 1), Sardina spp (Sar p 1), Sarcoptes spp (Sar s 1, Sar s 14, Sar s 3, Sar s GST, Sar s PM), Sardinops spp (Sar sa 1, Sar sa 1.0101), Schistosoma spp (Sch j GST, Sch j PM, Sch j Sj22, Sch j Sj67, Sch ma Sm20, Sch ma Sm21, Sch ma Sm22, Sch ma Sm31), Sciaenops spp (Sci oc 1), Scomber spp (Sco a 1), Scombermorus spp (Sco ca 1), Scomberomorus spp (Sco g 1), Scomber spp (Sco j 1, Sco ma 1, Sco s 1), Scolopendra spp (Sco y 7, Sco y 7.0101), Scylla spp (Scy o 1, Scy o 1.0101, Scy o 2, Scy pa 1, Scy pa 2, Scy s 1, Scy s 1.0101, Scy s 2), Sebastes spp (Seb fa 1, Seb in 1, Seb m 1, Seb m 1.0101, Seb m 1.0201), Secale spp (Sec c 1, Sec c 12, Sec c 13, Sec c 2, Sec c 20, Sec c 20.0101, Sec c 20.0201, Sec c 28, Sec c 3, Sec c 4, Sec c 4.0101, Sec c 4.0201, Sec c 5, Sec c 5.0101, Sec c aA_TI, Sec c aA_TI.0101), Senecio spp (Sen j MDH, Sen j PL), Sepia spp (Sep e 1, Sep e 1.0101), Sepioteuthis spp (Sep I 1, Sep 1 1.0101), Sepia spp (Sep m 1), Seriola spp (Ser d 1, Ser la 1), Sergestes spp (Ser lu 1), Seriola spp (Ser q 1, Ser ri 1), Sesamum spp (Ses i 1, Ses i 1.0101, Ses i 2, Ses i 2.0101, Ses i 3, Ses i 3.0101, Ses i 4, Ses i 4.0101, Ses i 5, Ses i 5.0101, Ses i 6, Ses i 6.0101, Ses i 7, Ses i 7.0101, Ses i 8), Shigella spp (Shi bo GST, Shi dy GST), Simulia spp (Sim vi 1, Sim vi 2, Sim vi 3, Sim vi 4, Sim vi 70 kD), Sinapis spp (Sin a 1, Sin a 1.0101, Sin a 1.0104, Sin a 1.0105, Sin a 1.0106, Sin a 1.0107, Sin a 1.0108, Sin a 2, Sin a 2.0101, Sin a 3, Sin a 3.0101, Sin a 4, Sin a 4.0101), Sinonovacula spp (Sin c 1, Sin c 1.0101), Solenopsis spp (Sol g 2, Sol g 2.0101, Sol g 3, Sol g 3.0101, Sol g 4, Sol g 4.0101, Sol g 4.0201, Sol i 1, Sol i 1.0101, Sol i 2, Sol i 2.0101, Sol i 3, Sol i 3.0101, Sol i 4, Sol i 4.0101), Solenocera spp (Sol me 1), Solenopsis spp (Sol r 1, Sol r 2, Sol r 2.0101, Sol r 3, Sol r 3.0101, Sol s 2, Sol s 2.0101, Sol s 3, Sol s 3.0101, Sol s 4), Solea spp (Sol so 1, Sol so TPI), Solanum spp (Sola t 1, Sola t 1.0101, Sola t 2, Sola t 2.0101, Sola t 3, Sola t 3.0101, Sola t 3.0102, Sola t 4, Sola t 4.0101, Sola t 8, Sola t Glucanase), Sorghum spp (Sor b 1, Sor h 1, Sor h 1.0101, Sor h 12, Sor h 7), Sparus spp (Spa a 1), Sphyrna spp (Sph ti 1), Spirulina spp (Spi mx beta_Phycocyanin), Spinacia spp (Spi o 2, Spi o RuBisCO), Squilla spp (Squ ac 1, Squ ac 1.0101, Squ o 1, Squ o 1.0101), Staphylococcus spp (Sta a FBP, Sta a SEA, Sta a SEB, Sta a SEC, Sta a SED, Sta a SEE, Sta a TSST), Stachybotrys spp (Sta c 3, Sta c 3.0101, Sta c Cellulase, Sta c Hemolysin, Sta c SchS34, Sta c Stachyrase A), Stemphylium spp (Ste b 1, Ste c 1, Ste v 1), Stolephorus spp (Sto i 1), Struthio spp (Str c 1, Str c 2, Str c 3), Streptococcus spp (Str dy Streptokinase), Streptomyces spp (Str g Pronase), Streptococcus spp (Str pn PspC), Strongylocentrotus spp (Str pu 18 kD, Str pu Vitellogenin), Streptococcus spp (Str py SPEA, Str py SPEC, Str py Streptokinase), Strongyloides spp (Str st 45 kD), Streptomyces spp (Str v PAT), Styela spp (Sty p 1), Suidasia spp (Sui m 1, Sui m 13, Sui m 2, Sui m 3, Sui m 5, Sui m 5.01, Sui m 5.02, Sui m 5.03, Sui m 6, Sui m 7, Sui m 8, Sui m 9), Sus spp (Sus s ACTH, Sus s ALA, Sus s Amylase, Sus s BLG, Sus s Casein, Sus s Casein alphaS1, Sus s Casein alphaS2, Sus s Casein beta, Sus s Casein kappa, Sus s Gelatin, Sus s HG, Sus s Insulin, Sus s Lipase, Sus s Pepsin, Sus s Phosvitin, Sus s PRVB, Sus s PSA, Sus s TCTP), Syntelopodeuma spp (Syn y 7, Syn y 7.0101), Syringa spp (Syr v 1, Syr v 1.0101, Syr v 1.0102, Syr v 1.0103, Syr v 2, Syr v 3, Syr v 3.0101), Tabanus spp (Tab y 1, Tab y 1.0101, Tab y 2, Tab y 2.0101, Tab y 5, Tab y 5.0101), Tadorna spp (Tad ra 1), Talaromyces spp (Tal st 22, Tal st 3, Tal st 8), Taraxacum spp (Tar o 18 kD), Taxodium spp (Tax d 2), Tegenaria spp (Teg d Hemocyanin), Teladorsagia spp (Tel ci 3), Thaumetopoea spp (Tha p 1, Tha p 1.0101, Tha p 2, Tha p 2.0101), Theragra spp (The c 1), Thermomyces spp (The I Lipase, The sp Lipase, The sp Xylanase), Thunnus spp (Thu a 1, Thu a 1.0101, Thu a Collagen, Thu al 1, Thu at 1, Thu o 1, Thu o Collagen), Thuja spp (Thu oc 3, Thu p 1), Thunnus spp (Thu t 1, Thu to 1), Thyrsites spp (Thy at 1), Thyrophygus spp (Thy y 7, Thy y 7.0101), Todarodes spp (Tod p 1, Tod p 1.0101, Tod p 1.0102), Toxoptera spp (Tox c 7, Tox c 7.0101), Toxocara spp (Tox ca TES120, Tox ca TES26, Tox ca TES30), Toxoplasma spp (Tox g HSP70), Trachypenaeus spp (Tra c 1), Trachinotus spp (Tra ca 1), Trachurus spp (Tra j 1, Tra j Gelatin, Tra tr Gelatin), Triticum spp (Tri a 1, Tri a 10 kD, Tri a 12, Tri a 12.0101, Tri a 12.0102, Tri a 12.0103, Tri a 12.0104, Tri a 13, Tri a 14, Tri a 14.0101, Tri a 14.0201, Tri a 15, Tri a 15.0101, Tri a 18, Tri a 18.0101, Tri a 19, Tri a 19.0101, Tri a 2, Tri a 21, Tri a 21.0101, Tri a 23kd, Tri a 25, Tri a 25.0101, Tri a 26, Tri a 26.0101, Tri a 27, Tri a 27.0101, Tri a 28, Tri a 28.0101, Tri a 29, Tri a 29.0101, Tri a 29.0201, Tri a 3, Tri a 30, Tri a 30.0101, Tri a 31, Tri a 31.0101, Tri a 32, Tri a 32.0101, Tri a 33, Tri a 33.0101, Tri a 34, Tri a 34.0101, Tri a 35, Tri a 35.0101, Tri a 36, Tri a 36.0101, Tri a 37, Tri a 37.0101, Tri a 4, Tri a 4.0101, Tri a 4.0201, Tri a 5, Tri a 7, Tri a aA_SI, Tri a alpha_Gliadin, Tri a bA, Tri a Bd36K, Tri a beta_Gliadin, Tri a Chitinase, Tri a CM16, Tri a DH, Tri a Endochitinase, Tri a gamma_Gliadin, Tri a Germin, Tri a Gliadin, Tri a GST, Tri a LMW Glu, Tri a LMW-GS B16, Tri a LMW-GS P42, Tri a LMW-GS P73, Tri a LTP2, Tri a omega2_Gliadin, Tri a Peroxidase, Tri a Peroxidase 1, Tri a SPI, Tri a TLP, Tri a Tritin, Tri a XI), Tritirachium spp (Tri al Proteinase K), Tribolium spp (Tri ca 17, Tri ca 17.0101, Tri ca 7, Tri ca 7.0101), Trichostrongylus spp (Tri co 3, Tri co 3.0101), Trichophyton spp (Tri eq 4), Trigonella spp (Tri fg 1, Tri fg 2, Tri fg 3, Tri fg 4), Trichosanthes spp (Tri k RIP), Trichiurus spp (Tri le 1), Triticum spp (Tri m Peroxidase), Trichophyton spp (Tri me 2, Tri me 4), Trisetum spp (Tri p 1, Tri p 5), Trichinella spp (Tri ps 3, Tri ps 3.0101), Trichophyton spp (Tri r 2, Tri r 2.0101, Tri r 4, Tri r 4.0101), Trichoderma spp (Tri rs Cellulase), Triticum spp (Tri s 14), Trichophyton spp (Tri sc 2, Tri sc 4, Tri so 2), Trichinella spp (Tri sp 3, Tri sp 3.0101, Tri sp 3.0102, Tri sp 3.0103, Tri sp 3.0104, Tri sp 3.0105, Tri sp 3.0106), Trichophyton spp (Tri t 1, Tri t 1.0101, Tri t 4, Tri t 4.0101), Triticum spp (Tri td 14, Tri td aA_TI), Trichoderma spp (Tri v Cellulase), Trichophyton spp (Tri ve 4), Triatoma spp (Tria p 1, Tria p 1.0101), Triplochiton spp (Trip s 1), Turbo spp (Tur c 1, Tur c PM), Tyrophagus spp (Tyr p 1, Tyr p 10, Tyr p 10.0101, Tyr p 10.0102, Tyr p 13, Tyr p 13.0101, Tyr p 2, Tyr p 2.0101, Tyr p 24, Tyr p 24.0101, Tyr p 3, Tyr p 3.0101, Tyr p 4, Tyr p 5, Tyr p 5.01, Tyr p 5.02, Tyr p 5.03, Tyr p 7, Tyr p alpha Tubulin), Ulocladium spp (Ulo a 1, Ulo at 1, Ulo b 1, Ulo c 1, Ulo co 1, Ulo cu 1, Ulo mu 1, Ulo ob 1, Ulo se 1, Ulo su 1, Ulo tu 1), Uncia spp (Unc u 1), Urophycis spp (Uro te 1), Vaccinium spp (Vac m 3), Varroa spp (Var j 13 kD), Venerupis spp (Ven ph 1, Ven ph 1.0101), Vespula spp (Ves f 1, Ves f 2, Ves f 5, Ves f 5.0101, Ves g 1, Ves g 2, Ves g 5, Ves g 5.0101, Ves m 1, Ves m 1.0101, Ves m 2, Ves m 2.0101, Ves m 5, Ves m 5.0101, Ves m MLT, Ves p 1, Ves p 2, Ves p 5, Ves p 5.0101, Ves s 1, Ves s 1.0101, Ves s 2, Ves s 5, Ves s 5.0101, Ves v 1, Ves v 1.0101, Ves v 2, Ves v 2.0101, Ves v 2.0201, Ves v 3, Ves v 3.0101, Ves v 5, Ves v 5.0101, Ves v 5-Pol a 5, Ves vi 5, Ves vi 5.0101), Vespa spp (Vesp c 1, Vesp c 1.0101, Vesp c 2, Vesp c 5, Vesp c 5.0101, Vesp c 5.0102, Vesp m 1, Vesp m 1.0101, Vesp m 5, Vesp m 5.0101, Vesp ma 1, Vesp ma 2, Vesp ma 5, Vesp ma MLT, Vesp v MLT), Vigna spp (Vig r 1, Vig r 1.0101, Vig r 17 kD, Vig r 5, Vig r 8S Globulin, Vig r Albumin, Vig r beta-Conglycinin), Vitis spp (Vit v 1, Vit v 1.0101, Vit v 4, Vit v 5, Vit v Glucanase, Vit v TLP), Xiphias spp (Xip g 1, Xip g 1.0101, Xip g 25 kD), Zea spp (Zea m 1, Zea m 1.0101, Zea m 11, Zea m 12, Zea m 12.0101, Zea m 12.0102, Zea m 12.0103, Zea m 12.0104, Zea m 12.0105, Zea m 13, Zea m 14, Zea m 14.0101, Zea m 14.0102, Zea m 2, Zea m 20S, Zea m 22, Zea m 25, Zea m 25.0101, Zea m 27 kD Zein, Zea m 3, Zea m 4, Zea m 5, Zea m 50 kD Zein, Zea m 7, Zea m Chitinase, Zea m G1, Zea m G2, Zea m PAO, Zea m Zm13), Zeus spp (Zeu fa 1), Ziziphus spp (Ziz m 1, Ziz m 1.0101), Zoarces spp (Zoa a ISP III), Zygophyllum spp (Zyg f 2).

[0306] In this context, the terms in brackets indicate the particular preferred allergenic antigens (allergens) from the particular source.

[0307] Most preferably the allergenic antigen is preferably derived from a source (e.g. a plant (e.g. grass or a tree), a natural product (e.g. milk, nuts etc.), a fungal source (e.g. Aspergillus) or a bacterial source or from an animal source or animal poison (e.g. cat, dog, venom of bees etc.), preferably selected from the list consisting of grass pollen (e.g. pollen of rye), tree pollen (e.g. pollen of hazel, birch, alder, ash), flower pollen, herb pollen (e.g. pollen of mugwort), dust mite (e.g. Der f 1, Der p 1, Eur m 1, Der m 1 Der f 2, Der p 2, Eur m 2, Tyr p 2, Lep d 2), mold (e.g. allergens of Acremonium, Aspergillus, Cladosporium, Fusarium, Mucor, Penicillium, Rhizopus, Stachybotrys, Trichoderma, or Alternaria), animals (e.g Fel d1, Fel d 2, Fel d3, or Fel d4 of cats), food (e.g. allergens of fish (e.g. bass, cod, flounder), seafood (e.g. crab, lobster, shrimps), egg, wheat, nuts (e.g. peanuts, almonds, cashews, walnuts), soya, milk, etc.) or insect venom (e.g. allergens from the venom of wasps, bees, hornets, ants, mosquitoes, or ticks).

[0308] Autoimmune Self-Antigens:

[0309] Autoimmune self-antigens, i.e. antigens associated with autoimmune disease or autoantigens, may be associated with an autoimmune disease affecting at least one or more of the following organ systems: the circulatory system, the digestive system, the endocrine system, the excretory system, the immune system, the integumentary system, the muscular system, the nervous system, the reproductive system, the respiratory system, the skeletal system, preferably with the the cardiovascular system, the neuroendocrine system, the musculoskeletal system or gastrointestinal system. Therein the circulatory system is the organ system which enables pumping and channeling blood to and from the body and lungs with heart, blood and blood vessels. The digestive system enables digestion and processing food with salivary glands, esophagus, stomach, liver, gallbladder, pancreas, intestines, colon, rectum and anus. The endocrine system enables communication within the body using hormones made by endocrine glands such as the hypothalamus, pituitary or pituitary gland, pineal body or pineal gland, thyroid gland, parathyroid gland and adrenal glands. The excretory system comprises kidneys, ureters, bladder and urethra and is involved in fluid balance, electrolyte balance and excretion of urine. The immune system comprises structures involved in the transfer of lymph between tissues and the blood stream, the lymph and the nodes and vessels which may be responsible for transport of cellular and humoral components of the immune system. It is responsible for defending against disease-causing agents and comprises amongst others leukocytes, tonsils, adenoids, thymus and spleen. The integumentary system comprises skin, hair and nails. The muscular system enables movement with muscles together with the skeletal system which comprises bones, cartilage, ligaments and tendons and provides structural support. The nervous system is responsible for collecting, transferring and processing information and comprises the brain, spinal cord and nerves. The reproductive system comprises the sex organs, such as ovaries, fallopian tubes, uterus, vagina, mammary glands, testes, vas deferens, seminal vesicles, prostate and penis. The respiratory system comprises the organs used for breathing, the pharynx, larynx, trachea, bronchi, lungs and diaphragm and acts together with the circulation system.

[0310] Autoimmune self-antigens (antigens associated with autoimmune disease or autoantigens) are selected from autoantigens associated with autoimmune diseases selected from Addison disease (autoimmune adrenalitis, Morbus Addison), alopecia areata, Addison's anemia (Morbus Biermer), autoimmune hemolytic anemia (AIHA), autoimmune hemolytic anemia (AIHA) of the cold type (cold hemagglutinine disease, cold autoimmune hemolytic anemia (AIHA) (cold agglutinin disease), (CHAD)), autoimmune hemolytic anemia (AIHA) of the warm type (warm AIHA, warm autoimmune haemolytic anemia (AIHA)), autoimmune hemolytic Donath-Landsteiner anemia (paroxysmal cold hemoglobinuria), antiphospholipid syndrome (APS), atherosclerosis, autoimmune arthritis, arteriitis temporalis, Takayasu arteriitis (Takayasu's disease, aortic arch disease), temporal arteriitis/giant cell arteriitis, autoimmune chronic gastritis, autoimmune infertility, autoimmune inner ear disease (AIED), Basedow's disease (Morbus Basedow), Bechterew's disease (Morbus Bechterew, ankylosing spondylitis, spondylitis ankylosans), Behcet's syndrome (Morbus Behcet), bowel disease including autoimmune inflammatory bowel disease (including colitis ulcerosa (Morbus Crohn, Crohn's disease), cardiomyopathy, particularly autoimmune cardiomyopathy, idiopathic dilated cardiomyopathy (DCM), celiac sprue dermatitis (gluten mediated enteropathia), chronic fatigue immune dysfunction syndrome (CFIDS), chronic inflammatory demyelinating polyneuropathy (CIDP), chronic polyarthritis, Churg-Strauss syndrome, cicatricial pemphigoid, Cogan syndrome, CREST syndrome (syndrom with Calcinosis cutis, Raynaud phenomenon, motility disorders of the esophagus, sklerodaktylia and teleangiectasia), Crohn's disease (Morbus Crohn, colitis ulcerosa), dermatitis herpetiformis during, dermatologic autoimmune diseases, dermatomyositis, Diabetes, Diabetes mellitus Type 1 (type I diabetes, insuline dependent Diabetes mellitus), Diabetes mellitus Type 2 (type II diabetes), essential mixed cryoglobulinemia, essential mixed cryoglobulinemia, fibromyalgia, fibromyositis, Goodpasture syndrome (anti-GBM mediated glomerulonephritis), graft versus host disease, Guillain-Barre syndrome (GBM, Polyradikuloneuritis), haematologic autoimmune diseases, Hashimoto thyroiditis, hemophilia, acquired hemophilia, hepatitis, autoimmune hepatitis, particularly autoimmune forms of chronic hepatitis, idiopathic pulmonary fibrosis (IPF), idiopathic thrombocytopenic purpura, Immuno-thrombocytopenic purpura (Morbus Werlhof; ITP), IgA nephropathy, infertility, autoimmune infertility, juvenile rheumatoid arthritis (Morbus Still, Still syndrome), Lambert-Eaton syndrome, lichen planus, lichen sclerosus, lupus erythematosus, systemic lupus erythematosus (SLE), lupus erythematosus (discoid form), Lyme arthritis (Lyme disease, borrelia arthritis), Meniere's disease (Morbus Meniere); mixed connective tissue disease (MCTD), multiple sclerosis (MS, encephalomyelitis disseminate, Charcot's disease), Myasthenia gravis (myasthenia, MG), myosits, polymyositis, neural autoimmune diseases, neurodermitis, pemphigus vulgaris, bullous pemphigoid, scar forming pemphigoid; polyarteriitis nodosa (periarteiitis nodosa), polychondritis (panchondritis), polyglandular (autoimmune) syndrome (PGA syndrome, Schmidt's syndrome), Polymyalgia rheumatica, primary agammaglobulinemia, primary biliary cirrhosis PBC, primary autoimmune cholangitis), progressive systemic sclerosis (PSS), Psoriasis, Psoriasis vulgaris, Raynaud's phenomena, Reiter's syndrome (Morbus Reiter, urethral conjunctive synovial syndrome)), rheumatoid arthritis (RA, chronic polyarthritis, rheumatic disease of the joints, rheumatic fever), sarcoidosis (Morbus Boeck, Besnier-Boeck-Schaumann disease), stiff-man syndrome, Sclerodermia, Scleroderma, Sjögren's syndrome, sympathetic ophtalmia; Transient gluten intolerance, transplanted organ rejection, uveitis, autoimmune uveiitis, Vasculitis, Vitiligo, (leucoderma, piebold skin), and Wegner's disease (Morbus Wegner, Wegner's granulomatosis).

[0311] These and other proteins acting as autoimmune self-antigens are understood to be therapeutic, as they are meant to treat the subject, in particular a mammal, more particularly a human being, by vaccinating with a self-antigen which is expressed by the mammal, e.g. the human, itself and which triggers an undesired immune response, which is not raised in a healthy subject. Accordingly, such proteins acting as self-antigens are typically of mammalian, in particular human origin.

[0312] Particularly preferred in this context are autoimmune self-antigens (autoantigens) selected from:
[0313] myelin basic protein (MBP), proteolipid protein (PLP), and myelin oligodendrocyte glycoprotein (MOG), in each case associated with multiple sclerosis (MS);
[0314] CD44, preproinsulin, proinsulin, insulin, glutamic acid decaroxylase (GAD65), tyrosine phosphatase-like insulinoma antigen 2 (IA2), zinc transporter ((ZnT8), and heat shock protein 60 (HSP60), in each case associated with diabetes Typ I;
[0315] interphotoreceptor retinoid-binding protein (IRBP) associated with autoimmune uveitis;
[0316] acetylcholine receptor AchR, and insulin-like growth factor-1 receptor (IGF-1R), in each case associated with Myasthenia gravis;
[0317] M-protein from beta-hemolytic streptocci (pseudo-autoantigen) associated with Rheumatic Fever;
[0318] Macrophage migration inhibitory factor associated with Arthritis;
[0319] Ro/La RNP complex, alpha- and beta-fodrin, islet cell autoantigen, poly(ADP)ribose polymerase (PARP), NuMA, NOR-90, Ro60 autoantigen, and p27 antigen, in each case associated with Sjögren's syndrome;
[0320] Ro60 autoantigen, low-density lipoproteins, Sm antigens of the U-1 small nuclear ribonucleoprotein complex (B/B′, D1, D2, D3, E, F, G), and RNP ribonucleoproteins, in each case associated with lupus erythematosus;
[0321] oxLDL, beta(2)GPI, HSP60/65, and oxLDL/beta(2)GPI, in each case associated with Atherosclerosis;
[0322] cardiac beta(1)-adrenergic receptor associated with idiopathic dilated cardiomyopathy (DCM);
[0323] histidyl-tRNA synthetase (HisRS) associated with myositis;
[0324] topoisomerase I associated with scleroderma disease.

[0325] Furthermore, in other embodiments said autoimmune self-antigen is associated with the respective autoimmune disease, like e.g. IL-17, heat shock proteins, and/or any idiotype pathogenic T cell or chemokine receptor which is expressed by immune cells involved in the autoimmune response in said autoimmune disease (such as any autoimmune diseases described herein).

[0326] Preferably, the at least one coding region of the mRNA compound comprising an mRNA sequence according to the invention comprises at least two, three, four, five, six, seven, eight or more nucleic acid sequences identical to or having a sequence identity of at least 5%, 10%, 20%, 30%, 40%, 50%, 60%, 70%, 80%, 85%, 86%, 87%, 88%, 89%, 90%, 91%, 92%, 93%, 94%, 95%, 96%, 97%, 98%, or 99%, preferably of at least 70%, more preferably of at least 80%, even more preferably at least 85%, even more preferably of at least 90% and most preferably of at least 95% or even 97%, with any one of the nucleic acid sequences disclosed in the sequence listing (or respectively in Tables 1-5 or FIGS. 20-24 of PCT/EP2016/075843), or a fragment or variant of any one of said nucleic acid sequences.

[0327] Preferably, the mRNA sequence comprising at least one coding region as defined herein typically comprises a length of about 50 to about 20000, or 100 to about 20000 nucleotides, preferably of about 250 to about 20000 nucleotides, more preferably of about 500 to about 10000, even more preferably of about 500 to about 5000.

[0328] According to a further embodiment, the mRNA sequence according to the invention is an artificial mRNA sequence as defined herein.

[0329] According to a further embodiment, the mRNA compound comprising an mRNA sequence according to the invention is a modified mRNA sequence, preferably a modified mRNA sequence as described herein. In this context, a modification as defined herein preferably leads to a stabilization of the mRNA sequence according to the invention. More preferably, the invention thus provides a stabilized mRNA sequence comprising at least one coding region as defined herein.

[0330] According to one embodiment, the mRNA compound comprising an mRNA sequence of the present invention may thus be provided as a “stabilized mRNA sequence”, that is to say as an mRNA that is essentially resistant to in vivo degradation (e.g. by an exo- or endo-nuclease). Such stabilization can be effected, for example, by a modified phosphate backbone of the mRNA of the present invention. A backbone modification in connection with the present invention is a modification in which phosphates of the backbone of the nucleotides contained in the mRNA are chemically modified. Nucleotides that may be preferably used in this connection contain e.g. a phosphorothioate-modified phosphate backbone, preferably at least one of the phosphate oxygens contained in the phosphate backbone being replaced by a sulfur atom. Stabilized mRNAs may further include, for example: non-ionic phosphate analogues, such as, for example, alkyl and aryl phosphonates, in which the charged phosphonate oxygen is replaced by an alkyl or aryl group, or phosphodiesters and alkylphosphotriesters, in which the charged oxygen residue is present in alkylated form. Such backbone modifications typically include, without implying any limitation, modifications from the group consisting of methylphosphonates, phosphoramidates and phosphorothioates (e.g. cytidine-5′-O-(1-thiophosphate)).

[0331] In the following, specific modifications are described, which are preferably capable of “stabilizing” the mRNA as defined herein.

[0332] Chemical Modifications:

[0333] The term “mRNA modification” as used herein may refer to chemical modifications comprising backbone modifications as well as sugar modifications or base modifications.

[0334] In this context, a modified mRNA (sequence) as defined herein may contain nucleotide analogues/modifications, e.g. backbone modifications, sugar modifications or base modifications. A backbone modification in connection with the present invention is a modification, in which phosphates of the backbone of the nucleotides contained in an mRNA compound comprising an mRNA sequence as defined herein are chemically modified. A sugar modification in connection with the present invention is a chemical modification of the sugar of the nucleotides of the mRNA compound comprising an mRNA sequence as defined herein. Furthermore, a base modification in connection with the present invention is a chemical modification of the base moiety of the nucleotides of the mRNA compound comprising an mRNA sequence. In this context, nucleotide analogues or modifications are preferably selected from nucleotide analogues, which are applicable for transcription and/or translation.

[0335] Sugar Modifications:

[0336] The modified nucleosides and nucleotides, which may be incorporated into a modified mRNA compound comprising an mRNA sequence as described herein, can be modified in the sugar moiety. For example, the 2′ hydroxyl group (OH) can be modified or replaced with a number of different “oxy” or “deoxy” substituents. Examples of “oxy”-2′ hydroxyl group modifications include, but are not limited to, alkoxy or aryloxy (—OR, e.g., R=H, alkyl, cycloalkyl, aryl, aralkyl, heteroaryl or sugar); polyethyleneglycols (PEG), —O(CH2CH20)nCH2CH2OR; “locked” nucleic acids (LNA) in which the 2′ hydroxyl is connected, e.g., by a methylene bridge, to the 4′ carbon of the same ribose sugar; and amino groups (—O-amino, wherein the amino group, e.g., NRR, can be alkylamino, dialkylamino, heterocyclyl, arylamino, diarylamino, heteroarylamino, or diheteroaryl amino, ethylene diamine, polyamino) or aminoalkoxy.

[0337] “Deoxy” modifications include hydrogen, amino (e.g. NH2; alkylamino, dialkylamino, heterocyclyl, arylamino, diaryl amino, heteroaryl amino, diheteroaryl amino, or amino acid); or the amino group can be attached to the sugar through a linker, wherein the linker comprises one or more of the atoms C, N, and 0.

[0338] The sugar group can also contain one or more carbons that possess the opposite stereochemical configuration than that of the corresponding carbon in ribose. Thus, a modified mRNA can include nucleotides containing, for instance, arabinose as the sugar.

[0339] Backbone Modifications:

[0340] The phosphate backbone may further be modified in the modified nucleosides and nucleotides, which may be incorporated into a modified mRNA compound comprising an mRNA sequence as described herein. The phosphate groups of the backbone can be modified by replacing one or more of the oxygen atoms with a different substituent. Further, the modified nucleosides and nucleotides can include the full replacement of an unmodified phosphate moiety with a modified phosphate as described herein. Examples of modified phosphate groups include, but are not limited to, phosphorothioate, phosphoroselenates, borano phosphates, borano phosphate esters, hydrogen phosphonates, phosphoroamidates, alkyl or aryl phosphonates and phosphotriesters. Phosphorodithioates have both non-linking oxygens replaced by sulfur. The phosphate linker can also be modified by the replacement of a linking oxygen with nitrogen (bridged phosphoroamidates), sulfur (bridged phosphorothioates) and carbon (bridged methylene-phosphonates).

[0341] Base Modifications:

[0342] The modified nucleosides and nucleotides, which may be incorporated into a modified mRNA compound comprising an mRNA sequence as described herein can further be modified in the nucleobase moiety. Examples of nucleobases found in mRNA include, but are not limited to, adenine, guanine, cytosine and uracil.

[0343] For example, the nucleosides and nucleotides described herein can be chemically modified on the major groove face. In some embodiments, the major groove chemical modifications can include an amino group, a thiol group, an alkyl group, or a halo group.

[0344] In particularly preferred embodiments of the present invention, the nucleotide analogues/modifications are selected from base modifications, which are preferably selected from 2-amino-6-chloropurineriboside-5′-triphosphate, 2-Aminopurine-riboside-5′-triphosphate; 2-aminoadenosine-5′-triphosphate, 2′-Amino-2′-deoxycytidine-triphosphate, 2-thiocytidine-5′-triphosphate, 2-thiouridine-5′-triphosphate, 2′-Fluorothymidine-5′-triphosphate, 2′-O-Methyl-inosine-5′-triphosphate 4-thiouridine-5′-triphosphate, 5-aminoallylcytidine-5′-triphosphate, 5-aminoallyluridine-5′-triphosphate, 5-bromocytidine-5′-triphosphate, 5-bromouridine-5′-triphosphate, 5-Bromo-2′-deoxycytidine-5′-triphosphate, 5-Bromo-2′-deoxyuridine-5′-triphosphate, 5-iodocytidine-5′-triphosphate, 5-Iodo-2′-deoxycytidine-5′-triphosphate, 5-iodouridine-5′-triphosphate, 5-Iodo-2′-deoxyuridine-5′-triphosphate, 5-methylcytidine-5′-triphosphate, 5-methyluridine-5′-triphosphate, 5-Propynyl-2′-deoxycytidine-5′-triphosphate, 5-Propynyl-2′-deoxyuridine-5′-triphosphate, 6-azacytidine-5′-triphosphate, 6-azauridine-5′-triphosphate, 6-chloropurineriboside-5′-triphosphate, 7-deazaadenosine-5′-triphosphate, 7-deazaguanosine-5′-triphosphate, 8-azaadenosine-5′-triphosphate, 8-azidoadenosine-5′-triphosphate, benzimidazole-riboside-5′-triphosphate, N1-methyladenosine-5′-triphosphate, N1-methylguanosine-5′-triphosphate, N6-methyladenosine-5′-triphosphate, O6-methylguanosine-5′-triphosphate, pseudouridine-5′-triphosphate, or puromycin-5′-triphosphate, xanthosine-5′-triphosphate. Particular preference is given to nucleotides for base modifications selected from the group of base-modified nucleotides consisting of 5-methylcytidine-5′-triphosphate, 7-deazaguanosine-5′-triphosphate, 5-bromocytidine-5′-triphosphate, and pseudouridine-5′-triphosphate.

[0345] In some embodiments, modified nucleosides include pyridin-4-one ribonucleoside, 5-aza-uridine, 2-thio-5-aza-uridine, 2-thiouridine, 4-thio-pseudouridine, 2-thio-pseudouridine, 5-hydroxyuridine, 3-methyluridine, 5-carboxymethyl-uridine, 1-carboxymethyl-pseudouridine, 5-propynyl-uridine, 1-propynyl-pseudouridine, 5-taurinomethyluridine, 1-taurinomethyl-pseudouridine, 5-taurinomethyl-2-thio-uridine, 1-taurinomethyl-4-thio-uridine, 5-methyl-uridine, 1-methyl-pseudouridine, 4-thio-1-methyl-pseudouridine, 2-thio-1-methyl-pseudouridine, 1-methyl-1-deaza-pseudouridine, 2-thio-1-methyl-1-deaza-pseudouridine, dihydrouridine, dihydropseudouridine, 2-thio-dihydrouridine, 2-thio-dihydropseudouridine, 2-methoxyuridine, 2-methoxy-4-thio-uridine, 4-methoxy-pseudouridine, and 4-methoxy-2-thio-pseudouridine.

[0346] In some embodiments, modified nucleosides include 5-aza-cytidine, pseudoisocytidine, 3-methyl-cytidine, N4-acetylcytidine, 5-formylcytidine, N4-methylcytidine, 5-hydroxymethylcytidine, 1-methyl-pseudoisocytidine, pyrrolo-cytidine, pyrrolo-pseudoisocytidine, 2-thio-cytidine, 2-thio-5-methyl-cytidine, 4-thio-pseudoisocytidine, 4-thio-1-methyl-pseudoisocytidine, 4-thio-1-methyl-1-deaza-pseudoisocytidine, 1-methyl-1-deaza-pseudoisocytidine, zebularine, 5-aza-zebularine, 5-methyl-zebularine, 5-aza-2-thio-zebularine, 2-thio-zebularine, 2-methoxy-cytidine, 2-methoxy-5-methyl-cytidine, 4-methoxy-pseudoisocytidine, and 4-methoxy-1-methyl-pseudoisocytidine.

[0347] In other embodiments, modified nucleosides include 2-aminopurine, 2, 6-diaminopurine, 7-deaza-adenine, 7-deaza-8-aza-adenine, 7-deaza-2-aminopurine, 7-deaza-8-aza-2-aminopurine, 7-deaza-2,6-diaminopurine, 7-deaza-8-aza-2,6-diaminopurine, 1-methyladenosine, N6-methyladenosine, N6-isopentenyladenosine, N6-(cis-hydroxyisopentenyl)adenosine, 2-methylthio-N6-(cis-hydroxyisopentenyl) adenosine, N6-glycinylcarbamoyladenosine, N6-threonylcarbamoyladenosine, 2-methylthio-N6-threonyl carbamoyladenosine, N6,N6-dimethyladenosine, 7-methyladenine, 2-methylthio-adenine, and 2-methoxy-adenine.

[0348] In other embodiments, modified nucleosides include inosine, 1-methyl-inosine, wyosine, wybutosine, 7-deaza-guanosine, 7-deaza-8-aza-guanosine, 6-thio-guanosine, 6-thio-7-deaza-guanosine, 6-thio-7-deaza-8-aza-guanosine, 7-methyl-guanosine, 6-thio-7-methyl-guanosine, 7-methylinosine, 6-methoxy-guanosine, 1-methylguanosine, N2-methylguanosine, N2,N2-dimethylguanosine, 8-oxo-guanosine, 7-methyl-8-oxo-guanosine, 1-methyl-6-thio-guanosine, N2-methyl-6-thio-guanosine, and N2,N2-dimethyl-6-thio-guanosine.

[0349] In some embodiments, the nucleotide can be modified on the major groove face and can include replacing hydrogen on C-5 of uracil with a methyl group or a halo group. In specific embodiments, a modified nucleoside is 5′-O-(1-thiophosphate)-adenosine, 5′-O-(1-thiophosphate)-cytidine, 5′-O-(1-thiophosphate)-guanosine, 5′-O-(1-thiophosphate)-uridine or 5′-O-(1-thiophosphate)-pseudouridine.

[0350] In further specific embodiments, a modified mRNA may comprise nucleoside modifications selected from 6-aza-cytidine, 2-thio-cytidine, α-thio-cytidine, Pseudo-iso-cytidine, 5-aminoallyl-uridine, 5-iodo-uridine, N1-methyl-pseudouridine, 5,6-dihydrouridine, α-thio-uridine, 4-thio-uridine, 6-aza-uridine, 5-hydroxy-uridine, deoxy-thymidine, 5-methyl-uridine, Pyrrolo-cytidine, inosine, α-thio-guanosine, 6-methyl-guanosine, 5-methyl-cytdine, 8-oxo-guanosine, 7-deaza-guanosine, N1-methyl-adenosine, 2-amino-6-Chloro-purine, N6-methyl-2-amino-purine, Pseudo-iso-cytidine, 6-Chloro-purine, N6-methyl-adenosine, α-thio-adenosine, 8-azido-adenosine, 7-deaza-adenosine.

[0351] In a very specific embodiment of the invention, the mRNA compound does not comprise a base modification as described above.

[0352] Lipid Modification:

[0353] According to a further embodiment, a modified mRNA compound comprising an mRNA sequence as defined herein can contain a lipid modification. Such a lipid-modified mRNA typically comprises an mRNA as defined herein. Such a lipid-modified mRNA as defined herein typically further comprises at least one linker covalently linked with that mRNA, and at least one lipid covalently linked with the respective linker. Alternatively, the lipid-modified mRNA comprises at least one mRNA as defined herein and at least one (bifunctional) lipid covalently linked (without a linker) with that mRNA. According to a third alternative, the lipid-modified mRNA comprises an mRNA molecule as defined herein, at least one linker covalently linked with that mRNA, and at least one lipid covalently linked with the respective linker, and also at least one (bifunctional) lipid covalently linked (without a linker) with that mRNA. In this context, it is particularly preferred that the lipid modification is present at the terminal ends of a linear mRNA sequence.

[0354] Sequence Modifications:

[0355] G/C Content Modification:

[0356] According to another embodiment, the mRNA comprising lipid nanoparticles comprises an mRNA compound comprising an mRNA sequence, which may be modified, and thus stabilized, by modifying the guanosine/cytosine (G/C) content of the mRNA sequence, preferably of the at least one coding region of the mRNA compound comprising an mRNA sequence of the present invention.

[0357] In a particularly preferred embodiment of the present invention, the G/C content of the coding region of the mRNA compound comprising an mRNA sequence of the present invention is modified, particularly increased, compared to the G/C content of the coding region of the respective wild type mRNA, i.e. the unmodified mRNA. The amino acid sequence encoded by the mRNA is preferably not modified as compared to the amino acid sequence encoded by the respective wild type mRNA. This modification of the mRNA sequence of the present invention is based on the fact that the sequence of any mRNA region to be translated is important for efficient translation of that mRNA. Thus, the composition of the mRNA and the sequence of various nucleotides are important. In particular, sequences having an increased G (guanosine)/C (cytosine) content are more stable than sequences having an increased A (adenosine)/U (uracil) content. According to the invention, the codons of the mRNA are therefore varied compared to the respective wild type mRNA, while retaining the translated amino acid sequence, such that they include an increased amount of G/C nucleotides. In respect to the fact that several codons code for one and the same amino acid (so-called degeneration of the genetic code), the most favourable codons for the stability can be determined (so-called alternative codon usage). Depending on the amino acid to be encoded by the mRNA, there are various possibilities for modification of the mRNA sequence, compared to its wild type sequence. In the case of amino acids, which are encoded by codons, which contain exclusively G or C nucleotides, no modification of the codon is necessary. Thus, the codons for Pro (CCC or CCG), Arg (CGC or CGG), Ala (GCC or GCG) and Gly (GGC or GGG) require no modification, since no A or U is present. In contrast, codons which contain A and/or U nucleotides can be modified by substitution of other codons, which code for the same amino acids but contain no A and/or U. Examples of these are: the codons for Pro can be modified from CCU or CCA to CCC or CCG; the codons for Arg can be modified from CGU or CGA or AGA or AGG to CGC or CGG; the codons for Ala can be modified from GCU or GCA to GCC or GCG; the codons for Gly can be modified from GGU or GGA to GGC or GGG. In other cases, although A or U nucleotides cannot be eliminated from the codons, it is however possible to decrease the A and U content by using codons which contain a lower content of A and/or U nucleotides. Examples of these are: the codons for Phe can be modified from UUU to UUC; the codons for Leu can be modified from UUA, UUG, CUU or CUA to CUC or CUG; the codons for Ser can be modified from UCU or UCA or AGU to UCC, UCG or AGC; the codon for Tyr can be modified from UAU to UAC; the codon for Cys can be modified from UGU to UGC; the codon for His can be modified from CAU to CAC; the codon for Gin can be modified from CAA to CAG; the codons for Ile can be modified from AUU or AUA to AUC; the codons for Thr can be modified from ACU or ACA to ACC or ACG; the codon for Asn can be modified from AAU to AAC; the codon for Lys can be modified from AAA to AAG; the codons for Val can be modified from GUU or GUA to GUC or GUG; the codon for Asp can be modified from GAU to GAC; the codon for Glu can be modified from GAA to GAG; the stop codon UAA can be modified to UAG or UGA. In the case of the codons for Met (AUG) and Trp (UGG), on the other hand, there is no possibility of sequence modification. The substitutions listed above can be used either individually or in all possible combinations to increase the G/C content of the mRNA sequence of the present invention compared to its particular wild type mRNA (i.e. the original sequence). Thus, for example, all codons for Thr occurring in the wild type sequence can be modified to ACC (or ACG). Preferably, however, for example, combinations of the above substitution possibilities are used:

[0358] substitution of all codons coding for Thr in the original sequence (wild type mRNA) to ACC (or ACG) and substitution of all codons originally coding for Ser to UCC (or UCG or AGC);

[0359] substitution of all codons coding for Ile in the original sequence to AUC and

[0360] substitution of all codons originally coding for Lys to AAG and

[0361] substitution of all codons originally coding for Tyr to UAC;

[0362] substitution of all codons coding for Val in the original sequence to GUC (or GUG) and

[0363] substitution of all codons originally coding for Glu to GAG and

[0364] substitution of all codons originally coding for Ala to GCC (or GCG) and

[0365] substitution of all codons originally coding for Arg to CGC (or CGG);

[0366] substitution of all codons coding for Val in the original sequence to GUC (or GUG) and

[0367] substitution of all codons originally coding for Glu to GAG and

[0368] substitution of all codons originally coding for Ala to GCC (or GCG) and

[0369] substitution of all codons originally coding for Gly to GGC (or GGG) and

[0370] substitution of all codons originally coding for Asn to AAC;

[0371] substitution of all codons coding for Val in the original sequence to GUC (or GUG) and

[0372] substitution of all codons originally coding for Phe to UUC and

[0373] substitution of all codons originally coding for Cys to UGC and

[0374] substitution of all codons originally coding for Leu to CUG (or CUC) and

[0375] substitution of all codons originally coding for Gin to CAG and

[0376] substitution of all codons originally coding for Pro to CCC (or CCG); etc.

[0377] Preferably, the G/C content of the coding region of the mRNA compound comprising an mRNA sequence of the present invention is increased by at least 7%, more preferably by at least 15%, particularly preferably by at least 20%, compared to the G/C content of the coding region of the wild type RNA, which codes for an antigen as defined herein or a fragment or variant thereof. According to a specific embodiment at least 5%, 10%, 20%, 30%, 40%, 50%, 60%, more preferably at least 70%, even more preferably at least 80% and most preferably at least 90%, 95% or even 100% of the substitutable codons in the region coding for a peptide or protein as defined herein or a fragment or variant thereof or the whole sequence of the wild type mRNA sequence are substituted, thereby increasing the GC/content of said sequence. In this context, it is particularly preferable to increase the G/C content of the mRNA sequence of the present invention, preferably of the at least one coding region of the mRNA sequence according to the invention, to the maximum (i.e. 100% of the substitutable codons) as compared to the wild type sequence. According to the invention, a further preferred modification of the mRNA sequence of the present invention is based on the finding that the translation efficiency is also determined by a different frequency in the occurrence of tRNAs in cells. Thus, if so-called “rare codons” are present in the mRNA sequence of the present invention to an increased extent, the corresponding modified mRNA sequence is translated to a significantly poorer degree than in the case where codons coding for relatively “frequent” tRNAs are present. According to the invention, in the modified mRNA sequence of the present invention, the region which codes for a peptide or protein as defined herein or a fragment or variant thereof is modified compared to the corresponding region of the wild type mRNA sequence such that at least one codon of the wild type sequence, which codes for a tRNA which is relatively rare in the cell, is exchanged for a codon, which codes for a tRNA which is relatively frequent in the cell and carries the same amino acid as the relatively rare tRNA. By this modification, the sequence of the mRNA of the present invention is modified such that codons for which frequently occurring tRNAs are available are inserted. In other words, according to the invention, by this modification all codons of the wild type sequence, which code for a tRNA which is relatively rare in the cell, can in each case be exchanged for a codon, which codes for a tRNA which is relatively frequent in the cell and which, in each case, carries the same amino acid as the relatively rare tRNA. Which tRNAs occur relatively frequently in the cell and which, in contrast, occur relatively rarely is known to a person skilled in the art; cf. e.g. Akashi, Curr. Opin. Genet. Dev. 2001, 11(6): 660-666. The codons, which use for the particular amino acid the tRNA which occurs the most frequently, e.g. the Gly codon, which uses the tRNA, which occurs the most frequently in the (human) cell, are particularly preferred. According to the invention, it is particularly preferable to link the sequential G/C content which is increased, in particular maximized, in the modified mRNA sequence of the present invention, with the “frequent” codons without modifying the amino acid sequence of the protein encoded by the coding region of the mRNA sequence. This preferred embodiment allows provision of a particularly efficiently translated and stabilized (modified) mRNA sequence of the present invention. The determination of a modified mRNA sequence of the present invention as described above (increased G/C content; exchange of tRNAs) can be carried out using the computer program explained in WO02/098443—the disclosure content of which is included in its full scope in the present invention. Using this computer program, the nucleotide sequence of any desired mRNA sequence can be modified with the aid of the genetic code or the degenerative nature thereof such that a maximum G/C content results, in combination with the use of codons which code for tRNAs occurring as frequently as possible in the cell, the amino acid sequence coded by the modified mRNA sequence preferably not being modified compared to the non-modified sequence. Alternatively, it is also possible to modify only the G/C content or only the codon usage compared to the original sequence. The source code in Visual Basic 6.0 (development environment used: Microsoft Visual Studio Enterprise 6.0 with Servicepack 3) is also described in WO02/098443. In a further preferred embodiment of the present invention, the A/U content in the environment of the ribosome binding site of the mRNA sequence of the present invention is increased compared to the A/U content in the environment of the ribosome binding site of its respective wild type mRNA. This modification (an increased A/U content around the ribosome binding site) increases the efficiency of ribosome binding to the mRNA. An effective binding of the ribosomes to the ribosome binding site (Kozak sequence: SEQ ID NO: 224307 or SEQ ID NO: 224308, the AUG forms the start codon) in turn has the effect of an efficient translation of the mRNA. According to a further embodiment of the present invention, the mRNA sequence of the present invention may be modified with respect to potentially destabilizing sequence elements. Particularly, the coding region and/or the 5′ and/or 3′ untranslated region of this mRNA sequence may be modified compared to the respective wild type mRNA such that it contains no destabilizing sequence elements, the encoded amino acid sequence of the modified mRNA sequence preferably not being modified compared to its respective wild type mRNA. It is known that, for example in sequences of eukaryotic mRNAs, destabilizing sequence elements (DSE) occur, to which signal proteins bind and regulate enzymatic degradation of mRNA in vivo. For further stabilization of the modified mRNA sequence, optionally in the region which encodes at least one peptide or protein as defined herein or a fragment or variant thereof, one or more such modifications compared to the corresponding region of the wild type mRNA can therefore be carried out, so that no or substantially no destabilizing sequence elements are contained there. According to the invention, DSE present in the untranslated regions (3′- and/or 5′-UTR) can also be eliminated from the mRNA sequence of the present invention by such modifications. Such destabilizing sequences are e.g. AU-rich sequences (AURES), which occur in 3′-UTR sections of numerous unstable mRNAs (Caput et al., Proc. Natl. Acad. Sci. USA 1986, 83: 1670 to 1674). The mRNA sequence of the present invention is therefore preferably modified compared to the respective wild type mRNA such that the mRNA sequence of the present invention contains no such destabilizing sequences. This also applies to those sequence motifs which are recognized by possible endonucleases, e.g. the sequence GAACAAG, which is contained in the 3′-UTR segment of the gene encoding the transferrin receptor (Binder et al., EMBO J. 1994, 13: 1969 to 1980). These sequence motifs are also preferably removed in the mRNA sequence of the present invention.

[0378] According to a preferred embodiment, the present invention provides mRNA comprising lipid nanoparticles wherein the mRNA comprises an mRNA sequence as defined herein comprising at least one coding region, wherein the coding region comprises or consists of any one of the (modified) RNA sequences as disclosed in the sequence listing having numeric identifier <223> which starts with “derived and/or modified CDS sequence (opt1)”, “derived and/or modified CDS sequence (opt2)”, “derived and/or modified CDS sequence (opt3)”, “derived and/or modified CDS sequence (opt4)”, or “derived and/or modified CDS sequence (opt5)”, or respectively “column C” of Tables 1-5 or FIGS. 20-24 of PCT/EP2016/075843, or of a fragment or variant of any one of these sequences.

[0379] According to a particularly preferred embodiment, the present invention provides mRNA comprising lipid nanoparticles wherein the mRNA comprises an mRNA sequence as defined herein comprising at least one coding region encoding at least one antigenic peptide or protein derived from hemagglutinin (HA) of an influenza A virus, wherein the coding region comprises or consists of any one of the (modified) RNA sequences according to SEQ ID NOs: 64025-78055, 224085-224106, 192073-206103 or of a fragment or variant of any one of these sequences.

[0380] According to a further particularly preferred embodiment, the present invention provides mRNA comprising lipid nanoparticles wherein the mRNA comprises an mRNA sequence as defined herein comprising at least one coding region encoding at least one antigenic peptide or protein derived from hemagglutinin (HA) of an influenza B virus, wherein the coding region comprises or consists of any one of the (modified) RNA sequences according to SEQ ID NOs: 90422-92600, 224107-224112, 218470-220648, or of a fragment or variant of any one of these sequences.

[0381] According to a further particularly preferred embodiment, the present invention provides mRNA comprising lipid nanoparticles wherein the mRNA comprises an mRNA sequence as defined herein comprising at least one coding region encoding at least one antigenic peptide or protein derived from neuraminidase (NA) of an influenza A virus, wherein the coding region comprises or consists of any one of the (modified) RNA sequences according to SEQ ID NOs: 78056-90421, 224113, 224313-224317, 206104-218469, or of a fragment or variant of any one of these sequences.

[0382] According to a further particularly preferred embodiment, the present invention provides mRNA comprising lipid nanoparticles wherein the mRNA comprises an mRNA sequence as defined herein comprising at least one coding region encoding at least one antigenic peptide or protein derived from neuraminidase (NA) of an influenza B virus, wherein the coding region comprises or consists of any one of the (modified) RNA sequences according to SEQ ID NOs: 92601-94528, 220649-222576 or of a fragment or variant of any one of these sequences.

[0383] According to a further particularly preferred embodiment, the present invention provides mRNA comprising lipid nanoparticles wherein the mRNA comprises an mRNA sequence as defined herein comprising at least one coding region encoding at least one antigenic peptide or protein derived from glycoprotein of a Rabies virus, wherein the coding region comprises or consists of any one of the (modified) RNA sequences according to SEQ ID NOs: 94529-96036, 224271-224273, 222577-224084 or of a fragment or variant of any one of these sequences.

[0384] In a further preferred embodiment, the at least one coding region of the mRNA sequence according to the invention comprises or consists of an RNA sequence identical to or having a sequence identity of at least 5%, 10%, 20%, 30%, 40%, 50%, 60%, 70%, 80%, 85%, 86%, 87%, 88%, 89%, 90%, 91%, 92%, 93%, 94%, 95%, 96%, 97%, 98%, or 99%, preferably of at least 70%, more preferably of at least 80%, even more preferably at least 85%, even more preferably of at least 90% and most preferably of at least 95% or even 97%, with any one of the (modified) RNA sequences according to SEQ ID NOs: 64025-96036, 192073-224084, or of a fragment or variant of any one of these sequences.

[0385] According to a particularly preferred embodiment, the at least one coding region of the mRNA sequence according to the invention comprises or consists of an RNA sequence having a sequence identity of at least 80% with any one of the (modified) RNA sequences according SEQ ID NOs: 64025-96036, 192073-224084, or of a fragment or variant of any one of these sequences.

[0386] Sequences Adapted to Human Codon Usage:

[0387] According to the invention, a further preferred modification of the mRNA compound comprising an mRNA sequence comprised in the mRNA of the mRNA comprising lipid nanoparticles of the present invention is based on the finding that codons encoding the same amino acid typically occur at different frequencies. According to the invention, in the modified mRNA compound comprising an mRNA sequence of the present invention, the coding coding region as defined herein is preferably modified compared to the corresponding coding region of the respective wild type mRNA such that the frequency of the codons encoding the same amino acid corresponds to the naturally occurring frequency of that codon according to the human codon usage as e.g. shown in Table 1a (Human codon usage table).

[0388] For example, in the case of the amino acid alanine (Ala) present in an amino acid sequence encoded by the at least one coding region of the mRNA compound comprising an mRNA sequence according to the invention, the wild type coding region is preferably adapted in a way that the codon “GCC” is used with a frequency of 0.40, the codon “GCT” is used with a frequency of 0.28, the codon “GCA” is used with a frequency of 0.22 and the codon “GCG” is used with a frequency of 0.10 etc. (see Table 1a).

TABLE 1a
Human codon usage table

| Amino | | | | Amino | | | |
|---|---|---|---|---|---|---|---|
| acid | codon | fraction | /1000 | acid | codon | fraction | /1000 |
| Ala | GCG | 0.10 | 7.4 | Pro | CCG | 0.11 | 6.9 |
| Ala | GCA | 0.22 | 15.8 | Pro | CCA | 0.27 | 16.9 |
| Ala | GCT | 0.28 | 18.5 | Pro | CCT | 0.29 | 17.5 |
| Ala | GCC* | 0.40 | 27.7 | Pro | CCC* | 0.33 | 19.8 |
| Cys | TGT | 0.42 | 10.6 | Gln | CAG* | 0.73 | 34.2 |
| Cys | TGC* | 0.58 | 12.6 | Gln | CAA | 0.27 | 12.3 |
| Asp | GAT | 0.44 | 21.8 | Arg | AGG | 0.22 | 12.0 |
| Asp | GAC* | 0.56 | 25.1 | Arg | AGA* | 0.21 | 12.1 |
| Glu | GAG* | 0.59 | 39.6 | Arg | CGG | 0.19 | 11.4 |
| Glu | GAA | 0.41 | 29.0 | Arg | CGA | 0.10 | 6.2 |
| Phe | TTT | 0.43 | 17.6 | Arg | CGT | 0.09 | 4.5 |
| Phe | TTC* | 0.57 | 20.3 | Arg | CGC | 0.19 | 10.4 |
| Gly | GGG | 0.23 | 16.5 | Ser | AGT | 0.14 | 12.1 |
| Gly | GGA | 0.26 | 16.5 | Ser | AGC* | 0.25 | 19.5 |
| Gly | GGT | 0.18 | 10.8 | Ser | TCG | 0.06 | 4.4 |
| Gly | GGC* | 0.33 | 22.2 | Ser | TCA | 0.15 | 12.2 |
| His | CAT | 0.41 | 10.9 | Ser | TCT | 0.18 | 15.2 |
| His | CAC* | 0.59 | 15.1 | Ser | TCC | 0.23 | 17.7 |
| Ile | ATA | 0.14 | 7.5 | Thr | ACG | 0.12 | 6.1 |
| Ile | ATT | 0.35 | 16.0 | Thr | ACA | 0.27 | 15.1 |
| Ile | ATC* | 0.52 | 20.8 | Thr | ACT | 0.23 | 13.1 |
| Lys | AAG* | 0.60 | 31.9 | Thr | ACC* | 0.38 | 18.9 |
| Lys | AAA | 0.40 | 24.4 | Val | GTG* | 0.48 | 28.1 |
| Leu | TTG | 0.12 | 12.9 | Val | GTA | 0.10 | 7.1 |
| Leu | TTA | 0.06 | 7.7 | Val | GTT | 0.17 | 11.0 |
| Leu | CTG* | 0.43 | 39.6 | Val | GTC | 0.25 | 14.5 |
| Leu | CTA | 0.07 | 7.2 | Trp | TGG* | 1 | 13.2 |
| Leu | CTT | 0.12 | 13.2 | Tyr | TAT | 0.42 | 12.2 |
| Leu | CTC | 0.20 | 19.6 | Tyr | TAC* | 0.58 | 15.3 |
| Met | ATG* | 1 | 22.0 | Stop | TGA* | 0.61 | 1.6 |
| Asn | AAT | 0.44 | 17.0 | Stop | TAG | 0.17 | 0.8 |
| Asn | AAC* | 0.56 | 19.1 | Stop | TAA | 0.22 | 1.0 |

*most frequent codon

[0389] According to a preferred embodiment, the present invention provides mRNA comprising lipid nanoparticles wherein the mRNA comprises an mRNA sequence as defined herein comprising at least one coding region, wherein the coding region comprises or consists of any one of the (modified) RNA sequences according to SEQ ID NOs: 128049-160060, or of a fragment or variant of any one of these sequences.

[0390] According to a particularly preferred embodiment, the present invention provides mRNA comprising lipid nanoparticles wherein the mRNA comprises an mRNA sequence as defined herein comprising at least one coding region encoding at least one antigenic peptide or protein derived from hemagglutinin (HA) of an influenza A virus, wherein the coding region comprises or consists of any one of the (modified) RNA sequences according to SEQ ID NOs: 128049-142079, or of a fragment or variant of any one of these sequences.

[0391] According to a further particularly preferred embodiment, the present invention provides mRNA comprising lipid nanoparticles wherein the mRNA comprises an mRNA sequence as defined herein comprising at least one coding region encoding at least one antigenic peptide or protein derived from hemagglutinin (HA) of an influenza B virus, wherein the coding region comprises or consists of any one of the (modified) RNA sequences according to SEQ ID NOs: 154446-156624 or of a fragment or variant of any one of these sequences.

[0392] According to a further particularly preferred embodiment, the present invention provides mRNA comprising lipid nanoparticles wherein the mRNA comprises an mRNA sequence as defined herein comprising at least one coding region encoding at least one antigenic peptide or protein derived from neuraminidase (NA) of an influenza A virus, wherein the coding region comprises or consists of any one of the (modified) RNA sequences according to SEQ ID NOs: 142080-154445, or of a fragment or variant of any one of these sequences.

[0393] According to a further particularly preferred embodiment, the present invention provides mRNA comprising lipid nanoparticles wherein the mRNA comprises an mRNA sequence as defined herein comprising at least one coding region encoding at least one antigenic peptide or protein derived from neuraminidase (NA) of an influenza B virus, wherein the coding region comprises or consists of any one of the (modified) RNA sequences according to SEQ ID NOs: 156625-158552 or of a fragment or variant of any one of these sequences.

[0394] According to a further particularly preferred embodiment, the present invention provides mRNA comprising lipid nanoparticles wherein the mRNA comprises an mRNA sequence as defined herein comprising at least one coding region encoding at least one antigenic peptide or protein derived from glycoprotein of a Rabies virus, wherein the coding region comprises or consists of any one of the (modified) RNA sequences according to SEQ ID NOs: 158553-160060 or of a fragment or variant of any one of these sequences.

[0395] According to a further particularly preferred embodiment, the present invention provides mRNA comprising lipid nanoparticles wherein the mRNA comprises an mRNA sequence as defined herein comprising at least one coding region encoding at least one antigenic peptide or protein derived from an Ebola virus, wherein the coding region comprises or consists of any one of the (modified) RNA sequences according to SEQ ID NOs: 20-44 of the patent application WO2016097065, or fragments or variants of these sequences. In this context, SEQ ID NOs: 20-44 of WO2016097065 and the disclosure relating to SEQ ID NOs: 20-44 of WO2016097065 are incorporated herein by reference.

[0396] In a further preferred embodiment, the at least one coding region of the mRNA sequence according to the invention comprises or consists of an RNA sequence identical to or having a sequence identity of at least 5%, 10%, 20%, 30%, 40%, 50%, 60%, 70%, 80%, 85%, 86%, 87%, 88%, 89%, 90%, 91%, 92%, 93%, 94%, 95%, 96%, 97%, 98%, or 99%, preferably of at least 70%, more preferably of at least 80%, even more preferably at least 85%, even more preferably of at least 90% and most preferably of at least 95% or even 97%, with any one of the (modified) RNA sequences according to SEQ ID NOs: 128049-160060, or of a fragment or variant of any one of these sequences.

[0397] According to a particularly preferred embodiment, the at least one coding region of the mRNA sequence according to the invention comprises or consists of an RNA sequence having a sequence identity of at least 80% with any one of the (modified) RNA sequences according to SEQ ID NOs: 128049-160060 or of a fragment or variant of any one of these sequences.

[0398] Codon-Optimized Sequences:

[0399] As described above it is preferred according to the invention, that all codons of the wild type sequence which code for a tRNA, which is relatively rare in the cell, are exchanged for a codon which codes for a tRNA, which is relatively frequent in the cell and which, in each case, carries the same amino acid as the relatively rare tRNA. Therefore it is particularly preferred that the most frequent codons are used for each encoded amino acid (see Table 1a, “Human codon usage table”, most frequent codons are marked with asterisks). Such an optimization procedure increases the codon adaptation index (CAI) and ultimately maximises the CAI. In the context of the invention, sequences with increased or maximized CAI are typically referred to as “codon-optimized” sequences and/or CAI increased and/or maximized sequences. According to a preferred embodiment, the mRNA compound comprising an mRNA sequence of the present invention comprises at least one coding region, wherein the coding region/sequence is codon-optimized as described herein. More preferably, the codon adaptation index (CAI) of the at least one coding sequence is at least 0.5, at least 0.8, at least 0.9 or at least 0.95. Most preferably, the codon adaptation index (CAI) of the at least one coding sequence is 1.

[0400] For example, in the case of the amino acid alanine (Ala) present in the amino acid sequence encoded by the at least one coding sequence of the RNA according to the invention, the wild type coding sequence is adapted in a way that the most frequent human codon “GCC” is always used for said amino acid, or for the amino acid Cysteine (Cys), the wild type sequence is adapted in a way that the most frequent human codon “TGC” is always used for said amino acid etc.

[0401] According to a preferred embodiment, the present invention provides mRNA comprising lipid nanoparticles wherein the mRNA comprises an mRNA sequence as defined herein comprising at least one coding region, wherein the coding region comprises or consists of any one of the (modified) RNA sequences according to SEQ ID NOs: 160061-192072 or of a fragment or variant of any one of these sequences.

[0402] According to a particularly preferred embodiment, the present invention provides mRNA comprising lipid nanoparticles wherein the mRNA comprises an mRNA sequence as defined herein comprising at least one coding region encoding at least one antigenic peptide or protein derived from hemagglutinin (HA) of an influenza A virus, wherein the coding region comprises or consists of any one of the (modified) RNA sequences according to SEQ ID NOs: 160061-174091, or of a fragment or variant of any one of these sequences.

[0403] According to a further particularly preferred embodiment, the present invention provides mRNA comprising lipid nanoparticles wherein the mRNA comprises an mRNA sequence as defined herein comprising at least one coding region encoding at least one antigenic peptide or protein derived from hemagglutinin (HA) of an influenza B virus, wherein the coding region comprises or consists of any one of the (modified) RNA sequences according to SEQ ID NOs: 186458-188636, or of a fragment or variant of any one of these sequences.

[0404] According to a further particularly preferred embodiment, the present invention provides mRNA comprising lipid nanoparticles wherein the mRNA comprises an mRNA sequence as defined herein comprising at least one coding region encoding at least one antigenic peptide or protein derived from neuraminidase (NA) of an influenza A virus, wherein the coding region comprises or consists of any one of the (modified) RNA sequences according to SEQ ID NOs: 174092-186457 or of a fragment or variant of any one of these sequences.

[0405] According to a further particularly preferred embodiment, the present invention provides mRNA comprising lipid nanoparticles wherein the mRNA comprises an mRNA sequence as defined herein comprising at least one coding region encoding at least one antigenic peptide or protein derived from neuraminidase (NA) of an influenza B virus, wherein the coding region comprises or consists of any one of the (modified) RNA sequences according to SEQ ID NOs: 188637-190564, or of a fragment or variant of any one of these sequences.

[0406] According to a further particularly preferred embodiment, the present invention provides mRNA comprising lipid nanoparticles wherein the mRNA comprises an mRNA sequence as defined herein comprising at least one coding region encoding at least one antigenic peptide or protein derived from glycoprotein of a Rabies virus, wherein the coding region comprises or consists of any one of the (modified) RNA sequences according to SEQ ID NOs: 190565-192072 or of a fragment or variant of any one of these sequences.

[0407] In a further preferred embodiment, the at least one coding region of the mRNA sequence according to the invention comprises or consists of an RNA sequence identical to or having a sequence identity of at least 5%, 10%, 20%, 30%, 40%, 50%, 60%, 70%, 80%, 85%, 86%, 87%, 88%, 89%, 90%, 91%, 92%, 93%, 94%, 95%, 96%, 97%, 98%, or 99%, preferably of at least 70%, more preferably of at least 80%, even more preferably at least 85%, even more preferably of at least 90% and most preferably of at least 95% or even 97%, with any one of the (modified) RNA sequences according to SEQ ID NOs: 160061-192072, or of a fragment or variant of any one of these sequences.

[0408] According to a particularly preferred embodiment, the at least one coding region of the mRNA sequence according to the invention comprises or consists of an RNA sequence having a sequence identity of at least 80% with any one of the (modified) RNA sequences according to SEQ ID NOs: 160061-192072 or of a fragment or variant of any one of these sequences.

[0409] C-Optimized Sequences:

[0410] According to another embodiment, the mRNA compound comprising an mRNA sequence of the present invention may be modified by modifying, preferably increasing, the cytosine (C) content of the mRNA sequence, preferably of the coding region of the mRNA sequence.

[0411] In a particularly preferred embodiment of the present invention, the C content of the coding region of the mRNA sequence of the present invention is modified, preferably increased, compared to the C content of the coding region of the respective wild type mRNA, i.e. the unmodified mRNA. The amino acid sequence encoded by the at least one coding region of the mRNA sequence of the present invention is preferably not modified as compared to the amino acid sequence encoded by the respective wild type mRNA.

[0412] In a preferred embodiment of the present invention, the modified mRNA sequence is modified such that at least 10%, 20%, 30%, 40%, 50%, 60%, 70% or 80%, or at least 90% of the theoretically possible maximum cytosine-content or even a maximum cytosine-content is achieved.

[0413] In further preferred embodiments, at least 10%, 20%, 30%, 40%, 50%, 60%, 70%, 80%, 90% or even 100% of the codons of the target mRNA wild type sequence, which are “cytosine content optimizable” are replaced by codons having a higher cytosine-content than the ones present in the wild type sequence.

[0414] In a further preferred embodiment, some of the codons of the wild type coding sequence may additionally be modified such that a codon for a relatively rare tRNA in the cell is exchanged by a codon for a relatively frequent tRNA in the cell, provided that the substituted codon for a relatively frequent tRNA carries the same amino acid as the relatively rare tRNA of the original wild type codon. Preferably, all of the codons for a relatively rare tRNA are replaced by a codon for a relatively frequent tRNA in the cell, except codons encoding amino acids, which are exclusively encoded by codons not containing any cytosine, or except for glutamine (Gln), which is encoded by two codons each containing the same number of cytosines.

[0415] In a further preferred embodiment of the present invention, the modified target mRNA is modified such that at least 80%, or at least 90% of the theoretically possible maximum cytosine-content or even a maximum cytosine-content is achieved by means of codons, which code for relatively frequent tRNAs in the cell, wherein the amino acid sequence remains unchanged.

[0416] Due to the naturally occurring degeneracy of the genetic code, more than one codon may encode a particular amino acid. Accordingly, 18 out of 20 naturally occurring amino acids are encoded by more than one codon (with Tryp and Met being an exception), e.g. by 2 codons (e.g. Cys, Asp, Glu), by three codons (e.g. Ile), by 4 codons (e.g. A1, Gly, Pro) or by 6 codons (e.g. Leu, Arg, Ser). However, not all codons encoding the same amino acid are utilized with the same frequency under in vivo conditions. Depending on each single organism, a typical codon usage profile is established.

[0417] The term “cytosine content-optimizable codon” as used within the context of the present invention refers to codons, which exhibit a lower content of cytosines than other codons encoding the same amino acid. Accordingly, any wild type codon, which may be replaced by another codon encoding the same amino acid and exhibiting a higher number of cytosines within that codon, is considered to be cytosine-optimizable (C-optimizable). Any such substitution of a C-optimizable wild type codon by the specific C-optimized codon within a wild type coding region increases its overall C-content and reflects a C-enriched modified mRNA sequence. According to a preferred embodiment, the mRNA sequence of the present invention, preferably the at least one coding region of the mRNA sequence of the present invention comprises or consists of a C-maximized mRNA sequence containing C-optimized codons for all potentially C-optimizable codons. Accordingly, 100% or all of the theoretically replaceable C-optimizable codons are preferably replaced by C-optimized codons over the entire length of the coding region.

[0418] In this context, cytosine-content optimizable codons are codons, which contain a lower number of cytosines than other codons coding for the same amino acid.

[0419] Any of the codons GCG, GCA, GCU codes for the amino acid Ala, which may be exchanged by the codon GCC encoding the same amino acid, and/or

[0420] the codon UGU that codes for Cys may be exchanged by the codon UGC encoding the same amino acid, and/or

[0421] the codon GAU which codes for Asp may be exchanged by the codon GAC encoding the same amino acid, and/or

[0422] the codon that UUU that codes for Phe may be exchanged for the codon UUC encoding the same amino acid, and/or

[0423] any of the codons GGG, GGA, GGU that code Gly may be exchanged by the codon GGC encoding the same amino acid, and/or

[0424] the codon CAU that codes for His may be exchanged by the codon CAC encoding the same amino acid, and/or

[0425] any of the codons AUA, AUU that code for Ile may be exchanged by the codon AUC, and/or

[0426] any of the codons UUG, UUA, CUG, CUA, CUU coding for Leu may be exchanged by the codon CUC encoding the same amino acid, and/or

[0427] the codon AAU that codes for Asn may be exchanged by the codon AAC encoding the same amino acid, and/or

[0428] any of the codons CCG, CCA, CCU coding for Pro may be exchanged by the codon CCC encoding the same amino acid, and/or

[0429] any of the codons AGG, AGA, CGG, CGA, CGU coding for Arg may be exchanged by the codon CGC encoding the same amino acid, and/or

[0430] any of the codons AGU, AGC, UCG, UCA, UCU coding for Ser may be exchanged by the codon UCC encoding the same amino acid, and/or

[0431] any of the codons ACG, ACA, ACU coding for Thr may be exchanged by the codon ACC encoding the same amino acid, and/or

[0432] any of the codons GUG, GUA, GUU coding for Val may be exchanged by the codon GUC encoding the same amino acid, and/or

[0433] the codon UAU coding for Tyr may be exchanged by the codon UAC encoding the same amino acid.

[0434] In any of the above instances, the number of cytosines is increased by 1 per exchanged codon. Exchange of all non C-optimized codons (corresponding to C-optimizable codons) of the coding region results in a C-maximized coding sequence. In the context of the invention, at least 70%, preferably at least 80%, more preferably at least 90%, of the non C-optimized codons within the at least one coding region of the mRNA sequence according to the invention are replaced by C-optimized codons.

[0435] It may be preferred that for some amino acids the percentage of C-optimizable codons replaced by C-optimized codons is less than 70%, while for other amino acids the percentage of replaced codons is higher than 70% to meet the overall percentage of C-optimization of at least 70% of all C-optimizable wild type codons of the coding region.

[0436] Preferably, in a C-optimized mRNA sequence of the invention, at least 50% of the C-optimizable wild type codons for any given amino acid are replaced by C-optimized codons, e.g. any modified C-enriched mRNA sequence preferably contains at least 50% C-optimized codons at C-optimizable wild type codon positions encoding any one of the above mentioned amino acids Ala, Cys, Asp, Phe, Gly, His, Ile, Leu, Asn, Pro, Arg, Ser, Thr, Val and Tyr, preferably at least 60%.

[0437] In this context codons encoding amino acids, which are not cytosine content-optimizable and which are, however, encoded by at least two codons, may be used without any further selection process. However, the codon of the wild type sequence that codes for a relatively rare tRNA in the cell, e.g. a human cell, may be exchanged for a codon that codes for a relatively frequent tRNA in the cell, wherein both code for the same amino acid. Accordingly, the relatively rare codon GAA coding for Glu may be exchanged by the relative frequent codon GAG coding for the same amino acid, and/or

[0438] the relatively rare codon AAA coding for Lys may be exchanged by the relative frequent codon AAG coding for the same amino acid, and/or

[0439] the relatively rare codon CAA coding for Gin may be exchanged for the relative frequent codon CAG encoding the same amino acid.

[0440] In this context, the amino acids Met (AUG) and Trp (UGG), which are encoded by only one codon each, remain unchanged. Stop codons are not cytosine-content optimized, however, the relatively rare stop codons amber, ochre (UAA, UAG) may be exchanged by the relatively frequent stop codon opal (UGA).

[0441] The single substitutions listed above may be used individually as well as in all possible combinations in order to optimize the cytosine-content of the modified mRNA sequence compared to the wild type mRNA sequence.

[0442] Accordingly, the at least one coding sequence as defined herein may be changed compared to the coding region of the respective wild type mRNA in such a way that an amino acid encoded by at least two or more codons, of which one comprises one additional cytosine, such a codon may be exchanged by the C-optimized codon comprising one additional cytosine, wherein the amino acid is preferably unaltered compared to the wild type sequence.

[0443] According to a preferred embodiment, the the present invention provides mRNA comprising lipid nanoparticles wherein the mRNA comprises an mRNA sequence as defined herein comprising at least one coding region, wherein the coding region comprises or consists of any one of the (modified) RNA sequences according to SEQ ID NOs: 96037-128048, or of a fragment or variant of any one of these sequences.

[0444] According to a particularly preferred embodiment, the present invention provides mRNA comprising lipid nanoparticles wherein the mRNA comprises an mRNA sequence as defined herein comprising at least one coding region encoding at least one antigenic peptide or protein derived from hemagglutinin (HA) of an influenza A virus, wherein the coding region comprises or consists of any one of the (modified) RNA sequences according to SEQ ID NOs: 96037-110067, or of a fragment or variant of any one of these sequences.

[0445] According to a further particularly preferred embodiment, the present invention provides mRNA comprising lipid nanoparticles wherein the mRNA comprises an mRNA sequence as defined herein comprising at least one coding region encoding at least one antigenic peptide or protein derived from hemagglutinin (HA) of an influenza B virus, wherein the coding region comprises or consists of any one of the (modified) RNA sequences according to SEQ ID NOs: 122434-124612 or of a fragment or variant of any one of these sequences.

[0446] According to a further particularly preferred embodiment, the present invention provides mRNA comprising lipid nanoparticles wherein the mRNA comprises an mRNA sequence as defined herein comprising at least one coding region encoding at least one antigenic peptide or protein derived from neuraminidase (NA) of an influenza A virus, wherein the coding region comprises or consists of any one of the (modified) RNA sequences according to SEQ ID NOs: 110068-122433, or of a fragment or variant of any one of these sequences.

[0447] According to a further particularly preferred embodiment, the present invention provides mRNA comprising lipid nanoparticles wherein the mRNA comprises an mRNA sequence as defined herein comprising at least one coding region encoding at least one antigenic peptide or protein derived from neuraminidase (NA) of an influenza B virus, wherein the coding region comprises or consists of any one of the (modified) RNA sequences according to SEQ ID NOs: 124613-126540, or of a fragment or variant of any one of these sequences.

[0448] According to a further particularly preferred embodiment, the present invention provides mRNA comprising lipid nanoparticles wherein the mRNA comprises an mRNA sequence as defined herein comprising at least one coding region encoding at least one antigenic peptide or protein derived from glycoprotein of a Rabies virus, wherein the coding region comprises or consists of any one of the (modified) RNA sequences according to SEQ ID NOs: 126541-128048 or of a fragment or variant of any one of these sequences.

[0449] In a further preferred embodiment, the at least one coding region of the mRNA sequence according to the invention comprises or consists of an RNA sequence identical to or having a sequence identity of at least 5%, 10%, 20%, 30%, 40%, 50%, 60%, 70%, 80%, 85%, 86%, 87%, 88%, 89%, 90%, 91%, 92%, 93%, 94%, 95%, 96%, 97%, 98%, or 99%, preferably of at least 70%, more preferably of at least 80%, even more preferably at least 85%, even more preferably of at least 90% and most preferably of at least 95% or even 97%, with any one of the (modified) RNA sequences according to SEQ ID NOs: 96037-128048, or of a fragment or variant of any one of these sequences.

[0450] According to a particularly preferred embodiment, the at least one coding region of the mRNA compound comprising an mRNA sequence according to the invention comprises or consists of an RNA sequence having a sequence identity of at least 80% with any one of the (modified) RNA sequences according to SEQ ID NOs: 96037-128048 or of a fragment or variant of any one of these sequences.

[0451] According to a particularly preferred embodiment, the present invention provides mRNA comprising lipid nanoparticles wherein the mRNA comprises an mRNA sequence, comprising at least one coding region as defined herein, wherein the G/C content of the at least one coding region of the mRNA sequence is increased compared to the G/C content of the corresponding coding region of the corresponding wild type mRNA, and/or

[0452] wherein the C content of the at least one coding region of the mRNA sequence is increased compared to the C content of the corresponding coding region of the corresponding wild type mRNA, and/or

[0453] wherein the codons in the at least one coding region of the mRNA sequence are adapted to human codon usage, wherein the codon adaptation index (CAI) is preferably increased or maximised in the at least one coding region of the mRNA sequence,

[0454] and wherein the amino acid sequence encoded by the mRNA sequence is preferably not being modified compared to the amino acid sequence encoded by the corresponding wild type mRNA.

[0455] 5′-CAP Structure:

[0456] According to another preferred embodiment of the invention, a modified mRNA sequence as defined herein, can be modified by the addition of a so-called “5′-CAP structure”, which preferably stabilizes the mRNA as described herein. A 5′-CAP is an entity, typically a modified nucleotide entity, which generally“caps” the 5′-end of a mature mRNA. A 5′-CAP may typically be formed by a modified nucleotide, particularly by a derivative of a guanine nucleotide. Preferably, the 5′-CAP is linked to the 5′-terminus via a 5′-5′-triphosphate linkage. A 5′-CAP may be methylated, e.g. m7GpppN, wherein N is the terminal 5′ nucleotide of the nucleic acid carrying the 5′-CAP, typically the 5′-end of an mRNA. m7GpppN is the 5′-CAP structure, which naturally occurs in mRNA transcribed by polymerase II and is therefore preferably not considered as modification comprised in a modified mRNA in this context. Accordingly, a modified mRNA sequence of the present invention may comprise a m7GpppN as 5′-cap, but additionally the modified mRNA sequence typically comprises at least one further modification as defined herein.

[0457] Further examples of 5′-CAP structures include glyceryl, inverted deoxy abasic residue (moiety), 4′,5′ methylene nucleotide, 1-(beta-D-erythrofuranosyl) nucleotide, 4′-thio nucleotide, carbocyclic nucleotide, 1,5-anhydrohexitol nucleotide, L-nucleotides, alpha-nucleotide, modified base nucleotide, threo-pentofuranosyl nucleotide, acyclic 3′,4′-seco nucleotide, acyclic 3,4-dihydroxybutyl nucleotide, acyclic 3,5 dihydroxypentyl nucleotide, 3′-3′-inverted nucleotide moiety, 3′-3′-inverted abasic moiety, 3′-2′-inverted nucleotide moiety, 3′-2′-inverted abasic moiety, 1,4-butanediol phosphate, 3′-phosphoramidate, hexylphosphate, aminohexyl phosphate, 3′-phosphate, 3′phosphorothioate, phosphorodithioate, or bridging or non-bridging methylphosphonate moiety. These modified 5′-CAP structures are regarded as at least one modification in this context.

[0458] Particularly preferred modified 5′-CAP structures are cap1 (methylation of the ribose of the adjacent nucleotide of m7G), cap2 (additional methylation of the ribose of the 2nd nucleotide downstream of the m7G), cap3 (additional methylation of the ribose of the 3rd nucleotide downstream of the m7G), cap4 (methylation of the ribose of the 4th nucleotide downstream of the m7G), ARCA (anti-reverse CAP analogue, modified ARCA (e.g. phosphothioate modified ARCA), inosine, N1-methyl-guanosine, 2′-fluoro-guanosine, 7-deaza-guanosine, 8-oxo-guanosine, 2-amino-guanosine, LNA-guanosine, and 2-azido-guanosine. Accordingly, the RNA according to the invention preferably comprises a 5′-CAP structure.

[0459] Poly(A) Sequence/Tail:

[0460] According to a further preferred embodiment, the mRNA compound comprising an mRNA sequence of the present invention may contain a poly-A tail on the 3′-terminus of typically about 10 to 200 adenosine nucleotides, preferably about 10 to 100 adenosine nucleotides, more preferably about 40 to 80 adenosine nucleotides or even more preferably about 50 to 70 adenosine nucleotides.

[0461] Preferably, the poly(A) sequence in the mRNA compound comprising an mRNA sequence of the present invention is derived from a DNA template by RNA in vitro transcription. Alternatively, the poly(A) sequence may also be obtained in vitro by common methods of chemical-synthesis without being necessarily transcribed from a DNA-progenitor. Moreover, poly(A) sequences, or poly(A) tails may be generated by enzymatic polyadenylation of the RNA according to the present invention using commercially available polyadenylation kits and corresponding protocols known in the art.

[0462] Alternatively, the mRNA as described herein optionally comprises a polyadenylation signal, which is defined herein as a signal, which conveys polyadenylation to a (transcribed) RNA by specific protein factors (e.g. cleavage and polyadenylation specificity factor (CPSF), cleavage stimulation factor (CstF), cleavage factors I and II (CF I and CF II), poly(A) polymerase (PAP)). In this context, a consensus polyadenylation signal is preferred comprising the NN(U/T)ANA consensus sequence. In a particularly preferred aspect, the polyadenylation signal comprises one of the following sequences: AA(U/T)AAA or A(U/T)(U/T)AAA (wherein uridine is usually present in RNA and thymidine is usually present in DNA).

[0463] Poly(C) Sequence:

[0464] According to a further preferred embodiment, the mRNA compound comprising an mRNA sequence of the present invention may contain a poly(C) tail on the 3′-terminus of typically about 10 to 200 cytosine nucleotides, preferably about 10 to 100 cytosine nucleotides, more preferably about 20 to 70 cytosine nucleotides or even more preferably about 20 to 60 or even 10 to 40 cytosine nucleotides.

[0465] In one preferred embodiment the mRNA compound comprising an mRNA sequence comprises, preferably in 5′-to 3′-direction:

[0466] a) a 5′-CAP structure, preferably m7GpppN;

[0467] b) at least one coding region encoding at least one antigenic peptide or protein,

[0468] c) optionally, a poly(A) sequence, preferably comprising 64 adenosines;

[0469] d) optionally, a poly(C) sequence, preferably comprising 30 cytosines.

[0470] In a more preferred embodiment the mRNA sequence comprises, preferably in 5′- to 3′-direction:
[0471] a) a 5′-CAP structure, preferably m7GpppN;
[0472] b) at least one coding region encoding at least one antigenic peptide or protein derived from a protein of an influenza or rabies virus or a fragment or variant thereof,
[0473] c) optionally, a poly(A) sequence, preferably comprising 64 adenosines;
[0474] d) optionally, a poly(C) sequence, preferably comprising 30 cytosines.

[0475] In a particularly preferred embodiment the mRNA sequence comprises, preferably in 5′- to 3′-direction:
[0476] a) a 5′-CAP structure, preferably m7GpppN;
[0477] b) at least one coding region encoding at least one antigenic peptide or protein derived from a protein of an influenza virus or a rabies virus or a fragment or variant thereof, preferably comprising or consisting of any one of the nucleic acid sequences as disclosed in the sequence listing having a numeric identifier <223> which starts with “derived and/or modified CDS sequence (wt)” or “derived and/or modified CDS sequence (opt1)”, “derived and/or modified CDS sequence (opt2)”, “derived and/or modified CDS sequence (opt3)”, “derived and/or modified CDS sequence (opt4)”, or “derived and/or modified CDS sequence (opt5)”, or respectively “column B” or “column C” of Tables 1-5 or FIGS. 20-24 of PCT/EP2016/075843, SEQ ID NOs: 32013-64024, or SEQ ID NOs: 64025-224084 or of a fragment or variant of any one of these sequences),
[0478] c) optionally, a poly(A) sequence, preferably comprising 64 adenosines;
[0479] d) optionally, a poly(C) sequence, preferably comprising 30 cytosines.

[0480] UTRs:

[0481] In a preferred embodiment, the mRNA compound comprising an mRNA sequence according to the invention comprises at least one 5′- or 3′-UTR element. In this context, an UTR element comprises or consists of a nucleic acid sequence, which is derived from the 5′- or 3′-UTR of any naturally occurring gene or which is derived from a fragment, a homolog or a variant of the 5′- or 3′-UTR of a gene. Preferably, the 5′- or 3′-UTR element used according to the present invention is heterologous to the at least one coding region of the mRNA sequence of the invention. Even if 5′- or 3′-UTR elements derived from naturally occurring genes are preferred, also synthetically engineered UTR elements may be used in the context of the present invention.

[0482] 3′-UTR Elements:

[0483] The term “3′-UTR element” typically refers to a nucleic acid sequence, which comprises or consists of a nucleic acid sequence that is derived from a 3′-UTR or from a variant of a 3′-UTR. A 3′-UTR element in the sense of the present invention may represent the 3′-UTR of an RNA, preferably an mRNA. Thus, in the sense of the present invention, preferably, a 3′-UTR element may be the 3′-UTR of an RNA, preferably of an mRNA, or it may be the transcription template for a 3′-UTR of an RNA. Thus, a 3′-UTR element preferably is a nucleic acid sequence which corresponds to the 3′-UTR of an RNA, preferably to the 3′-UTR of an mRNA, such as an mRNA obtained by transcription of a genetically engineered vector construct. Preferably, the 3′-UTR element fulfils the function of a 3′-UTR or encodes a sequence which fulfils the function of a 3′-UTR.

[0484] Preferably, the at least one 3′-UTR element comprises or consists of a nucleic acid sequence derived from the 3′-UTR of a chordate gene, preferably a vertebrate gene, more preferably a mammalian gene, most preferably a human gene, or from a variant of the 3′-UTR of a chordate gene, preferably a vertebrate gene, more preferably a mammalian gene, most preferably a human gene.

[0485] Preferably, the mRNA compound comprising an mRNA sequence of the present invention comprises a 3′-UTR element, which may be derivable from a gene that relates to an mRNA with an enhanced half-life (that provides a stable mRNA), for example a 3′-UTR element as defined and described below. Preferably, the 3′-UTR element is a nucleic acid sequence derived from a 3′-UTR of a gene, which preferably encodes a stable mRNA, or from a homolog, a fragment or a variant of said gene.

[0486] In a particularly preferred embodiment, the 3′-UTR element comprises or consists of a nucleic acid sequence, which is derived from a 3′-UTR of a gene selected from the group consisting of an albumin gene, an α-globin gene, a β-globin gene, a tyrosine hydroxylase gene, a lipoxygenase gene, and a collagen alpha gene, such as a collagen alpha 1(I) gene, or from a variant of a 3′-UTR of a gene selected from the group consisting of an albumin gene, an α-globin gene, a β-globin gene, a tyrosine hydroxylase gene, a lipoxygenase gene, and a collagen alpha gene, such as a collagen alpha 1(I) gene according to SEQ ID NOs: 1369-1390 of the patent application WO2013/143700, whose disclosure is incorporated herein by reference, or from a homolog, a fragment or a variant thereof. In a particularly preferred embodiment, the 3′-UTR element comprises or consists of a nucleic acid sequence which is derived from a 3′-UTR of an albumin gene, preferably a vertebrate albumin gene, more preferably a mammalian albumin gene, most preferably a human albumin gene according to SEQ ID NO: 224301 or SEQ ID NO: 224303 or the corresponding RNA sequences SEQ ID NO: 224300 or SEQ ID NO: 224304.

Human albumin 3′-UTR SEQ ID NO 224301
CATCACATTTAAAAGCATCTCAGCCTACCATGAGAATAAGAGAAAGAAAAT
GAAGATCAAAAGCTTATTCATCTGTTTTTCTTTTTCGTTGGTGTAAAGCCA
ACACCCTGTCTAAAAAACATAAATTTCTTTAATCATTTTGCCTCTTTTCTC
TGTGCTTCAATTAATAAAAAATGGAAAGAATCT
(corresponding to SEQ ID NO: 1369 of the patent
application WO2013/143700).

[0487] In this context it is particularly preferred that the mRNA compound comprising an mRNA sequence according to the invention comprises a 3′-UTR element comprising a corresponding RNA sequence derived from the nucleic acids according to SEQ ID NOs: 1369-1390 of the patent application WO2013/143700 or a fragment, homolog or variant thereof.

[0488] Most preferably the 3′-UTR element comprises the nucleic acid sequence derived from a fragment of the human albumin gene according to SEQ ID NO: 224303.

albumin7 3′-UTR
CATCACATTTAAAAGCATCTCAGCCTACCATGAGAATAAGAGAAAGAAAAT
GAAGATCAATAGCTTATTCATCTCTTTTTCTTTTTCGTTGGTGTAAAGCCA
ACACCCTGTCTAAAAAACATAAATTTCTTTAATCATTTTGCCTCTTTTCTC
TGTGCTTCAATTAATAAAAAATGGAAAGAACCT
(SEQ ID NO: 224303 corresponding to SEQ ID NO: 1376
of the patent application WO2013143700).

[0489] In this context, it is particularly preferred that the 3′-UTR element of the mRNA sequence according to the present invention comprises or consists of a corresponding RNA sequence of the nucleic acid sequence according to SEQ ID NO: 224301 or SEQ ID NO: 224303 as shown in SEQ ID NOs: 224302 or SEQ ID NO: 224304.

[0490] In another particularly preferred embodiment, the 3′-UTR element comprises or consists of a nucleic acid sequence which is derived from a 3′-UTR of an α- or β-globin gene, preferably a vertebrate α- or β-globin gene, more preferably a mammalian α- or β-globin gene, most preferably a human α- or β globin gene according to SEQ ID NOs: 224291, 224293, 224295, 224297 or the corresponding RNA sequences SEQ ID NOs: 224292, 224294, 224296, 224298.

3′-UTR of Homo sapiens hemoglobin, alpha 1 (HBA1)
GCTGGAGCCTCGGTGGCCATGCTTCTTGCCCCTTGGGCCTCCCCCCAGCCC
CTCCTCCCCTTCCTGCACCCGTACCCCCGTGGTCTTTGAATAAAGTCTGAG
TGGGCGGC
(SEQ ID NO: 224291 corresponding to SEQ ID NO: 1370
of the patent application WO2013/143700).
3′-UTR of Homo sapiens hemoglobin, alpha 2 (HBA2)
GCTGGAGCCTCGGTAGCCGTTCCTCCTGCCCGCTGGGCCTCCCAACGGGCC
CTCCTCCCCTCCTTGCACCGGCCCTTCCTGGTCTTTGAATAAAGTCTGAGT
GGGCAG
(SEQ ID NO: 224293 corresponding to SEQ ID NO: 1371
of the patent application WO2013/143700).
3′-UTR of Homo sapiens hemoglobin, beta (HBB)
GCTCGCTTTCTTGCTGTCCAATTTCTATTAAAGGTTCCTTTGTTCCCTAAG
TCCAACTACTAAACTGGGGGATATTATGAAGGGCCTTGAGCATCTGGATTC
TGCCTAATAAAAAACATTTATTTTCATTGC
(SEQ ID NO: 224295 corresponding to SEQ ID NO: 1372
of the patent application WO2013/143700).

[0491] For example, the 3′-UTR element may comprise or consist of the center, α-complex-binding portion of the 3′-UTR of an α-globin gene, such as of a human α-globin gene, or a homolog, a fragment, or a variant of an α-globin gene, preferably according to SEQ ID NO: 224297.

Center, a-complex-binding portion of the 3′-UTR of
an α-globin gene (also named herein as “muag”)
GCCCGATGGGCCTCCCAACGGGCCCTCCTCCCCTCCTTGCACCG
(SEQ ID NO: 224297 corresponding to SEQ ID NO: 1393
of the patent application WO2013/143700).

[0492] In this context it is particularly preferred that the 3′-UTR element of the mRNA sequence according to the invention comprises or consists of a corresponding RNA sequence of the nucleic acid sequence according to SEQ ID NO: 224297 as shown in SEQ ID NO: 224298, or a homolog, a fragment or variant thereof.

[0493] The term “a nucleic acid sequence which is derived from the 3′-UTR of a [ . . . ] gene” preferably refers to a nucleic acid sequence which is based on the 3′-UTR sequence of a [ . . . ] gene or on a part thereof, such as on the 3′-UTR of an albumin gene, an α-globin gene, a β-globin gene, a tyrosine hydroxylase gene, a lipoxygenase gene, or a collagen alpha gene, such as a collagen alpha 1(I) gene, preferably of an albumin gene or on a part thereof. This term includes sequences corresponding to the entire 3′-UTR sequence, i.e. the full length 3′-UTR sequence of a gene, and sequences corresponding to a fragment of the 3′-UTR sequence of a gene, such as an albumin gene, α-globin gene, β-globin gene, tyrosine hydroxylase gene, lipoxygenase gene, or collagen alpha gene, such as a collagen alpha 1(I) gene, preferably of an albumin gene.

[0494] The term “a nucleic acid sequence which is derived from a variant of the 3′-UTR of a [ . . . ] gene” preferably refers to a nucleic acid sequence, which is based on a variant of the 3′-UTR sequence of a gene, such as on a variant of the 3′-UTR of an albumin gene, an α-globin gene, a β-globin gene, a tyrosine hydroxylase gene, a lipoxygenase gene, or a collagen alpha gene, such as a collagen alpha 1(I) gene, or on a part thereof as described above. This term includes sequences corresponding to the entire sequence of the variant of the 3′-UTR of a gene, i.e. the full length variant 3′-UTR sequence of a gene, and sequences corresponding to a fragment of the variant 3′-UTR sequence of a gene. A fragment in this context preferably consists of a continuous stretch of nucleotides corresponding to a continuous stretch of nucleotides in the full-length variant 3′-UTR, which represents at least 20%, preferably at least 30%, more preferably at least 40%, more preferably at least 50%, even more preferably at least 60%, even more preferably at least 70%, even more preferably at least 80%, and most preferably at least 90% of the full-length variant 3′-UTR. Such a fragment of a variant, in the sense of the present invention, is preferably a functional fragment of a variant as described herein.

[0495] According to a preferred embodiment, the mRNA compound comprising an mRNA sequence according to the invention comprises a 5′-CAP structure and/or at least one 3′-untranslated region element (3′-UTR element), preferably as defined herein. More preferably, the RNA further comprises a 5′-UTR element as defined herein.

[0496] In one preferred embodiment the mRNA compound comprising an mRNA sequence comprises, preferably in 5′-to 3′-direction:
[0497] a) a 5′-CAP structure, preferably m7GpppN;
[0498] b) at least one coding region encoding at least one antigenic peptide or protein,
[0499] c) optionally a 3′-UTR element, preferably comprising or consisting of a nucleic acid sequence which is derived from an alpha globin gene, preferably comprising the corresponding RNA sequence of the nucleic acid sequence according to SEQ ID NO: 224297 as shown in SEQ ID NO: 224298, a homolog, a fragment or a variant thereof;
[0500] d) optionally, a poly(A) sequence, preferably comprising 64 adenosines;
[0501] e) optionally, a poly(C) sequence, preferably comprising 30 cytosines.

[0502] In a preferred embodiment the mRNA sequence comprises, preferably in 5′- to 3′-direction:
[0503] a) a 5′-CAP structure, preferably m7GpppN;
[0504] b) at least one coding region encoding at least one antigenic peptide or protein, preferably derived from a protein of an influenza virus or a Rabies virus or a fragment or variant thereof,
[0505] c) optionally a 3′-UTR element, preferably comprising or consisting of a nucleic acid sequence which is derived from an alpha globin gene, preferably comprising the corresponding RNA sequence of the nucleic acid sequence according to SEQ ID NO: 224297 as shown in SEQ ID NO: 224298, a homolog, a fragment or a variant thereof;
[0506] d) optionally, a poly(A) sequence, preferably comprising 64 adenosines;
[0507] e) optionally, a poly(C) sequence, preferably comprising 30 cytosines.

[0508] In a particularly preferred embodiment the mRNA sequence comprises, preferably in 5′- to 3′-direction:
[0509] a) a 5′-CAP structure, preferably m7GpppN;
[0510] b) at least one coding region encoding at least one antigenic peptide or protein preferably derived from a protein of an influenza virus or Rabies virus or a fragment or variant thereof, preferably comprising or consisting of any one of the nucleic acid sequences as disclosed in the sequence listing having a numeric identifier <223> which starts with “derived and/or modified CDS sequence (wt)” or “derived and/or modified CDS sequence (opt1)”, “derived and/or modified CDS sequence (opt2)”, “derived and/or modified CDS sequence (opt3)”, “derived and/or modified CDS sequence (opt4)”, or “derived and/or modified CDS sequence (opt5)”, or respectively “column B” or “column C” of Tables 1-5 or FIGS. 20-24 of PCT/EP2016/075843, SEQ ID NOs: 32013-64024, or SEQ ID NOs: 64025-224084 or of a fragment or variant of any one of these sequences,
[0511] c) optionally a 3′-UTR element, preferably comprising or consisting of a nucleic acid sequence which is derived from an alpha globin gene, preferably comprising the corresponding RNA sequence of the nucleic acid sequence according to SEQ ID NO: 224297 as shown in SEQ ID NO: 224298, a homolog, a fragment or a variant thereof;
[0512] d) optionally, a poly(A) sequence, preferably comprising 64 adenosines;
[0513] e) optionally, a poly(C) sequence, preferably comprising 30 cytosines; and

[0514] 5′-UTR Elements:

[0515] In a particularly preferred embodiment, the at least one mRNA compound comprising an mRNA sequence comprises at least one 5′-untranslated region element (5′-UTR element). Preferably, the at least one 5′-UTR element comprises or consists of a nucleic acid sequence, which is derived from the 5′-UTR of a TOP gene or which is derived from a fragment, homolog or variant of the 5′-UTR of a TOP gene.

[0516] It is particularly preferred that the 5′-UTR element does not comprise a TOP motif or a 5′-TOP, as defined above.

[0517] In some embodiments, the nucleic acid sequence of the 5′-UTR element, which is derived from a 5′-UTR of a TOP gene, terminates at its 3′-end with a nucleotide located at position 1, 2, 3, 4, 5, 6, 7, 8, 9 or 10 upstream of the start codon (e.g. A(U/T)G) of the gene or mRNA it is derived from. Thus, the 5′-UTR element does not comprise any part of the protein coding region. Thus, preferably, the only protein coding part of the at least one mRNA sequence is provided by the coding region.

[0518] The nucleic acid sequence derived from the 5′-UTR of a TOP gene is preferably derived from a eukaryotic TOP gene, preferably a plant or animal TOP gene, more preferably a chordate TOP gene, even more preferably a vertebrate TOP gene, most preferably a mammalian TOP gene, such as a human TOP gene.

[0519] For example, the 5′-UTR element is preferably selected from 5′-UTR elements comprising or consisting of a nucleic acid sequence, which is derived from a nucleic acid sequence selected from the group consisting of SEQ ID NOs: 1-1363, SEQ ID NO: 1395, SEQ ID NO: 1421 and SEQ ID NO: 1422 of the patent application WO2013/143700, whose disclosure is incorporated herein by reference, from the homologs of SEQ ID NOs: 1-1363, SEQ ID NO: 1395, SEQ ID NO: 1421 and SEQ ID NO: 1422 of the patent application WO2013/143700, from a variant thereof, or preferably from a corresponding RNA sequence. The term “homologs of SEQ ID NOs: 1-1363, SEQ ID NO: 1395, SEQ ID NO: 1421 and SEQ ID NO: 1422 of the patent application WO2013/143700” refers to sequences of other species than Homo sapiens, which are homologous to the sequences according to SEQ ID NOs: 1-1363, SEQ ID NO: 1395, SEQ ID NO: 1421 and SEQ ID NO: 1422 of the patent application WO2013/143700.

[0520] In a preferred embodiment, the 5′-UTR element of the mRNA compound comprising an mRNA sequence according to the invention comprises or consists of a nucleic acid sequence, which is derived from a nucleic acid sequence extending from nucleotide position 5 (i.e. the nucleotide that is located at position 5 in the sequence) to the nucleotide position immediately 5′ to the start codon (located at the 3′-end of the sequences), e.g. the nucleotide position immediately 5′ to the ATG sequence, of a nucleic acid sequence selected from SEQ ID NOs: 1-1363, SEQ ID NO: 1395, SEQ ID NO: 1421 and SEQ ID NO: 1422 of the patent application WO2013/143700, from the homologs of SEQ ID NOs: 1-1363, SEQ ID NO: 1395, SEQ ID NO: 1421 and SEQ ID NO: 1422 of the patent application WO2013/143700 from a variant thereof, or a corresponding RNA sequence. It is particularly preferred that the 5′-UTR element is derived from a nucleic acid sequence extending from the nucleotide position immediately 3′ to the 5′-TOP to the nucleotide position immediately 5′ to the start codon (located at the 3′-end of the sequences), e.g. the nucleotide position immediately 5′ to the ATG sequence, of a nucleic acid sequence selected from SEQ ID NOs: 1-1363, SEQ ID NO: 1395, SEQ ID NO: 1421 and SEQ ID NO: 1422 of the patent application WO2013/143700, from the homologs of SEQ ID NOs: 1-1363, SEQ ID NO: 1395, SEQ ID NO: 1421 and SEQ ID NO: 1422 of the patent application WO2013/143700, from a variant thereof, or a corresponding RNA sequence.

[0521] In a particularly preferred embodiment, the 5′-UTR element comprises or consists of a nucleic acid sequence, which is derived from a 5′-UTR of a TOP gene encoding a ribosomal protein or from a variant of a 5′-UTR of a TOP gene encoding a ribosomal protein. For example, the 5′-UTR element comprises or consists of a nucleic acid sequence, which is derived from a 5′-UTR of a nucleic acid sequence according to any of SEQ ID NOs: 67, 170, 193, 244, 259, 554, 650, 675, 700, 721, 913, 1016, 1063, 1120, 1138, and 1284-1360 of the patent application WO2013/143700, a corresponding RNA sequence, a homolog thereof, or a variant thereof as described herein, preferably lacking the 5′-TOP motif. As described above, the sequence extending from position 5 to the nucleotide immediately 5′ to the ATG (which is located at the 3′-end of the sequences) corresponds to the 5′-UTR of said sequences.

[0522] Preferably, the 5′-UTR element comprises or consists of a nucleic acid sequence, which is derived from a 5′-UTR of a TOP gene encoding a ribosomal Large protein (RPL) or from a homolog or variant of a 5′-UTR of a TOP gene encoding a ribosomal Large protein (RPL). For example, the 5′-UTR element comprises or consists of a nucleic acid sequence, which is derived from a 5′-UTR of a nucleic acid sequence according to any of SEQ ID NOs: 67, 259, 1284-1318, 1344, 1346, 1348-1354, 1357, 1358, 1421 and 1422 of the patent application WO2013/143700, a corresponding RNA sequence, a homolog thereof, or a variant thereof as described herein, preferably lacking the 5′-TOP motif.

[0523] In a particularly preferred embodiment, the 5′-UTR element comprises or consists of a nucleic acid sequence which is derived from the 5′-UTR of a ribosomal protein Large 32 gene, preferably from a vertebrate ribosomal protein Large 32 (L32) gene, more preferably from a mammalian ribosomal protein Large 32 (L32) gene, most preferably from a human ribosomal protein Large 32 (L32) gene, or from a variant of the 5′UTR of a ribosomal protein Large 32 gene, preferably from a vertebrate ribosomal protein Large 32 (L32) gene, more preferably from a mammalian ribosomal protein Large 32 (L32) gene, most preferably from a human ribosomal protein Large 32 (L32) gene, wherein preferably the 5′-UTR element does not comprise the 5′-TOP of said gene.

[0524] Accordingly, in a particularly preferred embodiment, the 5′-UTR element comprises or consists of a nucleic acid sequence, which has an identity of at least about 40%, preferably of at least about 50%, preferably of at least about 60%, preferably of at least about 70%, more preferably of at least about 80%, more preferably of at least about 90%, even more preferably of at least about 95%, even more preferably of at least about 99% to the nucleic acid sequence according to SEQ ID NO: 224287 or SEQ ID NO: 224288 (5′-UTR of human ribosomal protein Large 32 lacking the 5′-terminal oligopyrimidine tract: GGCGCTGCCTACGGAGGTGGCAGCCATCTCCTTCTCGGCATC; corresponding to SEQ ID NO: 1368 of the patent application WO2013/143700) or preferably to a corresponding RNA sequence, or wherein the at least one 5′-UTR element comprises or consists of a fragment of a nucleic acid sequence which has an identity of at least about 40%, preferably of at least about 50%, preferably of at least about 60%, preferably of at least about 70%, more preferably of at least about 80%, more preferably of at least about 90%, even more preferably of at least about 95%, even more preferably of at least about 99% to the nucleic acid sequence according to SEQ ID NO: 224287 or more preferably to a corresponding RNA sequence (SEQ ID NO: 224288), wherein, preferably, the fragment is as described above, i.e. being a continuous stretch of nucleotides representing at least 20% etc. of the full-length 5′-UTR. Preferably, the fragment exhibits a length of at least about 20 nucleotides or more, preferably of at least about 30 nucleotides or more, more preferably of at least about 40 nucleotides or more. Preferably, the fragment is a functional fragment as described herein.

[0525] In some embodiments, the mRNA compound comprising an mRNA sequence according to the invention comprises a 5′-UTR element, which comprises or consists of a nucleic acid sequence, which is derived from the 5′-UTR of a vertebrate TOP gene, such as a mammalian, e.g. a human TOP gene, selected from RPSA, RPS2, RPS3, RPS3A, RPS4, RPS5, RPS6, RPS7, RPS8, RPS9, RPS10, RPS11, RPS12, RPS13, RPS14, RPS15, RPS15A, RPS16, RPS17, RPS18, RPS19, RPS20, RPS21, RPS23, RPS24, RPS25, RPS26, RPS27, RPS27A, RPS28, RPS29, RPS30, RPL3, RPL4, RPL5, RPL6, RPL7, RPL7A, RPL8, RPL9, RPL10, RPL10A, RPL11, RPL12, RPL13, RPL13A, RPL14, RPL15, RPL17, RPL18, RPL18A, RPL19, RPL21, RPL22, RPL23, RPL23A, RPL24, RPL26, RPL27, RPL27A, RPL28, RPL29, RPL30, RPL31, RPL32, RPL34, RPL35, RPL35A, RPL36, RPL36A, RPL37, RPL37A, RPL38, RPL39, RPL40, RPL41, RPLP0, RPLP1, RPLP2, RPLP3, RPLP0, RPLP1, RPLP2, EEF1A1, EEF1B2, EEF1D, EEF1G, EEF2, EIF3E, EIF3F, EIF3H, EIF2S3, EIF3C, EIF3K, EIF3EIP, EIF4A2, PABPC1, HNRNPA1, TPT1, TUBB1, UBA52, NPM1, ATP5G2, GNB2L1, NME2, UQCRB, or from a homolog or variant thereof, wherein preferably the 5′-UTR element does not comprise a TOP motif or the 5′-TOP of said genes, and wherein optionally the 5′-UTR element starts at its 5′-end with a nucleotide located at position 1, 2, 3, 4, 5, 6, 7, 8, 9 or 10 downstream of the 5′-terminal oligopyrimidine tract (TOP) and wherein further optionally the 5′-UTR element which is derived from a 5′-UTR of a TOP gene terminates at its 3′-end with a nucleotide located at position 1, 2, 3, 4, 5, 6, 7, 8, 9 or 10 upstream of the start codon (A(U/T)G) of the gene it is derived from.

[0526] In further particularly preferred embodiments, the 5′-UTR element comprises or consists of a nucleic acid sequence, which is derived from the 5′-UTR of a ribosomal protein Large 32 gene (RPL32), a ribosomal protein Large 35 gene (RPL35), a ribosomal protein Large 21 gene (RPL21), an ATP synthase, H+ transporting, mitochondrial F1 complex, alpha subunit 1, cardiac muscle (ATP5A1) gene, an hydroxysteroid (17-beta) dehydrogenase 4 gene (HSD17B4), an androgen-induced 1 gene (AIG1), cytochrome c oxidase subunit VIc gene (COX6C), or a N-acylsphingosine amidohydrolase (acid ceramidase) 1 gene (ASAH1) or from a variant thereof, preferably from a vertebrate ribosomal protein Large 32 gene (RPL32), a vertebrate ribosomal protein Large 35 gene (RPL35), a vertebrate ribosomal protein Large 21 gene (RPL21), a vertebrate ATP synthase, H+ transporting, mitochondrial F1 complex, alpha subunit 1, cardiac muscle (ATP5A1) gene, a vertebrate hydroxysteroid (17-beta) dehydrogenase 4 gene (HSD17B4), a vertebrate androgen-induced 1 gene (AIG1), a vertebrate cytochrome c oxidase subunit VIc gene (COX6C), or a vertebrate N-acylsphingosine amidohydrolase (acid ceramidase) 1 gene (ASAH1) or from a variant thereof, more preferably from a mammalian ribosomal protein Large 32 gene (RPL32), a ribosomal protein Large 35 gene (RPL35), a ribosomal protein Large 21 gene (RPL21), a mammalian ATP synthase, H+ transporting, mitochondrial F1 complex, alpha subunit 1, cardiac muscle (ATP5A1) gene, a mammalian hydroxysteroid (17-beta) dehydrogenase 4 gene (HSD17B4), a mammalian androgen-induced 1 gene (AIG1), a mammalian cyto-chrome c oxidase subunit VIc gene (COX6C), or a mammalian N-acylsphingosine ami-dohydrolase (acid ceramidase) 1 gene (ASAH1) or from a variant thereof, most preferably from a human ribosomal protein Large 32 gene (RPL32), a human ribosomal protein Large 35 gene (RPL35), a human ribosomal protein Large 21 gene (RPL21), a human ATP synthase, H+ transporting, mitochondrial F1 complex, alpha subunit 1, cardiac muscle (ATP5A1) gene, a human hydroxysteroid (17-beta) dehydrogenase 4 gene (HSD17B4), a human androgen-induced 1 gene (AIG1), a human cytochrome c oxidase subunit VIc gene (COX6C), or a human N-acylsphingosine amidohydrolase (acid ceramidase) 1 gene (ASAH1) or from a variant thereof, wherein preferably the 5′-UTR element does not comprise the 5′-TOP of said gene.

[0527] Accordingly, in a particularly preferred embodiment, the 5′-UTR element comprises or consists of a nucleic acid sequence, which has an identity of at least about 40%, preferably of at least about 50%, preferably of at least about 60%, preferably of at least about 70%, more preferably of at least about 80%, more preferably of at least about 90%, even more preferably of at least about 95%, even more preferably of at least about 99% to the nucleic acid sequence according to SEQ ID NO: 1368, or SEQ ID NOs: 1412-1420 of the patent application WO2013/143700, or a corresponding RNA sequence, or wherein the at least one 5′-UTR element comprises or consists of a fragment of a nucleic acid sequence which has an identity of at least about 40%, preferably of at least about 50%, preferably of at least about 60%, preferably of at least about 70%, more preferably of at least about 80%, more preferably of at least about 90%, even more preferably of at least about 95%, even more preferably of at least about 99% to the nucleic acid sequence according to SEQ ID NO: 1368, or SEQ ID NOs: 1412-1420 of the patent application WO2013/143700, wherein, preferably, the fragment is as described above, i.e. being a continuous stretch of nucleotides representing at least 20% etc. of the full-length 5′-UTR. Preferably, the fragment exhibits a length of at least about 20 nucleotides or more, preferably of at least about 30 nucleotides or more, more preferably of at least about 40 nucleotides or more. Preferably, the fragment is a functional fragment as described herein.

[0528] Accordingly, in a particularly preferred embodiment, the 5′-UTR element comprises or consists of a nucleic acid sequence, which has an identity of at least about 40%, preferably of at least about 50%, preferably of at least about 60%, preferably of at least about 70%, more preferably of at least about 80%, more preferably of at least about 90%, even more preferably of at least about 95%, even more preferably of at least about 99% to the nucleic acid sequence according to SEQ ID NO: 224289 (5′-UTR of ATP5A1 lacking the 5′-terminal oligopyrimidine tract: GCGGCTCGGCCATGTCCCAGTACAGTCCGGAGGCTGCGGCTGCAGAAGTACCGCCTGCGGAGTAACTGCAAAG; corresponding to SEQ ID NO: 224289 of the patent application WO2013/143700) or preferably to a corresponding RNA sequence (SEQ ID NO: 224290), or wherein the at least one 5′-UTR element comprises or consists of a fragment of a nucleic acid sequence which has an identity of at least about 40%, preferably of at least about 50%, preferably of at least about 60%, preferably of at least about 70%, more preferably of at least about 80%, more preferably of at least about 90%, even more preferably of at least about 95%, even more preferably of at least about 99% to the nucleic acid sequence according to SEQ ID NO: 224289 or more preferably to a corresponding RNA sequence (SEQ ID NO: 224290), wherein, preferably, the fragment is as described above, i.e. being a continuous stretch of nucleotides representing at least 20% etc. of the full-length 5′-UTR. Preferably, the fragment exhibits a length of at least about 20 nucleotides or more, preferably of at least about 30 nucleotides or more, more preferably of at least about 40 nucleotides or more. Preferably, the fragment is a functional fragment as described herein.

[0529] Preferably, the at least one 5′-UTR element and the at least one 3′-UTR element act synergistically to increase protein production from the at least one mRNA sequence as described above.

[0530] According to a preferred embodiment the mRNA compound comprising an mRNA sequence according to the invention comprises, preferably in 5′- to 3′-direction:
[0531] a) a 5′-CAP structure, preferably m7GpppN;
[0532] b) optionally a 5′-UTR element which preferably comprises or consists of a nucleic acid sequence which is derived from the 5′-UTR of a TOP gene, more preferably comprising or consisting of the corresponding RNA sequence of a nucleic acid sequence according to SEQ ID NO: 224287, as shown in SEQ ID NO: 224288, a homolog, a fragment or a variant thereof;
[0533] c) at least one coding region encoding at least one antigenic peptide or protein preferably derived from a protein of an influenza virus or a Rabies virus, or a fragment or variant thereof, preferably comprising or consisting of any one of the nucleic acid sequences as disclosed in the sequence listing having a numeric identifier <223> which starts with “derived and/or modified CDS sequence (wt)” or “derived and/or modified CDS sequence (opt1)”, “derived and/or modified CDS sequence (opt2)”, “derived and/or modified CDS sequence (opt3)”, “derived and/or modified CDS sequence (opt4)”, or “derived and/or modified CDS sequence (opt5)”, or respectively “column B” or “column C” of Tables 1-5 or FIGS. 20-24 of PCT/EP2016/075843, SEQ ID NOs: 32013-64024, or SEQ ID NOs: 64025-224084 or of a fragment or variant of any one of these sequences,
[0534] d) optionally a 3′-UTR element which preferably comprises or consists of a nucleic acid sequence which is derived from a gene providing a stable mRNA, preferably comprising or consisting of the corresponding RNA sequence of a nucleic acid sequence according to SEQ ID NO: 224291, 224293, 224295, 224297, 224299, 224301 or 224303, preferably according to SEQ ID NO: 224297 or SEQ ID NO: 224303 or a homolog, a fragment or a variant thereof;
[0535] e) optionally a poly(A) sequence preferably comprising 64 adenosines; and
[0536] f) optionally a poly(C) sequence, preferably comprising 30 cytosines.

[0537] Histone Stem-Loop:

[0538] In a particularly preferred embodiment, the mRNA sequence of the mRNA compound according to the invention comprises a histone stem-loop sequence/structure. Such histone stem-loop sequences are preferably selected from histone stem-loop sequences as disclosed in WO2012/019780, the disclosure of which is incorporated herewith by reference.

[0539] A histone stem-loop sequence, suitable to be used within the present invention, is preferably selected from at least one of the following formulae (V) or (VI):

[0540] Formula (V) (Stem-Loop Sequence without Stem Bordering Elements):

[chemical structure]

[0541] Formula (VI) (Stem-Loop Sequence with Stem Bordering Elements):

[chemical structure]

[0542] wherein:

[0543] stem1 or stem2 bordering elements N₁₋₆ is a consecutive sequence of 1 to 6, preferably of 2 to 6, more preferably of 2 to 5, even more preferably of 3 to 5, most preferably of 4 to 5 or 5 N, wherein each N is independently from another selected from a nucleotide selected from A, U, T, G and C, or a nucleotide analogue thereof;

[0544] stem1 [N₀₋₂GN₃₋₅] is reverse complementary or partially reverse complementary with element stem2, and is a consecutive sequence between of 5 to 7 nucleotides;

[0545] wherein N₀₋₂ is a consecutive sequence of 0 to 2, preferably of 0 to 1, more preferably of 1 N, wherein each N is independently from another selected from a nucleotide selected from A, U, T, G and C or a nucleotide analogue thereof;

[0546] wherein N₃₋₅ is a consecutive sequence of 3 to 5, preferably of 4 to 5, more preferably of 4 N, wherein each N is independently from another selected from a nucleotide selected from A, U, T, G and C or a nucleotide analogue thereof, and

[0547] wherein G is guanosine or an analogue thereof, and may be optionally replaced by a cytidine or an analogue thereof, provided that its complementary nucleotide cytidine in stem2 is replaced by guanosine;

[0548] loop sequence [N₀₋₄(U/T)N₀₋₄] is located between elements stem1 and stem2, and is a consecutive sequence of 3 to 5 nucleotides, more preferably of 4 nucleotides;

[0549] wherein each N₀₋₄ is independent from another a consecutive sequence of 0 to 4, preferably of 1 to 3, more preferably of 1 to 2 N, wherein each N is independently from another selected from a nucleotide selected from A, U, T, G and C or a nucleotide analogue thereof; and

[0550] wherein U/T represents uridine, or optionally thymidine;

[0551] stem2 [N₃₋₅CN₀₋] is reverse complementary or partially reverse complementary with element stem1, and is a consecutive sequence between of 5 to 7 nucleotides;

[0552] wherein N₃₋₅ is a consecutive sequence of 3 to 5, preferably of 4 to 5, more preferably of 4 N, wherein each N is independently from another selected from a nucleotide selected from A, U, T, G and C or a nucleotide analogue thereof;

[0553] wherein N₀₋₂ is a consecutive sequence of 0 to 2, preferably of 0 to 1, more preferably of 1 N, wherein each N is independently from another selected from a nucleotide selected from A, U, T, G or C or a nucleotide analogue thereof; and

[0554] wherein C is cytidine or an analogue thereof, and may be optionally replaced by a guanosine or an analogue thereof provided that its complementary nucleoside guanosine in stem1 is replaced by cytidine;

[0555] wherein

[0556] stem1 and stem2 are capable of base pairing with each other forming a reverse complementary sequence, wherein base pairing may occur between stem1 and stem2, e.g. by Watson-Crick base pairing of nucleotides A and U/T or G and C or by non-Watson-Crick base pairing e.g. wobble base pairing, reverse Watson-Crick base pairing, Hoogsteen base pairing, reverse Hoogsteen base pairing or are capable of base pairing with each other forming a partially reverse complementary sequence, wherein an incomplete base pairing may occur between stem1 and stem2, on the basis that one or more bases in one stem do not have a complementary base in the reverse complementary sequence of the other stem.

[0557] According to a further preferred embodiment the inventive mRNA sequence of the mRNA compound may comprise at least one histone stem-loop sequence according to at least one of the following specific formulae (Va) or (VIa):

[0558] Formula (Va) (Stem-Loop Sequence without Stem Bordering Elements):

[chemical structure]

[0559] Formula (VIa) (Stem-Loop Sequence with Stem Bordering Elements):

[chemical structure]

[0560] wherein:

[0561] N, C, G, T and U are as defined above.

[0562] According to a further more particularly preferred embodiment, the at least one mRNA of the inventive composition may comprise at least one histone stem-loop sequence according to at least one of the following specific formulae (Vb) or (VIb):

[0563] Formula (Vb) (Stem-Loop Sequence without Stem Bordering Elements):

[chemical structure]

[0564] Formula (VIb) (Stem-Loop Sequence with Stem Bordering Elements):

[chemical structure]

[0565] wherein:

[0566] N, C, G, T and U are as defined above.

[0567] A particular preferred histone stem-loop sequence is the sequence CAAAGGCTCTTTTCAGAGCCACCA (according to SEQ ID NO: 224305) or more preferably the corresponding RNA sequence CAAAGGCUCUUUUCAGAGCCACCA (according to SEQ ID NO: 224306).

[0568] Any of the above modifications may be applied to the mRNA compound comprising an mRNA sequence of the present invention, and further to any mRNA as used in the context of the present invention and may be, if suitable or necessary, be combined with each other in any combination, provided, these combinations of modifications do not interfere with each other in the respective mRNA sequence. A person skilled in the art will be able to take his choice accordingly.

[0569] The mRNA compound comprising an mRNA sequence according to the invention, which comprises at least one coding region as defined herein, may preferably comprise a 5′-UTR and/or a 3′-UTR preferably containing at least one histone stem-loop. The 3′-UTR of the mRNA sequence according to the invention preferably comprises also a poly(A) and/or a poly(C) sequence as defined herein. The single elements of the 3′-UTR may occur therein in any order from 5′ to 3′ along the sequence of the mRNA sequence of the present invention. In addition, further elements as described herein, may also be contained, such as a stabilizing sequence as defined herein (e.g. derived from the UTR of a globin gene), IRES sequences, etc. Each of the elements may also be repeated in the mRNA sequence according to the invention at least once (particularly in di- or multicistronic constructs), preferably twice or more. As an example, the single elements may be present in the mRNA sequence according to the invention in the following order:

[0570] 5′-coding region-histone stem-loop-poly(A)/(C) sequence-3′; or

[0571] 5′-coding region-poly(A)/(C) sequence-histone stem-loop-3′; or

[0572] 5′-coding region-histone stem-loop-polyadenylation signal-3′; or

[0573] 5′-coding region-polyadenylation signal-histone stem-loop-3′; or

[0574] 5′-coding region-histone stem-loop-histone stem-loop-poly(A)/(C) sequence-3′; or

[0575] 5′-coding region-histone stem-loop-histone stem-loop-polyadenylation signal-3′; or

[0576] 5′-coding region-stabilizing sequence-poly(A)/(C) sequence-histone stem-loop-3′; or

[0577] 5′-coding region-stabilizing sequence-poly(A)/(C) sequence-poly(A)/(C) sequence-histone stem-loop-3′; etc.

[0578] According to a further embodiment, the mRNA compound comprising an mRNA sequence of the present invention preferably comprises at least one of the following structural elements: a 5′- and/or 3′-untranslated region element (UTR element), particularly a 5′-UTR element, which preferably comprises or consists of a nucleic acid sequence which is derived from the 5′-UTR of a TOP gene or from a fragment, homolog or a variant thereof, or a 5′- and/or 3′-UTR element which may preferably be derivable from a gene that provides a stable mRNA or from a homolog, fragment or variant thereof; a histone-stem-loop structure, preferably a histone-stem-loop in its 3′ untranslated region; a 5′-CAP structure; a poly-A tail; or a poly(C) sequence.

[0579] In one embodiment the mRNA compound comprising an mRNA sequence comprises, preferably in 5′- to 3′-direction:
[0580] a) a 5′-CAP structure, preferably m7GpppN;
[0581] b) at least one coding region encoding at least one antigenic peptide or protein,
[0582] c) optionally a 3′-UTR element comprising or consisting of a nucleic acid sequence which is derived from an alpha globin gene, preferably comprising the corresponding RNA sequence of the nucleic acid sequence according to SEQ ID NOs: 224291, 224293, or 224297, preferably according to SEQ ID NO: 224297, or a homolog, a fragment or a variant thereof;
[0583] d) optionally, a poly(A) sequence, preferably comprising 64 adenosines;
[0584] e) optionally, a poly(C) sequence, preferably comprising 30 cytosines; and
[0585] f) optionally, a histone stem-loop, preferably comprising the RNA sequence according to SEQ ID NO: 224306.

[0586] In a particularly preferred embodiment the mRNA compound comprising an mRNA sequence comprises, preferably in 5′- to 3′-direction:
[0587] a) a 5′-CAP structure, preferably m7GpppN;
[0588] b) at least one coding region encoding at least one antigenic peptide or protein derived from a protein of an influenza virus or a Rabies virus or a fragment or variant thereof, preferably comprising or consisting of any one of the nucleic acid sequences as disclosed in the sequence listing having a numeric identifier <223> which starts with “derived and/or modified CDS sequence (wt)” or “derived and/or modified CDS sequence (opt1)”, “derived and/or modified CDS sequence (opt2)”, “derived and/or modified CDS sequence (opt3)”, “derived and/or modified CDS sequence (opt4)”, or “derived and/or modified CDS sequence (opt5)”, or respectively “column B” or “column C” of Tables 1-5 or FIGS. 20-24 of PCT/EP2016/075843, SEQ ID NOs: 32013-64024, or SEQ ID NOs: 64025-224084 or of a fragment or variant of any one of these sequences,
[0589] c) optionally a 3′-UTR element comprising or consisting of a nucleic acid sequence which is derived from an alpha globin gene, preferably comprising the corresponding RNA sequence of the nucleic acid sequence according to SEQ ID NOs: 224291, 224293, or 224297, preferably according to SEQ ID NO: 224297, or a homolog, a fragment or a variant thereof;
[0590] d) optionally, a poly(A) sequence, preferably comprising 64 adenosines;
[0591] e) optionally, a poly(C) sequence, preferably comprising 30 cytosines; and
[0592] f) optionally, a histone stem-loop, preferably comprising the RNA sequence according to SEQ ID NO: 224306.

[0593] According to another particularly preferred embodiment the mRNA compound comprising an mRNA sequence according to the invention comprises, preferably in 5′- to 3′-direction:
[0594] a) a 5′-CAP structure, preferably m7GpppN;
[0595] b) a 5′-UTR element which comprises or consists of a nucleic acid sequence which is derived from the 5′-UTR of a TOP gene, preferably comprising or consisting of the corresponding RNA sequence of a nucleic acid sequence according to SEQ ID NO: 224287 or SEQ ID NO: 224289 as shown in SEQ ID NO: 224288 or SEQ ID NO: 224290, a homolog, a fragment or a variant thereof;
[0596] c) at least one coding region encoding at least one antigenic peptide or protein preferably derived from a protein of an influenza virus or a Rabies virus or a fragment or variant thereof, preferably comprising or consisting of any one of the nucleic acid sequences as disclosed in the sequence listing having a numeric identifier <223> which starts with “derived and/or modified CDS sequence (wt)” or “derived and/or modified CDS sequence (opt1)”, “derived and/or modified CDS sequence (opt2)”, “derived and/or modified CDS sequence (opt3)”, “derived and/or modified CDS sequence (opt4)”, or “derived and/or modified CDS sequence (opt5)”, or respectively “column B” or “column C” of Tables 1-5 or FIGS. 20-24 of PCT/EP2016/075843, SEQ ID NOs: 32013-64024, or SEQ ID NOs: 64025-224084 or of a fragment or variant of any one of these sequences,
[0597] d) optionally a 3′-UTR element comprising or consisting of a nucleic acid sequence which is derived from a gene providing a stable mRNA, preferably comprising or consisting of the corresponding RNA sequence of a nucleic acid sequence according to SEQ ID NO: 224301 or SEQ ID NO: 224303 as shown in SEQ ID NO: 224302 or SEQ ID NO: 224304, a homolog, a fragment or a variant thereof;
[0598] e) optionally a poly(A) sequence preferably comprising 64 adenosines;
[0599] f) optionally a poly(C) sequence, preferably comprising 30 cytosines; and
[0600] g) optionally, a histone stem-loop, preferably comprising the RNA sequence according to SEQ ID NO: 224306.

[0601] In particularly preferred embodiments the mRNA compound comprising an mRNA sequence according to the invention comprises the following mRNA sequences (or RNA sequences being identical or at least 50%, 60%, 70%, 80%, 85%, 86%, 87%, 88%, 89%, 90%, 91%, 92%, 93%, 94%, 95%, 96%, 97%, 98%, or 99% identical to the following RNA sequences):

[0602] Influenza A HA:
[0603] mRNA encoding HA protein of influenza A/Vietnam/1194/2004 (H5N1) according to SEQ ID NOs: 224198-224201, 224203-224210.
[0604] mRNA encoding HA protein of influenza A/Hong Kong/4801/2014 (H3N2) according to SEQ ID NOs: SEQ ID NOs: 224181-224194.
[0605] mRNA encoding HA protein of influenza A/Netherlands/602/2009 (H1N1) according to SEQ ID NOs: 224163-224175.
[0606] mRNA encoding HA protein of influenza A/California/07/2009 (H1N1) according to SEQ ID NOs: 224117-224126, 224129, 224130, 224131, 224132
[0607] mRNA encoding HA protein of influenza A/Michigan/45/2015 (H1N1)pdm09-like virus according to SEQ ID NOs: 224133-224142-224162.

[0608] Influenza B HA:
[0609] mRNA encoding HA protein of influenza B/Phuket/3037/2013 according to SEQ ID NOs: 224246-224255, 224256, 224257.
[0610] mRNA encoding HA protein of influenza B/Brisbane/60/2008 (GI: 223950973; FJ766840.1) according to SEQ ID NOs: 224236-224245.

[0611] Influenza A NA:
[0612] mRNA encoding NA protein of influenza A/California/07/2009 (H1N1) according to SEQ ID NOs: 224319-224323.
[0613] mRNA encoding NA protein of influenza A/Michigan/45/2015 (H1N1)pdm09-like virus according to SEQ ID NOs: 224324-224325.
[0614] mRNA encoding NA protein of influenza A/Netherlands/602/2009 (H1N1) according to SEQ ID NOs: 224326-224335.
[0615] mRNA encoding NA protein of influenza A/Hong Kong/4801/2014 (H3N2) according to SEQ ID NOs: 224336-224339.
[0616] mRNA encoding NA protein of influenza A/Vietnam/1194/2004 (H5N1) according to SEQ ID NOs: 224342-224343.
[0617] mRNA encoding NA protein of influenza A/Vietnam/1203/2004 (H5N1) according to SEQ ID NOs: 224344-224345.

[0618] Influenza B NA:
[0619] mRNA encoding NA protein of influenza B/Brisbane/60/2008 (GI: 223950973; FJ766840.1) according to SEQ ID NOs: 224348-224349.
[0620] mRNA encoding NA protein of influenza B/Phuket/3037/2013 according to SEQ ID NOs: 224350-224351.

[0621] Most preferred mRNA sequences include:

[0622] An mRNA sequence comprising at least one coding region encoding at least one antigenic peptide or protein derived from hemagglutinin (HA) of an influenza A virus according to SEQ ID NOs: 1-14031 or a fragment or variant thereof.

[0623] An mRNA sequence being identical or at least 50%, 60%, 70%, 80%, 85%, 86%, 87%, 88%, 89%, 90%, 91%, 92%, 93%, 94%, 95%, 96%, 97%, 98%, or 99% identical to an RNA sequence according to SEQ ID NOs: 32013-46043, 64025-78055, 224085-224106, 96037-110067, 128049-142079, 160061-174091, 192073-206103 or a fragment or variant thereof.

[0624] An mRNA sequence comprising at least one coding region encoding at least one antigenic peptide or protein derived from hemagglutinin (HA) of an influenza B virus according to SEQ ID NOs: 26398-28576 or a fragment or variant thereof.

[0625] An mRNA sequence being identical or at least 50%, 60%, 70%, 80%, 85%, 86%, 87%, 88%, 89%, 90%, 91%, 92%, 93%, 94%, 95%, 96%, 97%, 98%, or 99% identical to an RNA sequence according to SEQ ID NOs: 58410-60588, 90422-92600, 224107-224112, 122434-124612, 154446-156624, 186458-188636, 218470-220648 or a fragment or variant thereof.

[0626] An mRNA sequence comprising at least one coding region encoding at least one antigenic peptide or protein derived from neuraminidase (NA) of an influenza A virus according to SEQ ID NOs: 14032-26397, 224309, or 224310 or a fragment or variant thereof.

[0627] An mRNA sequence being identical or at least 50%, 60%, 70%, 80%, 85%, 86%, 87%, 88%, 89%, 90%, 91%, 92%, 93%, 94%, 95%, 96%, 97%, 98%, or 99% identical to an RNA sequence according to SEQ ID NOs: 110068-122433, 78056-90421, 224113, 224313-224317, 110068-122433, 142080-154445, 174092-186457, 206104-218469 or a fragment or variant thereof.

[0628] An mRNA sequence comprising at least one coding region encoding at least one antigenic peptide or protein derived from neuraminidase (NA) of an influenza B virus according to SEQ ID NOs: 28577-30504 or a fragment or variant thereof.

[0629] An mRNA sequence being identical or at least 50%, 60%, 70%, 80%, 85%, 86%, 87%, 88%, 89%, 90%, 91%, 92%, 93%, 94%, 95%, 96%, 97%, 98%, or 99% identical to the RNA sequences according to SEQ ID NOs: 60589-62516, 92601-94528, 124613-126540, 156625-158552, 188637-190564, 220649-222576 or a fragment or variant thereof.

[0630] An mRNA sequence comprising at least one coding region encoding at least one antigenic peptide or protein derived from glycoprotein G (RAV-G, RAVBV-G or RABV-G), nucleoprotein N (RAV-N), phospoprotein P (RAV-P), matrix protein M (RAV-M) or RNA polymerase L (RAV-L) of a Rabies virus or a fragment, variant thereof.

[0631] An mRNA sequence comprising at least one coding region encoding at least one antigenic peptide or protein derived from glycoprotein G (RAV-G, RAVBV-G or RABV-G) of a Rabies virus according to SEQ ID NOs: 30505-32012 or a fragment or variant thereof.

[0632] An mRNA sequence comprising at least one RNA sequence selected from RNA sequences being identical or at least 50%, 60%, 70%, 80%, 85%, 86%, 87%, 88%, 89%, 90%, 91%, 92%, 93%, 94%, 95%, 96%, 97%, 98%, or 99% identical to the RNA sequences according to SEQ ID NOs: 62517-64024, 224270, 224274, 94529-96036, 224271-224273, 126541-128048, 158553-160060, 190565-192072, 222577-224084 or a fragment or variant thereof.

[0633] Signal Peptides:

[0634] According to another particularly preferred embodiment, the mRNA sequence according to the invention may additionally or alternatively encode a secretory signal peptide. Such signal peptides are sequences, which typically exhibit a length of about 15 to 30 amino acids and are preferably located at the N-terminus of the encoded peptide, without being limited thereto. Signal peptides as defined herein preferably allow the transport of the antigen, antigenic protein or antigenic peptide as encoded by the at least one mRNA sequence into a defined cellular compartment, preferably the cell surface, the endoplasmic reticulum (ER) or the endosomal-lysosomal compartment. Examples of secretory signal peptide sequences as defined herein include, without being limited thereto, signal sequences of classical or non-classical MHC-molecules (e.g. signal sequences of MHC I and II molecules, e.g. of the MHC class I molecule HLA-A*0201), signal sequences of cytokines or immunoglobulines as defined herein, signal sequences of the invariant chain of immunoglobulines or antibodies as defined herein, signal sequences of Lamp1, Tapasin, Erp57, Calretikulin, Calnexin, and further membrane associated proteins or of proteins associated with the endoplasmic reticulum (ER) or the endosomal-lysosomal compartment. Most preferably, signal sequences of MHC class I molecule HLA-A*0201 may be used according to the present invention. For example, a signal peptide derived from HLA-A is preferably used in order to promote secretion of the encoded antigen as defined herein or a fragment or variant thereof. More preferably, an HLA-A signal peptide is fused to an encoded antigen as defined herein or to a fragment or variant thereof.

[0635] Production of mRNA:

[0636] The mRNA according to the present invention may be prepared using any method known in the art, including synthetic methods such as e.g. solid phase RNA synthesis, as well as in vitro methods, such as RNA in vitro transcription reactions, particularly as described in the examples.

[0637] As noted, the mRNA compound according to the invention in encapsulated in or associated with a lipid nanoparticle.

[0638] The term “lipid nanoparticle”, also referred to as LNP, refers to a particle having at least one dimension on the order of nanometers (e.g., 1-1,000 nm) which includes one or more lipids, for example a lipid of Formula (I), (II) or (III). In some embodiments, such lipid nanoparticles comprise a cationic lipid (e.g., a lipid of Formula (I), (II) or (III)) and one or more excipient selected from neutral lipids, charged lipids, steroids and polymer conjugated lipids (e.g., a pegylated lipid such as a pegylated lipid of formula (IV)). In some embodiments, the mRNA, or a portion thereof, is encapsulated in the lipid portion of the lipid nanoparticle or an aqueous space enveloped by some or all of the lipid portion of the lipid nanoparticle, thereby protecting it from enzymatic degradation or other undesirable effects induced by the mechanisms of the host organism or cells e.g. an adverse immune response. In some embodiments, the mRNA or a portion thereof is associated with the lipid nanoparticles.

[0639] In the context of the present invention, lipid nanoparticles are not restricted to any particular morphology, and should be interpreted as to include any morphology generated when a cationic lipid and optionally one or more further lipids are combined, e.g. in an aqueous environment and/or in the presence of a nucleic acid compound. For example, a liposome, a lipid complex, a lipoplex and the like are within the scope of a lipid nanoparticle.

[0640] In various embodiments, the lipid nanoparticles have a mean diameter of from about 30 nm to about 150 nm, from about 40 nm to about 150 nm, from about 50 nm to about 150 nm, from about 60 nm to about 130 nm, from about 70 nm to about 110 nm, from about 70 nm to about 100 nm, from about 80 nm to about 100 nm, from about 90 nm to about 100 nm, from about 70 to about 90 nm, from about 80 nm to about 90 nm, from about 70 nm to about 80 nm, or about 30 nm, 35 nm, 40 nm, 45 nm, 50 nm, 55 nm, 60 nm, 65 nm, 70 nm, 75 nm, 80 nm, 85 nm, 90 nm, 95 nm, 100 nm, 105 nm, 110 nm, 115 nm, 120 nm, 125 nm, 130 nm, 135 nm, 140 nm, 145 nm, or 150 nm, and are substantially non-toxic. In certain embodiments, the mRNA, when present in the lipid nanoparticles, is resistant in aqueous solution to degradation with a nuclease. As used herein, the mean diameter may be represented by the z-average as determined by dynamic light scattering.

[0641] An LNP may comprise any lipid capable of forming a particle to which the one or more nucleic acid molecules are attached, or in which the one or more nucleic acid molecules are encapsulated. The term “lipid” refers to a group of organic compounds that are derivatives of fatty acids (e.g., esters) and are generally characterized by being insoluble in water but soluble in many organic solvents. Lipids are usually divided in at least three classes: (1) “simple lipids” which include fats and oils as well as waxes; (2) “compound lipids” which include phospholipids and glycolipids; and (3) “derived lipids” such as steroids.

[0642] In one embodiment, the mRNA-comprising LNP comprises one or more cationic lipids as defined herein, and one or more stabilizing lipids. Stabilizing lipids include neutral lipids and pegylated lipids.

[0643] As mentioned, the LNP comprises a cationic lipid. The cationic lipid is preferably cationisable, i.e. it becomes protonated as the pH is lowered below the pKa of the ionizable group of the lipid, but is progressively more neutral at higher pH values. When positively charged, the lipid is then able to associate with negatively charged nucleic acids. In certain embodiments, the cationic lipid comprises a zwitterionic lipid that assumes a positive charge on pH decrease. The LNP may comprise any lipid capable of forming a particle to which the one or more nucleic acid molecules are attached, or in which the one or more nucleic acid molecules are encapsulated.

[0644] In certain embodiments, the LNP may comprise any further cationic or cationisable lipid, i.e. any of a number of lipid species which carry a net positive charge at a selective pH, such as physiological pH. Such lipids include, but are not limited to, N,N-dioleyl-N,N-dimethylammonium chloride (DODAC); N-(2,3-dioleyloxy)propyl)-N,N,N-trimethylammonium chloride (DOTMA); N,N-distearyl-N,N-dimethylammonium bromide (DDAB); N-(2,3dioleoyloxy)propyl)-N,N,N-trimethylammonium chloride (DOTAP); 3-(N—(N′,N′dimethylaminoethane)-carbamoyl)cholesterol (DC-Chol), N-(1-(2,3-dioleoyloxy)propyl)N-2-(sperminecarboxamido)ethyl)-N,N-dimethylammonium trifluoracetate (DOSPA), dioctadecylamidoglycyl carboxyspermine (DOGS), 1,2-dioleoyl-3-dimethylammonium propane (DODAP), N,N-dimethyl-2,3-dioleoyloxy)propylamine (DODMA), and N-(1,2dimyristyloxyprop-3-yl)-N,N-dimethyl-N-hydroxyethyl ammonium bromide (DMRIE).

[0645] Additionally, a number of commercial preparations of cationic lipids are available which can be used in the present invention. These include, for example, LIPOFECTIN® (commercially available cationic liposomes comprising DOTMA and 1,2-dioleoyl-sn-3phosphoethanolamine (DOPE), from GIBCO/BRL, Grand Island, N.Y.); LIPOFECTAMINE® (commercially available cationic liposomes comprising N-(1-(2,3dioleyloxy)propyl)-N-(2-(sperminecarboxamido)ethyl)-N,N-dimethylammonium trifluoroacetate (DOSPA) and (DOPE), from GIBCO/BRL); and TRANSFECTAM® (commercially available cationic lipids comprising dioctadecylamidoglycyl carboxyspermine (DOGS) in ethanol from Promega Corp., Madison, Wis.). The following lipids are cationic and have a positive charge at below physiological pH: DODAP, DODMA, DMDMA, 1,2-dilinoleyloxy-N,N-dimethylaminopropane (DLinDMA), 1,2-dilinolenyloxy-N,N-dimethylaminopropane (DLenDMA).

[0646] In one embodiment, the further cationic lipid is an amino lipid. Suitable amino lipids useful in the invention include those described in WO2012/016184, incorporated herein by reference in its entirety. Representative amino lipids include, but are not limited to, 1,2-dilinoleyoxy-3-(dimethylamino)acetoxypropane (DLin-DAC), 1,2-dilinoleyoxy-3morpholinopropane (DLin-MA), 1,2-dilinoleoyl-3-dimethylaminopropane (DLinDAP), 1,2-dilinoleylthio-3-dimethylaminopropane (DLin-S-DMA), 1-linoleoyl-2-linoleyloxy-3dimethylaminopropane (DLin-2-DMAP), 1,2-dilinoleyloxy-3-trimethylaminopropane chloride salt (DLin-TMA.Cl), 1,2-dilinoleoyl-3-trimethylaminopropane chloride salt (DLin-TAP.Cl), 1,2-dilinoleyloxy-3-(N-methylpiperazino)propane (DLin-MPZ), 3-(N,Ndilinoleylamino)-1,2-propanediol (DLinAP), 3-(N,N-dioleylamino)-1,2-propanediol (DOAP), 1,2-dilinoleyloxo-3-(2-N,N-dimethylamino)ethoxypropane (DLin-EG-DMA), and 2,2-dilinoleyl-4-dimethylaminomethyl-[1,3]-dioxolane (DLin-K-DMA).

[0647] Suitable amino lipids include those having the formula:

[chemical structure]

[0648] wherein R₁ and R₂ are either the same or different and independently optionally substituted C₁₀-C₂₄ alkyl, optionally substituted C₁₀-C₂₄ alkenyl, optionally substituted C₁₀-C₂₄ alkynyl, or optionally substituted C₁₀-C₂₄ acyl;

[0649] R₃ and R₄ are either the same or different and independently optionally substituted C₁-C₆ alkyl, optionally substituted C₂-C₆ alkenyl, or optionally substituted C₂-C₆ alkynyl or R₃ and R₄ may join to form an optionally substituted heterocyclic ring of 4 to 6 carbon atoms and 1 or 2 heteroatoms chosen from nitrogen and oxygen;

[0650] R₅ is either absent or present and when present is hydrogen or C₁-C₆ alkyl; m, n, and p are either the same or different and independently either 0 or 1 with the proviso that m, n, and p are not simultaneously 0; q is 0, 1, 2, 3, or 4; and

[0651] Y and Z are either the same or different and independently O, S, or NH. In one embodiment, R₁ and R₂are each linoleyl, and the amino lipid is a dilinoleyl amino lipid. In one embodiment, the amino lipid is a dilinoleyl amino lipid.

[0652] A representative useful dilinoleyl amino lipid has the formula:

[chemical structure]

[0653] wherein n is 0, 1, 2, 3, or 4.

[0654] In one embodiment, the cationic lipid is a DLin-K-DMA. In one embodiment, the cationic lipid is DLin-KC2-DMA (DLin-K-DMA above, wherein n is 2).

[0655] In one embodiment, the LNP comprises

[0656] (i) a cationic lipid component of Formula (I):

[chemical structure]

[0657] as defined below or a pharmaceutically acceptable salt, tautomer, prodrug or stereoisomer thereof, and (ii) a mRNA compound comprising an mRNA sequence encoding at least one antigenic peptide or protein, wherein the mRNA compound is encapsulated in or associated with said lipid nanoparticle. With respect to the mRNA compound, the mRNA sequence and the antigenic peptide or protein, reference is made to the description of these features including the respective options and preferences above. In one of the preferred embodiments, the mRNA compound does not comprise a nucleoside modification. In another embodiment, it comprises no base modification. In a further embodiment, it does not comprise a 1-methylpseudouridine modification. In a further embodiment the mRNA compound only comprises the natural nucleosides adenine, guanine, cytosine and uracil. Moreover, if the cationic lipid is compound I-6 as defined below, the lipid nanoparticle is not a lipid nanoparticle comprising compound I-6, DSPC, cholesterol and the PEG lipid of formula (IVa) at a ratio of about 50:10:38.5:1.5 that encapsulates unmodified, 1-methylpseudouridine modified or codon-optimized mRNA encoding an influenza PR8 or Cal/7/2009 hemagglutinin or an HIV-1 CD4-independent R3A envelop protein.

[0658] With respect to Formula (I):

[0659] L¹ and L² are each independently —O(C═O)—, —(C═O)O— or a carbon-carbon double bond;

[0660] R^{1a} and R^{1b} are, at each occurrence, independently either (a) H or C₁-C₁₂ alkyl, or (b) R^{1a} is H or C₁-C₁₂ alkyl, and R^{1b} together with the carbon atom to which it is bound is taken together with an adjacent R^{1b} and the carbon atom to which it is bound to form a carbon-carbon double bond;

[0661] R^{2a} and R^{2b} are, at each occurrence, independently either (a) H or C₁-C₁₂ alkyl, or (b) R^{2a} is H or C₁-C₁₂ alkyl, and R^{2b} together with the carbon atom to which it is bound is taken together with an adjacent R^{2b} and the carbon atom to which it is bound to form a carbon-carbon double bond;

[0662] R^{3a} and R^{3b} are, at each occurrence, independently either (a) H or C₁-C₁₂ alkyl, or (b) R^{3a} is H or C₁-C₁₂ alkyl, and R^{3b} together with the carbon atom to which it is bound is taken together with an adjacent R^{3b} and the carbon atom to which it is bound to form a carbon-carbon double bond;

[0663] R^{4a} and R^{4b} are, at each occurrence, independently either (a) H or C₁-C₁₂ alkyl, or (b) R^{4a} is H or C₁-C₁₂ alkyl, and R^{4b} together with the carbon atom to which it is bound is taken together with an adjacent R^{4b} and the carbon atom to which it is bound to form a carbon-carbon double bond;

[0664] R⁵ and R⁶ are each independently methyl or cycloalkyl;

[0665] R⁷ is, at each occurrence, independently H or C₁-C₁₂ alkyl;

[0666] R⁸ and R⁹ are each independently C₁-C₁₂ alkyl; or R⁸ and R⁹, together with the nitrogen atom to which they are attached, form a 5, 6 or 7-membered heterocyclic ring comprising one nitrogen atom;

[0667] a and d are each independently an integer from 0 to 24;

[0668] b and c are each independently an integer from 1 to 24; and

[0669] e is 1 or 2.

[0670] In certain embodiments of Formula (I), at least one of R^{1a}, R^{2a}, R^{3a} or R^{4a} is C₁-C₁₂ alkyl, or at least one of L¹ or L² is —O(C═O)— or —(C═O)O—. In other embodiments, R^{1a} and R^{1b} are not isopropyl when a is 6 or n-butyl when a is 8.

[0671] In still further embodiments of Formula (I), at least one of R^{1a}, R^{2a}, R^{3a} or R^{4a} is C₁-C₁₂ alkyl, or at least one of L¹ or L² is —O(C═O)— or —(C═O)O—; and

[0672] R^{1a} and R^{1b} are not isopropyl when a is 6 or n-butyl when a is 8.

[0673] In other embodiments of Formula (I), R⁸ and R⁹ are each independently unsubstituted C₁-C₁₂ alkyl; or R⁸ and R⁹, together with the nitrogen atom to which they are attached, form a 5, 6 or 7-membered heterocyclic ring comprising one nitrogen atom;

[0674] In certain embodiments of Formula (I), any one of L¹ or L² may be —O(C═O)— or a carbon-carbon double bond. L¹ and L² may each be —O(C═O)— or may each be a carbon-carbon double bond.

[0675] In some embodiments of Formula (I), one of L¹ or L² is —O(C═O)—. In other embodiments, both L¹ and L² are —O(C═O)—.

[0676] In some embodiments of Formula (I), one of L¹ or L² is —(C═O)O—. In other embodiments, both L¹ and L² are —(C═O)O—.

[0677] In some other embodiments of Formula (I), one of L¹ or L² is a carbon-carbon double bond. In other embodiments, both L¹ and L² are a carbon-carbon double bond.

[0678] In still other embodiments of Formula (I), one of L¹ or L² is —O(C═O)— and the other of L¹ or L² is —(C═O)O—. In more embodiments, one of L¹ or L² is —O(C═O)— and the other of L¹ or L² is a carbon-carbon double bond. In yet more embodiments, one of L¹ or L² is —(C═O)O— and the other of L¹ or L² is a carbon-carbon double bond.

[0679] It is understood that “carbon-carbon” double bond, as used throughout the specification, refers to one of the following structures:

[chemical structure]

[0680] wherein R^{a} and R^{b} are, at each occurrence, independently H or a substituent. For example, in some embodiments R^{a} and R^{b} are, at each occurrence, independently H, C₁-C₁₂ alkyl or cycloalkyl, for example H or C₁-C₁₂ alkyl.

[0681] In other embodiments, the lipid compounds of Formula (I) have the following structure (Ia):

[chemical structure]

[0682] In other embodiments, the lipid compounds of Formula (I) have the following structure (Ib):

[chemical structure]

[0683] In yet other embodiments, the lipid compounds of Formula (I) have the following structure (Ic):

[chemical structure]

[0684] In certain embodiments of the lipid compound of Formula (I), a, b, c and d are each independently an integer from 2 to 12 or an integer from 4 to 12. In other embodiments, a, b, c and d are each independently an integer from 8 to 12 or 5 to 9. In some certain embodiments, a is 0. In some embodiments, a is 1. In other embodiments, a is 2. In more embodiments, a is 3. In yet other embodiments, a is 4. In some embodiments, a is 5. In other embodiments, a is 6. In more embodiments, a is 7. In yet other embodiments, a is 8. In some embodiments, a is 9. In other embodiments, a is 10. In more embodiments, a is 11. In yet other embodiments, a is 12. In some embodiments, a is 13. In other embodiments, a is 14. In more embodiments, a is 15. In yet other embodiments, a is 16.

[0685] In some other embodiments of Formula (I), b is 1. In other embodiments, b is 2. In more embodiments, b is 3. In yet other embodiments, b is 4. In some embodiments, b is 5. In other embodiments, b is 6. In more embodiments, b is 7. In yet other embodiments, b is 8. In some embodiments, b is 9. In other embodiments, b is 10. In more embodiments, b is 11. In yet other embodiments, b is 12. In some embodiments, b is 13. In other embodiments, b is 14. In more embodiments, b is 15. In yet other embodiments, b is 16.

[0686] In some more embodiments of Formula (I), c is 1. In other embodiments, c is 2. In more embodiments, c is 3. In yet other embodiments, c is 4. In some embodiments, c is 5. In other embodiments, c is 6. In more embodiments, c is 7. In yet other embodiments, c is 8. In some embodiments, c is 9. In other embodiments, c is 10. In more embodiments, c is 11. In yet other embodiments, c is 12. In some embodiments, c is 13. In other embodiments, c is 14. In more embodiments, c is 15. In yet other embodiments, c is 16.

[0687] In some certain other embodiments of Formula (I), d is 0. In some embodiments, d is 1. In other embodiments, d is 2. In more embodiments, d is 3. In yet other embodiments, d is 4. In some embodiments, d is 5. In other embodiments, d is 6. In more embodiments, d is 7. In yet other embodiments, d is 8. In some embodiments, d is 9. In other embodiments, d is 10. In more embodiments, d is 11. In yet other embodiments, d is 12. In some embodiments, d is 13. In other embodiments, d is 14. In more embodiments, d is 15. In yet other embodiments, d is 16.

[0688] In some other various embodiments of Formula (I), a and d are the same. In some other embodiments, b and c are the same. In some other specific embodiments, a and d are the same and b and c are the same.

[0689] The sum of a and b and the sum of c and d in Formula (I) are factors which may be varied to obtain a lipid of formula I having the desired properties. In one embodiment, a and b are chosen such that their sum is an integer ranging from 14 to 24. In other embodiments, c and d are chosen such that their sum is an integer ranging from 14 to 24. In further embodiment, the sum of a and b and the sum of c and d are the same. For example, in some embodiments the sum of a and b and the sum of c and d are both the same integer which may range from 14 to 24. In still more embodiments, a. b, c and d are selected such the sum of a and b and the sum of c and d is 12 or greater.

[0690] In some embodiments of Formula (I), e is 1. In other embodiments, e is 2.

[0691] The substituents at R^{1a}, R^{2a}, R^{3a} and R^{4a} of Formula (I) are not particularly limited. In certain embodiments R^{1a}, R^{2a}, R^{3a} and R^{4a} are H at each occurrence. In certain other embodiments at least one of R^{1a}, R^{2a}, R^{3a} and R^{4a} is C₁-C₁₂ alkyl. In certain other embodiments at least one of R^{1a}, R^{2a}, R^{3a} and R^{4a} is C₁-C₈ alkyl. In certain other embodiments at least one of R^{1a}, R^{2a}, R^{3a} and R^{4a} is C₁-C₆ alkyl. In some of the foregoing embodiments, the C₁-C₈ alkyl is methyl, ethyl, n-propyl, iso-propyl, n-butyl, iso-butyl, tert-butyl, n-hexyl or n-octyl.

[0692] In certain embodiments of Formula (I), R^{1a}, R^{1b}, R^{4a} and R^{4b} are C₁-C₁₂ alkyl at each occurrence.

[0693] In further embodiments of Formula (I), at least one of R^{1b}, R^{2b}, R^{3b} and R^{4b} is H or R^{1b}, R^{2b}, R^{3b} and R^{4b} are H at each occurrence.

[0694] In certain embodiments of Formula (I), R^{1b} together with the carbon atom to which it is bound is taken together with an adjacent R^{1b} and the carbon atom to which it is bound to form a carbon-carbon double bond. In other embodiments of the foregoing R^{4b} together with the carbon atom to which it is bound is taken together with an adjacent R^{4b} and the carbon atom to which it is bound to form a carbon-carbon double bond.

[0695] The substituents at R⁵ and R⁶ of Formula (I) are not particularly limited in the foregoing embodiments. In certain embodiments one or both of R⁵ or R⁶ is methyl. In certain other embodiments one or both of R⁵ or R⁶ is cycloalkyl for example cyclohexyl. In these embodiments the cycloalkyl may be substituted or not substituted. In certain other embodiments the cycloalkyl is substituted with C₁-C₁₂ alkyl, for example tert-butyl.

[0696] The substituents at R⁷ are not particularly limited in the foregoing embodiments of Formula (I). In certain embodiments at least one R⁷ is H. In some other embodiments, R⁷ is H at each occurrence. In certain other embodiments R⁷ is C₁-C₁₂ alkyl.

[0697] In certain other of the foregoing embodiments of Formula (I), one of R⁸ or R⁹ is methyl. In other embodiments, both R⁸ and R⁹ are methyl.

[0698] In some different embodiments of Formula (I), R⁸ and R⁹, together with the nitrogen atom to which they are attached, form a 5, 6 or 7-membered heterocyclic ring. In some embodiments of the foregoing, R⁸ and R⁹, together with the nitrogen atom to which they are attached, form a 5-membered heterocyclic ring, for example a pyrrolidinyl ring.

[0699] In various different embodiments, the lipid of Formula (I) has one of the structures set forth in Table 7 (“Representative Lipids of Formula (I)”) below.

TABLE 7
Representative Lipids of Formula (I)

| | | Prep. |
|---|---|---|
| No. | Structure | Method |
| I-1 | [chemical structure] | B |
| I-2 | [chemical structure] | A |
| I-3 | [chemical structure] | A |
| I-4 | [chemical structure] | B |
| I-5 | [chemical structure] | B |
| I-6 | [chemical structure] | B |
| I-7 | [chemical structure] | A |
| I-8 | [chemical structure] | A |
| I-9 | [chemical structure] | B |
| I-10 | [chemical structure] | A |
| I-11 | [chemical structure] | A |
| I-12 | [chemical structure] | A |
| I-13 | [chemical structure] | A |
| I-14 | [chemical structure] | A |
| I-15 | [chemical structure] | A |
| I-16 | [chemical structure] | A |
| I-17 | [chemical structure] | A |
| I-18 | [chemical structure] | A |
| I-19 | [chemical structure] | A |
| I-20 | [chemical structure] | A |
| I-21 | [chemical structure] | A |
| I-22 | [chemical structure] | A |
| I-23 | [chemical structure] | A |
| I-24 | [chemical structure] | A |
| I-25 | [chemical structure] | A |
| I-26 | [chemical structure] | A |
| I-27 | [chemical structure] | A |
| I-28 | [chemical structure] | A |
| I-29 | [chemical structure] | A |
| I-30 | [chemical structure] | A |
| I-31 | [chemical structure] | C |
| I-32 | [chemical structure] | C |
| I-33 | [chemical structure] | C |
| I-34 | [chemical structure] | B |
| I-35 | [chemical structure] | B |
| I-36 | [chemical structure] | C |
| I-37 | [chemical structure] | C |
| I-38 | [chemical structure] | B |
| I-39 | [chemical structure] | B |
| I-40 | [chemical structure] | B |
| I-41 | [chemical structure] | B |

[0700] In some embodiments, the LNPs comprise a lipid of Formula (I), a mRNA compound as defined herein and one or more excipient selected from neutral lipids, steroids and pegylated lipids. In some embodiments the lipid of Formula (I) is compound I-5. In some embodiments the lipid of Formula (I) is compound I-6.

[0701] In another embodiment, the lipid nanoparticle comprises (i) a cationic lipid with the structure of Formula (II):

[chemical structure]

[0702] as further defined below or a pharmaceutically acceptable salt, tautomer, prodrug or stereoisomer thereof, and (ii) a mRNA compound comprising an mRNA sequence encoding at least one antigenic peptide or protein, wherein the mRNA compound is encapsulated in or associated with said lipid nanoparticle. With respect to the mRNA compound, the mRNA sequence and the antigenic peptide or protein, reference is made to the description of these features including the respective options and preferences above. In one of the preferred embodiments, the mRNA compound does not comprise a nucleoside modification. In another embodiment, it comprises no base modification. In a further embodiment, it does not comprise a 1-methylpseudouridine modification. In a further embodiment the mRNA compound only comprises the naturally existing nucleosides adenine, guanine, cytosine and uracil.

[0703] Formula (II) is further defined in that:

[0704] L¹ and L² are each independently —O(C═O)—, —(C═O)O—, —C(═O)—, —O—, —S(O)ₓ—, —S—S—, —C(═O)S—, —SC(═O)—, —NR^{a}C(═O)—, —C(═O)NR^{a}—, —NR^{a}C(═O)NR^{a}, —OC(═O)NR^{a}—, —NR^{a}C(═O)O—, or a direct bond;

[0705] G¹ is C₁-C₂ alkylene, —(C═O)—, —O(C═O)—, —SC(═O)—, —NR^{a}C(═O)— or a direct bond;

[0706] G² is —C(═O)—, —(C═O)O—, —C(═O)S—, —C(═O)NR^{a} or a direct bond;

[0707] G³ is C₁-C₆ alkylene;

[0708] R^{a} is H or C₁-C₁₂ alkyl;

[0709] R^{1a} and R^{1b} are, at each occurrence, independently either: (a) H or C₁-C₁₂ alkyl; or (b) R^{1a} is H or C₁-C₁₂ alkyl, and R^{1b} together with the carbon atom to which it is bound is taken together with an adjacent R^{1b} and the carbon atom to which it is bound to form a carbon-carbon double bond;

[0710] R^{2a} and R^{2b} are, at each occurrence, independently either: (a) H or C₁-C₁₂ alkyl; or (b) R^{2a} is H or C₁-C₁₂ alkyl, and R^{2b} together with the carbon atom to which it is bound is taken together with an adjacent R^{2b} and the carbon atom to which it is bound to form a carbon-carbon double bond;

[0711] R^{3a} and R^{3b} are, at each occurrence, independently either: (a) H or C₁-C₁₂ alkyl; or (b) R^{3a} is H or C₁-C₁₂ alkyl, and R^{3b} together with the carbon atom to which it is bound is taken together with an adjacent R^{3b} and the carbon atom to which it is bound to form a carbon-carbon double bond;

[0712] R^{4a} and R^{4b} are, at each occurrence, independently either: (a) H or C₁-C₁₂ alkyl; or (b) R^{4a} is H or C₁-C₁₂ alkyl, and R^{4b} together with the carbon atom to which it is bound is taken together with an adjacent R^{4b} and the carbon atom to which it is bound to form a carbon-carbon double bond;

[0713] R⁵ and R⁶ are each independently H or methyl;

[0714] R⁷ is C₄-C₂₀ alkyl;

[0715] R⁸ and R⁹ are each independently C₁-C₁₂ alkyl; or R⁸ and R⁹, together with the nitrogen atom to which they are attached, form a 5, 6 or 7-membered heterocyclic ring;

[0716] a, b, c and d are each independently an integer from 1 to 24; and

[0717] x is 0, 1 or 2.

[0718] In some embodiments of Formula (II), L¹ and L² are each independently

[0719] —O(C═O)—, —(C═O)O— or a direct bond. In other embodiments, G¹ and G² are each independently —(C═O)— or a direct bond. In some different embodiments, L¹ and L² are each independently —O(C═O)—, —(C═O)O— or a direct bond; and G¹ and G² are each independently —(C═O)— or a direct bond.

[0720] In some different embodiments of Formula (II), L¹ and L² are each independently —C(═O)—, —O—, —S(O)ₓ—, —S—S—, —C(═O)S—, —SC(═O)—, —NR^{a}—, —NR^{a}C(═O)—, —C(═O)NR^{a}—, —NR^{a}C(═O)NR^{a}, —OC(═O)NR^{a}—, —NR^{a}C(═O)O—, —NR^{a}S(O)ₓNR^{a}—, —NR^{a}S(O)ₓ— or —S(O)ₓNR^{a}—. In other of the foregoing embodiments of Formula (II), the lipid compound has one of the following structures (IIA) or (IIB):

[chemical structure]

[0721] In some embodiments of Formula (II), the lipid compound has structure (IIA). In other embodiments, the lipid compound has structure (IIB).

[0722] In any of the foregoing embodiments of Formula (II), one of L¹ or L² is —O(C═O)—. For example, in some embodiments each of L¹ and L² are —O(C═O)—.

[0723] In some different embodiments of Formula (II), one of L¹ or L² is —(C═O)O—. For example, in some embodiments each of L¹ and L² is —(C═O)O—.

[0724] In different embodiments of Formula (II), one of L1 or L² is a direct bond. As used herein, a “direct bond” means the group (e.g., L¹ or L²) is absent. For example, in some embodiments each of L1 and L² is a direct bond.

[0725] In other different embodiments of Formula (II), for at least one occurrence of R^{1a} and R^{1b}, R^{1a} is H or C₁-C₁₂ alkyl, and R^{1b} together with the carbon atom to which it is bound is taken together with an adjacent R^{1b} and the carbon atom to which it is bound to form a carbon-carbon double bond.

[0726] In still other different embodiments of Formula (II), for at least one occurrence of R^{4a} and R^{4b}, R^{4a} is H or C₁-C₁₂ alkyl, and R^{4b} together with the carbon atom to which it is bound is taken together with an adjacent R^{4b} and the carbon atom to which it is bound to form a carbon-carbon double bond.

[0727] In more embodiments of Formula (II), for at least one occurrence of R^{2a} and R^{2b}, R^{2a} is H or C₁-C₁₂ alkyl, and R^{2b} together with the carbon atom to which it is bound is taken together with an adjacent R^{2b} and the carbon atom to which it is bound to form a carbon-carbon double bond.

[0728] In other different embodiments of Formula (II), for at least one occurrence of R^{3a} and R^{3b}, R^{3a} is H or C₁-C₁₂ alkyl, and R^{3b} together with the carbon atom to which it is bound is taken together with an adjacent R^{3b} and the carbon atom to which it is bound to form a carbon-carbon double bond.

[0729] In various other embodiments of Formula (II), the lipid compound has one of the following structures (IIC) or (IID):

[chemical structure]

[0730] wherein e, f, g and h are each independently an integer from 1 to 12.

[0731] In some embodiments of Formula (II), the lipid compound has structure (IIC). In other embodiments, the lipid compound has structure (IID).

[0732] In various embodiments of structures (IIC) or (IID), e, f, g and h are each independently an integer from 4 to 10.

[0733] In certain embodiments of Formula (II), a, b, c and d are each independently an integer from 2 to 12 or an integer from 4 to 12. In other embodiments, a, b, c and d are each independently an integer from 8 to 12 or 5 to 9. In some certain embodiments, a is 0. In some embodiments, a is 1. In other embodiments, a is 2. In more embodiments, a is 3. In yet other embodiments, a is 4. In some embodiments, a is 5. In other embodiments, a is 6. In more embodiments, a is 7. In yet other embodiments, a is 8. In some embodiments, a is 9. In other embodiments, a is 10. In more embodiments, a is 11. In yet other embodiments, a is 12. In some embodiments, a is 13. In other embodiments, a is 14. In more embodiments, a is 15. In yet other embodiments, a is 16.

[0734] In some embodiments of Formula (II), b is 1. In other embodiments, b is 2. In more embodiments, b is 3. In yet other embodiments, b is 4. In some embodiments, b is 5. In other embodiments, b is 6. In more embodiments, b is 7. In yet other embodiments, b is 8. In some embodiments, b is 9. In other embodiments, b is 10. In more embodiments, b is 11. In yet other embodiments, b is 12. In some embodiments, b is 13. In other embodiments, b is 14. In more embodiments, b is 15. In yet other embodiments, b is 16.

[0735] In some embodiments of Formula (II), c is 1. In other embodiments, c is 2. In more embodiments, c is 3. In yet other embodiments, c is 4. In some embodiments, c is 5. In other embodiments, c is 6. In more embodiments, c is 7. In yet other embodiments, c is 8. In some embodiments, c is 9. In other embodiments, c is 10. In more embodiments, c is 11. In yet other embodiments, c is 12. In some embodiments, c is 13. In other embodiments, c is 14. In more embodiments, c is 15. In yet other embodiments, c is 16.

[0736] In some certain embodiments of Formula (II), d is 0. In some embodiments, d is 1. In other embodiments, d is 2. In more embodiments, d is 3. In yet other embodiments, d is 4. In some embodiments, d is 5. In other embodiments, d is 6. In more embodiments, d is 7. In yet other embodiments, d is 8. In some embodiments, d is 9. In other embodiments, d is 10. In more embodiments, d is 11. In yet other embodiments, d is 12. In some embodiments, d is 13. In other embodiments, d is 14. In more embodiments, d is 15. In yet other embodiments, d is 16.

[0737] In some embodiments of Formula (II), e is 1. In other embodiments, e is 2. In more embodiments, e is 3. In yet other embodiments, e is 4. In some embodiments, e is 5. In other embodiments, e is 6. In more embodiments, e is 7. In yet other embodiments, e is 8. In some embodiments, e is 9. In other embodiments, e is 10. In more embodiments, e is 11. In yet other embodiments, e is 12.

[0738] In some embodiments of Formula (II), f is 1. In other embodiments, f is 2. In more embodiments, f is 3. In yet other embodiments, f is 4. In some embodiments, f is 5. In other embodiments, f is 6. In more embodiments, f is 7. In yet other embodiments, f is 8. In some embodiments, f is 9. In other embodiments, f is 10. In more embodiments, f is 11. In yet other embodiments, f is 12.

[0739] In some embodiments of Formula (II), g is 1. In other embodiments, g is 2. In more embodiments, g is 3. In yet other embodiments, g is 4. In some embodiments, g is 5. In other embodiments, g is 6. In more embodiments, g is 7. In yet other embodiments, g is 8. In some embodiments, g is 9. In other embodiments, g is 10. In more embodiments, g is 11. In yet other embodiments, g is 12.

[0740] In some embodiments of Formula (II), h is 1. In other embodiments, e is 2. In more embodiments, h is 3. In yet other embodiments, h is 4. In some embodiments, e is 5. In other embodiments, h is 6. In more embodiments, h is 7. In yet other embodiments, h is 8. In some embodiments, h is 9. In other embodiments, h is 10. In more embodiments, h is 11. In yet other embodiments, h is 12.

[0741] In some other various embodiments of Formula (II), a and d are the same. In some other embodiments, b and c are the same. In some other specific embodiments and a and d are the same and b and c are the same.

[0742] The sum of a and b and the sum of c and d of Formula (II) are factors which may be varied to obtain a lipid having the desired properties. In one embodiment, a and b are chosen such that their sum is an integer ranging from 14 to 24. In other embodiments, c and d are chosen such that their sum is an integer ranging from 14 to 24. In further embodiment, the sum of a and b and the sum of c and d are the same. For example, in some embodiments the sum of a and b and the sum of c and d are both the same integer which may range from 14 to 24. In still more embodiments, a. b, c and d are selected such that the sum of a and b and the sum of c and d is 12 or greater.

[0743] The substituents at R^{1a}, R^{2a}, R^{3a} and R^{4a} of Formula (II) are not particularly limited. In some embodiments, at least one of R^{1a}, R^{2a}, R^{3a} and R^{4a} is H. In certain embodiments R^{1a}, R^{2a}, R^{3a} and R^{4a} are H at each occurrence. In certain other embodiments at least one of R^{1a}, R^{2a}, R^{3a} and R^{4a} is C₁-C₁₂ alkyl. In certain other embodiments at least one of R^{1a}, R^{2a}, R^{3a} and R^{4a} is C₁-C₈ alkyl. In certain other embodiments at least one of R^{1a}, R^{2a}, R^{3a} and R^{4a} is C₁-C₆ alkyl. In some of the foregoing embodiments, the C₁-C₈ alkyl is methyl, ethyl, n-propyl, iso-propyl, n-butyl, iso-butyl, tert-butyl, n-hexyl or n-octyl.

[0744] In certain embodiments of Formula (II), R^{1a}, R1^{b}, R^{4a} and R^{4b} are C₁-C₁₂ alkyl at each occurrence.

[0745] In further embodiments of Formula (II), at least one of R^{1b}, R^{2b}, R^{3b} and R^{4b} is H or R^{1b}, R^{2b}, R^{3b} and R^{4b} are H at each occurrence.

[0746] In certain embodiments of Formula (II), R^{1b} together with the carbon atom to which it is bound is taken together with an adjacent R^{1b} and the carbon atom to which it is bound to form a carbon-carbon double bond. In other embodiments of the foregoing R^{4b} together with the carbon atom to which it is bound is taken together with an adjacent R^{4b} and the carbon atom to which it is bound to form a carbon-carbon double bond.

[0747] The substituents at R⁵ and R⁶ of Formula (II) are not particularly limited in the foregoing embodiments. In certain embodiments one of R⁵ or R⁶ is methyl. In other embodiments each of R⁵ or R⁶ is methyl.

[0748] The substituents at R⁷ of Formula (II) are not particularly limited in the foregoing embodiments. In certain embodiments R⁷ is C₆-C₁₆ alkyl. In some other embodiments, R⁷ is C₆-C₉ alkyl. In some of these embodiments, R⁷ is substituted with —(C═O)OR^{b}, —O(C═O)R^{b}, —C(═O)R^{b}, —OR^{b}, —S(O)ₓR^{b}, —S—SR^{b}, —C(═O)SR^{b}, —SC(═O)R^{b}, —NR^{a}R^{b}, —NR^{a}C(═O)R^{b}, —C(═O)NR^{a}R^{b}, —NR^{a}C(═O)NR^{a}R^{b}, —OC(═O)NR^{a}R^{b}, —NR^{a}C(═O)OR^{b}, —NR^{a}S(O)NR^{a}R^{b}, —NR^{a}S(O)ₓRb or —S(O)NR^{a}R^{b}, wherein: R^{a} is H or C₁-C₁₂ alkyl; R^{b} is C₁-C₁₅ alkyl; and x is 0, 1 or 2. For example, in some embodiments R⁷ is substituted with —(C═O)OR^{b} or —O(C═O)R^{b}.

[0749] In various of the foregoing embodiments of Formula (II), R^{b} is branched C₁-C₁₅ alkyl. For example, in some embodiments R^{b} has one of the following structures:

[chemical structure]

[0750] In certain other of the foregoing embodiments of Formula (II), one of R⁸ or R⁹ is methyl. In other embodiments, both R⁸ and R⁹ are methyl.

[0751] In some different embodiments of Formula (II), R⁸ and R⁹, together with the nitrogen atom to which they are attached, form a 5, 6 or 7-membered heterocyclic ring. In some embodiments of the foregoing, R⁸ and R⁹, together with the nitrogen atom to which they are attached, form a 5-membered heterocyclic ring, for example a pyrrolidinyl ring. In some different embodiments of the foregoing, R⁸ and R⁹, together with the nitrogen atom to which they are attached, form a 6-membered heterocyclic ring, for example a piperazinyl ring.

[0752] In still other embodiments of the foregoing lipids of Formula (II), G³ is C₂-C₄ alkylene, for example C₃ alkylene.

[0753] In various different embodiments, the lipid compound has one of the structures set forth in Table 8 (“Representative Lipids of Formula (II)”) below.

TABLE 8
Representative Lipids of Formula (II)

| | | Prep. |
|---|---|---|
| No. | Structure | Method |
| II-1 | [chemical structure] | D |
| II-2 | [chemical structure] | D |
| II-3 | [chemical structure] | D |
| II-4 | [chemical structure] | E |
| II-5 | [chemical structure] | D |
| II-6 | [chemical structure] | D |
| II-7 | [chemical structure] | D |
| II-8 | [chemical structure] | D |
| II-9 | [chemical structure] | D |
| II-10 | [chemical structure] | D |
| II-11 | [chemical structure] | D |
| II-12 | [chemical structure] | D |
| II-13 | [chemical structure] | D |
| II-14 | [chemical structure] | D |
| II-15 | [chemical structure] | D |
| II-16 | [chemical structure] | E |
| II-17 | [chemical structure] | D |
| II-18 | [chemical structure] | D |
| II-19 | [chemical structure] | D |
| II-20 | [chemical structure] | D |
| II-21 | [chemical structure] | D |
| II-22 | [chemical structure] | D |
| II-23 | [chemical structure] | D |
| II-24 | [chemical structure] | D |
| II-25 | [chemical structure] | E |
| II-26 | [chemical structure] | E |
| II-27 | [chemical structure] | E |
| II-28 | [chemical structure] | E |
| II-29 | [chemical structure] | E |
| II-30 | [chemical structure] | E |
| II-31 | [chemical structure] | E |
| II-32 | [chemical structure] | E |
| II-33 | [chemical structure] | E |
| II-34 | [chemical structure] | E |
| II-35 | [chemical structure] | D |
| II-36 | [chemical structure] | D |

[0754] In some embodiments, the LNPs comprise a lipid of Formula (II), a mRNA compound as described above and one or more excipient selected from neutral lipids, steroids and pegylated lipids. In some embodiments the lipid of Formula (II) is compound II-9. In some embodiments the lipid of Formula (II) is compound II-10. In some embodiments the lipid of Formula (II) is compound II-11. In some embodiments the lipid of Formula (II) is compound II-12. In some embodiments the lipid of Formula (II) is compound II-32.

[0755] In a further embodiment, the LNP comprises (i) a cationic lipid of Formula (III):

[chemical structure]

[0756] as further defined below or a pharmaceutically acceptable salt, tautomer, prodrug or stereoisomer thereof, and (ii) a mRNA compound comprising an mRNA sequence encoding at least one antigenic peptide or protein, wherein the mRNA compound is encapsulated in or associated with said lipid nanoparticle. With respect to the mRNA compound, the mRNA sequence and the antigenic peptide or protein, reference is made to the description of these features including the respective options and preferences above. In one of the preferred embodiments, the mRNA compound does not comprise a nucleoside modification. In another embodiment, it comprises no base modification. In a further embodiment, it does not comprise a 1-methylpseudouridine modification. In yet a further embodiment the mRNA compound only comprises the natural nucleosides adenine, guanine, cytosine and uracil.

[0757] Formula (III) is further defined in that:

[0758] one of L¹ or L² is —O(C═O)—, —(C═O)O—, —C(═O)—, —O—, —S(O)ₓ—, —S—S—, —C(═O)S—, SC(═O)—, —NR^{a}C(═O)—, —C(═O)NR^{a}—, —NR^{a}C(═O)NR^{a}—, —OC(═O)NR^{a}— or —NR^{a}C(═O)O—, and the other of L¹ or L² is —O(C═O)—, —(C═O)O—, —C(═O)—, —O—, —S(O)ₓ—, —S—S—, —C(═O)S—, SC(═O)—, —NR^{a}C(═O)—, —C(═O)NR^{a}—, —NR^{a}C(═O)NR^{a}—, —OC(═O)NR^{a}— or —NR^{a}C(═O)O— or a direct bond;

[0759] G¹ and G² are each independently unsubstituted C₁-C₁₂ alkylene or C₁-C₁₂ alkenylene;

[0760] G³ is C₁-C₂₄ alkylene, C₁-C₂₄ alkenylene, C₃-C₈ cycloalkylene, C₃-C₈ cycloalkenylene;

[0761] R^{a} is H or C₁-C₁₂ alkyl;

[0762] R¹ and R² are each independently C₆-C₂₄ alkyl or C₆-C₂₄ alkenyl;

[0763] R³ is H, OR⁵, CN, —C(═O)OR⁴, —OC(═O)R⁴ or —NR⁵C(═O)R⁴;

[0764] R⁴ is C₁-C₁₂ alkyl;

[0765] R⁵ is H or C₁-C₆ alkyl; and

[0766] x is 0, 1 or 2.

[0767] In some of the foregoing embodiments of Formula (III), the lipid has one of the following structures (IIIA) or (IIIB):

[chemical structure]

[0768] wherein:

[0769] A is a 3 to 8-membered cycloalkyl or cycloalkylene ring;

[0770] R⁶ is, at each occurrence, independently H, OH or C₁-C₂₄ alkyl;

[0771] n is an integer ranging from 1 to 15.

[0772] In some of the foregoing embodiments of Formula (III), the lipid has structure (IIIA), and in other embodiments, the lipid has structure (IIIB).

[0773] In other embodiments of Formula (III), the lipid has one of the following structures (IIIC) or (IIID):

[chemical structure]

[0774] wherein y and z are each independently integers ranging from 1 to 12.

[0775] In any of the foregoing embodiments of Formula (III), one of L¹ or L² is —O(C═O)—. For example, in some embodiments each of L¹ and L² are —O(C═O)—. In some different embodiments of any of the foregoing, L1 and L² are each independently —(C═O)O— or —O(C═O)—. For example, in some embodiments each of L¹ and L² is —(C═O)O—.

[0776] In some different embodiments of Formula (III), the lipid has one of the following structures (IIIE) or (IIIF):

[chemical structure]

[0777] In some of the foregoing embodiments of Formula (III), the lipid has one of the following structures (IIIG), (IIIH), (IIII), or (IIIJ):

[chemical structure]

[0778] In some of the foregoing embodiments of Formula (III), n is an integer ranging from 2 to 12, for example from 2 to 8 or from 2 to 4. For example, in some embodiments, n is 3, 4, 5 or 6. In some embodiments, n is 3. In some embodiments, n is 4. In some embodiments, n is 5. In some embodiments, n is 6.

[0779] In some other of the foregoing embodiments of Formula (III), y and z are each independently an integer ranging from 2 to 10. For example, in some embodiments, y and z are each independently an integer ranging from 4 to 9 or from 4 to 6.

[0780] In some of the foregoing embodiments of Formula (III), R⁶ is H. In other of the foregoing embodiments, R⁶ is C₁-C₂₄ alkyl. In other embodiments, R⁶ is OH.

[0781] In some embodiments of Formula (III), G³ is unsubstituted. In other embodiments, G3 is substituted. In various different embodiments, G³ is linear C₁-C₂₄ alkylene or linear C₁-C₂₄ alkenylene.

[0782] In some other foregoing embodiments of Formula (III), R¹ or R², or both, is C₆-C₂₄ alkenyl. For example, in some embodiments, R¹ and R² each, independently have the following structure:

[chemical structure]

[0783] wherein:

[0784] R^{7a} and R^{7b} are, at each occurrence, independently H or C₁-C₁₂ alkyl; and

[0785] a is an integer from 2 to 12,

[0786] wherein R^{7a}, R^{7b} and a are each selected such that R¹ and R² each independently comprise from 6 to 20 carbon atoms. For example, in some embodiments a is an integer ranging from 5 to 9 or from 8 to 12.

[0787] In some of the foregoing embodiments of Formula (III), at least one occurrence of R^{7a} is H. For example, in some embodiments, R^{7a} is H at each occurrence. In other different embodiments of the foregoing, at least one occurrence of R^{7b} is C₁-C₈ alkyl. For example, in some embodiments, C₁-C₈ alkyl is methyl, ethyl, n-propyl, iso-propyl, n-butyl, iso-butyl, tert-butyl, n-hexyl or n-octyl.

[0788] In different embodiments of Formula (III), R¹ or R², or both, has one of the following structures:

[chemical structure]

[0789] In some of the foregoing embodiments of Formula (III), R³ is OH, CN, —C(═O)OR⁴, —OC(═O)R⁴ or —NHC(═O)R⁴. In some embodiments, R⁴ is methyl or ethyl.

[0790] In various different embodiments, the cationic lipid of Formula (III) has one of the structures set forth in Table 9 (“Representative Compounds of Formula (III)”) below.

TABLE 9
Representative Compounds of Formula (III)

| | | Prep. |
|---|---|---|
| No. | Structure | Method |
| III-1 | [chemical structure] | F |
| III-2 | [chemical structure] | F |
| III-3 | [chemical structure] | F |
| III-4 | [chemical structure] | F |
| III-5 | [chemical structure] | F |
| III-6 | [chemical structure] | F |
| III-7 | [chemical structure] | F |
| III-8 | [chemical structure] | F |
| III-9 | [chemical structure] | F |
| III-10 | [chemical structure] | F |
| III-11 | [chemical structure] | F |
| III-12 | [chemical structure] | F |
| III-13 | [chemical structure] | F |
| III-14 | [chemical structure] | F |
| III-15 | [chemical structure] | F |
| III-16 | [chemical structure] | G |
| III-17 | [chemical structure] | G |
| III-18 | [chemical structure] | G |
| III-19 | [chemical structure] | G |
| III-20 | [chemical structure] | G |
| III-21 | [chemical structure] | G |
| III-22 | [chemical structure] | G |
| III-23 | [chemical structure] | G |
| III-24 | [chemical structure] | G |
| III-25 | [chemical structure] | G |
| III-26 | [chemical structure] | G |
| III-27 | [chemical structure] | G |
| III-28 | [chemical structure] | G |
| III-29 | [chemical structure] | G |
| III-30 | [chemical structure] | G |
| III-31 | [chemical structure] | G |
| III-32 | [chemical structure] | G |
| III-33 | [chemical structure] | G |
| III-34 | [chemical structure] | G |
| III-35 | [chemical structure] | G |
| III-36 | [chemical structure] | G |

[0791] In some embodiments, the LNPs comprise a lipid of Formula (III), a mRNA compound as described herein and one or more excipient selected from neutral lipids, steroids and pegylated lipids. In some embodiments the lipid of Formula (III) is compound III-3. In some embodiments the lipid of Formula (III) is compound III-7.

[0792] Within the context of the present invention LNP-III-3 means a lipid nanoparticle as defined herein comprising the cationic lipid compound III-3, according to the tables above. Other lipid nanoparticles are referenced in analogous form.

[0793] In certain embodiments, the cationic lipid of Formula (I), (II) or (III) is present in the LNP in an amount from about 30 to about 95 mole percent, relative to the total lipid content of the LNP. If more than one cationic lipid is incorporated within the LNP, such percentages apply to the combined cationic lipids. In one embodiment, the cationic lipid is present in the LNP in an amount from about 30 to about 70 mole percent. In one embodiment, the cationic lipid is present in the LNP in an amount from about 40 to about 60 mole percent, such as about 40, 41, 42, 43, 44, 45, 46, 47, 48, 49, 50, 51, 52, 53, 54, 55, 56, 57, 58, 59 or 60 mole percent, respectively.

[0794] In some embodiments of the invention the LNP comprises a combination or mixture of any the lipids described above.

[0795] In one of the preferred embodiments, the lipid nanoparticle comprises a cationic lipid selected from the group of:

[chemical structure]

[0796] In a further embodiment, the invention relates to an mRNA comprising lipid nanoparticle comprising:

[0797] (i) a PEG lipid with the formula (IV)

[chemical structure]

[0798] wherein R⁸ and R⁹ are each independently a straight or branched, saturated or unsaturated alkyl chain containing from 10 to 30 carbon atoms, wherein the alkyl chain is optionally interrupted by one or more ester bonds;

[0799] and w has a mean value ranging from 30 to 60; and

[0800] (ii) a mRNA compound comprising an mRNA sequence encoding at least one antigenic peptide or protein; wherein the mRNA compound is encapsulated in or associated with said lipid nanoparticle. With respect to the mRNA compound, the mRNA sequence and the antigenic peptide or protein, reference is made to the description of these features including the respective options and preferences above. In one of the preferred embodiments, the mRNA compound does not comprise a nucleoside modification. In another embodiment, it comprises no base modification. In a further embodiment, it does not comprise a 1-methylpseudouridine modification. Moreover, if the PEG lipid is compound (IVa), the lipid nanoparticle is not a lipid nanoparticle comprising compound I-6, DSPC, cholesterol and the PEG lipid (IVa) at a ratio of about 50:10:38.5:1.5 that encapsulates unmodified, 1-methylpseudouridine modified or codon-optimized mRNA encoding an influenza PR8 or Cal/7/2009 hemagglutinin or an HIV-1 CD4-independent R3A envelop protein. In one of the preferred embodiments, the lipid nanoparticle comprises (i) a cationic lipid according to formula (I), (II), or (III) as defined above, (ii) a mRNA compound comprising an mRNA sequence encoding at least one antigenic peptide or protein as described herein, and (iii) a PEG lipid of formula (IV); wherein the mRNA compound is encapsulated in or associated with said lipid nanoparticle.

[0801] The amount of the permanently cationic lipid or lipidoid should also be selected taking the amount of the nucleic acid cargo into account. In one embodiment, these amounts are selected such as to result in an N/P ratio of the nanoparticle(s) or of the composition in the range from about 0.1 to about 20. In this context, the N/P ratio is defined as the mole ratio of the nitrogen atoms (“N”) of the basic nitrogen-containing groups of the lipid or lipidoid to the phosphate groups (“P”) of the nucleic acid which is used as cargo. The N/P ratio may be calculated on the basis that, for example, 1 pg RNA typically contains about 3 nmol phosphate residues, provided that the RNA exhibits a statistical distribution of bases. The “N”-value of the lipid or lipidoid may be calculated on the basis of its molecular weight and the relative content of permanently cationic and—if present—cationisable groups.

[0802] Such low N/P ratios are commonly believed to be detrimental to the performance and in vivo efficacy of such carrier-cargo complexes, or nucleic-acid loaded nanoparticles. However, the inventors found that such N/P ratios are indeed useful in the context of the present invention, in particular when the local or extravascular administration of the nanoparticles is intended. Here, the respectively nanoparticles have been found to be efficacious and at the same time well-tolerated.

[0803] In certain embodiments, the LNP comprises one or more additional lipids which stabilize the formation of particles during their formation.

[0804] Suitable stabilizing lipids include neutral lipids and anionic lipids. The term “neutral lipid” refers to any one of a number of lipid species that exist in either an uncharged or neutral zwitterionic form at physiological pH. Representative neutral lipids include diacylphosphatidylcholines, diacylphosphatidylethanolamines, ceramides, sphingomyelins, dihydro sphingomyelins, cephalins, and cerebrosides.

[0805] Exemplary neutral lipids include, for example, distearoylphosphatidylcholine (DSPC), dioleoylphosphatidylcholine (DOPC), dipalmitoylphosphatidylcholine (DPPC), dioleoylphosphatidylglycerol (DOPG), dipalmitoylphosphatidylglycerol (DPPG), dioleoyl-phosphatidylethanolamine (DOPE), palmitoyloleoylphosphatidylcholine (POPC), palmitoyloleoyl-phosphatidylethanolamine (POPE) and dioleoyl-phosphatidylethanolamine 4-(N-maleimidomethyl)-cyclohexane-lcarboxylate (DOPE-mal), dipalmitoyl phosphatidyl ethanolamine (DPPE), dimyristoylphosphoethanolamine (DMPE), distearoyl-phosphatidylethanolamine (DSPE), 16-O-monomethyl PE, 16-O-dimethyl PE, 18-1-trans PE, 1-stearioyl-2-oleoylphosphatidyethanol amine (SOPE), and 1,2-dielaidoyl-sn-glycero-3-phophoethanolamine (transDOPE). In one embodiment, the neutral lipid is 1,2-distearoyl-sn-glycero-3phosphocholine (DSPC).

[0806] In some embodiments, the LNPs comprise a neutral lipid selected from DSPC, DPPC, DMPC, DOPC, POPC, DOPE and SM. In various embodiments, the molar ratio of the cationic lipid (e.g., lipid of Formula (I), (II) or (III)) to the neutral lipid ranges from about 2:1 to about 8:1.

[0807] In various embodiments, the LNPs further comprise a steroid or steroid analogue. A “steroid” is a compound comprising the following carbon skeleton:

[chemical structure]

[0808] In certain embodiments, the steroid or steroid analogue is cholesterol. In some of these embodiments, the molar ratio of the cationic lipid (e.g., lipid of Formula (I), (II), or (III)) to cholesterol ranges from about 5:1 to 1:1.

[0809] The term “anionic lipid” refers to any lipid that is negatively charged at physiological pH. These lipids include phosphatidylglycerol, cardiolipin, diacylphosphatidylserine, diacylphosphatidic acid, Ndodecanoylphosphatidylethanolamines, N-succinylphosphatidylethanolamines, Nglutarylphosphatidylethanolamines, lysylphosphatidylglycerols, palmitoyloleyolphosphatidylglycerol (POPG), and other anionic modifying groups joined to neutral lipids.

[0810] In certain embodiments, the LNP comprises glycolipids (e.g., monosialoganglioside GM₁).

[0811] In some embodiments, the LNPs comprise a polymer conjugated lipid. The term “polymer conjugated lipid” refers to a molecule comprising both a lipid portion and a polymer portion. An example of a polymer conjugated lipid is a pegylated lipid. The term “pegylated lipid” refers to a molecule comprising both a lipid portion and a polyethylene glycol portion. Pegylated lipids are known in the art and include 1-(monomethoxy-polyethyleneglycol)-2,3-dimyristoylglycerol (PEG-s-DMG) and the like.

[0812] In certain embodiments, the LNP comprises an additional, stabilizing-lipid which is a polyethylene glycol-lipid (pegylated lipid). Suitable polyethylene glycollipids include PEG-modified phosphatidylethanolamine, PEG-modified phosphatidic acid, PEG-modified ceramides (e.g., PEG-CerC14 or PEG-CerC20), PEG-modified dialkylamines, PEG-modified diacylglycerols, PEG-modified dialkylglycerols. Representative polyethylene glycol-lipids include PEG-c-DOMG, PEG-c-DMA, and PEG-s-DMG. In one embodiment, the polyethylene glycol-lipid is N-[(methoxy poly(ethylene glycol)₂₀₀₀)carbamyl]-1,2-dimyristyloxlpropyl-3-amine (PEG-c-DMA). In one embodiment, the polyethylene glycol-lipid is PEG-c-DOMG). In other embodiments, the LNPs comprise a pegylated diacylglycerol (PEG-DAG) such as 1-(monomethoxy-polyethyleneglycol)-2,3-dimyristoylglycerol (PEG-DMG), a pegylated phosphatidylethanoloamine (PEG-PE), a PEG succinate diacylglycerol (PEG-S-DAG) such as 4-O-(2′,3′-di(tetradecanoyloxy)propyl-1-O-(ω-methoxy(polyethoxy)ethyl)butanedioate (PEG-S-DMG), a pegylated ceramide (PEG-cer), or a PEG dialkoxypropylcarbamate such as ω-methoxy(polyethoxy)ethyl-N-(2,3di(tetradecanoxy)propyl)carbamate or 2,3-di(tetradecanoxy)propyl-N-(ω-methoxy(polyethoxy)ethyl)carbamate. In various embodiments, the molar ratio of the cationic lipid to the pegylated lipid ranges from about 100:1 to about 25:1.

[0813] As mentioned, the mRNA comprising lipid nanoparticle may comprise a pegylated lipid having the structure of formula (IV):

[chemical structure]

[0814] or a pharmaceutically acceptable salt, tautomer or stereoisomer thereof, wherein:

[0815] R⁸ and R⁹ are each independently a straight or branched, saturated or unsaturated alkyl chain containing from 10 to 30 carbon atoms, wherein the alkyl chain is optionally interrupted by one or more ester bonds; and w has mean value ranging from 30 to 60.

[0816] In some of the foregoing embodiments of the pegylated lipid (IV), R⁸ and R⁹ are not both n-octadecyl when w is 42. In some other embodiments, R⁸ and R⁹ are each independently a straight or branched, saturated or unsaturated alkyl chain containing from 10 to 18 carbon atoms. In some embodiments, R⁸ and R⁹ are each independently a straight or branched, saturated or unsaturated alkyl chain containing from 12 to 16 carbon atoms. In some embodiments, R⁸ and R⁹ are each independently a straight or branched, saturated or unsaturated alkyl chain containing 12 carbon atoms. In some embodiments, R⁸ and R⁹ are each independently a straight or branched, saturated or unsaturated alkyl chain containing 14 carbon atoms. In other embodiments, R⁸ and R⁹ are each independently a straight or branched, saturated or unsaturated alkyl chain containing 16 carbon atoms. In still more embodiments, R⁸ and R⁹ are each independently a straight or branched, saturated or unsaturated alkyl chain containing 18 carbon atoms. In still other embodiments, R⁸ is a straight or branched, saturated or unsaturated alkyl chain containing 12 carbon atoms and R⁹ is a straight or branched, saturated or unsaturated alkyl chain containing 14 carbon atoms.

[0817] In various embodiments, w spans a range that is selected such that the PEG portion of (IV) has an average molecular weight of about 400 to about 6000 g/mol. In some embodiments, the average w is about 50.

[0818] In a preferred embodiment R⁸ and R⁹ are saturated alkyl chains.

[0819] In a further preferred embodiment the PEG lipid is of formula (IVa)

[chemical structure]

[0820] wherein n has a mean value ranging from 30 to 60, such as about 30±2, 32±2, 34±2, 36±2, 38±2, 40±2, 42±2, 44±2, 46±2, 48±2, 50±2, 52±2, 54±2, 56±2, 58±2, or 60±2. In a most preferred embodiment n is about 49.

[0821] In other embodiments, the pegylated lipid has one of the following structures:

[chemical structure]

[0822] wherein n is an integer selected such that the average molecular weight of the pegylated lipid is about 2500 g/mol, most preferably n is about 49.

[0823] In certain embodiments, the PEG lipid is present in the LNP in an amount from about 1 to about 10 mole percent, relative to the total lipid content of the nanoparticle. In one embodiment, the PEG lipid is present in the LNP in an amount from about 1 to about 5 mole percent. In one embodiment, the PEG lipid is present in the LNP in about 1 mole percent or about 1.5 mole percent.

[0824] In certain embodiments, the LNP comprises one or more targeting moieties which are capable of targeting the LNP to a cell or cell population. For example, in one embodiment, the targeting moiety is a ligand which directs the LNP to a receptor found on a cell surface.

[0825] In certain embodiments, the LNP comprises one or more internalization domains. For example, in one embodiment, the LNP comprises one or more domains which bind to a cell to induce the internalization of the LNP. For example, in one embodiment, the one or more internalization domains bind to a receptor found on a cell surface to induce receptor-mediated uptake of the LNP. In certain embodiments, the LNP is capable of binding a biomolecule in vivo, where the LNP-bound biomolecule can then be recognized by a cell-surface receptor to induce internalization. For example, in one embodiment, the LNP binds systemic ApoE, which leads to the uptake of the LNP and associated cargo.

[0826] Other exemplary LNPs and their manufacture are described in the art, for example in U.S. Patent Application Publication No. US20120276209, Semple et al., 2010, Nat Biotechnol., 28(2):172-176; Akinc et al., 2010, Mol Ther., 18(7): 1357-1364; Basha et al., 2011, Mol Ther, 19(12): 2186-2200; Leung et al., 2012, J Phys Chem C Nanomater Interfaces, 116(34): 18440-18450; Lee et al., 2012, Int J Cancer., 131(5): E781-90; Belliveau et al., 2012, Mol Ther nucleic Acids, 1: e37; Jayaraman et al., 2012, Angew Chem Int Ed Engl., 51(34): 8529-8533; Mui et al., 2013, Mol Ther Nucleic Acids. 2, e139; Maier et al., 2013, Mol Ther., 21(8): 1570-1578; and Tam et al., 2013, Nanomedicine, 9(5): 665-74, each of which are incorporated by reference in their entirety.

[0827] In preferred embodiments, the lipid nanoparticles have a mean diameter of from about 30 nm to about 150 nm, from about 40 nm to about 150 nm, from about 50 nm to about 150 nm, from about 60 nm to about 130 nm, from about 70 nm to about 110 nm, from about 70 nm to about 100 nm, from about 80 nm to about 100 nm, from about 90 nm to about 100 nm, from about 70 to about 90 nm, from about 80 nm to about 90 nm, from about 70 nm to about 80 nm, or about 30 nm, 35 nm, 40 nm, 45 nm, 50 nm, 55 nm, 60 nm, 65 nm, 70 nm, 75 nm, 80 nm, 85 nm, 90 nm, 95 nm, 100 nm, 105 nm, 110 nm, 115 nm, 120 nm, 125 nm, 130 nm, 135 nm, 140 nm, 145 nm, or 150 nm, and are substantially non-toxic. As mentioned, the mean diameter may correspond to the z-average as determined by dynamic light scattering.

[0828] In another preferred embodiment of the invention the lipid nanoparticles have a hydrodynamic diameter in the range from about 50 nm to about 300 nm, or from about 60 nm to about 250 nm, from about 60 nm to about 150 nm, or from about 60 nm to about 120 nm, respectively.

[0829] In certain embodiments, the mRNA, when present in the lipid nanoparticles, is resistant in aqueous solution to degradation with a nuclease.

[0830] The total amount of mRNA in the lipid nanoparticles varies and may be defined depending on the mRNA to total lipid w/w ratio. In one embodiment of the invention the invention the mRNA to total lipid ratio is less than 0.06 w/w, preferably between 0.03 and 0.04 w/w.

[0831] In some embodiments, the LNPs comprise a lipid of Formula (I), (II) or (III), a mRNA compound as defined above, a neutral lipid, a steroid and a pegylated lipid. In some embodiments the lipid of Formula (I) is compound I-6, or the lipid of formula (III) is compound III-3, the neutral lipid is DSPC, the steroid is cholesterol, and the pegylated lipid is the compound of formula (IVa).

[0832] In certain embodiments, the LNP comprises one or more targeting moieties which are capable of targeting the LNP to a cell or cell population. For example, in one embodiment, the targeting moiety is a ligand which directs the LNP to a receptor found on a cell surface.

[0833] In certain embodiments, the LNP comprises one or more internalization domains. For example, in one embodiment, the LNP comprises one or more domains which bind to a cell to induce the internalization of the LNP. For example, in one embodiment, the one or more internalization domains bind to a receptor found on a cell surface to induce receptor-mediated uptake of the LNP. In certain embodiments, the LNP is capable of binding a biomolecule in vivo, where the LNP-bound biomolecule can then be recognized by a cell-surface receptor to induce internalization. For example, in one embodiment, the LNP binds systemic ApoE, which leads to the uptake of the LNP and associated cargo.

[0834] In particular the invention relates to the following non-limiting specific embodiments.

[0835] In a preferred embodiment, the invention relates to a mRNA comprising lipid nanoparticle comprising a cationic lipid according to formula (I), (II) or (II) as defined above and a mRNA compound comprising a mRNA sequence encoding at least one antigenic peptide or protein as defined above, wherein, if the cationic lipid is of formula I-6, the lipid nanoparticle is not a lipid nanoparticle comprising formula I-6, DSPC, cholesterol and a PEG lipid of formula (IVA) at a ratio of about 50:10:38.5:1.5 that encapsulates unmodified, 1-methylpseudouridine modified or codon-optimized mRNA encoding an influenza PR8 or Cal/7/2009 hemagglutinin or an HIV-1 CD4-independent R3A envelop protein.

[0836] A further preferred embodiment relates to a mRNA comprising lipid nanoparticle comprising a PEG lipid according to formula (IV) as defined above and a mRNA compound comprising a mRNA sequence encoding at least one antigenic peptide or protein, wherein, if the cationic lipid is of formula I-6, the lipid nanoparticle is not a lipid nanoparticle comprising formula I-6, DSPC, cholesterol and a PEG lipid of formula (IVa) at a ratio of about 50:10:38.5:1.5 that encapsulates unmodified, 1-methylpseudouridine modified or codon-optimized mRNA encoding an influenza PR8 or Cal/7/2009 hemagglutinin or an HIV-1 CD4-independent R3A envelop protein.

[0837] In a specific preferred embodiment the invention relates to a mRNA comprising lipid nanoparticle, comprising a cationic lipid according to formula (I), (II) or (III), a PEG-lipid according to formula (IV), a mRNA compound comprising a mRNA sequence encoding at least one antigenic peptide or protein, a steroid and a neutral lipid, wherein preferably, if the cationic lipid is of formula I-6, the lipid nanoparticle is not a lipid nanoparticle comprising formula I-6, DSPC, cholesterol and a PEG lipid of formula (IVa) at a ratio of about 50:10:38.5:1.5 that encapsulates unmodified, 1-methylpseudouridine modified or codon-optimized mRNA encoding an influenza PR8 or Cal/7/2009 hemagglutinin or an HIV-1 CD4-independent R3A envelop protein, preferably the antigenic peptide or protein is derived from pathogenic antigens, tumour antigens, allergenic antigens or autoimmune self-antigens or a fragment or variant thereof, more preferably the pathogenic antigen is derived from an influenza or rabies virus.

[0838] In a further preferred embodiment, the invention relates to a mRNA comprising lipid nanoparticle comprising: a cationic lipid selected from

[chemical structure]

[0839] a PEG lipid with the structure

[chemical structure]

[0840] wherein n has a mean value ranging from 30 to 60, preferably about 49, optionally a neutral lipid, preferably 1,2-distearoyl-sn-glycero-3-phosphocholine (DSPC) and optionally a steroid, preferably cholesterol, wherein the molar ratio of the cationic lipid to DSPC is optionally in the range from about 2:1 to 8:1, wherein the molar ratio of the cationic lipid to cholesterol is optionally in the range from about 2:1 to 1:1.

[0841] In one preferred embodiment, the invention relates to a mRNA comprising lipid nanoparticle comprising: a cationic lipid with formula (I), (II) or (III) and/or PEG lipid with formula (IV), optionally a neutral lipid, preferably 1,2-distearoyl-sn-glycero-3-phosphocholine (DSPC) and optionally a steroid, preferably cholesterol, wherein the molar ratio of the cationic lipid to DSPC is optionally in the range from about 2:1 to 8:1, wherein the molar ratio of the cationic lipid to cholesterol is optionally in the range from about 2:1 to 1:1, and an mRNA composition comprising an mRNA sequence encoding an antigenic peptide or protein, wherein wherein the mRNA sequence additionally comprises preferably in 5′ to 3′-direction, the following elements:
[0842] a) a 5′-CAP structure, preferably m7GpppN,
[0843] b) at least one coding region encoding at least one antigenic peptide or protein,
[0844] c) a poly(A) tail, preferably consisting of 10 to 200, 10 to 100, 40 to 80 or 50 to 70 adenosine nucleotides,
[0845] d) optionally a poly(C) tail, preferably consisting of 10 to 200, 10 to 100, 20 to 70, 20 to 60 or 10 to 40 cytosine nucleotides, and
[0846] e) optionally a histone stem-loop,
[0847] f) and optionally a 3′-UTR element.

[0848] In a more preferred embodiment the invention relates to a mRNA comprising lipid nanoparticle comprising: a cationic lipid selected from

[chemical structure]

[0849] and/or a PEG lipid with the structure

[chemical structure]

[0850] wherein n has a mean value ranging from 30 to 60, preferably about 49,

[0851] and a mRNA compound comprising an mRNA sequence encoding an antigenic peptide or protein, wherein preferably wherein the antigenic peptide or protein is derived from pathogenic antigens, tumour antigens, allergenic antigens or autoimmune self-antigens or a fragment or variant thereof, more preferably the antigen is derived from an influenza or rabies virus,

[0852] optionally a neutral lipid, preferably 1,2-distearoyl-sn-glycero-3-phosphocholine (DSPC) and optionally a steroid, preferably cholesterol, wherein the molar ratio of the cationic lipid to DSPC is optionally in the range from about 2:1 to 8:1, wherein the molar ratio of the cationic lipid to cholesterol is optionally in the range from about 2:1 to 1:1, wherein wherein the mRNA sequence optionally comprises

[0853] a) a 5′-CAP structure, and/or

[0854] b) a poly(A) sequence, and/or

[0855] c) a poly (C) sequence.

[0856] In a more preferred embodiment the mRNA sequence comprises a coding region encoding the at least one antigenic peptide or protein, wherein the mRNA sequence comprises a sequence modification selected from a G/C content modification, a codon modification, a codon optimization or a C-optimization of the sequence.

[0857] In a specific preferred embodiment, the invention relates to a mRNA comprising lipid nanoparticle comprising: a cationic lipid selected from

[chemical structure]

[0858] optionally a PEG lipid with the structure

[chemical structure]

[0859] wherein n has a mean value ranging from 30 to 60, preferably about 49,

[0860] and a mRNA compound, comprising an mRNA sequence

[0861] optionally a neutral lipid, preferably 1,2-distearoyl-sn-glycero-3-phosphocholine (DSPC) and

[0862] optionally a steroid, preferably cholesterol, wherein the molar ratio of the cationic lipid to DSPC is optionally in the range from about 2:1 to 8:1, wherein the molar ratio of the cationic lipid to cholesterol is optionally in the range from about 2:1 to 1:1,

[0863] wherein the mRNA sequence additionally comprises preferably in 5′ to 3′-direction, the following elements:
[0864] a) a 5′-CAP structure, preferably m7GpppN,
[0865] b) at least one coding region encoding at least one antigenic peptide or protein, preferably the antigenic peptide or protein is derived from pathogenic antigens, tumour antigens, allergenic antigens or autoimmune self-antigens or a fragment or variant thereof, more preferably the pathogenic antigen is derived from an influenza or rabies virus;
[0866] c) a poly(A) tail, preferably consisting of 10 to 200, 10 to 100, 40 to 80 or 50 to 70 adenosine nucleotides,
[0867] d) optionally a poly(C) tail, preferably consisting of 10 to 200, 10 to 100, 20 to 70, 20 to 60 or 10 to 40 cytosine nucleotides, and
[0868] e) optionally a histone stem-loop,
[0869] f) and optionally a 3′-UTR element.

[0870] In a particular preferred embodiment, the (pharmaceutical) composition or the vaccine according to the invention comprising mRNA comprises lipid nanoparticles, which have a molar ratio of approximately 50:10:38.5:1.5, preferably 47.5:10:40.8:1.7 or more preferably 47.4:10:40.9:1.7 (i.e. proportion (mol %) of cationic lipid, DSPC, cholesterol and PEG-lipid; solubilized in ethanol).

[0871] In particular preferred embodiments the lipid nanoparticle is a mRNA comprising lipid nanoparticle as defined above, wherein preferably the antigenic peptide or protein is derived from hemagglutinin (HA), neuraminidase (NA), nucleoprotein (NP), matrix protein 1 (M1), matrix protein 2 (M2), non-structural protein 1 (NS1), non-structural protein 2 (NS2), nuclear export protein (NEP), polymerase acidic protein (PA), polymerase basic protein PB1, PB1-F2, or polymerase basic protein 2 (PB2) of an influenza virus or a fragment or variant thereof. More preferably the antigenic peptide or protein is derived from hemagglutinin (HA) or neuraminidase (NA) of an influenza virus or a fragment or variant thereof. Even more preferably the antigenic peptide or protein is at least one full-length protein of hemagglutinin (HA) and/or at least one full-length protein of neuraminidase (NA) of an influenza virus or a variant thereof. In a further preferred embodiment the influenza virus is selected from an influenza A, B or C virus. In a particularly preferred embodiment the influenza A virus is selected from an influenza virus characterized by a hemagglutinin (HA) selected from the group consisting of H1, H2, H3, H4, H5, H6, H7, H8, H9, H10, H11, H12, H13, H14, H15, H16, H17 and H18 and/or the influenza A virus is selected from an influenza virus characterized by a neuraminidase (NA) selected from the group consisting of N1, N2, N3, N4, N5, N6, N7, N8, N9, N10, and N11. Preferably, the influenza A virus is selected from the group consisting of H1N1, H1N2, H2N2, H3N1, H3N2, H3N8, H5N1, H5N2, H5N3, H5N8, H5N9, H7N1, H7N2, H7N3, H7N4, H7N7, H7N9, H9N2, and H10N7, preferably from H1N1, H3N2, H5N1. Most preferably, the mRNA sequence comprises at least one coding region encoding at least one antigenic peptide or protein derived from hemagglutinin (HA) of an influenza virus or a fragment or variant thereof and at least one antigenic peptide or protein derived from neuraminidase (NA) of an influenza virus or a fragment or variant thereof. In a specifically preferred embodiment the mRNA sequence comprises at least one coding region encoding at least one antigenic peptide or protein derived from hemagglutinin (HA) and/or at least one antigenic peptide or protein derived from neuraminidase (NA) of an influenza A virus selected from the group consisting of H1N1, H1N2, H2N2, H3N1, H3N2, H3N8, H5N1, H5N2, H5N3, H5N8, H5N9, H7N1, H7N2, H7N3, H7N4, H7N7, H7N9, H9N2, and H10N7, preferably from H1N1, H3N2, H5N1 or a fragment or variant thereof. The invention further relates to a method of preparing said lipid nanoparticles comprising the steps of: (i) providing a cationic lipid of formula (I)

[chemical structure]

[0872] as defined above or a pharmaceutically acceptable salt, tautomer, prodrug or stereoisomer thereof, and/or of formula (II)

[chemical structure]

[0873] as defined above or a pharmaceutically acceptable salt, tautomer, prodrug or stereoisomer thereof, and/or of formula III:

[chemical structure]

[0874] as defined above or a pharmaceutically acceptable salt, tautomer, prodrug or stereoisomer thereof; and/or

[0875] b) a PEG lipid with the formula (IV):

[chemical structure]

[0876] as defined above;

[0877] c) at least one mRNA compound comprising an mRNA sequence encoding at least one antigenic peptide or protein; and

[0878] d) optionally a steroid; and

[0879] e) optionally a neutral lipid;

[0880] (ii) solubilizing the cationic lipid and/or the PEG lipid and optionally the neutral lipid and/or the steroid or a steroid derivative in ethanol;

[0881] (iii) mixing the ethanolic lipid solution with an aqueous solution comprising the mRNA polynucleotide

[0882] (iv) removing the ethanol to form lipid nanoparticles encapsulating or associating with the mRNA polynucleotide; and optionally

[0883] (v) separating or purifying the lipid nanoparticles.

[0884] The ethanol may be removed by any suitable method which does not negatively affect the lipids or the forming lipid nanoparticles. In one embodiment of the invention the ethanol is removed by dialysis. In an alternative embodiment the ethanol is removed by diafiltration.

[0885] Separation and optimal purification of the lipid nanoparticles might also be performed by any suitable method. Preferably the lipid nanoparticles are filtrated, more preferably the lipid nanoparticles are separated or purified by filtration through a sterile filter.

[0886] The invention further relates to a pharmaceutical composition comprising at least one lipid nanoparticle according to the present invention. The lipid nanoparticle might comprise an mRNA compound comprising a sequence encoding at least one antigenic peptide or protein as defined herein.

[0887] In one embodiment of the invention the mRNA sequence encodes one antigenic peptide or protein. In an alternative embodiment of the invention the mRNA sequence encodes more than one antigenic peptide or protein.

[0888] In one embodiment of the invention, the pharmaceutical composition comprises a lipid nanoparticle according to the invention, wherein the lipid nanoparticle comprises more than one mRNA compounds, which each comprise a different mRNA sequence encoding an antigenic peptide or protein.

[0889] In an alternative embodiment of the invention the pharmaceutical composition comprises a second lipid nanoparticle, wherein the mRNA compound comprised by the second lipid nanoparticle is different from the mRNA compound comprised by the first lipid nanoparticle.

[0890] In a further aspect, the present invention concerns a composition comprising mRNA comprising lipid nanoparticles wherein the mRNA comprises an mRNA sequence comprising at least one coding region as defined herein and a pharmaceutically acceptable carrier. The composition according to the invention is preferably provided as a pharmaceutical composition or as a vaccine.

[0891] According to a preferred embodiment, the (pharmaceutical) composition or the vaccine according to the invention comprises mRNA comprising lipid nanoparticles comprising at least one mRNA comprising at least one mRNA sequence as defined above, wherein the at least one coding region of the at least one mRNA sequence encodes at least one antigenic peptide or protein preferably derived from a protein of an influenza virus or Rabies virus, preferably any one of the hemagglutinin (HA) or neuraminidase (NA) proteins or glycoproteins, as disclosed in the sequence listing of the present invention or respectively in Tables 1-5 or FIGS. 20-24 of PCT/EP2016/075843 or a fragment or variant of any one of these proteins.

[0892] Preferably, the (pharmaceutical) composition or the vaccine according to the invention comprises mRNA comprising lipid nanoparticles comprising at least one mRNA comprising at least one mRNA sequence as defined above, wherein the at least one coding sequence of the at least one mRNA sequence comprises or consists of a nucleic acid sequence encoding at least one antigenic peptide or protein preferably derived from a protein of an influenza virus, preferably any one of the hemagglutinin (HA) or neuraminidase (NA) proteins, as defined in the sequence listing or respectively in Tables 1-4 or FIGS. 20-23 of PCT/EP2016/075843, or a fragment or variant thereof, wherein the protein derived from a protein of an influenza virus preferably comprises or consists of any one of the amino acid sequences defined in the sequence listing or respectively in Tables 1-4 or FIGS. 20-23 of PCT/EP2016/075843, preferably SEQ ID NOs: 1-30504 of the sequence listing or respectively in Tables 1-4 or FIGS. 20-23 of PCT/EP2016/075843, or a fragment or variant of any one of these sequences. Alternatively, the antigenic peptide or protein is derived from a Rabies virus, preferably from glycoprotein of a Rabies virus, preferably comprising or consisting of any one of the amino acid sequences disclosed in the sequence listing, or respectively in Table 5 or FIGS. 24 of PCT/EP2016/075843, preferably SEQ ID NOs: 30505-32012 of the sequence listing, or a fragment or variant of any one of these sequences.

[0893] Preferably, the (pharmaceutical) composition or the vaccine according to the invention comprises mRNA comprising lipid nanoparticles comprising at least one mRNA comprising at least one mRNA sequence as defined above, wherein the at least one coding sequence of the mRNA sequence comprises or consists of a nucleic acid sequence encoding at least one antigenic peptide or protein derived from a protein of an influenza virus or Rabies virus, or a fragment or variant thereof, wherein the antigenic peptide or protein derived from a protein of an influenza virus or Rabies virus preferably comprises or consists of an amino acid sequence having a sequence identity of at least 5%, 10%, 20%, 30%, 40%, 50%, 60%, 70%, 80%, 85%, 86%, 87%, 88%, 89%, 90%, 91%, 92%, 93%, 94%, 95%, 96%, 97%, 98%, or 99%, preferably of at least 70%, more preferably of at least 80%, even more preferably at least 85%, even more preferably of at least 90% and most preferably of at least 95% or even 97%, with any one of the amino acid sequences disclosed in the sequence listing, preferably SEQ ID NOs: 1-32012, or respectively “column A” of Tables 1-5 or FIGS. 20-24 of PCT/EP2016/075843, or a fragment or variant of any one of these sequences.

[0894] More preferably, the (pharmaceutical) composition or the vaccine according to the invention comprises mRNA comprising lipid nanoparticles comprising at least one mRNA comprising at least one mRNA sequence as defined above, wherein the at least one coding sequence of the at least one mRNA sequence comprises or consists of a nucleic acid sequence encoding at least one antigenic peptide or protein derived from a protein of an influenza virus or Rabies virus, or a fragment or variant thereof, wherein the antigenic peptide or protein derived from a protein of an influenza virus or Rabies virus preferably comprises or consists of an amino acid sequence having a sequence identity of at least 80% with any one of the amino acid sequences disclosed in the sequence listing, preferably in SEQ ID NOs: 1-32012, or respectively “column A” of Tables 1-5 or FIGS. 20-24 of PCT/EP2016/075843, or a fragment or variant of any one of these sequences.

[0895] In preferred embodiments, the (pharmaceutical) composition or the vaccine according to the invention comprises mRNA comprising lipid nanoparticles comprising at least one mRNA comprising at least one mRNA sequence as defined above, wherein the at least one coding sequence of the at least one mRNA sequence comprises or consists of any one of the nucleic acid sequences disclosed in the sequence listing, preferably SEQ ID NOs: 32013-64024 or SEQ ID NOs: 64025-224084 or columns “B” or “C” of Tables 1-5 or FIGS. 20-24 of PCT/EP2016/075843, or a fragment or variant of any one of these sequences.

[0896] According to another embodiment, the (pharmaceutical) composition or the vaccine according to the invention comprises mRNA comprising lipid nanoparticles comprising at least one mRNA comprising at least one mRNA sequence as defined above, wherein the at least one coding sequence of the at least one mRNA sequence comprises or consists of a nucleic acid sequence having a sequence identity of at least 5%, 10%, 20%, 30%, 40%, 50%, 60%, 70%, 80%, 85%, 86%, 87%, 88%, 89%, 90%, 91%, 92%, 93%, 94%, 95%, 96%, 97%, 98%, or 99%, preferably of at least 70%, more preferably of at least 80%, even more preferably at least 85%, even more preferably of at least 90% and most preferably of at least 95% or even 97%, with any one of the nucleic acid sequences disclosed in the sequence listing, preferably SEQ ID NOs: 32013-64024 or SEQ ID NOs: 64025-224084, or respectively “column B” or “column C” of Tables 1-5 or FIGS. 20-24 of PCT/EP2016/075843, or a fragment or variant of any one of these sequences.

[0897] According to a particularly preferred embodiment, the (pharmaceutical) composition or the vaccine according to the invention comprises mRNA comprising lipid nanoparticles comprising at least one mRNA comprising at least one mRNA sequence as defined above, wherein the at least one coding sequence of the at least one mRNA sequence comprises or consists of a nucleic acid sequence having a sequence identity of at least 80% with any one of the nucleic acid sequences disclosed in the sequence listing, preferably in the SEQ ID NOs: 32013-64024 or SEQ ID NOs: 64025-224084, or respectively “column B” or “column C” of Tables 1-5 or FIGS. 20-24 of PCT/EP2016/075843, or a fragment or variant of any one of these sequences.

[0898] More preferably, the (pharmaceutical) composition or the vaccine according to the invention comprises mRNA comprising lipid nanoparticles comprising at least one mRNA comprising at least one mRNA sequence as defined above, wherein the at least one coding sequence of the at least one mRNA sequence comprises or consists of any one of the nucleic acid sequences disclosed in the sequence listing, or respectively “column C” of Tables 1-5 or FIGS. 20-24 of PCT/EP2016/075843, or SEQ ID NOs: 64025-224084, or a fragment or variant of any one of these sequences.

[0899] In the context of the present invention, the (pharmaceutical) composition or vaccine may comprise mRNA comprising lipid nanoparticles comprising mRNA encoding one or more of the antigenic peptides or proteins as defined herein, preferably derived from a protein of an influenza virus or Rabies virus as defined herein or a fragment or variant thereof.

[0900] The (pharmaceutical) composition or vaccine according to the invention may thus comprise mRNA comprising lipid nanoparticles comprising at least one mRNA comprising at least one mRNA sequence comprising at least one coding region, encoding at least one antigenic peptide or protein, preferably derived from a protein of an influenza virus or Rabies virus or a fragment or variant thereof, wherein the at least one coding region of the at least one mRNA sequence encodes one specific antigenic peptide or protein e.g. derived from a protein of an influenza virus defined herein or a fragment or a variant thereof.

[0901] Alternatively, the (pharmaceutical) composition or vaccine of the present invention may comprise mRNA comprising lipid nanoparticles comprising at least one mRNA compound comprising at least one mRNA sequence according to the invention, wherein the at least one mRNA sequence encodes at least two, three, four, five, six, seven, eight, nine, ten, eleven or twelve distinct antigenic peptides or proteins e.g. derived from a protein of an influenza virus as defined herein or a fragment or variant thereof.

[0902] In this context it is particularly preferred that the at least one mRNA compound comprised in the (pharmaceutical) composition or vaccine is a bi- or multicistronic mRNA as defined herein, which encodes the at least two, three, four, five, six, seven, eight, nine, ten, eleven or twelve distinct antigenic peptides or proteins e.g. derived from a protein of an influenza virus. Mixtures between these embodiments are also envisaged, such as compositions comprising more than one mRNA sequence, wherein at least one mRNA sequence may be monocistronic, while at least one other mRNA sequence may be bi- or multicistronic.

[0903] The (pharmaceutical) composition or vaccine according to the present invention, preferably the at least one coding sequence of the mRNA sequence comprised therein, may thus comprise any combination of the nucleic acid sequences as defined herein.

[0904] Preferably, the (pharmaceutical) composition or vaccine comprises mRNA comprising lipid nanoparticle comprising a plurality or more than one of the mRNA sequences according to the invention, wherein each mRNA sequence comprises at least one coding region encoding at least one antigenic peptide or protein derived from a protein of an influenza virus or a fragment or variant thereof.

[0905] In a particularly preferred embodiment the composition comprises at least 2, 3, 4, 5, 6, 7, 6, 9, 10, 11, 12, 13, 14, 15, 16, 17, 18, 19, 20, 25, 30, 35, 40, 45, 50, 60, 70, 80, or 100 different mRNA sequences each encoding at least one antigenic peptide or protein preferably derived from a protein of an influenza virus or a fragment or variant thereof as defined above, preferably derived from hemagglutinin (HA) or neuraminidase (NA) of an influenza virus or a fragment or variant thereof.

[0906] In a most preferred embodiment the composition comprises 4 different mRNA sequences each encoding at least one antigenic peptide or protein preferably derived from a protein of an influenza virus or a fragment or variant thereof as defined above, preferably derived from hemagglutinin (HA) or neuraminidase (NA) of an influenza virus or a fragment or variant thereof.

[0907] In this context it is particularly preferred that each mRNA sequence encodes at least one different antigenic peptide or protein derived from proteins of the same pathogen, e.g. influenza virus, wherein it is particularly preferred that the antigenic peptide or protein is derived from different proteins of the same pathogen, e.g. influenza virus. Preferably the composition comprises at least two mRNA sequences, wherein at least one mRNA sequence encodes at least one antigenic peptide or protein derived from hemagglutinin (HA) of the influenza virus and at least one mRNA sequence encodes at least one antigenic peptide or protein derived from neuraminidase (NA) of the same influenza virus.

[0908] In another preferred embodiment each mRNA sequence encodes at least one different antigenic peptide or protein derived from proteins of different pathogens, e.g. influenza viruses. Preferably each mRNA sequence encodes at least one antigenic peptide or protein derived from hemagglutinin (HA) and/or neuraminidase (NA) of different influenza viruses.

[0909] Preferably, the (pharmaceutical) composition or vaccine according to the present invention comprises a plurality of mRNA sequences each encoding at least one antigenic peptide or protein derived from hemagglutinin (HA) and/or neuraminidase (NA) of an influenza virus, wherein at least one antigenic peptide or protein derived from hemagglutinin (HA) and/or neuraminidase (NA) of 2, 3, 4, 5, 6, 7, 6, 9, 10, 11, 12, 13, 14, 15, 16, 17, 18, 19, 20, 25, 30, 35, 40, 45, 50, 60, 70, 80, or 100 different influenza viruses are encoded by the plurality of mRNA sequences.

[0910] In this context it is particularly preferred that the (pharmaceutical) composition or vaccine comprises at least one mRNA comprising lipid nanoparticle comprising a mRNA compound comprising a mRNA sequence encoding at least one antigenic peptide or protein derived from a protein of influenza A virus H1, preferably hemagglutinin (HA) and/or neuraminidase (NA), at least one mRNA sequence encoding at least one antigenic peptide or protein derived from a protein of influenza A virus H3, preferably hemagglutinin (HA) and/or neuraminidase (NA), at least one mRNA sequence encoding at least one antigenic peptide or protein derived from a protein of influenza A virus H5, preferably hemagglutinin (HA) and/or neuraminidase (NA), and optionally at least one mRNA sequence encoding at least one antigenic peptide or protein derived from a protein of influenza A virus H7, preferably hemagglutinin (HA) and/or neuraminidase (NA), and/or optionally at least one mRNA sequence encoding at least one antigenic peptide or protein derived from a protein of influenza A virus H9, preferably hemagglutinin (HA) and/or neuraminidase (NA).

[0911] Preferably, the (pharmaceutical) composition or vaccine comprises at least one mRNA comprising lipid nanoparticle comprising a mRNA compound comprising a mRNA sequence encoding at least one antigenic peptide or protein derived from hemagglutinin (HA) and/or at least one mRNA sequence encoding at least one antigenic peptide or protein derived from neuraminidase (NA) of influenza A virus H1, at least one mRNA sequence encoding at least one antigenic peptide or protein derived from hemagglutinin (HA) and/or at least one mRNA sequence encoding at least one antigenic peptide or protein derived from neuraminidase (NA) of influenza A virus H3, at least one mRNA sequence encoding at least one antigenic peptide or protein derived from hemagglutinin (HA) and/or at least one mRNA sequence encoding at least one antigenic peptide or protein derived from neuraminidase (NA) of influenza A virus H5, and optionally at least one mRNA sequence encoding at least one antigenic peptide or protein derived from preferably hemagglutinin (HA) and/or at least one mRNA sequence encoding at least one antigenic peptide or protein derived from neuraminidase (NA) of influenza A virus H7, and/or optionally at least one mRNA sequence encoding at least one antigenic peptide or protein derived from, preferably hemagglutinin (HA) and/or at least one mRNA sequence encoding at least one antigenic peptide or protein derived from neuraminidase (NA) of influenza A virus H9.

[0912] In a specific embodiment the (pharmaceutical) composition or vaccine comprises at least one mRNA comprising lipid nanoparticle comprising an mRNA compound comprising a mRNA sequence encoding at least one antigenic peptide or protein derived from hemagglutinin (HA) and/or at least one mRNA sequence encoding at least one antigenic peptide or protein derived from neuraminidase (NA) of influenza A virus H1N1, at least one mRNA sequence encoding at least one antigenic peptide or protein derived from hemagglutinin (HA) and/or at least one mRNA sequence encoding at least one antigenic peptide or protein derived from neuraminidase (NA) of influenza A virus H3N2, at least one mRNA sequence encoding at least one antigenic peptide or protein derived from hemagglutinin (HA) and/or at least one mRNA sequence encoding at least one antigenic peptide or protein derived from neuraminidase (NA) of influenza A virus H5N1.

[0913] Additionally, the (pharmaceutical) composition or vaccine preferably further comprises at least one mRNA comprising lipid nanoparticle comprising a mRNA compound comprising a mRNA sequence encoding at least one antigenic peptide or protein derived from hemagglutinin (HA) and/or at least one mRNA sequence encoding at least one antigenic peptide or protein derived from neuraminidase (NA) of at least one influenza B virus, encapsulated or associated with mRNA comprising lipid nanoparticles according to the invention.

[0914] In this context it is particularly preferred that the (pharmaceutical) composition or vaccine comprises mRNA comprising lipid nanoparticles comprising mRNA comprising a plurality of mRNA sequences encoding at least one antigenic peptide or protein derived from hemagglutinin (HA) and/or at least one antigenic peptide or protein derived from neuraminidase (NA) of influenza
[0915] A/Netherlands/602/2009 and/or A/California/7/2009,
[0916] A/Hong Kong/4801/2014,
[0917] B/Brisbane/60/2008, and
[0918] A/Vietnam/1203/2004;

[0919] or of influenza
[0920] A/California/07/2009 (H1N1),
[0921] A/Hong Kong/4801/2014 (H3N2),
[0922] B/Brisbane/60/2008,
[0923] B/Phuket/3073/2013,
[0924] and optionally A/Michigan/45/2015 (H1N1)pdm09-like virus.

[0925] In a more preferred embodiment the pharmaceutical composition or vaccine comprises at least 4 different mRNA sequences derived from influenza virus antigens as defined above encapsulated or associated with mRNA comprising lipid nanoparticles according to the invention.

[0926] Preferably in this context the mRNA sequence(s) comprises or consists of the following RNA sequences of Table 11 (“preferred RNA sequences”):

TABLE 11
preferred RNA sequences

| Strain/Organism | HA | NA |
|---|---|---|
| A/Netherlands/602/2009 | SEQ ID NO: 224163 | SEQ ID NO: 224326 |
| A/California/7/2009 | SEQ ID NO: 224117 | SEQ ID NO: 224318 |
| A/Hong Kong/4801/2014 | SEQ ID NO: 224181 | SEQ ID NO: 224336 |
| A/Vietnam/1203/2004 or | SEQ ID NO: 224198 | SEQ ID NO: 224342 or |
| A/Vietnam/1194/2004 | | SEQ ID NO: 224344 |
| B/Brisbane/60/2008 | SEQ ID NO: 224236 | SEQ ID NO: 224348 |
| B/Phuket/3073/2013 | SEQ ID NO: 224246 | SEQ ID NO: 224350 |
| A/Michigan/45/2015 (H1N1) | SEQ ID NO: 224133 | SEQ ID NO: 224324 |
| pdm09-like virus | | |

[0927] In a specifically preferred embodiment the pharmaceutical composition or vaccine is a tetravalent influenza vaccine, comprising lipid nanoparticles, which comprise mRNA compounds as defined above.

[0928] Particularly preferred in this context is the combination of mRNAs encoding the following protein sequences (f.e. for preparing a tetravalent cocktail):
[0929] HA protein of influenza A/Hong Kong/4801/2014 (H3N2) (preferably selected from the group consisting of SEQ ID NOs: 13853, 13854, 13855 and 13856); and/or
[0930] HA protein of influenza A/California/07/2009 (H1N1) (preferably selected from the group consisting of SEQ ID NOs: 13836, 13837, 13838, 13839, 13840, 13841, 13842, 13843, and 13844); and/or
[0931] HA protein of influenza B/Phuket/3037/2013 (EPI540671) (preferably selected from the group consisting of SEQ ID NOs: 28530, 28531 and 28532); and/or
[0932] HA protein of influenza B/Brisbane/60/2008 (preferably selected from the group consisting of SEQ ID NOs: 28524, 28525, 28526, 28527, 28528, and 28529).

[0933] Further particularly preferred in this context is the combination of mRNAs encoding the following protein sequences (f.e. for preparing a triavalent cocktail):
[0934] NA protein of influenza A/Hong Kong/4801/2014 (H3N2) (preferably selected from the group consisting of SEQ ID NOs: 26251, 26252, 26253, and 26254); and/or
[0935] NA protein of influenza A/California/7/2009 (H1N1)pdm09 (preferably selected from the group consisting of SEQ ID NOs: 26238, 26239, 26240, 26241, 26242, and 26243); and/or
[0936] NA protein of influenza B/Brisbane/60/2008 (preferably selected from the group consisting of SEQ ID NOs: 30455, 30456, 30457, 30458, 30459, and 30460).

[0937] Even further particularly preferred in this context is the combination of mRNAs encoding the following protein sequences (f.e. for preparing a tetravalent cocktail):
[0938] HA protein of influenza A/Netherlands/602/2009 (H1N1) (preferably selected from the group consisting of SEQ ID NOs: 13848, 13849, and 13850); and/or
[0939] HA protein of influenza A/Hong Kong/4801/2014 (H3N2) (preferably selected from the group consisting of SEQ ID NOs: 13853, 13854, 13855, and 13856); and/or
[0940] HA protein of influenza B/Brisbane/60/2008 (preferably selected from the group consisting of SEQ ID NOs: 28524, 28525, 28526, 28527, 28528 and 28529); and/or
[0941] HA protein of influenza A/Vietnam/1194/2004 (H5N1) (preferably selected from the group consisting of SEQ ID NOs: 13859 and 13860).

[0942] Also particularly preferred in this context is the combination of mRNAs encoding the following protein sequences (f.e. for preparing a septavalent cocktail):
[0943] HA protein of influenza A/Hong Kong/4801/2014 (H3N2) (preferably selected from the group consisting of SEQ ID NOs: 13853, 13854, 13855, and 13856); and/or
[0944] HA protein of influenza A/California/07/2009 (H1N1) (preferably selected from the group consisting of SEQ ID NOs: 13836, 13837, 13838, 13839, 13840, 13841, 13842, 13843, and 13844); and/or
[0945] HA protein of influenza B/Phuket/3037/2013 (EPI540671) (preferably selected from the group consisting of SEQ ID NOs: 28530, 28531, and 28532); and/or
[0946] HA protein of influenza B/Brisbane/60/2008 (preferably selected from the group consisting of SEQ ID NOs: 28524, 28525, 28526, 28527, 28528, and 28529); and/or
[0947] NA protein of influenza A/Hong Kong/4801/2014 (H3N2) (preferably selected from the group consisting of SEQ ID NOs: 26251, 26252, 26253, and 26254); and/or
[0948] NA protein of influenza A/California/7/2009 (H1N1)pdm09 (preferably selected from the group consisting of SEQ ID NOs: 26238, 26239, 26240, 26241, 26242 and 26243); and/or
[0949] NA protein of influenza B/Brisbane/60/2008 (preferably selected from the group consisting of SEQ ID NOs: 30455, 30456, 30457, 30458, 30459, and 30460).

[0950] The composition according to the invention might also comprise suitable pharmaceutically acceptable adjuvants and excipients. In preferred embodiments the adjuvant is preferably added in order to enhance the immunostimulatory properties of the composition. In this context, an adjuvant may be understood as any compound, which is suitable to support administration and delivery of the composition according to the invention. Furthermore, such an adjuvant may, without being bound thereto, initiate or increase an immune response of the innate immune system, i.e. a non-specific immune response. In other words, when administered, the composition according to the invention typically initiates an adaptive immune response due to an antigen as defined herein or a fragment or variant thereof, which is encoded by the at least one coding sequence of the inventive mRNA contained in the composition of the present invention. Additionally, the composition according to the invention may generate an (supportive) innate immune response due to addition of an adjuvant as defined herein to the composition according to the invention.

[0951] Such an adjuvant may be selected from any adjuvant known to a skilled person and suitable for the present case, i.e. supporting the induction of an immune response in a mammal. Preferably, the adjuvant may be selected from the group consisting of, without being limited thereto, TDM, MDP, muramyl dipeptide, pluronics, alum solution, aluminium hydroxide, ADJUMER™ (polyphosphazene); aluminium phosphate gel; glucans from algae; algammulin; aluminium hydroxide gel (alum); highly protein-adsorbing aluminium hydroxide gel; low viscosity aluminium hydroxide gel; AF or SPT (emulsion of squalane (5%), Tween 80 (0.2%), Pluronic L121 (1.25%), phosphate-buffered saline, pH 7.4); AVRIDINE™ (propanediamine); BAY R1005TM ((N-(2-deoxy-2-L-leucylamino-b-D-glucopyranosyl)-N-octadecyl-dodecanoyl-amide hydroacetate); CALCITRIOL™ (1-alpha,25-dihydroxy-vitamin D3); calcium phosphate gel; CAP™ (calcium phosphate nanoparticles); cholera holotoxin, cholera-toxin-A1-protein-A-D-fragment fusion protein, sub-unit B of the cholera toxin; CRL 1005 (block copolymer P1205); cytokine-containing liposomes; DDA (dimethyldioctadecylammonium bromide); DHEA (dehydroepiandrosterone); DMPC (dimyristoylphosphatidylcholine); DMPG (dimyristoylphosphatidylglycerol); DOC/alum complex (deoxycholic acid sodium salt); Freund's complete adjuvant; Freund's incomplete adjuvant; gamma inulin; Gerbu adjuvant (mixture of: i)N-acetylglucosaminyl-(P1-4)-N-acetylmuramyl-L-alanyl-D-glutamine (GMDP), ii) dimethyldioctadecylammonium chloride (DDA), iii) zinc-L-proline salt complex (ZnPro-8); GM-CSF); GMDP (N-acetylglucosaminyl-(b1-4)-N-acetylmuramyl-L-alanyl-D-isoglutamine); imiquimod (1-(2-methypropyl)-1H-imidazo[4,5-c]quinoline-4-amine); ImmTher™ (N-acetylglucosaminyl-N-acetylmuramyl-L-Ala-D-isoGlu-L-Ala-glycerol dipalmitate); DRVs (immunoliposomes prepared from dehydration-rehydration vesicles); interferon-gamma; interleukin-1beta; interleukin-2; interleukin-7; interleukin-12; ISCOMS™; ISCOPREP 7.0.3.TM; liposomes; LOXORIBINE™ (7-allyl-8-oxoguanosine); LT oral adjuvant (E. coli labile enterotoxin-protoxin); microspheres and microparticles of any composition; MF59TM; (squalene-water emulsion); MONTANIDE ISA 51TM (purified incomplete Freund's adjuvant); MONTANIDE ISA 720TM (metabolisable oil adjuvant); MPL™ (3-Q-desacyl-4′-monophosphoryl lipid A); MTP-PE and MTP-PE liposomes ((N-acetyl-L-alanyl-D-isoglutaminyl-L-alanine-2-(1,2-dipalmitoyl-sn-glycero-3-(hydroxyphosphoryloxy))-ethylamide, monosodium salt); MURAMETIDE™ (Nac-Mur-L-Ala-D-Gln-OCH3); MURAPALMITINE™ and D-MURAPALMITINE™ (Nac-Mur-L-Thr-D-isoGln-sn-glyceroldipalmitoyl); NAGO (neuraminidase-galactose oxidase); nanospheres or nanoparticles of any composition; NISVs (non-ionic surfactant vesicles); PLEURAN™ (P3-glucan); PLGA, PGA and PLA (homo- and co-polymers of lactic acid and glycolic acid; microspheres/nanospheres); PLURONIC L121TM; PMMA (polymethyl methacrylate); PODDS™ (proteinoid microspheres); polyethylene carbamate derivatives; poly-rA: poly-rU (polyadenylic acid-polyuridylic acid complex); polysorbate 80 (Tween 80); protein cochleates (Avanti Polar Lipids, Inc., Alabaster, Ala.); STIMULON™ (QS-21); Quil-A (Quil-A saponin); S-28463 (4-amino-otec-dimethyl-2-ethoxymethyl-1H-imidazo[4,5 c]quinoline-1-ethanol); SAF-1TM (“Syntex adjuvant formulation”); Sendai proteoliposomes and Sendai-containing lipid matrices; Span-85 (sorbitan trioleate); Specol (emulsion of Marcol 52, Span 85 and Tween 85); squalene or Robane® (2,6,10,15,19,23-hexamethyltetracosan and 2,6,10,15,19,23-hexamethyl-2,6,10,14,18,22-tetracosahexane); stearyltyrosine (octadecyltyrosine hydrochloride); Theramid® (N-acetylglucosaminyl-N-acetylmuramyl-L-Ala-D-isoGlu-L-Ala-dipalmitoxypropylamide); Theronyl-MDP (Termurtide™ or [thr 1]-MDP; N-acetylmuramyl-L-threonyl-D-isoglutamine); Ty particles (Ty-VLPs or virus-like particles); Walter-Reed liposomes (liposomes containing lipid A adsorbed on aluminium hydroxide), and lipopeptides, including Pam3Cys, in particular aluminium salts, such as Adju-phos, Alhydrogel, Rehydragel; emulsions, including CFA, SAF, IFA, MF59, Provax, TiterMax, Montanide, Vaxfectin; copolymers, including Optivax (CRL1005), L121, Poloaxmer4010), etc.; liposomes, including Stealth, cochleates, including BIORAL; plant derived adjuvants, including QS21, Quil A, Iscomatrix, ISCOM; adjuvants suitable for costimulation including Tomatine, biopolymers, including PLG, PMM, Inulin; microbe derived adjuvants, including Romurtide, DETOX, MPL, CWS, Mannose, CpG nucleic acid sequences, CpG7909, ligands of human TLR 1-10, ligands of murine TLR 1-13, ISS-1018, IC31, Imidazoquinolines, Ampligen, Ribi529, IMOxine, IRIVs, VLPs, cholera toxin, heat-labile toxin, Pam3Cys, Flagellin, GPI anchor, LNFPIII/Lewis X, antimicrobial peptides, UC-1V150, RSV fusion protein, cdiGMP; and adjuvants suitable as antagonists including CGRP neuropeptide.

[0952] Particularly preferred, an adjuvant may be selected from adjuvants, which support induction of a Th1-immune response or maturation of naïve T-cells, such as GM-CSF, IL-12, IFNγ, any immunostimulatory nucleic acid as defined above, preferably an immunostimulatory RNA, CpG DNA, etc.

[0953] In a further preferred embodiment it is also possible that the inventive composition contains besides the antigen-providing mRNA further components which are selected from the group comprising: further antigens (e.g. in the form of a peptide or protein) or further antigen-encoding nucleic acids; a further immunotherapeutic agent; one or more auxiliary substances; or any further compound, which is known to be immunostimulating due to its binding affinity (as ligands) to human Toll-like receptors; and/or an adjuvant nucleic acid, preferably an immunostimulatory RNA (isRNA).

[0954] The composition of the present invention can additionally contain one or more auxiliary substances in order to increase its immunogenicity or immunostimulatory capacity, if desired. A synergistic action of the mRNA as defined herein and of an auxiliary substance, which may be optionally contained in the inventive composition, is preferably achieved thereby. Depending on the various types of auxiliary substances, various mechanisms can come into consideration in this respect. For example, compounds that permit the maturation of dendritic cells (DCs), for example lipopolysaccharides, TNF-alpha or CD40 ligand, form a first class of suitable auxiliary substances. In general, it is possible to use as auxiliary substance any agent that influences the immune system in the manner of a “danger signal” (LPS, GP96, etc.) or cytokines, such as GM-CFS, which allow an immune response to be enhanced and/or influenced in a targeted manner. Particularly preferred auxiliary substances are cytokines, such as monokines, lymphokines, interleukins or chemokines, that further promote the innate immune response, such as IL-1, IL-2, IL-3, IL-4, IL-5, IL-6, IL-7, IL-8, IL-9, IL-10, IL-12, IL-13, IL-14, IL-15, IL-16, IL-17, IL-18, IL-19, IL-20, IL-21, IL-22, IL-23, IL-24, IL-25, IL-26, IL-27, IL-28, IL-29, IL-30, IL-31, IL-32, IL-33, IFN-alpha, IFN-beta, IFN-gamma, GM-CSF, G-CSF, M-CSF, LT-beta or TNF-alpha, growth factors, such as hGH.

[0955] Suitable adjuvants may furthermore be selected from nucleic acids having the formula GIXmGn, wherein: G is guanosine, uracil or an analogue of guanosine or uracil; X is guanosine, uracil, adenosine, thymidine, cytosine or an analogue of the above-mentioned nucleotides; I is an integer from 1 to 40, wherein when I=1 G is guanosine or an analogue thereof, when I >1 at least 50% of the nucleotides are guanosine or an analogue thereof; m is an integer and is at least 3; wherein when m=3 X is uracil or an analogue thereof, when m >3 at least 3 successive uracils or analogues of uracil occur; n is an integer from 1 to 40, wherein when n=1 G is guanosine or an analogue thereof, when n >1 at least 50% of the nucleotides are guanosine or an analogue thereof, or formula: (NuGIXmGnNv)a, wherein: G is guanosine (guanine), uridine (uracil) or an analogue of guanosine (guanine) or uridine (uracil), preferably guanosine (guanine) or an analogue thereof; X is guanosine (guanine), uridine (uracil), adenosine (adenine), thymidine (thymine), cytidine (cytosine), or an analogue of these nucleotides (nucleosides), preferably uridine (uracil) or an analogue thereof; N is a nucleic acid sequence having a length of about 4 to 50, preferably of about 4 to 40, more preferably of about 4 to 30 or 4 to 20 nucleic acids, each N independently being selected from guanosine (guanine), uridine (uracil), adenosine (adenine), thymidine (thymine), cytidine (cytosine) or an analogue of these nucleotides (nucleosides); a is an integer from 1 to 20, preferably from 1 to 15, most preferably from 1 to 10; I is an integer from 1 to 40, wherein when I=1, G is guanosine (guanine) or an analogue thereof, when I >1, at least 50% of these nucleotides (nucleosides) are guanosine (guanine) or an analogue thereof; m is an integer and is at least 3; wherein when m=3, X is uridine (uracil) or an analogue thereof, and when m >3, at least 3 successive uridines (uracils) or analogues of uridine (uracil) occur; n is an integer from 1 to 40, wherein when n=1, G is guanosine (guanine) or an analogue thereof, when n >1, at least 50% of these nucleotides (nucleosides) are guanosine (guanine) or an analogue thereof; u,v may be independently from each other an integer from 0 to 50, preferably wherein when u=0, v >1, or when v=0, u >1; wherein the nucleic acid molecule of formula (NuGIXmGnNv)a has a length of at least 50 nucleotides, preferably of at least 100 nucleotides, more preferably of at least 150 nucleotides, even more preferably of at least 200 nucleotides and most preferably of at least 250 nucleotides.

[0956] Other suitable adjuvants may furthermore be selected from nucleic acids having the formula: CIXmCn, wherein: C is cytosine, uracil or an analogue of cytosine or uracil; X is guanosine, uracil, adenosine, thymidine, cytosine or an analogue of the above-mentioned nucleotides; I is an integer from 1 to 40, wherein when I=1 C is cytosine or an analogue thereof, when I >1 at least 50% of the nucleotides are cytosine or an analogue thereof; m is an integer and is at least 3; wherein when m=3 X is uracil or an analogue thereof, when m >3 at least 3 successive uracils or analogues of uracil occur; n is an integer from 1 to 40, wherein when n=1 C is cytosine or an analogue thereof, when n >1 at least 50% of the nucleotides are cytosine or an analogue thereof.

[0957] In this context the disclosure of WO2008/014979 and WO2009/095226 is also incorporated herein by reference.

[0958] In a further aspect, the present invention provides a vaccine, which is based on the mRNA comprising lipid nanoparticles according to the invention comprising at least one mRNA compound comprising a mRNA sequence comprising coding region as defined herein. The vaccine according to the invention is preferably a (pharmaceutical) composition as defined herein.

[0959] Accordingly, the vaccine according to the invention is based on the same components as the (pharmaceutical) composition described herein. Insofar, it may be referred to the description of the (pharmaceutical) composition as provided herein. Preferably, the vaccine according to the invention comprises at least one mRNA comprising lipid nanoparticles comprising at least one mRNA sequence as defined herein and a pharmaceutically acceptable carrier. In embodiments, where the vaccine comprises more than one mRNA sequence (such as a plurality of RNA sequences according to the invention, wherein each preferably encodes a distinct antigenic peptide or protein) encapsulated in mRNA comprising lipid nanoparticles, the vaccine may be provided in physically separate form and may be administered by separate administration steps. The vaccine according to the invention may correspond to the (pharmaceutical) composition as described herein, especially where the mRNA sequences are provided by one single composition. However, the inventive vaccine may also be provided physically separated. For instance, in embodiments, wherein the vaccine comprises more than one mRNA sequences/species encapsulated in mRNA comprising lipid nanoparticles as defined herein, these RNA species may be provided such that, for example, two, three, four, five or six separate compositions, which may contain at least one mRNA species/sequence each (e.g. three distinct mRNA species/sequences), each encoding distinct antigenic peptides or proteins, are provided, which may or may not be combined. Also, the inventive vaccine may be a combination of at least two distinct compositions, each composition comprising at least one mRNA encoding at least one of the antigenic peptides or proteins defined herein. Alternatively, the vaccine may be provided as a combination of at least one mRNA, preferably at least two, three, four, five, six or more mRNAs, each encoding one of the antigenic peptides or proteins defined herein. The vaccine may be combined to provide one single composition prior to its use or it may be used such that more than one administration is required to administer the distinct mRNA sequences/species encoding any of the antigenic peptides or proteins encapsulated in mRNA comprising lipid nanoparticles as defined herein. If the vaccine contains at least one mRNA comprising lipid nanoparticles, typically comprising at least two mRNA sequences, encoding the antigen combinations defined herein, it may e.g. be administered by one single administration (combining all mRNA species/sequences), by at least two separate administrations. Accordingly; any combination of mono-, bi- or multicistronic mRNAs encoding the at least one antigenic peptide or protein or any combination of antigens as defined herein (and optionally further antigens), provided as separate entities (containing one mRNA species) or as combined entity (containing more than one mRNA species), is understood as a vaccine according to the present invention. According to a particularly preferred embodiment of the inventive vaccine, the at least one antigen, preferably a combination as defined herein of at least two, three, four, five, six or more antigens encoded by the inventive composition as a whole, is provided as an individual (monocistronic) mRNA, which is administered separately.

[0960] As with the (pharmaceutical) composition according to the present invention, the entities of the vaccine may be provided in liquid and or in dry (e.g. lyophilized) form. They may contain further components, in particular further components allowing for its pharmaceutical use. The vaccine or the (pharmaceutical) composition may, e.g., additionally contain a pharmaceutically acceptable carrier and/or further auxiliary substances and additives and/or adjuvants.

[0961] The vaccine or (pharmaceutical) composition typically comprises a safe and effective amount of the mRNA compound according to the invention as defined herein, encoding an antigenic peptide or protein as defined herein or a fragment or variant thereof or a combination of antigens, encapsulate within and/or associated with the lipid nanoparticles. As used herein, “safe and effective amount” means an amount of the mRNA that is sufficient to significantly induce a positive modification of cancer or a disease or disorder related to cancer. At the same time, however, a “safe and effective amount” is small enough to avoid serious side-effects, that is to say to permit a sensible relationship between advantage and risk. The determination of these limits typically lies within the scope of sensible medical judgment. In relation to the vaccine or (pharmaceutical) composition of the present invention, the expression “safe and effective amount” preferably means an amount of the mRNA (and thus of the encoded antigen) that is suitable for stimulating the adaptive immune system in such a manner that no excessive or damaging immune reactions are achieved but, preferably, also no such immune reactions below a measurable level. Such a “safe and effective amount” of the mRNA of the (pharmaceutical) composition or vaccine as defined herein may furthermore be selected in dependence of the type of mRNA, e.g. monocistronic, bi- or even multicistronic mRNA, since a bi- or even multicistronic mRNA may lead to a significantly higher expression of the encoded antigen(s) than the use of an equal amount of a monocistronic mRNA. A “safe and effective amount” of the mRNA of the (pharmaceutical) composition or vaccine as defined above will furthermore vary in connection with the particular condition to be treated and also with the age and physical condition of the patient to be treated, the severity of the condition, the duration of the treatment, the nature of the accompanying therapy, of the particular pharmaceutically acceptable carrier used, and similar factors, within the knowledge and experience of the accompanying doctor. The vaccine or composition according to the invention can be used according to the invention for human and also for veterinary medical purposes, as a pharmaceutical composition or as a vaccine.

[0962] In a preferred embodiment, the mRNA comprising lipid nanoparticle of the (pharmaceutical) composition, vaccine or kit of parts according to the invention is provided in lyophilized form. Preferably, the lyophilized mRNA comprising lipid nanoparticles are reconstituted in a suitable buffer, advantageously based on an aqueous carrier, prior to administration, e.g. Ringer-Lactate solution, Ringer solution, a phosphate buffer solution. In a preferred embodiment, the (pharmaceutical) composition, the vaccine or the kit of parts according to the invention contains at least one, two, three, four, five, six or more mRNA compounds, which may be provided as a single species of lipid nanoparticles, or separately for each LNP species, optionally in lyophilized form (optionally together with at least one further additive) and which are preferably reconstituted separately in a suitable buffer (such as Ringer-Lactate solution) prior to their use so as to allow individual administration of each of the (monocistronic) mRNAs.

[0963] The vaccine or (pharmaceutical) composition according to the invention may typically contain a pharmaceutically acceptable carrier. The expression “pharmaceutically acceptable carrier” as used herein preferably includes the liquid or non-liquid basis of the inventive vaccine. If the inventive vaccine is provided in liquid form, the carrier will be water, typically pyrogen-free water; isotonic saline or buffered (aqueous) solutions, e.g phosphate, citrate etc. buffered solutions. Particularly for injection of the inventive vaccine, water or preferably a buffer, more preferably an aqueous buffer, may be used, containing a sodium salt, preferably at least 50 mM of a sodium salt, a calcium salt, preferably at least 0.01 mM of a calcium salt, and optionally a potassium salt, preferably at least 3 mM of a potassium salt. According to a preferred embodiment, the sodium, calcium and, optionally, potassium salts may occur in the form of their halogenides, e.g. chlorides, iodides, or bromides, in the form of their hydroxides, carbonates, hydrogen carbonates, or sulfates, etc. Without being limited thereto, examples of sodium salts include e.g. NaCl, NaI, NaBr, Na2CO3, NaHCO₃, Na2SO4, examples of the optional potassium salts include e.g. KCl, KI, KBr, K2CO3, KHCO3, K2SO4, and examples of calcium salts include e.g. CaCl2), CaI2, CaBr2, CaCO3, CaSO4, Ca(OH)2. Furthermore, organic anions of the aforementioned cations may be contained in the buffer. According to a more preferred embodiment, the buffer suitable for injection purposes as defined above, may contain salts selected from sodium chloride (NaCl), calcium chloride (CaCl2)) and optionally potassium chloride (KCl), wherein further anions may be present additional to the chlorides. CaCl2) can also be replaced by another salt like KCl. Typically, the salts in the injection buffer are present in a concentration of at least 50 mM sodium chloride (NaCl), at least 3 mM potassium chloride (KCl) and at least 0.01 mM calcium chloride (CaCl2)). The injection buffer may be hypertonic, isotonic or hypotonic with reference to the specific reference medium, i.e. the buffer may have a higher, identical or lower salt content with reference to the specific reference medium, wherein preferably such concentrations of the afore mentioned salts may be used, which do not lead to damage of cells due to osmosis or other concentration effects. Reference media are e.g. in “in vivo” methods occurring liquids such as blood, lymph, cytosolic liquids, or other body liquids, or e.g. liquids, which may be used as reference media in “in vitro” methods, such as common buffers or liquids. Such common buffers or liquids are known to a skilled person.

[0964] However, one or more compatible solid or liquid fillers or diluents or encapsulating compounds may be used as well, which are suitable for administration to a person. The term “compatible” as used herein means that the constituents of the inventive vaccine are capable of being mixed with the mRNA according to the invention as defined herein, in such a manner that no interaction occurs, which would substantially reduce the pharmaceutical effectiveness of the inventive vaccine under typical use conditions. Pharmaceutically acceptable carriers, fillers and diluents must, of course, have sufficiently high purity and sufficiently low toxicity to make them suitable for administration to a person to be treated. Some examples of compounds which can be used as pharmaceutically acceptable carriers, fillers or constituents thereof are sugars, such as, for example, lactose, glucose, trehalose and sucrose; starches, such as, for example, corn starch or potato starch; dextrose; cellulose and its derivatives, such as, for example, sodium carboxymethylcellulose, ethylcellulose, cellulose acetate; powdered tragacanth; malt; gelatin; tallow; solid glidants, such as, for example, stearic acid, magnesium stearate; calcium sulfate; vegetable oils, such as, for example, groundnut oil, cottonseed oil, sesame oil, olive oil, corn oil and oil from theobroma; polyols, such as, for example, polypropylene glycol, glycerol, sorbitol, mannitol and polyethylene glycol; alginic acid.

[0965] The choice of a pharmaceutically acceptable carrier is determined, in principle, by the manner, in which the pharmaceutical composition or vaccine according to the invention is administered. The composition or vaccine can be administered, for example, systemically or locally. Routes for systemic administration in general include, for example, transdermal, oral, parenteral routes, including subcutaneous, intravenous, intramuscular, intraarterial, intradermal and intraperitoneal injections and/or intranasal administration routes. Routes for local administration in general include, for example, topical administration routes but also intradermal, transdermal, subcutaneous, or intramuscular injections or intralesional, intracranial, intrapulmonal, intracardial, and sublingual injections. More preferably, composition or vaccines according to the present invention may be administered by an intradermal, subcutaneous, or intramuscular route, preferably by injection, which may be needle-free and/or needle injection. Compositions/vaccines are therefore preferably formulated in liquid or solid form. The suitable amount of the vaccine or composition according to the invention to be administered can be determined by routine experiments, e.g. by using animal models. Such models include, without implying any limitation, rabbit, sheep, mouse, rat, dog and non-human primate models. Preferred unit dose forms for injection include sterile solutions of water, physiological saline or mixtures thereof. The pH of such solutions should be adjusted to a physiologically tolerable pH, such as about 7.4. Suitable carriers for injection include hydrogels, devices for controlled or delayed release, polylactic acid and collagen matrices. Suitable pharmaceutically acceptable carriers for topical application include those which are suitable for use in lotions, creams, gels and the like. If the inventive composition or vaccine is to be administered perorally, tablets, capsules and the like are the preferred unit dose form. The pharmaceutically acceptable carriers for the preparation of unit dose forms which can be used for oral administration are well known in the prior art. The choice thereof will depend on secondary considerations such as taste, costs and storability, which are not critical for the purposes of the present invention, and can be made without difficulty by a person skilled in the art.

[0966] The inventive vaccine or composition can additionally contain one or more auxiliary substances in order to further increase the immunogenicity. A synergistic action of the mRNA contained in the inventive composition and of an auxiliary substance, which may be optionally be co-formulated (or separately formulated) with the inventive vaccine or composition as described above, is preferably achieved thereby. Depending on the various types of auxiliary substances, various mechanisms may play a role in this respect. For example, compounds that permit the maturation of dendritic cells (DCs), for example lipopolysaccharides, TNF-alpha or CD40 ligand, form a first class of suitable auxiliary substances. In general, it is possible to use as auxiliary substance any agent that influences the immune system in the manner of a “danger signal” (LPS, GP96, etc.) or cytokines, such as GM-CFS, which allow an immune response produced by the immune-stimulating adjuvant according to the invention to be enhanced and/or influenced in a targeted manner. Particularly preferred auxiliary substances are cytokines, such as monokines, lymphokines, interleukins or chemokines, that—additional to induction of the adaptive immune response by the encoded at least one antigen—promote the innate immune response, such as IL-1, IL-2, IL-3, IL-4, IL-5, IL-6, IL-7, IL-8, IL-9, IL-10, IL-12, IL-13, IL-14, IL-15, IL-16, IL-17, IL-18, IL-19, IL-20, IL-21, IL-22, IL-23, IL-24, IL-25, IL-26, IL-27, IL-28, IL-29, IL-30, IL-31, IL-32, IL-33, INF-alpha, IFN-beta, INF-gamma, GM-CSF, G-CSF, M-CSF, LT-beta or TNF-alpha, growth factors, such as hGH. Preferably, such immunogenicity increasing agents or compounds are provided separately (not co-formulated with the inventive vaccine or composition) and administered individually.

[0967] Further additives which may be included in the inventive vaccine or composition are emulsifiers, such as, for example, Tween; wetting agents, such as, for example, sodium lauryl sulfate; colouring agents; taste-imparting agents, pharmaceutical carriers; tablet-forming agents; stabilizers; antioxidants; preservatives.

[0968] The inventive vaccine or composition can also additionally contain any further compound, which is known to be immune-stimulating due to its binding affinity (as ligands) to human Toll-like receptors TLR1, TLR2, TLR3, TLR4, TLR5, TLR6, TLR7, TLR8, TLR9, TLR10, or due to its binding affinity (as ligands) to murine Toll-like receptors TLR1, TLR2, TLR3, TLR4, TLR5, TLR6, TLR7, TLR8, TLR9, TLR10, TLR11, TLR12 or TLR13.

[0969] Another class of compounds, which may be added to an inventive vaccine or composition in this context, may be CpG nucleic acids, in particular CpG-RNA or CpG-DNA. A CpG-RNA or CpG-DNA can be a single-stranded CpG-DNA (ss CpG-DNA), a double-stranded CpG-DNA (dsDNA), a single-stranded CpG-RNA (ss CpG-RNA) or a double-stranded CpG-RNA (ds CpG-RNA). The CpG nucleic acid is preferably in the form of CpG-RNA, more preferably in the form of single-stranded CpG-RNA (ss CpG-RNA). The CpG nucleic acid preferably contains at least one or more (mitogenic) cytosine/guanine dinucleotide sequence(s) (CpG motif(s)). According to a first preferred alternative, at least one CpG motif contained in these sequences, that is to say the C (cytosine) and the G (guanine) of the CpG motif, is unmethylated. All further cytosines or guanines optionally contained in these sequences can be either methylated or unmethylated. According to a further preferred alternative, however, the C (cytosine) and the G (guanine) of the CpG motif can also be present in methylated form.

[0970] According to another aspect of the present invention, the present invention also provides a kit, in particular a kit of parts, comprising the mRNA compound comprising mRNA sequence as defined herein and at least one lipid according to formula (I), (II), (III) or (IV) as defined above. In a further embodiment the kit comprises a lipid nanoparticle as defined above or the (pharmaceutical) composition comprising a lipid nanoparticle as defined above, and/or the vaccine according to the invention, optionally a liquid vehicle for solubilising and optionally technical instructions with information on the administration and dosage of the mRNA comprising lipid nanoparticles, the composition and/or the vaccine. The technical instructions may contain information about administration and dosage of the mRNA comprising lipid nanoparticles, the composition and/or the vaccine. Such kits, preferably kits of parts, may be applied e.g. for any of the above mentioned applications or uses, preferably for the use of the lipid nanoparticle according to the invention (for the preparation of an inventive medicament, preferably a vaccine) for the treatment or prophylaxis of influenza virus infections or diseases or disorders related thereto. The kits may also be applied for the use of the lipid nanoparticle, the composition or the vaccine as defined herein (for the preparation of an inventive vaccine) for the treatment or prophylaxis of influenza virus infections or diseases or disorders related thereto, wherein the lipid nanoparticle, the composition and/or the vaccine may be capable of inducing or enhancing an immune response in a mammal as defined above. Such kits may further be applied for the use of the lipid nanoparticle, the composition or the vaccine as defined herein (for the preparation of an inventive vaccine) for modulating, preferably for eliciting, e.g. to induce or enhance, an immune response in a mammal as defined above, and preferably for supporting treatment or prophylaxis of influenza virus infections or diseases or disorders related thereto. Kits of parts, as a special form of kits, may contain one or more identical or different compositions and/or one or more identical or different vaccines as described herein in different parts of the kit. Kits of parts may also contain an (e.g. one) composition, an (e.g. one) vaccine and/or the mRNA comprising lipid nanoparticles according to the invention in different parts of the kit, e.g. each part of the kit containing an mRNA comprising lipid nanoparticles as defined herein, preferably encoding a distinct antigen. Preferably, the kit or the kit of parts contains as a part a vehicle for solubilising the mRNA according to the invention, the vehicle optionally being Ringer-lactate solution. Any of the above kits may be used in a treatment or prophylaxis as defined above.

[0971] In another embodiment of this aspect, the kit according to the present invention may additionally contain at least one adjuvant. In a further embodiment, the kit according to the present invention may additionally contain at least one further pharmaceutically active component, preferably a therapeutic compound suitable for treatment and/or prophylaxis of cancer or a related disorder. Moreover, in another embodiment, the kit may additionally contain parts and/or devices necessary or suitable for the administration of the composition or the vaccine according to the invention, including needles, applicators, patches, injection-devices.

[0972] In a further aspect the invention relates to the use of the mRNA comprising lipid nanoparticles or the pharmaceutical composition as a medicament. In an alternative embodiment the present invention relates to the use of the pharmaceutical composition or the mRNA comprising lipid in the manufacture of a medicament. In particular said medicament is for therapeutically or prophylactically raising an immune response of a subject in need thereof.

[0973] In a preferred embodiment the medicament is for prevention or treatment of cancer or tumour diseases, infectious diseases, allergies, or autoimmune diseases or disorders related thereto.

[0974] In particular the medicament is for the treatment of a subject, preferably a vertebrate. In a preferred embodiment the subject is a mammal, preferably selected from the group comprising goat, cattle, swine, dog, cat, donkey, monkey, ape, a rodent such as a mouse, hamster, rabbit and, particularly, human.

[0975] In a particular preferred embodiment the medicament is a vaccine, preferably a tumor, influenza or rabies vaccine. In a specific embodiment the medicament is a rabies vaccine used in rabies treatment.

[0976] The medicament might be administered in any suitable way. Preferably the medicament is for parenteral administration, in particular injection.

[0977] The invention further relates to a method for raising an immune response in a subject in need thereof, comprising administering to the subject a lipid nanoparticle as defined above or a pharmaceutical composition as defined above.

[0978] In a further aspect the invention relates to a method for prevention or treatment of cancer or tumour diseases, infectious diseases, allergies, or autoimmune diseases or disorders related thereto in a subject in need thereof, comprising administering to the subject a lipid nanoparticle as defined above or a pharmaceutical composition as defined above.

[0979] According to one aspect of the present invention, the mRNA comprising lipid nanoparticles, the (pharmaceutical) composition or the vaccine may be used according to the invention (for the preparation of a medicament) for the treatment or prophylaxis of cancer or tumour diseases, infectious diseases, allergies, or autoimmune diseases or disorders related thereto. In this context particularly preferred is the treatment or prophylaxis of Influenza virus or Rabies virus infections.

[0980] Furthermore, also included in the present inventions are methods of treating or preventing cancer or tumour diseases, infectious diseases, allergies, or autoimmune diseases or disorders related thereto, preferably as defined herein, by administering to a subject in need thereof a pharmaceutically effective amount of the mRNA comprising lipid nanoparticles, the (pharmaceutical) composition or the vaccine according to the invention. Such a method typically comprises an optional first step of preparing the mRNA comprising lipid nanoparticles, the composition or the vaccine of the present invention, and a second step, comprising administering (a pharmaceutically effective amount of) said composition or vaccine to a patient/subject in need thereof. A subject in need thereof will typically be a mammal. In the context of the present invention, the mammal is preferably selected from the group comprising, without being limited thereto, e.g. goat, cattle, swine, dog, cat, donkey, monkey, ape, a rodent such as a mouse, hamster, rabbit and, particularly, human. In some embodiments of the invention, the subject is a bird, preferably a chicken.

[0981] In this context, preferably included in the present invention are methods of treating or preventing influenza virus or Rabies virus infections or disorders related thereto.

[0982] The invention also relates to the use of the mRNA comprising lipid nanoparticles, the composition or the vaccine according to the invention, preferably for eliciting an immune response in a mammal, preferably for the treatment or prophylaxis of cancer or tumour diseases, infectious diseases, allergies, or autoimmune diseases or disorders related thereto, preferably of influenza virus or Rabies virus infections or a related condition as defined herein.

[0983] The present invention furthermore comprises the use of the mRNA comprising lipid nanoparticles, the (pharmaceutical) composition or the vaccine according to the invention as defined herein for modulating, preferably for inducing or enhancing, an immune response in a mammal as defined herein, more preferably for preventing and/or treating influenza virus infections, or of diseases or disorders related thereto. In this context, support of the treatment or prophylaxis of influenza virus infections may be any combination of a conventional influenza therapy method such as therapy with antivirals such as neuraminidase inhibitors (e.g. oseltamivir and zanamivir) and M2 protein inhibitors (e.g. adamantane derivatives), and a therapy using the RNA or the pharmaceutical composition as defined herein. Support of the treatment or prophylaxis of influenza virus infections may be also envisaged in any of the other embodiments defined herein. Accordingly, any use of the mRNA comprising lipid nanoparticles, the (pharmaceutical) composition or the vaccine according to the invention in co-therapy with any other approach, preferably one or more of the above therapeutic approaches, in particular in combination with antivirals is within the scope of the present invention.

[0984] For administration, preferably any of the administration routes may be used as defined herein. In particular, an administration route is used, which is suitable for treating or preventing an influenza virus infection as defined herein or diseases or disorders related thereto, by inducing or enhancing an adaptive immune response on the basis of an antigen encoded by the mRNA comprising lipid nanoparticles according to the invention. Administration of the composition and/or the vaccine according to the invention may then occur prior, concurrent and/or subsequent to administering another composition and/or vaccine as defined herein, which may—in addition—contain another mRNA comprising lipid nanoparticle or combination of mRNA comprising lipid nanoparticles encoding a different antigen or combination of antigens, wherein each antigen encoded by the mRNA sequence according to the invention is preferably suitable for the treatment or prophylaxis of influenza virus infections and diseases or disorders related thereto. In this context, a treatment as defined herein may also comprise the modulation of a disease associated to influenza virus infection and of diseases or disorders related thereto.

[0985] According to a preferred embodiment of this aspect of the invention, the (pharmaceutical) composition or the vaccine according to the invention is administered by injection. Any suitable injection technique known in the art may be employed. Preferably, the inventive composition is administered by injection, preferably by needle-less injection, for example by jet-injection.

[0986] In one embodiment, the inventive composition comprises at least one, two, three, four, five, six, seven, eight, nine, ten, eleven, twelve or more mRNAs as defined herein, each of which is preferably injected separately, preferably by needle-less injection. Alternatively, the inventive composition comprises at least one, two, three, four, five, six, seven, eight, nine, ten, eleven, twelve or more mRNAs, wherein the at least one, two, three, four, five, six, seven, eight, nine, ten, eleven, twelve or more mRNAs are administered, preferably by injection as defined herein, as a mixture.

[0987] In a further aspect the invention relates to a method of immunization of a subject against an antigen or a combination of antigens.

[0988] The immunization protocol for the immunization of a subject against an antigen or a combination of at least two, three, four, five, six, seven, eight, nine, ten, eleven, twelve or more antigens as defined herein typically comprises a series of single doses or dosages of the (pharmaceutical) composition or the vaccine according to the invention. A single dosage, as used herein, refers to the initial/first dose, a second dose or any further doses, respectively, which are preferably administered in order to “boost” the immune reaction. In this context, each single dosage preferably comprises the administration of the same antigen or the same combination of antigens as defined herein, wherein the interval between the administration of two single dosages can vary from at least one day, preferably 2, 3, 4, 5, 6 or 7 days, to at least one week, preferably 2, 3, 4, 5, 6, 7 or 8 weeks. The intervals between single dosages may be constant or vary over the course of the immunization protocol, e.g. the intervals may be shorter in the beginning and longer towards the end of the protocol. Depending on the total number of single dosages and the interval between single dosages, the immunization protocol may extend over a period of time, which preferably lasts at least one week, more preferably several weeks (e.g. 2, 3, 4, 5, 6, 7, 8, 9, 10, 11 or 12 weeks), even more preferably several months (e.g. 3, 4, 5, 6, 7, 8, 9, 10, 11, 12, 18 or 24 months). Each single dosage preferably encompasses the administration of an antigen, preferably of a combination of at least two, three, four, five, six, seven, eight, nine, ten, eleven, twelve or more antigens as defined herein and may therefore involve at least one, preferably 1, 2, 3, 4, 5, 6, 7, 8, 9, 10, 11 or 12 injections. In some cases, the composition or the vaccine according to the invention is administered as a single dosage typically in one injection. In the case, where the vaccine according to the invention comprises separate mRNA formulations encoding distinct antigens as defined herein, the minimum number of injections carried out during the administration of a single dosage corresponds to the number of separate components of the vaccine. In certain embodiments, the administration of a single dosage may encompass more than one injection for each component of the vaccine (e.g. a specific mRNA formulation comprising an mRNA encoding, for instance, one antigenic peptide or protein as defined herein). For example, parts of the total volume of an individual component of the vaccine may be injected into different body parts, thus involving more than one injection. In a more specific example, a single dosage of a vaccine comprising four separate mRNA formulations, each of which is administered in two different body parts, comprises eight injections. Typically, a single dosage comprises all injections required to administer all components of the vaccine, wherein a single component may be involve more than one injection as outlined above. In the case, where the administration of a single dosage of the vaccine according to the invention encompasses more than one injection, the injection are carried out essentially simultaneously or concurrently, i.e. typically in a time-staggered fashion within the time-frame that is required for the practitioner to carry out the single injection steps, one after the other. The administration of a single dosage therefore preferably extends over a time period of several minutes, e.g. 2, 3, 4, 5, 10, 15, 30 or 60 minutes.

[0989] Administration of the mRNA comprising lipid nanoparticles as defined herein, the (pharmaceutical) composition or the vaccine according to the invention may be carried out in a time staggered treatment. A time staggered treatment may be e.g. administration of the mRNA comprising lipid nanoparticles, the composition or the vaccine prior, concurrent and/or subsequent to a conventional therapy of influenza virus infections or diseases or disorders related thereto, e.g. by administration of the mRNA comprising lipid nanoparticles, the composition or the vaccine prior, concurrent and/or subsequent to a therapy or an administration of a therapeutic suitable for the treatment or prophylaxis of influenza virus infections or diseases or disorders related thereto. Such time staggered treatment may be carried out using e.g. a kit, preferably a kit of parts as defined herein.

[0990] Time staggered treatment may additionally or alternatively also comprise an administration of the mRNA comprising lipid nanoparticles as defined herein, the (pharmaceutical) composition or the vaccine according to the invention in a form, wherein the mRNA encoding an antigenic peptide or protein as defined herein or a fragment or variant thereof, preferably forming part of the composition or the vaccine, is administered parallel, prior or subsequent to another mRNA comprising lipid nanoparticles as defined above, preferably forming part of the same inventive composition or vaccine. Preferably, the administration (of all mRNA comprising lipid nanoparticles) occurs within an hour, more preferably within 30 minutes, even more preferably within 15, 10, 5, 4, 3, or 2 minutes or even within 1 minute. Such time staggered treatment may be carried out using e.g. a kit, preferably a kit of parts as defined herein.

[0991] In a preferred embodiment, the pharmaceutical composition or the vaccine of the present invention is administered repeatedly, wherein each administration preferably comprises individual administration of the at least one mRNA comprising lipid nanoparticles of the inventive composition or vaccine. At each time point of administration, the at least one mRNA may be administered more than once (e.g. 2 or 3 times). In a particularly preferred embodiment of the invention, at least two, three, four, five, six or more mRNA sequences (each encoding a distinct one of the antigens as defined herein) encapsulated or associated with mRNA comprising lipid nanoparticles as defined above, wherein the mRNA sequences are part of mRNA compounds of the same or different lipid nanoparticles, are administered at each time point, wherein each mRNA is administered twice by injection, distributed over the four limbs.

[0992] The following Reaction Schemes illustrate methods to make lipids of Formula (I), (II) or (III).

[chemical structure]

[0993] Embodiments of the lipid of Formula (I) (e.g., compound A-5) can be prepared according to General Reaction Scheme 1 (“Method A”), wherein R is a saturated or unsaturated C₁-C₂₄ alkyl or saturated or unsaturated cycloalkyl, m is 0 or 1 and n is an integer from 1 to 24. Referring to General Reaction Scheme 1, compounds of structure A-1 can be purchased from commercial sources or prepared according to methods familiar to one of ordinary skill in the art. A mixture of A-1, A-2 and DMAP is treated with DCC to give the bromide A-3. A mixture of the bromide A-3, a base (e.g., N,N-diisopropylethylamine) and the N,N-dimethyldiamine A-4 is heated at a temperature and time sufficient to produce A-5 after any necessarily workup and or purification step.

[chemical structure]

[0994] Other embodiments of the compound of Formula (I) (e.g., compound B-5) can be prepared according to General Reaction Scheme 2 (“Method B”), wherein R is a saturated or unsaturated C₁-C₂₄ alkyl or saturated or unsaturated cycloalkyl, m is 0 or 1 and n is an integer from 1 to 24. As shown in General Reaction Scheme 2, compounds of structure B-1 can be purchased from commercial sources or prepared according to methods familiar to one of ordinary skill in the art. A solution of B-1 (1 equivalent) is treated with acid chloride B-2 (1 equivalent) and a base (e.g., triethylamine). The crude product is treated with an oxidizing agent (e.g., pyridinum chlorochromate) and intermediate product B-3 is recovered. A solution of crude B-3, an acid (e.g., acetic acid), and N,N-dimethylaminoamine B-4 is then treated with a reducing agent (e.g., sodium triacetoxyborohydride) to obtain B-5 after any necessary work up and/or purification.

[0995] It should be noted that although starting materials A-1 and B-1 are depicted above as including only saturated methylene carbons, starting materials which include carbon-carbon double bonds may also be employed for preparation of compounds which include carbon-carbon double bonds.

[chemical structure]

[0996] Different embodiments of the lipid of Formula (I) (e.g., compound C-7 or C9) can be prepared according to General Reaction Scheme 3 (“Method C”), wherein R is a saturated or unsaturated C₁-C₂₄ alkyl or saturated or unsaturated cycloalkyl, m is 0 or 1 and n is an integer from 1 to 24. Referring to General Reaction Scheme 3, compounds of structure C-1 can be purchased from commercial sources or prepared according to methods familiar to one of ordinary skill in the art.

[chemical structure]

[0997] Embodiments of the compound of Formula (II) (e.g., compounds D-5 and D-7) can be prepared according to General Reaction Scheme 4 (“Method D”), wherein R^{1a}, R^{1b}, R^{2a}, R^{2b}, R^{3a}, R^{3b}, R^{4a}, R^{4b}, R⁵, R⁶, R⁸, R⁹, L¹, L², G¹, G², G³, a, b, c and d are as defined herein, and R^{7′} represents R⁷ or a C₃-C₁₉ alkyl. Referring to General Reaction Scheme 1, compounds of structure D-1 and D-2 can be purchased from commercial sources or prepared according to methods familiar to one of ordinary skill in the art. A solution of D-1 and D-2 is treated with a reducing agent (e.g., sodium triacetoxyborohydride) to obtain D-3 after any necessary work up. A solution of D-3 and a base (e.g. trimethylamine, DMAP) is treated with acyl chloride D-4 (or carboxylic acid and DCC) to obtain D-5 after any necessary work up and/or purification. D-5 can be reduced with LiAlH4 D-6 to give D-7 after any necessary work up and/or purification.

[chemical structure]

[0998] Embodiments of the lipid of Formula (II) (e.g., compound E-5) can be prepared according to General Reaction Scheme 5 (“Method E”), wherein R^{1a}, R^{1b}, R^{2a}, R^{2b}, R^{3a}, R^{3b}, R^{4a}, R^{4b}, R^{5s}, R⁶, R⁷, R⁸, R⁹, L¹, L², G³, a, b, c and d are as defined herein. Referring to General Reaction Scheme 2, compounds of structure E-1 and E-2 can be purchased from commercial sources or prepared according to methods familiar to one of ordinary skill in the art. A mixture of E-1 (in excess), E-2 and a base (e.g., potassium carbonate) is heated to obtain E-3 after any necessary work up. A solution of E-3 and a base (e.g. trimethylamine, DMAP) is treated with acyl chloride E-4 (or carboxylic acid and DCC) to obtain E-5 after any necessary work up and/or purification.

[chemical structure]

[0999] Other embodiments of the compound of Formula (II) (e.g., F-9) are prepared according to General Reaction Scheme 6 (Method F). As illustrated in General Reaction Scheme 6, an appropriately protected ketone (F-1) is reacted under reductive amination conditions with amine F-2 to yield F-3. Acylation of F-3 with acid chloride F-4 yields acylated product F-5. Removal of the alcohol protecting group on F-5 followed by reaction with F-7 and/or F-8 and appropriate activating reagent (e.g., DCC) yields the desired compound F-9.

[chemical structure]

[1000] General Reaction Scheme 7 provides an exemplary method (Method G) for preparation of Lipids of Formula (III). G¹, G³, R¹ and R³ in General Reaction Scheme 7 are as defined herein for Formula (III), and G1′ refers to a one-carbon shorter homologue of G1. Compounds of structure G-1 are purchased or prepared according to methods known in the art. Reaction of G-1 with diol G-2 under appropriate condensation conditions (e.g., DCC) yields ester/alcohol G-3, which can then be oxidized (e.g., PCC) to aldehyde G-4. Reaction of G-4 with amine G-5 under reductive amination conditions yields a lipid of Formula (III).

[1001] It should be noted that various alternative strategies for preparation of lipids of Formula (III) are available to those of ordinary skill in the art. For example, other lipids of Formula (III) wherein L¹ and L² are other than ester can be prepared according to analogous methods using the appropriate starting material. Further, General Reaction Scheme 6 depicts preparation of lipids of Formula (III), wherein G¹ and G² are the same; however, this is not a required aspect of the invention and modifications to the above reaction scheme are possible to yield compounds wherein G¹ and G² are different.

[1002] It will be appreciated by those skilled in the art that in the process described herein the functional groups of intermediate compounds may need to be protected by suitable protecting groups. Such functional groups include hydroxy, amino, mercapto and carboxylic acid. Suitable protecting groups for hydroxy include trialkylsilyl or diarylalkylsilyl (for example, t-butyldimethylsilyl, t-butyldiphenylsilyl or trimethylsilyl), tetrahydropyranyl, benzyl, and the like. Suitable protecting groups for amino, amidino and guanidino include t-butoxycarbonyl, benzyloxycarbonyl, and the like. Suitable protecting groups for mercapto include —C(O)—R″ (where R″ is alkyl, aryl or arylalkyl), p-methoxybenzyl, trityl and the like. Suitable protecting groups for carboxylic acid include alkyl, aryl or arylalkyl esters. Protecting groups may be added or removed in accordance with standard techniques, which are known to one skilled in the art and as described herein. The use of protecting groups is described in detail in Green, T. W. and P. G. M. Wutz, Protective Groups in Organic Synthesis (1999), 3rd Ed., Wiley. As one of skill in the art would appreciate, the protecting group may also be a polymer resin such as a Wang resin, Rink resin or a 2-chlorotrityl-chloride resin.

[1003] Preparation of Lipid Nanoparticle Compositions:

[1004] LNPs were prepared as follows. Cationic lipid, DSPC, cholesterol and PEG-lipid were solubilized in ethanol. Lipid nanoparticles (LNP) were prepared at a total lipid to mRNA weight ratio of approximately 10:1 to 30:1. Briefly, the mRNA was diluted to 0.05 to 0.2 mg/mL in 10 to 50 mM citrate buffer, pH 4. Syringe pumps were used to mix the ethanolic lipid solution with the mRNA aqueous solution at a ratio of about 1:5 to 1:3 (vol/vol) with total flow rates above 15 ml/min. The ethanol was then removed and the external buffer replaced with PBS by dialysis. Finally, the lipid nanoparticles were filtered through a 0.2 μm pore sterile filter. Lipid nanoparticle particle size was 70-90 nm diameter as determined by quasi-elastic light scattering using a Malvern Zetasizer Nano (Malvern, UK).

[1005] Items

[1006] Item 1. A lipid nanoparticle comprising

[1007] (i) a cationic lipid with the formula I:

[chemical structure]

[1008] or a pharmaceutically acceptable salt, tautomer, prodrug or stereoisomer thereof, wherein:

[1009] L1 and L2 are each independently —O(C═O)—, —(C═O)O— or a carbon-carbon double bond;

[1010] R1a and R1b are, at each occurrence, independently either (a) H or C1-C12 alkyl, or (b) R1a is H or C1-C12 alkyl, and R1b together with the carbon atom to which it is bound is taken together with an adjacent R1b and the carbon atom to which it is bound to form a carbon-carbon double bond;

[1011] R2a and R2b are, at each occurrence, independently either (a) H or C1-C12 alkyl, or (b) R2a is H or C1-C12 alkyl, and R2b together with the carbon atom to which it is bound is taken together with an adjacent R2b and the carbon atom to which it is bound to form a carbon-carbon double bond;

[1012] R3a and R3b are, at each occurrence, independently either (a) H or C1-C12 alkyl, or (b) R3a is H or C1-C12 alkyl, and R3b together with the carbon atom to which it is bound is taken together with an adjacent R3b and the carbon atom to which it is bound to form a carbon-carbon double bond;

[1013] R4a and R4b are, at each occurrence, independently either (a) H or C1-C12 alkyl, or (b) R4a is H or C1-C12 alkyl, and R4b together with the carbon atom to which it is bound is taken together with an adjacent R4b and the carbon atom to which it is bound to form a carbon-carbon double bond;

[1014] R5 and R6 are each independently methyl or cycloalkyl;

[1015] R7 is, at each occurrence, independently H or C1-C12 alkyl;

[1016] R8 and R9 are each independently C1-C12 alkyl; or R8 and R9, together with the nitrogen atom to which they are attached, form a 5, 6 or 7-membered heterocyclic ring comprising one nitrogen atom;

[1017] a and d are each independently an integer from 0 to 24;

[1018] b and c are each independently an integer from 1 to 24; and

[1019] e is 1 or 2;

[1020] (ii) a mRNA compound comprising an mRNA sequence encoding at least one antigenic peptide or protein, wherein the mRNA compound optionally does not comprise a nucleoside modification, in particular not a base modification,

[1021] wherein the mRNA compound is encapsulated in or associated with said lipid nanoparticle.

[1022] Item 2. A lipid nanoparticle comprising

[1023] (i) a cationic lipid with the formula II:

[chemical structure]

[1024] or a pharmaceutically acceptable salt, tautomer, prodrug or stereoisomer thereof, wherein:

[1025] L1 and L2 are each independently O(C═O), (C═O)O, C(═O), O, S(O)x, S S, C(═O)S, SC(═O), NR^{a}C(═O), C(═O)NRa, NR^{a}C(═O)NRa, OC(═O)NRa, NR^{a}C(═O)O, or a direct bond;

[1026] G1 is C1-C2 alkylene, —(C═O), —O(C═O), SC(═O), —NR^{a}C(═O)— or a direct bond

[1027] G2 is —C(═O), (C═O)O—, C(═O)S—, C(═O)NRa or a direct bond;

[1028] G3 is C1-C6 alkylene;

[1029] Ra is H or C1-C12 alkyl;

[1030] R1a and R1b are, at each occurrence, independently either: (a) H or C1-C12 alkyl; or (b) R1a is H or C1-C12 alkyl, and R1b together with the carbon atom to which it is bound is taken together with an adjacent R1b and the carbon atom to which it is bound to form a carbon-carbon double bond;

[1031] R2a and R2b are, at each occurrence, independently either: (a) H or C1-C12 alkyl; or (b) R2a is H or C1-C12 alkyl, and R2b together with the carbon atom to which it is bound is taken together with an adjacent R2b and the carbon atom to which it is bound to form a carbon-carbon double bond;

[1032] R3a and R3b are, at each occurrence, independently either: (a) H or C1-C12 alkyl; or (b) R3a is H or C1-C12 alkyl, and R3b together with the carbon atom to which it is bound is taken together with an adjacent R3b and the carbon atom to which it is bound to form a carbon-carbon double bond;

[1033] R4a and R4b are, at each occurrence, independently either: (a) H or C1-C12 alkyl; or (b) R4a is H or C1-C12 alkyl, and R4b together with the carbon atom to which it is bound is taken together with an adjacent R4b and the carbon atom to which it is bound to form a carbon-carbon double bond;

[1034] R5 and R6 are each independently H or methyl;

[1035] R7 is C4-C20 alkyl;

[1036] R8 and R9 are each independently C1-C12 alkyl; or R8 and R9, together with the nitrogen atom to which they are attached, form a 5, 6 or 7-membered heterocyclic ring;

[1037] a, b, c and d are each independently an integer from 1 to 24; and

[1038] x is 0, 1 or 2;

[1039] (ii) a mRNA compound comprising an mRNA sequence encoding at least one antigenic peptide or protein, wherein the mRNA compound optionally does not comprise a nucleoside modification, in particular not a base modification;

[1040] wherein the mRNA compound is encapsulated in or associated with said lipid nanoparticle.

[1041] Item 3. A lipid nanoparticle comprising

[1042] (i) a cationic lipid with the formula III:

[chemical structure]

[1043] or a pharmaceutically acceptable salt, tautomer, prodrug or stereoisomer thereof, wherein:

[1044] L1 or L2 is each independently —O(C═O)—, —(C═O)O—, —C(═O)—, —O—, —S(O)x-, —S—S—, C(═O)S—, SC(═O)—, —NR^{a}C(═O)—, —C(═O)NRa—, NR^{a}C(═O)NRa, —OC(═O)NRa— or NR^{a}C(═O)O—, preferably L1 or L2 is —O(C═O)— or —(C═O)O—;

[1045] G1 and G2 are each independently unsubstituted C1-C12 alkylene or C1-C12 alkenylene;

[1046] G3 is C1-C24 alkylene, C1-C24 alkenylene, C3-C8 cycloalkylene, or C3-C8 cycloalkenylene;

[1047] Ra is H or C1-C12 alkyl;

[1048] R1 and R2 are each independently C6-C24 alkyl or C6-C24 alkenyl;

[1049] R3 is H, OR5, CN, C(═O)OR4, OC(═O)R4 or —NR5C(═O)R4;

[1050] R4 is C1-C12 alkyl;

[1051] R5 is H or C1-C6 alkyl; and

[1052] x is 0, 1 or 2;

[1053] (ii) a mRNA compound comprising an mRNA sequence encoding at least one antigenic peptide or protein, wherein the mRNA compound optionally does not comprise a nucleoside modification, in particular not a base modification;

[1054] wherein the mRNA compound is encapsulated in or associated with said lipid nanoparticle.

[1055] Item 4. A lipid nanoparticle comprising:

[1056] (i) a PEG lipid with the formula (IV)

[chemical structure]

[1057] wherein R8 and R9 are each independently a straight or branched, saturated or unsaturated alkyl chain containing from 10 to 30 carbon atoms, wherein the alkyl chain is optionally interrupted by one or more ester bonds;

[1058] and w has a mean value ranging from 30 to 60; and

[1059] (ii) a mRNA compound comprising an mRNA sequence encoding at least one antigenic peptide or protein, wherein the mRNA compound optionally does not comprise a nucleoside modification, in particular not a base modification;

[1060] wherein the mRNA compound is encapsulated in or associated with said lipid nanoparticle.

[1061] Item 5. The lipid nanoparticle according to any one of items 1 to 3, additionally comprising

[1062] (iii) a PEG lipid with the formula (IV):

[chemical structure]

[1063] wherein R8 and R9 are each independently a straight or branched, saturated or unsaturated alkyl chain containing from 10 to 30 carbon atoms, wherein the alkyl chain is optionally interrupted by one or more ester bonds;

[1064] and w has a mean value ranging from 30 to 60.

[1065] Item 6. The lipid nanoparticle according to item 3 or 5, wherein the cationic lipid is a compound of formula III, and wherein:

[1066] L1 and L2 are each independently —O(C═O)— or (C═O)—O—;

[1067] G3 is C1-C24 alkylene or C1-C24 alkenylene; and

[1068] R3 is H or OR5.

[1069] Item 7. The lipid nanoparticle according to any one of items 3, 5 or 6, wherein the cationic lipid is a compound of formula III, and wherein:

[1070] L1 and L2 are each independently —O(C═O)— or (C═O)—O—;

[1071] R1 and R2 each independently have one of the following structures:

[chemical structure]

[1072] Item 8. The lipid nanoparticle according to any one of items 3 or 5 to 7, wherein the cationic lipid is a compound of formula III, and wherein R3 is OH.

[1073] Item 9. The lipid nanoparticle according to any one of items 1 to 3 or 5 to 8, wherein the cationic lipid is selected from structures I-1 to 1-41, II-1 to II-34 or III-1 to III-36, or Table 7: Representative Lipids of Formula (I), Table 8: Representative Lipids of Formula (II), or Table 9: Representative Lipids of Formula (III).

[1074] Item 10. The lipid nanoparticle according to any one of items 1 to 3 or 5 to 9, wherein the cationic lipid is selected from:

[chemical structure]

[1075] Item 11. The lipid nanoparticle according to any one of items 4 to 10, wherein in the PEG lipid R8 and R9 are saturated alkyl chains.

[1076] Item 12. The lipid nanoparticle according to item 11, wherein the PEG lipid is

[chemical structure]

[1077] wherein n has a mean value ranging from 30 to 60.

[1078] Item 13. The lipid nanoparticle according to any one of items 1 to 12, wherein the mRNA compound comprises at least one chemical modification, and wherein the mRNA compound preferably does not comprise a nucleoside modification, wherein said nucleoside modification is optionally a base modification, and wherein said base modification is optionally a 1-methylpseudouridine modification.

[1079] Item 14. The lipid nanoparticle according to item 13, wherein the chemical modification is selected from the group comprising sugar modifications, backbone modifications and lipid modifications.

[1080] Item 15. The lipid nanoparticle according to any one of items 1 to 14, wherein the mRNA sequence is an artificial mRNA sequence.

[1081] Item 16. The lipid nanoparticle according to any one of items 1 to 15 wherein the coding region of the mRNA sequence encoding the at least one antigenic peptide or protein comprises a sequence modification.

[1082] Item 17. The lipid nanoparticle according to item 16, wherein the sequence modification is selected from a G/C content modification, a codon modification, a codon optimization or a C-optimization of the sequence.

[1083] Item 18. The lipid nanoparticle according to item 17, wherein the G/C content of the coding region of the mRNA sequence is increased compared to the G/C content of the corresponding coding sequence of the wild-type mRNA, or wherein the C content of the coding region of the mRNA sequence is increased compared to the C content of the corresponding coding sequence of the wild-type mRNA, or wherein the codon usage in the coding region of the mRNA sequence is adapted to the human codon usage, or wherein the codon adaptation index (CAI) is increased or maximised in the coding region of the mRNA sequence, wherein the encoded amino acid sequence of the mRNA sequence is preferably not being modified compared to the encoded amino acid sequence of the wild-type mRNA.

[1084] Item 19. The lipid nanoparticle according to any one of items 1 to 18, wherein the mRNA sequence additionally comprises

[1085] a) a 5′-CAP structure, and/or

[1086] b) a poly(A) sequence, and/or

[1087] c) a poly (C) sequence.

[1088] Item 20. The lipid nanoparticle according to item 19, wherein the mRNA sequence comprises a poly(A) sequence, wherein the poly(A) sequence comprises a sequence of about 25 to about 400 adenosine nucleotides, preferably a sequence of about 50 to about 400 adenosine nucleotides, more preferably a sequence of about 50 to about 300 adenosine nucleotides, even more preferably a sequence of about 50 to about 250 adenosine nucleotides, most preferably a sequence of about 60 to about 250 adenosine nucleotides.

[1089] Item 21. The lipid nanoparticle according to any one of items 1 to 19, wherein the mRNA sequence additionally comprises at least one histone stem loop.

[1090] Item 22. The lipid nanoparticle according to item 21, wherein the at least one histone stem-loop comprises a nucleic acid sequence according to the following formulae (V) or (VI):

[1091] formula (V) (stem-loop sequence without stem bordering elements):

[chemical structure]

[1092] formula (VI) (stem-loop sequence with stem bordering elements):

[chemical structure]

[1093] wherein

[1094] stem1 or stem2 bordering elements N1-6 is a consecutive sequence of 1 to 6, preferably of 2 to 6, more preferably of 2 to 5, even more preferably of 3 to 5, most preferably of 4 to 5 or 5 N, wherein each N is independently from another selected from a nucleotide selected from A, U, T, G and C, or a nucleotide analogue thereof;

[1095] stem1 [N0-2GN3-5] is reverse complementary or partially reverse complementary with element stem2, and is a consecutive sequence between of 5 to 7 nucleotides;

[1096] wherein N0-2 is a consecutive sequence of 0 to 2, preferably of 0 to 1, more preferably of 1 N, wherein each N is independently from another selected from a nucleotide selected from A, U, T, G and C or a nucleotide analogue thereof;

[1097] wherein N3-5 is a consecutive sequence of 3 to 5, preferably of 4 to 5, more preferably of 4 N, wherein each N is independently from another selected from a nucleotide selected from A, U, T, G and C or a nucleotide analogue thereof, and

[1098] loop sequence [N0-4(U/T)N0-4] is located between elements stem1 and stem2, and is a consecutive sequence of 3 to 5 nucleotides, more preferably of 4 nucleotides;

[1099] wherein each N0-4 is independent from another a consecutive sequence of 0 to 4, preferably of 1 to 3, more preferably of 1 to 2 N, wherein each N is independently from another selected from a nucleotide selected from A, U, T, G and C or a nucleotide analogue thereof; and

[1100] wherein U/T represents uridine, or optionally thymidine;

[1101] stem2 [N3-5CN0-2] is reverse complementary or partially reverse complementary with element stem1, and is a consecutive sequence between of 5 to 7 nucleotides;

[1102] wherein N3-5 is a consecutive sequence of 3 to 5, preferably of 4 to 5, more preferably of 4 N, wherein each N is independently from another selected from a nucleotide selected from A, U, T, G and C or a nucleotide analogue thereof;

[1103] wherein N0-2 is a consecutive sequence of 0 to 2, preferably of 0 to 1, more preferably of 1 N, wherein each N is independently from another selected from a nucleotide selected from A, U, T, G and C or a nucleotide analogue thereof; and

[1104] wherein C is cytidine or an analogue thereof, and may be optionally replaced by a guanosine or an analogue thereof provided that its complementary nucleotide guanosine in stem1 is replaced by cytidine;

[1105] Item 23. The lipid nanoparticle according to item 21 or 22, wherein the at least one histone stem loop comprises a nucleic acid sequence according to SEQ ID NO: 224305 and/or most preferably an RNA sequence according to SEQ ID NO: 224306.

[1106] Item 24. The lipid nanoparticle according to any one of items 19 to 23, wherein the mRNA sequence comprises a poly(A) sequence, preferably comprising 10 to 200, 10 to 100, 40 to 80 or 50 to 70 adenosine nucleotides, and/or a poly(C) sequence, preferably comprising 10 to 200, 10 to 100, 20 to 70, 20 to 60 or 10 to 40 cytosine nucleotides.

[1107] Item 25. The lipid nanoparticle according to any one of items 1 to 24, wherein the mRNA sequence comprises, preferably in 5′ to 3′ direction, the following elements:

[1108] a) a 5′-CAP structure, preferably m7GpppN,

[1109] b) at least one coding region encoding at least one antigenic peptide or protein,

[1110] c) a poly(A) tail, preferably consisting of 10 to 200, 10 to 100, 40 to 80 or 50 to 70 adenosine nucleotides,

[1111] d) optionally a poly(C) tail, preferably consisting of 10 to 200, 10 to 100, 20 to 70, 20 to 60 or 10 to 40 cytosine nucleotides, and

[1112] e) optionally a histone stem-loop, preferably comprising the RNA sequence according to SEQ ID NO: 224306

[1113] Item 26. The lipid nanoparticle according to any one of items 1 to 25, wherein the mRNA sequence comprises a 3′-UTR element.

[1114] Item 27. The lipid nanoparticle according to item 26, wherein the at least one 3′-UTR element comprises or consists of a nucleic acid sequence which is derived from a 3′-UTR of a gene providing a stable mRNA or from a homolog, a fragment or a variant thereof.

[1115] Item 28. The lipid nanoparticle according to item 26 or 27, wherein the 3′-UTR element comprises a nucleic acid sequence derived from a 3′-UTR of an α-globin gene, preferably comprising the corresponding RNA sequence of the nucleic acid sequence according to SEQ ID NO: 224297, a homolog, a fragment, or a variant thereof.

[1116] Item 29. The lipid nanoparticle according to any one of items 26 to 28, wherein the at least one 3′-UTR element comprises a nucleic acid sequence, which is derived from the 3′-UTR of a vertebrate albumin gene or from a variant thereof, preferably from the 3′-UTR of a mammalian albumin gene or from a variant thereof, more preferably from the 3′-UTR of a human albumin gene or from a variant thereof, even more preferably from the 3′ UTR of the human albumin gene according to GenBank Accession number NM_000477.5, or from a fragment or variant thereof.

[1117] Item 30. The lipid nanoparticle according to any one of items 26 to 29, wherein the 3-′UTR element is derived from a nucleic acid sequence according to SEQ ID NO: 224301 or 224303, preferably from a corresponding RNA sequence, or a homolog, a fragment or a variant thereof.

[1118] Item 31. The lipid nanoparticle according to any one of items 1 to 30, wherein the mRNA sequence comprises, preferably in 5′ to 3′ direction, the following elements:

[1119] a) a 5′-CAP structure, preferably m7GpppN,

[1120] b) at least one coding region encoding at least one antigenic peptide or protein,

[1121] c) a 3′-UTR element comprising or consisting of a nucleic acid sequence which is derived from an alpha globin gene, preferably comprising the corresponding RNA sequence of the nucleic acid sequence according to SEQ ID NO. 224297, a homolog, a fragment or a variant thereof;

[1122] d) a poly(A) tail, preferably consisting of 10 to 200, 10 to 100, 40 to 80 or 50 to 70 adenosine nucleotides,

[1123] e) optionally a poly(C) tail, preferably consisting of 10 to 200, 10 to 100, 20 to 70, 20 to 60 or 10 to 40 cytosine nucleotides, and

[1124] f) optionally a histone stem-loop, preferably comprising the RNA sequence according to SEQ ID NO: 224306.

[1125] Item 32. The lipid nanoparticle according to any one of items 1 to 31, wherein the mRNA sequence comprises a 5′-UTR element.

[1126] Item 33. The lipid nanoparticle according to item 32, wherein the 5′-UTR element comprises or consists of a nucleic acid sequence which is derived from the 5′-UTR of a TOP gene preferably from a corresponding RNA sequence, a homolog, a fragment, or a variant thereof, preferably lacking the 5TOP motif.

[1127] Item 34. The lipid nanoparticle according to item 33, wherein the 5′-UTR element comprises or consists of a nucleic acid sequence which is derived from a 5′-UTR of a TOP gene encoding a ribosomal protein, preferably from a corresponding RNA sequence or from a homolog, a fragment or a variant thereof, preferably lacking the 5TOP motif.

[1128] Item 35. The lipid nanoparticle according to item 34, wherein the 5′-UTR element comprises or consists of a nucleic acid sequence which is derived from a 5′-UTR of a TOP gene encoding a ribosomal Large protein (RPL) or from a homolog, a fragment or variant thereof, preferably lacking the 5TOP motif and more preferably comprising or consisting of a corresponding RNA sequence of the nucleic acid sequence according to SEQ ID NO. 224287.

[1129] Item 36. The lipid nanoparticle according to item 35, wherein the 5′-UTR element which is derived from a 5′-UTR of a TOP gene comprises or consists of a corresponding RNA sequence of a nucleic acid sequence according to SEQ ID NO. 224287 or 224289.

[1130] Item 37. The lipid nanoparticle according to any one of items 1 to 36, wherein the mRNA sequence comprises, preferably in 5′ to 3′ direction, the following elements:

[1131] a) a 5′-CAP structure, preferably m7GpppN,

[1132] b) a 5′-UTR element which comprises or consists of a nucleic acid sequence which is derived from the 5′-UTR of a TOP gene, preferably comprising or consisting of the corresponding RNA sequence of a nucleic acid sequence according to SEQ ID NO. 224287 or 224289, a homolog, a fragment or a variant thereof;

[1133] c) at least one coding region encoding at least one antigenic peptide or protein;

[1134] d) a 3′-UTR element comprising or consisting of a nucleic acid sequence which is derived from an albumin gene, preferably comprising the corresponding RNA sequence of the nucleic acid sequence according to SEQ ID NO. 224303, a homolog, a fragment or a variant thereof;

[1135] e) a poly(A) tail, preferably consisting of 10 to 200, 10 to 100, 40 to 80 or 50 to 70 adenosine nucleotides,

[1136] f) optionally a poly(C) tail, preferably consisting of 10 to 200, 10 to 100, 20 to 70, 20 to 60 or 10 to 40 cytosine nucleotides, and

[1137] g) optionally a histone stem-loop, preferably comprising the RNA sequence according to SEQ ID NO: 224306.

[1138] Item 38. The lipid nanoparticle according to any one of items 1 to 37, wherein the antigenic peptide or protein is derived from pathogenic antigens, tumour antigens, allergenic antigens or autoimmune self-antigens or a fragment or variant thereof.

[1139] Item 39. The lipid nanoparticle according to item 38, wherein the pathogenic antigen is derived from an influenza or rabies virus.

[1140] Item 40. The lipid nanoparticle according item 39, wherein the antigenic peptide or protein is derived from hemagglutinin (HA), neuraminidase (NA), nucleoprotein (NP), matrix protein 1 (M1), matrix protein 2 (M2), non-structural protein 1 (NS1), non-structural protein 2 (NS2), nuclear export protein (NEP), polymerase acidic protein (PA), polymerase basic protein PB1, PB1-F2, or polymerase basic protein 2 (PB2) of an influenza virus or a fragment or variant thereof.

[1141] Item 41. The lipid nanoparticle according to items 40, wherein the antigenic peptide or protein is derived from hemagglutinin (HA) or neuraminidase (NA) of an influenza virus or a fragment or variant thereof.

[1142] Item 42. The lipid nanoparticle according to item 41, wherein the antigenic peptide or protein is at least one full-length protein of hemagglutinin (HA) and/or at least one full-length protein of neuraminidase (NA) of an influenza virus or a variant thereof.

[1143] Item 43. The lipid nanoparticle according to any one of items 39 to 41, wherein the influenza virus is selected from an influenza A, B or C virus.

[1144] Item 44. The lipid nanoparticle according to item 43, wherein the influenza A virus is selected from an influenza virus characterized by a hemagglutinin (HA) selected from the group consisting of H1, H2, H3, H4, H5, H6, H7, H8, H9, H10, H11, H12, H13, H14, H15, H16, H17 and H18.

[1145] Item 45. The lipid nanoparticle according to item 43 or 44, wherein the influenza A virus is selected from an influenza virus characterized by a neuraminidase (NA) selected from the group consisting of N1, N2, N3, N4, N5, N6, N7, N8, N9, N10, and N11.

[1146] Item 46. The lipid nanoparticle according to any one of items 43 to 45, wherein the influenza A virus is selected from the group consisting of H1N1, H1N2, H2N2, H3N1, H3N2, H3N8, H5N1, H5N2, H5N3, H5N8, H5N9, H7N1, H7N2, H7N3, H7N4, H7N7, H7N9, H9N2, and H10N7, preferably from H1N1, H3N2, H5N1.

[1147] Item 47. The lipid nanoparticle according to any one of items 39 to 46, wherein the mRNA sequence comprises at least one coding region encoding at least one antigenic peptide or protein derived from hemagglutinin (HA) of an influenza virus or a fragment or variant thereof and at least one antigenic peptide or protein derived from neuraminidase (NA) of an influenza virus or a fragment or variant thereof.

[1148] Item 48. The lipid nanoparticle according to any one of items 39 to 47, wherein the mRNA sequence comprises at least one coding region encoding at least one antigenic peptide or protein derived from hemagglutinin (HA) and/or at least one antigenic peptide or protein derived from neuraminidase (NA) of an influenza A virus selected from the group consisting of H1N1, H1N2, H2N2, H3N1, H3N2, H3N8, H5N1, H5N2, H5N3, H5N8, H5N9, H7N1, H7N2, H7N3, H7N4, H7N7, H7N9, H9N2, and H10N7, preferably from H1N1, H3N2, H5N1 or a fragment or variant thereof.

[1149] Item 49. The lipid nanoparticle according to any of items 39 to 48, wherein the mRNA sequence comprises at least one coding region encoding at least one antigenic peptide or protein derived from hemagglutinin (HA) of an influenza A virus according to SEQ ID NOs: 1-14031 or a fragment or variant thereof.

[1150] Item 50. The lipid nanoparticle according to any one of items 39 to 49, wherein the mRNA sequence comprises at least one RNA sequence selected from RNA sequences being identical or at least 50%, 60%, 70%, 80%, 85%, 86%, 87%, 88%, 89%, 90%, 91%, 92%, 93%, 94%, 95%, 96%, 97%, 98%, or 99% identical to the RNA sequences according to SEQ ID NOs. 32013-46043, 64025-78055, 96037-110067, 128049-142079, 160061-174091, 192073-206103 or a fragment or variant thereof.

[1151] Item 51. The lipid nanoparticle according to any one of items 39 to 50, wherein the mRNA sequence comprises at least one coding region encoding at least one antigenic peptide or protein derived from hemagglutinin (HA) of an influenza B virus according to SEQ ID NOs. 26398-28576 or a fragment or variant thereof.

[1152] Item 52. The lipid nanoparticle according to any of items 39 to 51, wherein the mRNA sequence comprises at least one RNA sequence selected from RNA sequences being identical or at least 50%, 60%, 70%, 80%, 85%, 86%, 87%, 88%, 89%, 90%, 91%, 92%, 93%, 94%, 95%, 96%, 97%, 98%, or 99% identical to the RNA sequences according to SEQ ID NOs. 58410-60588, 90422-92600, 122434-124612, 154446-156624, 186458-188636, 218470-220648 or a fragment or variant thereof.

[1153] Item 53. The lipid nanoparticle according to any one of items 39 to 52, wherein the mRNA sequence comprises at least one coding region encoding at least one antigenic peptide or protein derived from neuraminidase (NA) of an influenza A virus according to SEQ ID NOs. 14032-26397 or a fragment or variant thereof.

[1154] Item 54. The lipid nanoparticle according to any one of items 39 to 53, wherein the mRNA sequence comprises at least one RNA sequence selected from RNA sequences being identical or at least 50%, 60%, 70%, 80%, 85%, 86%, 87%, 88%, 89%, 90%, 91%, 92%, 93%, 94%, 95%, 96%, 97%, 98%, or 99% identical to the RNA sequences according to SEQ ID NOs. 46044-58409, 78056-90421, 110068-122433, 142080-154445, 174092-186457, 206104-218469 or a fragment or variant thereof.

[1155] Item 55. The lipid nanoparticle according to any one of items 39 to 54, wherein the mRNA sequence comprises at least one coding region encoding at least one antigenic peptide or protein derived from neuraminidase (NA) of an influenza B virus according to SEQ ID NOs. 28577-30504 or a fragment or variant thereof.

[1156] Item 56. The lipid nanoparticle according to any of items 39 to 55, wherein the mRNA sequence comprises at least one RNA sequence or a mixture of RNA sequences selected from RNA sequences being identical or at least 50%, 60%, 70%, 80%, 85%, 86%, 87%, 88%, 89%, 90%, 91%, 92%, 93%, 94%, 95%, 96%, 97%, 98%, or 99% identical to the RNA sequences according to SEQ ID NOs. 60589-62516, 92601-94528, 124613-126540, 156625-158552, 188637-190564, 220649-222576 or a fragment or variant thereof.

[1157] Item 57. The lipid nanoparticle according to any of items 39 to 56, wherein the mRNA sequence comprises at least one coding region encoding at least one antigenic peptide or protein derived from glycoprotein G (RAV-G, RAVBV-G or RABV-G), nucleoprotein N (RAV-N), phospoprotein P (RAV-P), matrix protein M (RAV-M) or RNA polymerase L (RAV-L) of a Rabies virus or a fragment, variant thereof.

[1158] Item 58. The lipid nanoparticle according to any of items 39 to 57, wherein the mRNA sequence comprises at least one coding region encoding at least one antigenic peptide or protein derived from glycoprotein G (RAV-G, RAVBV-G or RABV-G) of a Rabies virus according to SEQ ID NOs. 30505-32012 or a fragment or variant thereof.

[1159] Item 59. The lipid nanoparticle according to any of items 39 to 58, wherein the mRNA sequence comprises at least one RNA sequence selected from RNA sequences being identical or at least 50%, 60%, 70%, 80%, 85%, 86%, 87%, 88%, 89%, 90%, 91%, 92%, 93%, 94%, 95%, 96%, 97%, 98%, or 99% identical to the RNA sequences according to SEQ ID NOs. 62517-64024, 94529-96036, 126541-128048, 158553-160060, 190565-192072, 222577-224084 or a fragment or variant thereof.

[1160] Item 60. The lipid nanoparticle according to any one of items 1 to 59, wherein the mRNA compound comprises at least two mRNA sequences, wherein the at least two mRNA sequences encode two different antigenic peptides and/or proteins.

[1161] Item 61. The lipid nanoparticle according to any one of items 1 to 59, comprising at least two different mRNA compounds, each compound comprising a mRNA sequence which encodes at least one antigenic peptide or protein.

[1162] Item 62. The lipid nanoparticle according to any one of items 1 to 61, additionally comprising:

[1163] (iv) a neutral lipid; and/or

[1164] (v) a steroid or steroid analogue.

[1165] Item 63. The lipid nanoparticle according to item 62, wherein the neutral lipid is selected from the group comprising distearoylphosphatidylcholine (DSPC), dioleoylphosphatidylcholine (DOPC), dipalmitoylphosphatidylcholine (DPPC), dioleoylphosphatidylglycerol (DOPG), dipalmitoylphosphatidylglycerol (DPPG), dioleoyl-phosphatidylethanolamine (DOPE), palmitoyloleoylphosphatidylcholine (POPC), palmitoyloleoyl-phosphatidylethanolamine (POPE) and dioleoyl-phosphatidylethanolamine 4-(N-maleimidomethyl)-cyclohexane-lcarboxylate (DOPE-mal), dipalmitoyl phosphatidyl ethanolamine (DPPE), dimyristoylphosphoethanolamine (DMPE), distearoyl-phosphatidylethanolamine (DSPE), 16-O-monomethyl PE, 16-O-dimethyl PE, 18-1-trans PE, 1-stearioyl-2-oleoylphosphatidyethanol amine (SOPE), and 1,2-dielaidoyl-sn-glycero-3-phophoethanolamine (transDOPE).

[1166] Item 64. The lipid nanoparticle according to item 63 wherein the neutral lipid is 1,2-distearoyl-sn-glycero-3-phosphocholine (DSPC), and wherein the molar ratio of the cationic lipid to DSPC is optionally in the range from about 2:1 to 8:1.

[1167] Item 65. The lipid nanoparticle according to any one of items 62 to 64, wherein the steroid is cholesterol, and wherein the molar ratio of the cationic lipid to cholesterol is optionally in the range from about 2:1 to 1:1

[1168] Item 66. A method for the preparation of a lipid nanoparticle according to any one of items 5 to 67, comprising the steps of:

[1169] (i) providing

[1170] a) a cationic lipid

[1171] of formula (I)

[chemical structure]

[1172] as defined above or a pharmaceutically acceptable salt, tautomer, prodrug or stereoisomer thereof, and/or

[1173] of formula (II)

[chemical structure]

[1174] as defined above or a pharmaceutically acceptable salt, tautomer, prodrug or stereoisomer thereof, and/or

[1175] of formula III:

[chemical structure]

[1176] as defined above or a pharmaceutically acceptable salt, tautomer, prodrug or stereoisomer thereof; and/or

[1177] b) a PEG lipid with the formula (IV):

[chemical structure]

[1178] as defined above;

[1179] c) at least one mRNA compound comprising an mRNA sequence encoding at least one antigenic peptide or protein, wherein the mRNA compound optionally does not comprise a nucleoside modification, in particular not a base modification; and

[1180] d) optionally a steroid; and

[1181] e) optionally a neutral lipid;

[1182] (ii) solubilizing the cationic lipid and/or the PEG lipid and optionally the neutral lipid and/or the steroid or a steroid derivative in ethanol;

[1183] (iii) mixing the ethanolic lipid solution with an aqueous solution comprising the mRNA polynucleotide

[1184] (iv) removing the ethanol; and optionally

[1185] (v) separating or purifying the lipid nanoparticles.

[1186] Item 67. The method according to item 66, wherein in step (iv) the ethanol is removed by dialysis or diafiltration.

[1187] Item 68. The method according to item 66 or 67, wherein in step (v) the lipid nanoparticles are purified by filtration, preferably by filtration through a sterile filter.

[1188] Item 69. A pharmaceutical composition comprising at least one lipid nanoparticle according to any one of items 1 to 65.

[1189] Item 70. The pharmaceutical composition according to item 69, comprising at least a first and a second lipid nanoparticle according to any one of items 1 to 65, wherein the mRNA compound comprised by the second lipid nanoparticle is different from the mRNA compound comprised by the first lipid nanoparticle.

[1190] Item 71. The pharmaceutical composition according to item 69 or 70, additionally comprising a pharmaceutically acceptable adjuvant or excipient.

[1191] Item 72. A lipid nanoparticle according to any one of items 1 to 65 or a pharmaceutical composition according to any one of items 69 to 71 for use as a medicament.

[1192] Item 73. The lipid nanoparticle or the pharmaceutical composition for use according to item 72, wherein the medicament is for therapeutically or prophylactically raising an immune response of a subject in need thereof.

[1193] Item 74. The lipid nanoparticle or the pharmaceutical composition for use according to item 72 or 73, wherein the medicament is for prevention or treatment of cancer or tumour diseases, infectious diseases, allergies, or autoimmune diseases or disorders related thereto.

[1194] Item 75. The lipid nanoparticle or the pharmaceutical composition for use according to any one of items 72 to 74, wherein the medicament is a vaccine.

[1195] Item 76. The lipid nanoparticle or the pharmaceutical composition for use according to item 75, wherein the medicament is a tumor, influenza or rabies vaccine.

[1196] Item 77. The lipid nanoparticle or the pharmaceutical composition for use according to item 76, wherein the medicament is a rabies vaccine used in rabies treatment.

[1197] Item 78. The lipid nanoparticle or the pharmaceutical composition for use according to any one of items 72 to 77, wherein the subject is a vertebrate, preferably a mammal.

[1198] Item 79. The lipid nanoparticle or the pharmaceutical composition for use according to any one of items 72 to 78, wherein the medicament is for parenteral administration and wherein parenteral administration comprises injection.

[1199] Item 80. The lipid nanoparticle or the pharmaceutical composition for use according to any one of items 78 to 79, wherein the subject is a bird, preferably chicken, or a mammal, preferably selected from the group comprising goat, cattle, swine, dog, cat, donkey, monkey, ape, a rodent such as a mouse, hamster, rabbit and, particularly, human.

[1200] Item 81. A method for raising an immune response in a subject in need thereof, comprising administering to the subject a lipid nanoparticle according to any one of items 1 to 65 or a pharmaceutical composition according to any of the items 69 to 72.

[1201] Item 82. A method for prevention or treatment of cancer or tumour diseases, infectious diseases, allergies, or autoimmune diseases or disorders related thereto in a subject in need thereof, comprising administering to the subject a lipid nanoparticle according to any one of items 1 to 65 or a pharmaceutical composition according to any of the items 69 to 72.

### FIGURES

[1202] The figures shown in the following are merely illustrative and shall describe the present invention in a further way. These figures shall not be construed to limit the present invention thereto.

[1203] FIG. 1A-1B: show bioluminescence imaging results of mice after intraperitoneal Luciferin injection after 24h (FIG. 1A) and after 48h (FIG. 1B). LNP formulation of mRNA led to a significantly increased and dose-dependent protein expression after intramuscular application, compared to the same amount of unformulated mRNA.

[1204] FIGS. 2A-2G: show PpLuc expression measured 48h after i.m injection in organ lysates. Luciferase Relative Light Units (RLU) from individual organs were reported for each group (FIG. 2A=brain, FIG. 2B=heart, FIG. 2C=kidney, FIG. 2D=liver, FIG. 2E=lung, FIG. 2F=muscle, FIG. 2G=spleen).

[1205] FIGS. 3A-3B: show HI titers 21 days after prime vaccination with three different LNP-formulated HA-mRNA (FIG. 3A) and 14 days after boost vaccination (FIG. 3B). The dashed line indicates the conventionally defined protective HI titer of 1:40.

[1206] FIGS. 4A-4D: show results of ELISA assays 21 days after prime vaccination and 14 days after boost vaccination with three different LNP-formulated HA-mRNA and 14 days after boost vaccination (IgG1 subtypes day 21 post-prime are shown in FIG. 4A, IgG1 subtypes day 14 post-boost are shown in FIG. 4B, IgG2a subtypes day 21 post-prime are shown in FIG. 4C, IgG2a subtypes day 14 post-boost are shown in FIG. 4D).

[1207] FIGS. 5A-5C: show T cell assay results after induction of antigen-specific T cells using intracellular cytokine staining. FIG. 5A shows IFNγ/TNFα producing CD4 T cells, FIG. 5B shows IFNγ/TNFα producing CD8 T cells and FIG. 5C shows IFNγ/CD107+ producing CD8 T cells.

[1208] FIGS. 6A-6B: show HI titers 21 days after prime vaccination with three different LNP-formulated HA-mRNA (FIG. 6A) and 14 days after boost vaccination (FIG. 6B). The dashed line indicates the conventionally defined protective HI titer of 1:40.

[1209] FIGS. 7A-7D: show results of ELISA assays 21 days after prime vaccination and 14 days after boost vaccination with three different LNP-formulated HA-mRNA and 14 days after boost vaccination (IgG1 subtypes day 21 post-prime are shown in FIG. 7A, IgG1 subtypes day 14 post-boost are shown in FIG. 7B, IgG2a subtypes day 21 post-prime are shown in FIG. 7C, IgG2a subtypes day 14 post-boost are shown in FIG. 7D).

[1210] FIGS. 8A-8C: show T cell assay results after induction of antigen-specific T cells using intracellular cytokine staining. FIG. 8A shows IFNγ/TNFα producing CD4 T cells, FIG. 5B shows IFNγ/TNFα producing CD8 T cells and FIG. 8C shows IFNγ/CD107+ producing CD8 T cells.

[1211] FIGS. 9A-9B: show HI titers 21 days after prime vaccination with three different LNP-formulated HA-mRNA (FIG. 6A) and 14 days after boost vaccination (FIG. 6B) using only 1 μg LNP-formulated HA-mRNA. The dashed line indicates the conventionally defined protective HI titer of 1:40.

[1212] FIGS. 10A-10D: show results of ELISA assays 21 days after prime vaccination and 14 days after boost vaccination with three different LNP-formulated HA-mRNA and 14 days after boost vaccination (IgG1 subtypes day 21 post-prime are shown in FIG. 10A, IgG1 subtypes day 14 post-boost are shown in FIG. 10B, IgG2a subtypes day 21 post-prime are shown in FIG. 10C, IgG2a subtypes day 14 post-boost are shown in FIG. 10D).

[1213] FIG. 11: shows T cell immune responses measured by IFNγ production using Elispot.

[1214] FIG. 12: shows results of an antibody titer analysis after intramuscular vaccination of NHP with LNP-III-3-formulated HA-encoding mRNA.

[1215] FIG. 13: shows rabies virus neutralizing titers (VNTs) after intramuscular vaccination of NHPs with LNP-III-3-formulated RABV-G-encoding mRNA.

[1216] FIG. 14: shows HI-Titer analysis after vaccination with LNP-III-3-formulated HA-mRNA.

[1217] FIGS. 15A-15D: shows the results of a cytokine analysis after vaccination with LNP-III-3-formulated mRNA (FIG. 15A=IFNγ, FIG. 15B=IL-6, FIG. 15C=IL-8, FIG. 15D=TNF).

[1218] FIGS. 16A-16B: show rabies virus neutralizing titers (VNTs) after intramuscular vaccination of mice with LNP-III-3-formulated RABV-G-encoding mRNA (FIG. 16A=VNT day 21; FIG. 16B=VNT day 35).

[1219] FIGS. 17A-17C: show the results of a T cell assays of mice immunized twice with 5 pg, 1 μg and 0.5 pg LNP-formulated mRNA on day 35 (FIG. 17A shows IFNγ/TNFα producing CD4 T cells, FIG. 17B shows IFNγ/TNFα producing CD8 T cells and FIG. 17C shows IFNγ/CD107+ producing CD8 T cells). Negative DMSO control is indicated by a dashed line in the graphs.

[1220] FIGS. 18A-18D: show the results of a liver damage analysis, i.e. determination of AST levels on day 1 and 21 (FIGS. 18A-18B) and ALT levels on day 1 and 21 (FIGS. 18C-18D).

[1221] FIGS. 19A-19D: show the detection of an HA-specific immune response (B-cell immune response) by detecting IgG2a antibodies directed against the particular influenza virus, i.e. Influenza A/California/7/2009 (H1N1; FIG. 19A), Influenza A/Hong Kong/4801/2014 (H3N2; FIG. 19B), Influenza B/Brisbane/60/2008 (B; FIG. 19C) and Influenza A/Vietnam/1203/2004 (H5N1; FIG. 19D).

[1222] FIG. 20: shows exemplary hemagglutinin (HA) proteins of influenza A virus

[1223] (see section “Preferred sequences of the present invention”; Legend: First column: Protein or Nucleic Acid Accession No. (GenBank); second column (A): Protein Sequence wild type SEQ ID NO:; third column (B): Nucleotide Sequence wild type SEQ ID NO:; fourth column (C): Optimized Nucleotide Sequence SEQ ID NO:)

[1224] FIG. 21: shows exemplary hemagglutinin (HA) proteins of influenza B virus

[1225] (see section “Preferred sequences of the present invention”; Legend: First column: Protein or Nucleic Acid Accession No. (GenBank); second column (A): Protein Sequence wild type SEQ ID NO:; third column (B): Nucleotide Sequence wild type SEQ ID NO:; fourth column (C): Optimized Nucleotide Sequence SEQ ID NO:)

[1226] FIG. 22: shows exemplary neuraminidase (NA) proteins of influenza A virus

[1227] (see section “Preferred sequences of the present invention”; Legend: First column: Protein or Nucleic Acid Accession No. (GenBank); second column (A): Protein Sequence wild type SEQ ID NO:; third column (B): Nucleotide Sequence wild type SEQ ID NO:; fourth column (C): Optimized Nucleotide Sequence SEQ ID NO:)

[1228] FIG. 23: shows exemplary neuraminidase (NA) proteins of influenza B virus

[1229] (see section “Preferred sequences of the present invention”; Legend: First column: Protein or Nucleic Acid Accession No. (GenBank); second column (A): Protein Sequence wild type SEQ ID NO:; third column (B): Nucleotide Sequence wild type SEQ ID NO:; fourth column (C): Optimized Nucleotide Sequence SEQ ID NO:)

[1230] FIG. 24: shows exemplary glycoproteins of Rabies virus

[1231] (see section “Preferred sequences of the present invention”; Legend: First column: Protein or Nucleic Acid Accession No. (GenBank); second column (A): Protein Sequence wild type SEQ ID NO:; third column (B): Nucleotide Sequence wild type SEQ ID NO:; fourth column (C): Optimized Nucleotide Sequence SEQ ID NO:)

[1232] FIG. 25: shows the presence of total IgG1 and IgG2 antibodies specific for Influenza H1N1 (A/California/7/2009) of mice vaccinated with a combination of four mRNAs coding for different Influenza antigens (C-F) compared to controls injected with RiLa (A) or Influsplit (B). For each setting (A-F) three different time points are shown (d21, d35, and d49). Vaccination scheme, see Table A. A detailed description of the experiment is provided in Example 12.

[1233] FIG. 26: shows HI titers specific for influenza H1N1 (A/California/7/2009) of mice vaccinated with a combination of four mRNAs coding for different Influenza antigens (C-F) compared to controls injected with RiLa (A) or Influsplit (B). For each setting (A-F) three different time points are shown (d21, d35, and d49). Vaccination scheme, see Table A. A detailed description of the experiment is provided in Example 12.

[1234] FIG. 27: shows the presence of total IgG1 and IgG2 antibodies specific for Influenza H3N2 (A/HongKong/4801/2014) of mice vaccinated with a combination of four mRNAs coding for different Influenza antigens (C-F) compared to controls injected with RiLa (A) or Influsplit (B). For each setting (A-F) three different time points are shown (d21, d35, and d49). Vaccination scheme, see Table A. A detailed description of the experiment is provided in Example 12.

[1235] FIG. 28: shows HI titers specific for influenza H3N2 (A/HongKong/4801/2014) of mice vaccinated with a combination of four mRNAs coding for different Influenza antigens (C-F) compared to controls injected with RiLa (A) or Influsplit (B). For each setting (A-F) three different time points are shown (d21, d35, and d49). Vaccination scheme, see Table A. A detailed description of the experiment is provided in Example 12.

[1236] FIG. 29: shows the presence of total IgG1 and IgG2 antibodies specific for Influenza B (B/Brisbane/60/2008) of mice vaccinated with a combination of four mRNAs coding for different Influenza antigens (C-F) compared to controls injected with RiLa (A) or Influsplit (B). For each setting (A-F) three different time points are shown (d21, d35, and d49). Vaccination scheme, see Table A. A detailed description of the experiment is provided in Example 12.

[1237] FIG. 30: shows the presence of total IgG1 and IgG2 antibodies specific for Influenza B (B/Phuket/3073/2013) of mice vaccinated with a combination of four mRNAs coding for different Influenza antigens (C-F) compared to controls injected with RiLa (A) or Influsplit (B). For each setting (A-F) three different time points are shown (d21, d35, and d49). Vaccination scheme, see Table A. A detailed description of the experiment is provided in Example 12.

[1238] FIG. 31: shows that vaccination of mice with a combination of four mRNAs coding for different Influenza antigens (C-F) induced CD4+ T-cell responses against H1N1 (A/California/7/2009), H3N2 (A/HongKong/4801/2014), influenza B (B/Brisbane/60/2008), influenza B (B/Phuket/3073/2013) (1-4 respectively). As a control, cells were stimulated with buffer (5). As further controls, mice were injected Rila (A) or Influsplit (B). Vaccination scheme, see Table A. A detailed description of the experiment is provided in Example 12.

[1239] FIG. 32: shows that vaccination of mice with a combination of four mRNAs coding for different Influenza antigens (C-F) induced CD8+ T-cell responses against H1N1 (A/California/7/2009) (1). As a control, cells were stimulated with buffer (5). As further controls, mice were injected Rila (A) or Influsplit (B). Vaccination scheme, see Table A. A detailed description of the experiment is provided in Example 12.

[1240] FIG. 33: shows the presence of total IgG1 and IgG2 antibodies specific for Influenza H1N1 (A/California/7/2009) of mice vaccinated with a combination of four mRNAs coding for different Influenza antigens (C-E) compared to controls injected with RiLa (A) or Fluarix (B). For each setting (A-E), three different time points are shown (d21, d35, and d49). Vaccination scheme, see Table B. A detailed description of the experiment is provided in Example 13.

[1241] FIG. 34: shows HI titers specific for influenza H1N1 (A/California/7/2009) of mice vaccinated with a combination of four mRNAs coding for different Influenza antigens (C-E) compared to controls injected with RiLa (A) or Fluarix (B). For each setting (A-E), three different time points are shown (d21, d35, and d49). Vaccination scheme, see Table B. A detailed description of the experiment is provided in Example 13.

[1242] FIG. 35: shows the presence of total IgG1 and IgG2 antibodies specific for Influenza H3N2 (A/HongKong/4801/2014) of mice vaccinated with a combination of four mRNAs coding for different Influenza antigens (C-E) compared to controls injected with RiLa (A) or Fluarix (B). For each setting (A-E) three different time points are shown (d21, d35, and d49). Vaccination scheme, see Table B. A detailed description of the experiment is provided in Example 13.

[1243] FIG. 36: shows HI titers specific for influenza H3N2 (A/HongKong/4801/2014) of mice vaccinated with a combination of four mRNAs coding for different Influenza antigens (C-E) compared to controls injected with RiLa (A) or Fluarix (B). For each vaccination setting (A-E) three different time points are shown (d21, d35, and d49). Vaccination scheme, see Table B. A detailed description of the experiment is provided in Example 13.

[1244] FIG. 37: shows the presence of total IgG1 and IgG2 antibodies specific for Influenza B (B/Brisbane/60/2008) of mice vaccinated with a combination of four mRNAs coding for different Influenza antigens (C-E) compared to controls injected with RiLa (A) or Fluarix (B). For each setting (A-E) three different time points are shown (d21, d35, and d49). Vaccination scheme, see Table B. A detailed description of the experiment is provided in Example 13.

[1245] FIG. 38: shows the presence of total IgG1 and IgG2 antibodies specific for Influenza H5N1 (A/Vietnam/1203/2004) of mice vaccinated with a combination of four mRNAs coding for different Influenza antigens (C-E) compared to controls injected with RiLa (A) or Fluarix (B). For each setting (A-E) three different time points are shown (d21, d35, and d49). Vaccination scheme, see Table B. A detailed description of the experiment is provided in Example 13.

[1246] FIG. 39: shows that vaccination of mice with a combination of four mRNAs coding for different Influenza antigens (C-E) induced CD4+ T-cell responses against H1N1 (A/California/7/2009), H3N2 (A/HongKong/4801/2014), influenza B (B/Brisbane/60/2008), H5N1 (A/Vietnam/1203/2004) (1-4 respectively). As a control, cells were stimulated with buffer (5). As further controls, mice were injected Rila (A) or Influsplit (B). Vaccination scheme, see Table B. A detailed description of the experiment is provided in Example 13.

[1247] FIG. 40: shows that vaccination of mice with a combination of four mRNAs coding for different Influenza antigens (C-F) induced CD8+ T-cell responses against H1N1 (A/California/7/2009), H5N1 (A/Vietnam/1203/2004) (1 and 2). As a control, cells were stimulated with buffer (3). As further controls, mice were injected Rila (A) or Influsplit (B). Vaccination scheme, see Table B. A detailed description of the experiment is provided in Example 13.

[1248] FIG. 41: shows the presence of binding influenza N1 (A/California/7/2009) neuraminidase specific antibodies in and ELLA titers (50% inhibition titers) in serum samples of mice that were vaccinated with LNP formulated mRNA coding for Influenza N1 (A/California/7/2009) neuraminidase (C and D) compared to a control injected with RiLa (A) or Influsplit® (B). Vaccination scheme, see Table C. A detailed description of the experiment is provided in Example 14.

[1249] FIG. 42: shows that vaccination of mice with mRNAs coding for Influenza N1 (A/California/7/2009) neuraminidase induced CD4+ T-cell responses against neuraminidase (C and D). As controls, mice were injected with RiLa (A) or Influsplit® (B). Vaccination scheme, see Table C. A detailed description of the experiment is provided in Example 14.

[1250] FIG. 43: shows that vaccination of mice with mRNAs coding for Influenza N1 (A/California/7/2009) neuraminidase induced CD8+ T-cell responses against Neuraminidase (C and D). As controls, mice were injected with and RiLa (A) or Influsplit® (B). Vaccination scheme, see Table C. A detailed description of the experiment is provided in Example 14.

[1251] FIG. 44: shows that LNP formulated mRNAs coding for RAVBV-G induces a pro-inflammatory environment. Cytokine levels in muscle for four different timepoints (4h, 14h, 24h, and 96h) are shown (TNF, IL6). Arrow indicates the data series for mice vaccinated with LNP-formulated mRNA. Values represent mean of 6 samples with SD. A detailed description of the experiment is provided in Example 15.

[1252] FIG. 45: shows that LNP formulated mRNAs coding for RAVBV-G induces a pro-inflammatory environment. Cytokine levels in dLNs for four different timepoints (4h, 14h, 24h, and 96h) are shown (TNF, IL6). Arrow indicates the data series for mice vaccinated with LNP-formulated mRNA. Values represent mean of 6 samples with SD. A detailed description of the experiment is provided in Example 15.

[1253] FIG. 46: shows no systemic release of TNF following i.m. vaccination with LNP formulated mRNAs coding for RAVBV-G. Cytokine levels in serum for four different timepoints (4h, 14h, 24h, and 96h) are shown (TNF, IL6). Arrow indicates the data series for mice vaccinated with LNP-formulated mRNA. Values represent mean of 6 samples with SD. A detailed description of the experiment is provided in Example 15.

[1254] FIG. 47: shows that LNP formulated mRNAs coding for RAVBV-G induces a pro-inflammatory environment. Chemokine levels in muscle for four different timepoints (4h, 14h, 24h, and 96h) are shown (MIP-1beta, CXCL9). Arrow indicates the data series for mice vaccinated with LNP-formulated mRNA. Values represent mean of 6 samples with SD. A detailed description of the experiment is provided in Example 15.

[1255] FIG. 48: shows that LNP formulated mRNAs coding for RAVBV-G induces a pro-inflammatory environment. Chemokine levels in dLNs for four different timepoints (4h, 14h, 24h, and 96h) are shown (MIP-1beta, CXCL9). Arrow indicates the data series for mice vaccinated with LNP-formulated mRNA. Values represent mean of 6 samples with SD. A detailed description of the experiment is provided in Example 15.

[1256] FIG. 49: shows that LNP formulated mRNAs coding for RAVBV-G induces a pro-inflammatory environment. Chemokine levels in serum for four different timepoints (4h, 14h, 24h, and 96h) are shown (MIP-1beta, CXCL9). Arrow indicates the data series for mice vaccinated with LNP-formulated mRNA. Values represent mean of 6 samples with SD. A detailed description of the experiment is provided in Example 15.

[1257] FIG. 50A-50B: shows that LNP formulated F*mRNAs induces an increase in number and activation of both innate and adaptive immune cells within the dLNs. In FIG. 50A, number of CD4+ T cells, NK cells, CD11b+Gr1+ cells (monocytes and granolocytes) and total cells in dLNs for three different timepoints (4h, 24h, and 48h) are shown. In FIG. 50B frequencies of CD4+ T cells, CD8+ T cells, B cells and NK cells expressing the activation marker CD69 for three different timepoints (4h, 24h, and 48h) are shown. Arrow indicates the data series for mice injected with LNP-formulated mRNA. Values represent mean of 6 samples with SD. A detailed description of the experiment is provided in Example 15.

[1258] FIG. 51: shows that vaccination of monkeys with LNP formulated mRNAs coding for RABV-G induces rabies virus neutralizing titers (VNTs) after single i.m. vaccination. Two mRNA concentrations are shown (1 pg and 10 pg) before vaccination (“pre dose”) and after the first vaccination (“post prime”). Dashed lines indicate the conventionally defined protective titers for VNTs. A detailed description of the experiment is provided in Example 16.

[1259] FIG. 52: shows the kinetic of VNTs after vaccination (prime vaccination at day 0, boost vaccination at day 28) of monkeys with LNP formulated mRNAs coding for RABV-G. Dashed lines indicate the conventionally defined protective titers for VNTs. A detailed description of the experiment is provided in Example 16.

[1260] FIG. 53: Two mRNA concentrations are shown (1 pg and 10 pg) before boost (“pre recall”) and after the boost vaccination (“post recall”). Dashed lines indicate the conventionally defined protective titers for VNTs. A detailed description of the experiment is provided in Example 16.

[1261] FIG. 54: LNP formulated RAVBV-G mRNA vaccines induce stronger functional immune responses against rabies than a licensed vaccine in NHPs. Rabies VNTs in the sera of NHPs (n=2 male, 2 female per group) vaccinated with LNP formulated RABV-G mRNA at days 0 and 28, or with the inactivated rabies virus vaccine Rabipur® at days 0 and 28 (one boost). Dashed lines indicate the conventionally defined protective titers for VNTs. A detailed description of the experiment is provided in Example 16.

[1262] FIG. 55: LNP formulated RAVBV-G mRNA vaccines induce RABV-G specific CD4+ T cells in monkeys. Shown are frequencies of RABV-G-specific IFNγ/IL-2+CD4+ cells in the blood 7 days after the last vaccination (day 35). PBMCs were either stimulated with an overlapping peptide library covering the RABV-G protein (RABV-G peptides) or unstimulated (media) and analyzed by ICS. A detailed description of the experiment is provided in Example 16.

[1263] FIG. 56: LNP formulated RAVBV-G mRNA vaccines induce RABV-G specific CD8+ T cells in monkeys. Shown are frequencies of RABV-G-specific IFNγ+/GrzB+CD8 T cells in the blood 7 days after the last vaccination (day 35). PBMCs were either stimulated with an overlapping peptide library covering the RABV-G protein (RABV-G peptides) or unstimulated (media) and analyzed by ICS. A detailed description of the experiment is provided in Example 16.

[1264] FIG. 57: shows that vaccination of monkeys with LNP formulated mRNAs coding for influenza HA antigens of the H1N1 or H3N2 strains induces functional antibodies after single i.m. vaccination. HI titers before vaccination (“pre dose”) and after the first vaccination (“post prime”) are shown. Dashed lines indicate the conventionally defined protective titers for HI. A detailed description of the experiment is provided in Example 17.

[1265] FIG. 58: shows the kinetic of HI titers (mean with SEM) after vaccination (prime vaccination at day 0, boost vaccination at day 28) of monkeys with LNP formulated mRNAs coding for H1N1 HA. Timecourse of HI titers is shown for up to 544 days. Dashed lines indicate the conventionally defined protective titers for HI. Triangles: Datapoints for monkeys vaccinated with 10 pg; Rectangles: Datapoints for monkeys vaccinated with 1 μg. A detailed description of the experiment is provided in Example 17.

[1266] FIG. 59: LNP formulated H3N2-HA mRNA vaccine induced stronger functional immune responses against influenza than a licensed vaccine in NHPs. Shown are H3N2-HI titers in sera of NHPs vaccinated at days 0 and 28 with LNP formulated H3N2-HA mRNA or the adjuvanted vaccine Fluad®. Dashed lines indicate the conventionally defined protective titers for HI. A detailed description of the experiment is provided in Example 17.

[1267] FIG. 60: LNP formulated H3N2-HA mRNA vaccines induce H3N2 specific CD4+ T cells in monkeys. PBMCs were either stimulated with an overlapping peptide library covering the H3N2-HA protein (H3N2-HA peptides) or unstimulated (media) and analyzed by ICS. FIG. 60A: Shown are frequencies of H3N2-HA-specific IFNγ+/IL-2+CD4+ cells in the blood 7 days after the last vaccination (day 35). FIG. 60B: Shown are frequencies of H3N2-HA-specific TNFα+/IL-2+CD4+ cells in the blood 7 days after the last vaccination (day 35). A detailed description of the experiment is provided in Example 17.

[1268] FIGS. 61A-61B: show rabies virus neutralizing titers (VNTs) after intramuscular vaccination of mice with LNP-III-3-formulated RABV-G-encoding mRNA (FIG. 60A=VNT day 21; FIG. 60B=VNT day 35). A detailed description of the experiment is provided in Example 7.

[1269] FIGS. 62A-62B: show rabies virus neutralizing titers (VNTs) after intramuscular vaccination of mice with LNP-III-3-formulated RABV-G-encoding mRNA (FIG. 60A=VNT day 21; FIG. 60B=VNT day 35) applying LNPs which were stored at 50 C for three month. A detailed description of the experiment is provided in Example 20.

[1270] FIGS. 63A-63D: shows that vaccination of ferrets with LNP formulated tetravalent mRNA vaccine induces functional antibodies. Data shown for indicated groups (group A-D), measured on day 0, day 21, day 35 and day 49 respectively. FIG. 63A: HI titers for HA A/California/07/09; FIG. 63A: HI titers for HA A/HongKong/4801/2014; FIG. 63C: HI titers for HA B/Brisbane/60/2008; FIG. 63D: MN titers for HA B/Phuket/3073/2013. Positive control (Group D, Fluad) is not shown as Fluad does not contain HA B/Phuket. A detailed description of the experiment is provided in Example 22.

[1271] FIG. 64: shows that vaccination of mice with LNP formulated trivalent NA mRNA vaccine induces binding influenza NA antibodies. ELLA (50% inhibition titer) are shown. FIG. 64A shows ELLA titers for influenza N1 A/California/7/2009 for indicated groups; FIG. 64B shows shows ELLA titers for influenza N1 A/HongKong/4801/2014 for indicated groups; FIG. 64C shows ELLA titers for NA B/Brisbane/60/2008 for indicated groups. 1=mRNA vaccine, 2=control; 3=buffer control. A detailed description of the experiment is provided in Example 24.

[1272] FIG. 65: shows the presence of total IgG1 and IgG2a antibodies specific for HA of H1N1 A/California/7/2009 of mice vaccinated with LNP formulated septavalent HA/NA mRNA vaccine. For each setting (group 1-6) three different time points are shown (d21, d35, and d49) (ELISA). A detailed description of the experiment is provided in Example 25.

[1273] FIG. 66: shows the presence of total IgG1 and IgG2a antibodies specific for HA of H3N2 A/Hong Kong/4801/2014 of mice vaccinated with LNP formulated septavalent HA/NA mRNA vaccine. For each setting (group 1-6) three different time points are shown (d21, d35, and d49) (ELISA). A detailed description of the experiment is provided in Example 25.

[1274] FIG. 67: shows the presence of total IgG1 and IgG2a antibodies specific for HA of B/Brisbane/60/2008 of mice vaccinated with septavalent HA/NA mRNA vaccine (ELISA). For each setting (group 1-6) three different time points are shown (d21, d35, and d49). A detailed description of the experiment is provided in Example 25.

[1275] FIG. 68: shows the presence of total IgG1 and IgG2a antibodies for HA of B/Phuket/3073/2013 of mice vaccinated with LNP formulated septavalent HA/NA mRNA vaccine (ELISA). For each setting (group 1-group 6) three different time points are shown (d21, d35, and d49). A detailed description of the experiment is provided in Example 25.

[1276] FIG. 69: shows the presence of specific antibodies for NA of H1N1A/California/7/2009 of mice vaccinated with LNP formulated septavalent HA/NA mRNA vaccine (ELISA). For each setting (group 1-group 6) three different time points are shown (d21, d35, and d49). FIG. 69A: specific antibodies for NA of H1N1A/California/7/2009; FIG. 69B: specific antibodies for NA of H3N2 A/Hong Kong/4801/2014; FIG. 69C: specific antibodies for NA of B/Brisbane/60/2008. A detailed description of the experiment is provided in Example 25.

[1277] FIG. 70: shows that vaccination of mice with LNP formulated septavalent HA/NA mRNA vaccine induces functional antibodies. Data shown for indicated groups (group 1-group 6), measured on day 49. FIG. 63A: HI titers for HA A/California/07/09; FIG. 63A: HI titers for HA A/HongKong/4801/2014. A detailed description of the experiment is provided in Example 25.

[1278] FIG. 71: shows that LNP formulated GP (Ebola) mRNA vaccine induce strong IgG1 and IgG2a antibody responses in mice. A detailed description of the experiment is provided in Example 26.

[1279] FIG. 72: shows that LNP formulated mRNA vaccine induce strong and durable HI-titers when administered subcutaneously. A detailed description of the experiment is provided in Example 27.

[1280] FIG. 73: shows a comparison of Ova-specific CD8 positive T cells in the blood on day 7 after vaccination with 1 pg LNP formulated Ova mRNA (Component A) and 32 pg protamine formulated Ova mRNA (Component B). 1 pg LNP formulated Ova mRNA (Component A) induces higher levels of circulating antigen-specific CD8 positive T cells after intradermal application. A detailed description of the experiment is provided in Example 28.

[1281] FIG. 74: shows a comparison of Ova-specific CD8 positive T cells in the blood on day 21 after boosting vaccinated animals with 1 μg of LNP-formulated OVA mRNA (Component A) and 32 pg protamine formulated Ova mRNA (Component B). 1 μg of LNP-formulated OVA mRNA (Component A) induces boostable levels of circulating antigen-specific CD8 positive T cells after intradermal application. A detailed description of the experiment is provided in Example 28.

[1282] FIG. 75: shows a comparison of multifunctional Ova-specific CD8 positive T cells in the blood after vaccination with 1 μg LNP formulated Ova mRNA (Component A) and 32 pg protamine formulated Ova mRNA (Component B). 1 μg LNP formulated Ova mRNA vaccine (Component A) induces high levels of multifunctional CD8 positive T cells after intradermal application. A detailed description of the experiment is provided in Example 28.

[1283] FIG. 76: shows a comparison of OVA-specific IgG2c titers after vaccination with 1 μg LNP formulated OvamRNA (Component A) and 32 pg protamine formulated Ova-mRNA (Component B). 1 μg LNP formulated OvamRNA vaccine (Component A) leads to increased OVA-specific IgG2c titers after intradermal application. A detailed description of the experiment is provided in Example 28.

[1284] FIG. 77: shows a comparison of median tumor growth of tumor-bearing mice after vaccination with 1 μg LNP formulated Ova mRNA (Component A) and an irrelevant LNP formulated PpLuc mRNA (Component B). 1 μg LNP formulated Ova mRNA (Component A) strongly decreased the median tumor volume compared to the other treatment with an irrelevant mRNA (Component B). A detailed description of the experiment is provided in Example 29.

[1285] FIG. 78: shows a comparison of the overall survival of tumor challenged mice after vaccination with 1 μg LNP formulated Ova mRNA (Component A) and an irrelevant LNP formulated PpLuc mRNA (Component B). 1 μg LNP formulated Ova mRNA (Component A) strongly increased the survival of tumor challenged mice compared to the other treatments (Component B and Buffer). A detailed description of the experiment is provided in Example 29.

[1286] FIG. 79: shows a comparison of median tumor growth of tumor-bearing mice after vaccination with 1 μg LNP formulated Trp2 mRNA (Component A) and an irrelevant LNP formulated PpLuc mRNA (Component B) in combination with two checkpoint inhibitors anti-PD1 and anti-CTLA4. 1 μg LNP formulated Trp2 mRNA (Component A) strongly decreased the median tumor volume compared to the other treatment with an irrelevant mRNA (Component B) in combination with checkpoint inhibitors or a control antibody. A detailed description of the experiment is provided in Example 30.

[1287] FIG. 80: shows a comparison of the survival of tumor challenged mice after vaccination with 1 μg LNP formulated Trp2 mRNA (Component A) and an irrelevant LNP formulated PpLuc mRNA (Component B) in combination with two checkpoint inhibitors anti-PD1 and anti-CTLA4. 1 μg LNP formulated Trp2 mRNA (Component A) increased the survival of tumor challenged mice compared to the other treatments (Component B in combination with checkpoint inhibitors or a control antibody). A detailed description of the experiment is provided in Example 30.

### EXAMPLES

[1288] The invention is further described in detail by reference to the following experimental examples. These examples are provided for purposes of illustration only, and are not intended to be limiting unless otherwise specified. Thus, the invention should in no way be construed as being limited to the following examples, but rather, should be construed to encompass any and all variations which become evident as a result of the teaching provided herein.

[1289] Without further description, it is believed that one of ordinary skill in the art can, using the preceding description and the following illustrative examples, make and utilize the present invention and practice the claimed methods. The following working examples therefore, specifically point out the preferred embodiments of the present invention, and are not to be construed as limiting in any way the remainder of the disclosure.

### Example 1: Preparation of mRNA Constructs

[1290] For the present examples, DNA sequences encoding different proteins were prepared and used for subsequent RNA in vitro transcription reactions. The DNA sequences encoding the proteins were prepared by modifying the wild type encoding DNA sequence by introducing a GC-optimized sequence for stabilization. Sequences were introduced into a derived pUC19 vector. For further stabilization and/or increased translation UTR elements were introduced 5′- and/or 3′ of the coding region.

[1291] The following mRNA constructs were used in the examples:

[1292] Photinus pyralis Luciferase:
[1293] 5′-TOP-UTR derived from 32L4 ribosomal protein-GC-enriched coding sequence encoding PpLuc-3′-UTR derived from albumin gene—a stretch of 64 adenosines—a stretch of 30 cytosines—a histone stem-loop sequence (SEQ ID NO: 224286).

[1294] Influenza Hemagglutinin (HA):
[1295] 5′-TOP-UTR derived from 32L4 ribosomal protein—GC-enriched coding sequence encoding HA of Influenza A/California/07/2009 (H1N1)—3′-UTR derived from albumin gene—a stretch of 64 adenosines—a stretch of 30 cytosines—a histone stem-loop sequence (SEQ ID NO: 224118)
[1296] GC-enriched coding sequence encoding HA of Influenza A/California/07/2009 (H1N1)—3′-UTR derived from human alpha globin (muag)—a stretch of 64 adenosines—a stretch of 30 cytosines—a histone stem-loop sequence (SEQ ID NO: 224117)
[1297] GC-enriched coding sequence encoding HA of Influenza A/Hong Kong/4801/2014 (H3N2)—3′-UTR derived from human alpha globin (muag)—a stretch of 64 adenosines—a stretch of 30 cytosines—a histone stem-loop sequence (SEQ ID NO: 224181)
[1298] GC-enriched coding sequence encoding HA of Influenza B/Brisbane/60/2008-3′-UTR derived from human alpha globin (muag)—a stretch of 64 adenosines—a stretch of 30 cytosines—a histone stem-loop sequence (SEQ ID NO: 224236).
[1299] GC-enriched coding sequence encoding HA of Influenza A/Vietnam/1203/2004 (H5N1)—3′-UTR derived from human alpha globin (muag)—a stretch of 64 adenosines—a stretch of 30 cytosines—a histone stem-loop sequence (SEQ ID NO: 224200).
[1300] GC-enriched coding sequence encoding HA of Influenza A/Netherlands/602/2009 (H1N1)—3′-UTR derived from human alpha globin (muag)—a stretch of 64 adenosines—a stretch of 30 cytosines—a histone stem-loop sequence (SEQ ID NO: 224166).
[1301] GC-enriched coding sequence encoding HA of Influenza B/Brisbane/60/2008-3′-UTR derived from human alpha globin (muag)—a stretch of 64 adenosines—a stretch of 30 cytosines—a histone stem-loop sequence (SEQ ID NO: 224236).
[1302] GC-enriched coding sequence encoding HA of Influenza B/Phuket/3073/2013-3′-UTR derived from human alpha globin (muag)—a stretch of 64 adenosines—a stretch of 30 cytosines—a histone stem-loop sequence (SEQ ID NO: 224246).

[1303] Influenza Neuraminidase (NA):
[1304] GC-enriched coding sequence encoding NA of Influenza A/California/07/2009 (H1N1)—3′-UTR derived from human alpha globin (muag)—a stretch of 64 adenosines—a stretch of 30 cytosines—a histone stem-loop sequence (SEQ ID NO: 224318).
[1305] GC-enriched coding sequence encoding NA of Influenza A/Hong Kong/4801/2014 (H3N2)—3′-UTR derived from human alpha globin (muag)—a stretch of 64 adenosines—a stretch of 30 cytosines—a histone stem-loop sequence (SEQ ID NO: 224336).
[1306] GC-enriched coding sequence encoding NA of Influenza B/Brisbane/60/2008-3′-UTR derived from human alpha globin (muag)—a stretch of 64 adenosines—a stretch of 30 cytosines—a histone stem-loop sequence (SEQ ID NO: 224348).

[1307] Rabies:
[1308] RABV-G A: GC-enriched coding sequence encoding glycoprotein (RABV-G) of the Pasteur strain (GenBank accession number: AAA47218.1)—3′-UTR derived from human alpha globin (muag)—a stretch of 64 adenosines—a stretch of 30 cytosines—a histone stem-loop sequence (SEQ ID NO: 224276)
[1309] RABV-G B: 5′-TOP-UTR derived from 32L4 ribosomal protein—GC-enriched coding sequence encoding glycoprotein (RABV-G) of the Pasteur strain (GenBank accession number: AAA47218.1)—3′-UTR derived from albumin gene—a stretch of 64 adenosines—a stretch of 30 cytosines—a histone stem-loop sequence (SEQ ID NO: 224280).

[1310] Ebola:
[1311] GP of Ebola virus: GC-enriched coding sequence encoding glycoprotein of ZEBOV Sierra Leone 2014; 5′-TOP-UTR derived from 32L4 ribosomal protein—3′-UTR derived from albumin gene (SEQ ID NO: 224362).

[1312] The obtained plasmid DNA constructs were transformed and propagated in bacteria (Escherichia coli) using common protocols known in the art. Subsequently, the DNA plasmids are enzymatically linearized using EcoRI and transcribed in vitro using DNA dependent T7 RNA polymerase in vitro run-off transcription in the presence of a nucleotide mixture and CAP analog (m7GpppG) under suitable buffer conditions. The obtained mRNAs were purified using PureMessenger® (CureVac, Tübingen, Germany; WO2008/077592 A1) and were used for further experimentation. NHP were administered with RABV-G A as protamine formulation and RABV-G B as LNP formulation. Compositions comprising more than one mRNA encoding different Influenza proteins/antigens may also be produced according to procedures as disclosed in the PCT application PCT/EP2016/082487.

[1313] Example LNP Formulation

[1314] Lipid nanoparticles, cationic lipids and polymer conjugated lipids (PEG-lipid) were prepared and tested according to the general procedures described in PCT Pub. Nos. WO 2015/199952, WO 2017/004143 and WO 2017/075531, the full disclosures of which are incorporated herein by reference. Lipid nanoparticle (LNP)-formulated mRNA was prepared using an ionizable amino lipid (cationic lipid), phospholipid, cholesterol and a PEGylated lipid. LNPs were prepared as follows. Cationic lipid, DSPC, cholesterol and PEG-lipid were solubilized in ethanol at a molar ratio of approximately 50:10:38.5:1.5 or 47.5:10:40.8:1.7. LNPs for the Examples included, for example, cationic lipid compound III-3 and the foregoing components. Lipid nanoparticles (LNP) comprising compound III-3 were prepared at a ratio of mRNA to Total Lipid of 0.03-0.04 w/w. Briefly, the mRNA was diluted to 0.05 to 0.2 mg/mL in 10 to 50 mM citrate buffer, pH 4. Syringe pumps were used to mix the ethanolic lipid solution with the mRNA aqueous solution at a ratio of about 1:5 to 1:3 (vol/vol) with total flow rates above 15 ml/min. The ethanol was then removed and the external buffer replaced with PBS by dialysis. Finally, the lipid nanoparticles were filtered through a 0.2 μm pore sterile filter. Lipid nanoparticle particle diameter size was 60-90 nm as determined by quasi-elastic light scattering using a Malvern Zetasizer Nano (Malvern, UK). For other cationic lipid compounds mentioned in the present specification, the formulation process is similar.

### Example 2: Ppluc Expression after i.m. Application of LNP-Formulated mRNA

[1315] Expression of luciferase (Ppluc) in BALB/c mice was determined 24h and 48h after intramuscular injection (i.m.) into the M. tibialis.

[1316] Therefore, 0.1 pg, 1 μg and 10 pg mRNA coding for Ppluc were LNP-formulated to yield the respective LNP-formulation according to Table I. As a control served unformulated Ppluc mRNA (10 pg and 1 μg). At time point Oh, four mice per group were transfected with Ppluc mRNA in accordance with the scheme shown in table I.

TABLE I
(Example 2): Transfection scheme

| | | mRNA | | |
|---|---|---|---|---|
| | | dose | Route | Mice |
| Group | Treatment | [μg] | (Volume) | # |
| A | LNP-II-9-formulated Ppluc mRNA | 10 | i.m. (25 μl) | 4 |
| B | LNP-II-9-formulated Ppluc mRNA | 1 | i.m. (25 μl) | 4 |
| C | LNP-II-9-formulated Ppluc mRNA | 0.1 | i.m. (25 μl) | 4 |
| D | LNP-II-10-formulated Ppluc mRNA | 10 | i.m. (25 μl) | 4 |
| E | LNP-II-10-formulated Ppluc mRNA | 1 | i.m. (25 μl) | 4 |
| F | LNP-II-10-formulated Ppluc mRNA | 0.1 | i.m. (25 μl) | 4 |
| G | LNP-III-3-formulated Ppluc mRNA | 10 | i.m. (25 μl) | 4 |
| H | LNP-III-3-formulated Ppluc mRNA | 1 | i.m. (25 μl) | 4 |
| I | LNP-III-3-formulated Ppluc mRNA | 0.1 | i.m. (25 μl) | 4 |
| J | unformulated Ppluc mRNA | 10 | i.m. (25 μl) | 4 |
| K | unformulated Ppluc mRNA | 1 | i.m. (25 μl) | 5 |

[1317] After 24h and 48h, in vivo bioluminescence imaging of mice was performed with an IVIS Lumina II Imaging System 10 minutes after intraperitoneal Luciferin injection, using an exposure time of 60s. Bioluminescence values were quantified by measuring photon flux (photons/second) in the region of interest. After 48 hours, mice were sacrificed and muscle, lung, liver, spleen, brain, kidney and heart were collected, shock frozen in dry ice and stored at −80° C. for further analysis. Organ samples were lysed for 3 Minutes at full speed in a tissue lyser (Qiagen, Hilden, Germany). Afterwards 800 pl of lysis buffer were added and the resulting solutions were subjected another 6 minutes at full speed in the tissue lyser. After 10 minutes centrifugation at 13500 rpm at 4° C. the supernatants were mixed with luciferin buffer (25 mM glycylglycin, 15 mM MgSO4, 5 mM ATP, 62.5 μM luciferin) and luminescence was detected using a Chameleon plate reader (Hidex).

[1318] Results:

[1319] As can be seen in FIG. 1A and FIG. 1B, LNP formulation of mRNA led to a significantly increased protein expression after intramuscular application, compared to the same amount of unformulated mRNA after 24h (FIG. 1A) and 48h(FIG. 1B). A dose-dependent expression of Ppluc was observed.

[1320] As shown in FIGS. 2A-2G, PpLuc expression was measured 48h after i.m injection in organ lysates. Luciferase Relative Light Units (RLU) from individual organs were reported for each group. As expected, strong luciferase expression was observed at the injection site. Notably, only at the highest dose of 10 pg LNP-formulated mRNA, luciferase expression was detected in the spleen and to a minor degree in liver, kidney and lung (FIG. 2A=brain, FIG. 2B=heart, FIG. 2C=kidney, FIG. 2D=liver, FIG. 2E=lung, FIG. 2F=muscle, FIG. 2G=spleen).

### Example 3: Immunogenicity after Intramuscular (i.m.) Application of LNP-Formulated mRNA

[1321] LNP formulated HA-mRNA was used for testing the immunogenicity after intramuscular (i.m.) application. Specifically, a GC-enriched H1N1 (Netherlands 2009)-HA mRNA sequence as LNP formulation was applied as described above.

[1322] For vaccination, 8 BALB/c mice were intramuscularly injected into the M. tibialis of both legs (25 pl per leg) according to the vaccination scheme shown in Table II. As apparent, 10 pg mRNA encoding Influenza HA was LNP-formulated (as described above) to yield the respective LNP-formulation for vaccination; unformulated mRNA (10 pg) served as a control.

TABLE II
(Example 3): Vaccination scheme

| | | RNA | | Mice |
|---|---|---|---|---|
| Group | Treatment | dose | Route (Volume) | # |
| A | LNP-II-9-formulated HA mRNA | 10 μg | i.m. 25 μl per leg | 8 |
| B | LNP-II-10-formulated HA mRNA | 10 μg | i.m. 25 μl per leg | 8 |
| C | LNP-III-3-formulated HA mRNA | 10 μg | i.m. 25 μl per leg | 8 |
| D | unformulated HA mRNA | 10 μg | i.m. 25 μl per leg | 8 |
| E | RiLa buffer | — | i.m. 25 μl per leg | 8 |

[1323] On day 0, a prime vaccination was administered. Animals vaccinated with buffer served as negative control. On day 21, a blood sample was collected from the retrobulbar sinus and a boost vaccination was administered. After 35 days, the mice were sacrificed and blood and organ samples (spleen) were collected for further analysis. Splenocytes were isolated at day 35 and stimulated with an HA peptide library for T cell analysis. For immunogenicity assays, Hemagglutination inhibition (HI) titers were analyzed in the sera 3 weeks after prime and 2 weeks after boost. Frequencies of activated, HA-specific, multifunctional CD4+ and CD8+ T cells (IFN-γ+/TNF+) were measured by intracellular staining and flow cytometry. ELISA was applied for determining antibody titers.

[1324] Hemagglutination Inhibition Assay:

[1325] Hemagglutination inhibition (HI) assays were used for analyzing functional anti-HA antibody titers. Mouse sera were heat inactivated (56° C., 30 min), incubated with kaolin (Carl Roth, Germany) and pre-adsorbed to chicken red blood cells (CRBC; Lohmann Tierzucht, Germany). 50 pl of 2-fold dilutions of pre-treated sera were incubated for 45 min with 4 hemagglutination units (HAU) of inactivated Influenza A/California/7/2009 (H1N1) virus (NIBSC, UK) and 50p1 0.5% CRBC was added. HI titers were determined by the reciprocal of the highest dilution of the serum able to inhibit hemagglutination.

[1326] ELISA:

[1327] Detection of an antigen-specific immune response (B-cell immune response) was carried out by detecting influenza specific IgG1 and IgG2a antibodies. Therefore, blood samples were taken from the vaccinated mice 21 days post prime and 14 days post boost and sera were prepared. MaxiSorb plates (Nalgene Nunc International) were coated with the inactivated virus. After blocking with 1×PBS containing 0.05% Tween-20 and 1% BSA the plates were incubated with diluted mouse serum (as indicated). Subsequently a biotin-coupled secondary antibody (anti-mouse-IgG1 and IgG2a, Pharmingen) was added. After washing, the plate was incubated with horseradish peroxidase-streptavidin and subsequently the conversion of the ABTS substrate (2,2′-azino-bis(3-ethyl-benzthiazoline-6-sulfonic acid) was measured.

[1328] Intracellular Cytokine Staining:

[1329] Induction of antigen-specific T cells was determined 14 days after boost using intracellular cytokine staining (ICS). Splenocytes from vaccinated and control mice were isolated and stimulated with an HA peptide library (PepMix™ Influenza A (HA/California (H1N1)), JPT) and anti-CD28 antibody (BD Biosciences) for 6 hours at 37° C. in the presence of the GolgiPlug containing protein transport inhibitor Brefeldin A (BD Biosciences). After stimulation, cells were washed and stained for intracellular cytokines using the Cytofix/Cytoperm reagent (BD Biosciences) according to the manufacturer's instructions. The following antibodies were used for staining: CD8-APC H7 (1:100), CD4-BD Horizon V450 (1:200) (BD Biosciences), Thy1.2-FITC (1:300), TNFα-PE (1:100), IFN-γ-APC (1:100) (eBioscience), and incubated with FcγR-block diluted 1:100. Aqua Dye was used to distinguish live/dead cells (Invitrogen). Cells were acquired using a Canto II flow cytometer (BD Biosciences) and flow cytometry data were analyzed using FlowJo software (Tree Star).

[1330] Results:

[1331] Results Hemagglutination Inhibition (HI) Assays:

[1332] LNP-formulated HA-mRNA led to very high HI titers already after prime vaccination as apparent from FIG. 3A, i.e. all 3 different LNPs comprising HA mRNA at 10 pg dose induced HI titers above the threshold of 1:40 21 days after prime vaccination. In contrast unformulated mRNA did not reach the threshold of 1:40. HI titers even further increased after boost vaccination as apparent from FIG. 3B (14 days after boost vaccination). The dashed line indicates the conventionally defined protective HI titer of 1:40.

[1333] Results ELISA Assays:

[1334] LNP-formulated HA-mRNA induced significantly higher functional antibody titers, both IgG1 and IgG2a subtypes, when compared to unformulated mRNA already after a single i.m. injection as apparent from FIGS. 4A-4D 21 days after prime vaccination and 14 days after boost vaccination.

[1335] Results T Cell Assays:

[1336] As apparent from FIGS. 5A-5C, it was observed that LNP-formulated HA-mRNA significantly induced higher levels of antigen-specific multifunctional CD4+ T cells and CD8+ T cells compared to unformulated mRNA. The medium control as expected never generated a response.

### Example 4: Immunogenicity after Intradermal (i.d.) Application of LNP-Formulated mRNA

[1337] LNP formulated HA-mRNA was used for testing the immunogenicity after intradermal (i.d.) application. Specifically, a LNP-formulated GC-enriched H1N1 (Netherlands 2009)-HA mRNA sequence was applied as described above.

[1338] Therefore, 8 mice per group were each vaccinated intradermally according to the vaccination scheme shown in Table III. As apparent, 10 pg HA-mRNA was LNP-formulated (as described above) to yield the respective LNP-formulation for the vaccination; unformulated HA mRNA (10 pg) served as a control.

TABLE III
(Example 4): Vaccination scheme

| | | RNA | Route | Mice |
|---|---|---|---|---|
| Group | Treatment | dose | (Volume) | # |
| A | LNP-II-9-formulated HA mRNA | 10 μg | i.d. (25 μl) | 8 |
| B | LNP-II-10-formulated HA-mRNA | 10 μg | i.d. (25 μl) | 8 |
| C | LNP-III-3-formulated HA-mRNA | 10 μg | i.d. (25 μl) | 8 |
| D | unformulated HA-mRNA | 10 μg | i.d. (25 μl) | 8 |
| E | RiLa buffer | — | i.d. (25 μl) | 8 |

[1339] At time point 0 days, a prime vaccination was administered to 8 mice per group. On day 21, a blood sample was collected and a boost vaccination was administered. After 35 days, the mice were sacrificed and blood and organ samples (spleen) were collected for further analysis.

[1340] For immunogenicity assays, the HI titer was measured. ELISA was applied for determining antibody titers. Further, CD4 T cell immune response (IFNγ/TNFα producing CD4 T cells) and CD8 T cell immune response (IFNγ/TNFα producing CD8 T cells and CD107+ IFNγ producing CD8 T cells) was assessed 14 days after boost vaccination. Induction of antigen-specific T cells was determined using intracellular cytokine staining (ICS). Assays were performed as described above.

[1341] Results:

[1342] Results Hemagglutination Inhibition (HI) Assays:

[1343] LNP-formulated HA-mRNA led to very high HI titers already after prime vaccination compared to unformulated mRNA as apparent from FIG. 6A. HI titers even further increased after boost vaccination as apparent from FIG. 6B.

[1344] Results ELISA Assays:

[1345] LNP-formulated HA-mRNA induced significantly higher functional antibody titers, both IgG1 and IgG2a subtypes, when compared to unformulated mRNA already after a single i.d. injection as apparent from FIGS. 7A-7D.

[1346] Results T Cell Assays:

[1347] As apparent from FIGS. 8A-8C, it was observed that LNP-formulated HA-mRNA significantly induced higher levels of antigen-specific multifunctional CD4+T and CD8+ T cells compared to unformulated mRNA. The medium control as expected never generated a response.

### Example 5: Immunogenicity after Intramuscular (i.m.) Application of 1 μg LNP-Formulated mRNA

[1348] In the following example, the amount of 1 μg HA-mRNA (H1N1 (Netherlands 2009)-HA mRNA sequence LNP formulation, was used for testing the immunogenicity after intramuscular (i.m.) application as described above. Therefore, 8 BALB/c mice per group were each vaccinated intramuscularly in one leg according to the vaccination scheme shown in Table IV. As apparent, 1 μg HA-mRNA was LNP-formulated (as described above) to yield the respective LNP-formulation for the vaccination; unformulated HA mRNA (10 pg) served as a control.

TABLE IV
(Example 5): Vaccination scheme

| | | RNA | Route | Mice |
|---|---|---|---|---|
| Group | Treatment | dose | (Volume) | # |
| A | LNP-III-3-formulated HA-mRNA | 1 μg | i.m. (25 μl) | 8 |
| B | unformulated HA-mRNA | 10 μg | i.m. (25 μl) | 8 |
| C | Rila buffer | — | i.m. (25 μl) | 8 |

[1349] At time point 0 days, a prime vaccination was administered to 8 mice per group. On day 21, a blood sample was collected and a boost vaccination was administered. After 35 days, the mice were sacrificed and blood and organ samples (spleen) were collected for further analysis.

[1350] For immunogenicity assays, the HI titer was measured. ELISA was applied for determining antibody titers. Further, frozen splenocytes were stimulated with a HA overlapping peptide library and T cell immune responses were assessed by measuring IFNγ production using Elispot.

[1351] Results:

[1352] Results Immunogenicity Assays:

[1353] 1 μg HA-mRNA, LNP-formulated, induced HI titers above the threshold of 1:40 already after prime vaccination as apparent from FIG. 9A. HI titers even further increased after boost vaccination as apparent from FIG. 9B.

[1354] Results ELISA Assays:

[1355] 1 μg HA-mRNA, LNP-formulated, induced significantly higher functional antibody titers, both IgG1 and IgG2a subtypes, when compared to non-formulated mRNA already after a single i.m. injection (see FIGS. 10A-10D).

[1356] Results T Cell Assays:

[1357] 1 μg HA-mRNA, LNP-formulated, led to increased IFNγ production compared to non-formulated mRNA. The medium control as expected never generated a response (see FIG. 11).

### Example 6: HA-mRNA and RABV-G mRNA Vaccination of Monkeys

[1358] The rabies mRNA vaccine encoded the glycoprotein (RABV-G) of the Pasteur strain (GenBank accession number: AAA47218.1). Optimized mRNA constructs (RABV-G A and B) were used, which contain identical ORFs but different UTRs. The protamine-formulated RABV-G mRNA vaccines contained RABV-G mRNA A. The unformulated or LNP-formulated RABV-G mRNA vaccines contained RABV-G mRNA B (as described above) if not otherwise indicated.

[1359] Protamine RNA Formulation

[1360] For the preparation of protamine complexed mRNA (“RNActive® formulation”), the obtained antigen mRNA constructs were complexed with protamine prior to use in in vivo vaccination experiments. The mRNA complexation consists of a mixture of 50% free mRNA and 50% mRNA complexed with protamine at a weight ratio of 2:1. First, mRNA was complexed with protamine by addition of protamine-Ringer's lactate solution to mRNA. After incubation for 10 minutes, when the complexes were stably generated, free mRNA was added, and the final concentration of the vaccine was adjusted with Ringer's lactate solution.

[1361] LNP formulated HA-mRNA and RABV-G mRNA vaccines as prepared in the previous example were used for vaccination. Four nulliparous and nonpregnant cynomolgus monkeys (Macaca fascicularis) were vaccinated by intramuscular injection at days 1 and 29 with LNP-III-3-formulated HA-mRNA or RABV-G mRNA (1 pg or 10 pg, mRNA as described above) or protamine-formulated HA-mRNA or RABV-G mRNA (240 pg) into the biceps femoris muscle (500 μl). As negative control buffer was injected. Serum samples were collected from the femoral vein on days 0, 29 and 50.

[1362] Detection of an antigen-specific immune response was carried out on days 0, 29 and 50.

[1363] Hemagglutination Inhibition Assay:

[1364] Hemagglutination inhibition (HI) assays were used for analyzing functional anti-HA antibody titers. Non-human primate (NHP) sera were incubated with receptor destroying enzyme (RDEII, Denka Seiken, Japan) at 37° C. overnight, inactivated (56° C., 60 min) and incubated with kaolin. 50 pl of 2-fold dilutions of pre-treated sera were incubated for 45 min with 4 hemagglutination units (HAU) of inactivated Influenza A/California/7/2009 (H1N1) virus (NIBSC, UK) and 50 pl 0.5% CRBC was added. HI titers were determined by the reciprocal of the highest dilution of the serum able to inhibit hemagglutination.

[1365] Antibody Analysis:

[1366] HA-specific IgG titers in NHP sera were measured by ELISA using inactivated A/California/7/2009 (H1N1) virus for coating (1 pg/ml) and anti-human total IgG-HRP (ImmunoResearch) as detection antibody. Anti-rabies virus neutralizing titers (VNTs) in serum were analyzed by the Eurovir® Hygiene-Labor GmbH, Germany, using the FAVN test (Fluorescent Antibody Virus Neutralization test) and the Standard Challenge Virus CVS-11 according to WHO protocol.

[1367] Cytokine Analysis:

[1368] Blood samples of NHPs were collected on days 1 and 29 for HA immunization and day 1 for RABV-G immunization from all NHPs prior to administration and 6 and 24 hours after dosing to determine inflammation biomarkers (G-CSF, IFNγ, IL-13, IL-2, IL 4, IL-5, IL-6, IL-8 and TNF). Plasma was analyzed using the Luminex-based PRCYTOMAG-40K kit (MD MILLIPORE).

[1369] Body Temperature:

[1370] Body temperature of NHPs was determined by rectal measurement right before and at 0.5, 2, 6 and 24 hours after each dose.

[1371] Results:

[1372] As a general result, a single intramuscular administration of a 1 μg mRNA dose, LNP-III-3-formulated, surprisingly induced protective antibody titers in all vaccinated non-human primates in the two indications rabies and influenza.

[1373] Results Antibody Titer Analysis:

[1374] The results from the neutralizing antibody titer analysis are shown in FIG. 12. The intramuscular vaccination of NHP with LNP-III-3-formulated HA-encoding mRNA surprisingly led to strong induction of neutralizing antibodies in a dose-dependent manner, already after prime vaccination with LNP-III-3-formulated HA-mRNA.

[1375] Results Rabies Virus Neutralizing Titers (VNTs):

[1376] As shown in FIG. 13 intramuscular vaccination of NHPs with LNP-III-3-formulated RABV-G-encoding mRNA led to a strong induction of neutralizing antibodies in a dose-dependent manner surprisingly already after prime vaccination with only 1 μg LNP-III-3-formulated RABV-G-mRNA showing a VNT of >1 IU/ml (median value) after prime-vaccination and approximately 50 IU/ml (median value) after boost-vaccination (VNTs equal to or greater than the WHO-specified antibody titer of 0.5 IU/ml considered as a correlate of protection). Single vaccination with 10 pg LNP-III-3-formulated RABV-G-mRNA induced a median antibody titer of 17 IU/ml. After a second vaccination titers reached a median of 419 UI/ml.

[1377] Results HI-Titer:

[1378] LNP-III-3-formulated HA-mRNA led to very high HI titers already after prime vaccination as apparent from FIG. 14. In detail, vaccination with 10 pg LNP-III-3-formulated HA-mRNA induced in all animals HI titers at or above the HI titer of 1:40, which is considered protective in humans. Again, HI titers even further increased after second (boost) vaccination as apparent from FIG. 14.

[1379] Animals which received 1 μg of LNP-III-3-formulated HA-mRNA required a second vaccination to reach the protective titer in 3 of 4 animals, while none of the animals receiving 240 pg protamine-formulated HA-mRNA exhibited detectable HI titers.

[1380] Results Cytokine Analysis:

[1381] Systemic cytokine concentrations after vaccination with LNP-III-3-formulated mRNA stayed below detection level for IL-13, IL 4, IL-5, IL-6, IFN-γ and TNF or did not increase for IL-2, IL-8 and G-CSF (FIGS. 15A-15D).

[1382] Importantly, lower concentrations of the pro-inflammatory cytokines TNF, IFN-γ and IL-6 were induced by LNP-formulations compared to protamine-formulations, which are generally well tolerated in humans.

[1383] Results Body Temperature-Results and Other Results:

[1384] Intramuscular application of LNP-III-3-formulated mRNA in non-human primates showed no impact on body temperature or the body weight [data not shown]. Injection sites showed only slight erythema and/or edema in 1 of 4 animals in each group receiving the LNP-III-3-formulated HA-mRNA, which resolved 24 to 96 hours after injection and no injection site reactions after vaccination with the RABV-G-mRNA formulations [data not shown]. In summary, the LNP-III-3-formulated mRNA was well tolerated by NHPs.

### Example 7: Immunogenicity after Intramuscular (i.m.) Application of Low Doses LNP-Formulated RABV-G mRNA

[1385] The amount of 0.5 pg LNP-formulated RABV-G-mRNA was used for testing the immunogenicity after intramuscular (i.m.) application. The sequence which was used is shown in SEQ ID NO: 224276. Therefore, BALB/c mice were each vaccinated according to the vaccination scheme shown in Table Va intramuscularly in one leg. Unformulated RABV-G mRNA (40 pg) served as a control.

TABLE Va
(Example 7): Vaccination scheme

| Strain | Mice | Treatment | Route, | Immunisation | Retrobular |
|---|---|---|---|---|---|
| sex | # | RNA/mouse | Volume | schedule | bleeding |
| BALB/c | 10 | 5 μg LNP-III-3 formulated | i.m. | d0, d21 | d1, d21, d35 |
| Female | | RABV-G mRNA | 1 × 25 μl | | |
| BALB/c | 10 | 1 μg LNP-III-3 formulated | i.m. | d0, d21 | d1, d21, d35 |
| Female | | RABV-G mRNA | 1 × 25 μl | | |
| BALB/c | 10 | 0.5 μg LNP-III-3 formulated | i.m. | d0, d21 | d1, d21, d35 |
| Female | | RABV-G mRNA | 1 × 25 μl | | |
| BALB/c | 10 | 0.1 μg LNP-III-3 formulated | i.m. | d0, d21 | d1, d21, d35 |
| Female | | RABV-G mRNA | 1 × 25 μl | | |
| BALB/c | 10 | 0.05 μg LNP-III-3 formulated | i.m. | d0, d21 | d1, d21, d35 |
| Female | | RABV-G mRNA | 1 × 25 μl | | |
| BALB/c | 10 | 0.01 μg LNP-III-3 formulated | i.m. | d0, d21 | d1, d21, d35 |
| Female | | RABV-G mRNA | 1 × 25 μl | | |
| BALB/c | 10 | 40 μg unformulated RABV-G | i.m. | d0, d21 | d1, d21, d35 |
| Female | | mRNA | 1 × 25 μl | | |
| BALB/c | 6 | PBS | i.m. | d0, d21 | d1, d21, d35 |
| Female | | | 2 × 25 μl | | |
| BALB/c | 6 | 32 μg RNActive | i.d. | d0, d21 | d1, d21, d35 |
| Female | | (protamine formulation) | 2 × 50 μl | | |

[1386] At time point 0 days, a prime vaccination was administered to 8 mice per group and a blood samples was taken one day later. On day 21, a blood sample was collected and a boost vaccination was administered. Prime and boost vaccinations were performed in different legs, i.e. left and right leg, respectively. After 35 days, the mice were sacrificed and blood and organ samples (spleen and liver) were collected for further analysis.

[1387] For immunogenicity assays, the VNT was measured as described before, i.e. anti-rabies virus neutralizing titers (VNTs) in serum were analyzed by the Eurovir® Hygiene-Labor GmbH, Germany, using the FAVN test (Fluorescent Antibody Virus Neutralization test) and the Standard Challenge Virus CVS-11 according to WHO protocol.

[1388] CD4 T cell immune response (IFNγ/TNFα producing CD4 T cells) and CD8 T cell immune response (IFNγ/TNFα producing CD8 T cells and CD107+ IFNγ producing CD8 T cells) were assessed. Assays were performed as described before. Histology of liver specimens from animals vaccinated with 5 pg LNP or buffer controls was examined. Serum levels of ALT/AST were examined in serum samples taken d1 and d21. AST/ALT and liver were analyzed by mfd Diagnostics GmbH, Germany.

[1389] Results:

[1390] Results Rabies Virus Neutralizing Titers (VNTs):

[1391] As shown in FIGS. 16A-16B, intramuscular vaccination of mice with LNP-III-3-formulated RABV-G-encoding mRNA led to a strong induction of neutralizing antibodies in a dose-dependent manner surprisingly already after prime vaccination already with 0.5 pg LNP-III-3-formulated RABV-G-mRNA. WHO standard of 0.5 IU/ml is indicated by a dashed line in the graphs. Accordingly, doses of 5 pg, 1 μg and surprisingly also 0.5 pg LNP-III-3-formulated RABV-G mRNA induced responses that were significantly higher compared to 40 pg unformulated mRNA after prime vaccination (FIG. 16A). No VNTs were induced after prime vaccination with 0.05 pg and 0.01 pg LNP-III-3-formulated mRNA. 0.1 pg LNP-III-3-formulated mRNA induced VNTs after prime vaccination that were equal or above the WHO standard in 5 out of 10 animals. The VNTs even increased after boost vaccination (FIG. 16B).

[1392] As VNT-levels of FIGS. 16A/16B appeared to be even higher but were limited through experimental VNT detection (the diluted samples still appeared to be in saturation), a similar experiment was performed and new VNT analyses were generated (see vaccination scheme shown in Table Vb). PBS buffer served as a control.

TABLE Vb
(Example 7): Vaccination scheme

| Strain | Mice | Treatment | Route, | Immunisation | Retrobular |
|---|---|---|---|---|---|
| sex | # | RNA/mouse | Volume | schedule | bleeding |
| BALB/c | 14 | 0.1 μg LNP-III-3 | i.m. | d0, d21 | d21, d35 |
| Female | | formulated | 1 × 25 μl | | |
| | | RABV-G mRNA | | | |
| BALB/c | 14 | 0.3 μg LNP-III-3 | i.m. | d0, d21 | d21, d35 |
| Female | | formulated | 1 × 25 μl | | |
| | | RABV-G mRNA | | | |
| BALB/c | 14 | 0.9 μg LNP-III-3 | i.m. | d0, d21 | d21, d35 |
| Female | | formulated | 1 × 25 μl | | |
| | | RABV-G mRNA | | | |
| BALB/c | 6 | PBS | i.m. | d0, d21 | d21, d35 |
| Female | | | 2 × 25 μl | | |

[1393] As proven in FIGS. 61A-61B, intramuscular vaccination of mice with LNP-III-3-formulated RABV-G-encoding mRNA led to a very strong induction of neutralizing antibodies in a dose-dependent manner surprisingly already after prime vaccination already with 0.1 pg, 0.3 pg and 0.9 pg LNP-III-3-formulated RABV-G-mRNA. WHO standard of 0.5 IU/ml is indicated by a dashed line in the graphs. Accordingly, doses of 0.1 pg, 0.3 pg and 0.9 pg LNP-III-3-formulated RABV-G mRNA induced responses that were significantly higher compared to previous experiments with unformulated mRNA after prime vaccination. The VNTs even increased after boost vaccination (FIG. 60B; data displays median—tested with Mann-Whitney).

[1394] Results:

[1395] Results T Cell Assays:

[1396] T cell responses were observed in mice immunized twice with 5 pg, 1 μg and 0.5 pg as apparent from FIGS. 17A-17C. Accordingly, already 0.5 pg mRNA, LNP-formulated, significantly induced high levels of antigen-specific multifunctional CD4+T and CD8+ T cells compared to non-formulated mRNA. The negative DMSO control as expected never generated a response, as indicated by the dashed line in the graphs.

[1397] Results Liver Damage Analysis:

[1398] Histology of RABV-G LNP 5 pg mRNA and buffer administered control animals was performed. No pathological findings observed in any of the tested animals. AST levels were increased on day 1 post vaccination with the highest dose of LNPs (5 pg) but decreased over time and returned to background levels on day 21 (see FIGS. 18A-18D). Dashed lines indicate the standard murine AST/ALT levels. Only some animals had elevated AST levels on day 21, in all other animals AST/ALT levels were without pathological findings.

### Example 8: Vaccination Experiment with a Combination of mRNAs Encoding HA of Four Different Influenza Viruses

[1399] For vaccination 9 mice per group were intramuscularly injected twice with a composition comprising LNP formulated mRNA encoding HA of 4 different influenza virus strains: A/California/7/2009 (H1N1), A/Hong Kong/4801/2014 (H3N2), B/Brisbane/60/2008 (B) and A/Vietnam/1203/2004 (H5N1). Therefore, the four mRNAs were mixed in a ratio of 1:1:1:1 and then formulated as described above. As control, Fluarix Quadrivalent 2015-2016 was injected, a split virus vaccine comprising 4 different inactivated influenza virus strains (A/California/7/2009, A/Switzerland/9715293/2013, B/Phuket/3073/2013, and B/Brisbane/60/2008) indicated for active immunization for the prevention of disease caused by influenza A subtype viruses and type B viruses. As negative control Ringer lactate buffer was injected.

[1400] Detection of an HA-specific immune response (B-cell immune response) was carried out by detecting IgG2a antibodies directed against the particular influenza virus. Therefore, blood samples were taken from the vaccinated mice three weeks after vaccination and sera were prepared. MaxiSorb plates (Nalgene Nunc International) were coated with the particular recombinant HA protein. After blocking with 1×PBS containing 0.05% Tween-20 and 1% BSA the plates were incubated with diluted mice serum (as indicated). Subsequently a biotin-coupled secondary antibody (anti-mouse-IgG2a, Pharmingen) was added. After washing, the plate was incubated with horseradish peroxidase-streptavidin, followed by addition of the Amplex UltraRed Reagent (Invitrogen) and subsequent quantification of the fluorescent product.

[1401] Results:

[1402] The results shown in FIGS. 19A-19D demonstrate that HA-specific IgG antibodies directed against the different influenza viruses could be detected after single intramuscular vaccination with the LNP based vaccine comprising the four different mRNAs each encoding an HA antigen of a different influenza virus (Influenza A/California/7/2009 (H1N1; FIG. 19A), Influenza A/Hong Kong/4801/2014 (H3N2; FIG. 19B), Influenza B/Brisbane/60/2008 (B, FIG. 19C) and Influenza A/Vietnam/1203/2004 (H5N1, FIG. 19D).

[1403] These data proof that mRNA encoded antigens e.g. of different influenza viruses can be combined in one composition/vaccine.

[1404] In contrast to Fluarix, the LNP-III-3 formulated mRNA multivalent vaccine induced IgG2a antibody responses in naïve animals against all subtypes and the low dose of mRNA was immunogenic in mice surprisingly after single intramuscular injection.

### Example 9: Vaccination Experiment with a Combination of mRNAs Encoding HA and NA of Different Influenza Viruses

[1405] For vaccination 8 mice per group are intramuscularly injected with a composition comprising LNP formulated mRNA encoding HA of 4 different influenza virus strains: A/California/7/2009 (H1N1) and/or A/Netherlands/602/2009 (H1N1), A/Hong Kong/4801/2014 (H3N2), B/Brisbane/60/2008 and A/Vietnam/1203/2004 (H5N1) and NA of 3 different influenza virus strains: A/California/7/2009 (H1N1), A/Hong Kong/4801/2014 (H3N2), and B/Brisbane/60/2008.

[1406] In another vaccination experiment, 8 mice per group are intramuscularly injected with a composition comprising mRNA sequences encoding HA of InfluenzaA/California/7/2009 (H1N1) and/or A/Netherlands/602/2009 (H1N1), A/Hong Kong/4801/2014 (H3N2), B/Brisbane/60/2008 and B/Phuket/3073/2013 and NA of 3 different influenza virus strains: A/California/7/2009 (H1N1), A/Hong Kong/4801/2014 (H3N2), and B/Brisbane/60/2008.

[1407] As control, Influvac® Tetravalent 2016-2017 is injected, a split virus vaccine comprising 4 different inactivated influenza virus strains (A/California/7/2009, A/Hong Kong/4801/2014, B/Phuket/3073/2013, and B/Brisbane/60/2008) indicated for active immunization for the prevention of disease caused by influenza A subtype viruses and type B viruses. As negative control Ringer lactate buffer is injected.

[1408] Detection of an HA-specific immune response (B-cell immune response) is carried out by detecting IgG2a antibodies directed against the particular influenza virus as described above.

[1409] NA-specific immune responses (B-cell immune response) directed against the particular influenza virus are determined using NA inhibition assay (NAI).

### Example 10: Synthesis of Compound I-3

[1410] A solution of 6-(2′-hexyldecanoyloxy)hexan-1-al (2.4 g), acetic acid (0.33 g) and 4-aminobutan-1-ol (0.23 g) in methylene chloride (20 mL) was treated with sodium triacetoxyborohydride (1.3 g) for two hours. The solution was washed with aqueous sodium bicarbonate solution. The organic phase was dried over anhydrous magnesium sulfate, filtered and the solvent removed. The residue was passed down a silica gel column using a methanol/methylene chloride (0-8/100-92%) gradient, yielding compound 3 as a colorless oil (0.4 g).

### Example 11: Synthesis of a Representative PEG Lipid

[1411] Pegylated lipid IVa (“PEG-DMA”) was prepared wherein n approximates the center of the range of ethylene oxide repeating units in the pegylated lipid.

[1412] Synthesis of IVa-1 and IVa-2:

[1413] To a solution of myristic acid (6 g, 26 mmol) in toluene (50 mL) was added oxalyl chloride (39 mmol, 1.5 equivalents, 5 g) at RT. Accordingly, 39 mmol of oxalyl chloride is 1.5 molar equivalents relative to the starting material myristic acid (26 mmoles×1.5=39 mmoles). After the resulting mixture was heated at 70° C. for 2h, the mixture was concentrated. The residue was taken up in toluene and concentrated again. The residual oil was added via a syringe to a concentrated ammonia solution (20 mL) at 10° C. The reaction mixture was filtered and washed with water. The white solid was dried in vacuo. The desired product was obtained as a white solid (3.47 g, 15 mmol, 58.7%).

[1414] Synthesis of IVa-3:

[1415] To suspension of 20-2 (3.47 g, 15 mmol) in THF (70 mL) was added in portions of lithium aluminium hydride (1.14 g, 30 mmol) at RT during 30 min period of time. Then the mixture was heated to reflux gently (oil bath at 65° C.) overnight. The mixture was cooled to 5° C. and sodium sulphate 9 hydrate was added. The mixture was stirred for 2h, filtered through a layer of celite, washed with 15% of MeOH in DCM (200 mL). The filtrate and washings were combined and concentrated. The residual solid was dried in vacuo. The desired product was obtained as a white solid (2.86 g 13.4 mmol, 89.5%).

[1416] Synthesis of IVa-4:

[1417] To a solution of myristic acid (3.86 g, 16.9 mmol) in benzene (40 mL) and DMF (1 drop) was added oxalyl chloride (25.35 mmol, 1.5 equivalents, 3.22 g) at RT. Accordingly, 25.35 mmol of oxalyl chloride is 1.5 molar equivalents relative to the starting material myristic acid (16.9 mmol×1.5=25.35 mmol). The mixture was stirred at RT for 1.5h. Heated at 60° C. for 30 min. The mixture was concentrated. The residue was taken up in toluene and concentrated again. The residual oil (light yellow) was taken in 20 mL of benzene and added via syringe to a solution of 20-3 (2.86 g 13.4 mmol) and triethylamine (3.53 mL, 1.5 equivalents) in benzene (40 mL) at 10° C. Accordingly, 3.53 mL of triethylamine is 1.5 molar equivalents with respect to the 13.4 mmol of 20-3 i.e. a 50% molar excess of this reagent compared to the starting material for this step. After addition, the resulting mixture was stirred at RT overnight. The reaction mixture was diluted with water and was adjusted to pH 6-7 with 20% H2SO4. The mixture was filtered and washed with water. A pale solid was obtained. The crude product was recrystallized from methanol. This gave the desired product as an off-white solid (5.65 g, 13 mmol, 100%).

[1418] Synthesis of IVa-5:

[1419] To suspension of 20-4 (5.65 g, 13 mmol) in THF (60 mL) was added in portions lithium aluminium hydride (0.99 g, 26 mmol) at RT during 30 min period of time. Then the mixture was heated to reflux gently overnight. The mixture was cooled to 0° C. and sodium sulphate 9 hydrate. The mixture was stirred for 2h, then filtered through a pad of celite and silica gel and washed with ether first. The filtrate turned cloudy and precipitation formed. Filtration gave a white solid. The solid was recrystallized from MeOH and a colorless crystalline solid (2.43 g).

[1420] The pad of celite and silica gel was then washed 5% of MeOH in DCM (400 mL) and then 10% of MeOH in DCM with 1% of triethylamine (300 mL). The fractions containing the desired product were combined and concentrated. A white solid was obtained. The solid was recrystalized from MeOH and a colorless crystalline solid (0.79 g). The above two solids (2.43 g and 0.79 g) were combined and dried in vacuo (3.20 g, 60%). 1HNMR (CDCl3 at 7.27 ppm) δ: 2.58 (t-like, 7.2 Hz, 4H), 1.52-1.44 (m, 4H), 1.33-1.24 (m, 44H), 0.89 (t-like, 6.6 Hz, 6H), 2.1-1.3 (very broad, 1H).

[1421] Synthesis of Iva:

[1422] To a solution of 20-5 (7 mmol, 2.87 g) and triethylamine (30 mmol, 4.18 mL) in DCM (100 mL) was added a solution of mPEG-NHS (from NOF, 5.0 mmol, 9.97 g, PEG MW approx. 2,000, n=about 45) in DCM (120 mL,). After 24h the reaction solution was washed with water (300 mL). The aqueous phase was extracted twice with DCM (100 mL×2). DCM extracts were combined, washed with brine (100 mL). The organic phase was dried over sodium sulfate, filtered, concentrated partially. The concentrated solution (ca 300 mL) was cooled at approximately 15 C. Filtration gave a white solid (1.030 g, the unreacted starting amine). To the filtration was added Et3N (1.6 mmol, 0.222 mL, 4 equivalents) and acetic anhydride (1.6 mmol, 164 mg). The mixture was stirred at RT for 3h and then concentrated to a solid. The residual solid was purified by column chromatography on silica gel (0-8% methanol in DCM). This gave the desired product as a white solid (9.211 g). 1HNMR (CDCl3 at 7.27 ppm) δ: 4.19 (s, 2H), 3.83-3.45 (m, 180200H), 3.38 (s, 3H), 3.28 (t-like, 7.6 Hz, 2H, CH2N), 3.18 (t-like, 7.8 Hz, 2H, CH2N), 1.89 (s, 6.6H, water), 1.58-1.48 (m, 4H), 1.36-1.21 (m, 48-50H), 0.88 (t-like, 6.6 Hz, 6H).

### Example 12: Vaccination Experiment with a Combination of LNP-III-3 Formulated mRNAs Encoding HA of Different Influenza Viruses

[1423] Female BALB/c mice were immunized intramuscularly (i.m.) with LNP-III-3 formulated mRNA vaccine compositions with doses, application routes and vaccination schedules as indicated in Table A (mRNA sequences according to Example 1). As a negative control, one group of mice was injected with buffer (ringer lactate, Rila). As a positive control, one group of mice was vaccinated with an approved Influenza vaccine (Influsplit® tetra 2016/2017; A/California/07/2009, A/Hong Kong/4801/2014, B/Brisbane/60/2008, B/Phuket/3073/2013). All animals were injected with the respective composition on day 0 and day 21. Blood samples were collected on day 21, 35, and 49 for the determination of binding antibody titers (using ELISA) and blocking antibody titers (using a HI assay). T cell responses were analyzed by intracellular cytokine staining (ICS) using splenocytes isolated on day 49. Detailed descriptions of the performed experiments are provided below.

TABLE A
Immunization regimen (Example 12)

| | No. of | Treatment groups | | |
|---|---|---|---|---|
| Group | mice | (control and mRNA compositions) | Dose/formulation | Treatment |
| A | 6 | Rila buffer | — | i.m., 2 × 25 μl |
| B | 6 | Influsplit ® | 1/10 human dose | i.m., 2 × 25 μl |
| C | 9 | H1N1 A/Netherlands/602/2009 | 1 μg (0.25 μg each) | i.m., 1 × 25 μl |
| | | H3N2 A/Hong Kong/4801/2014 | LNP-III-3 formulated | |
| | | HA B/Brisbane/60/2008 | | |
| | | HA B/Phuket/3073/2013 | | |
| D | 9 | H1N1 A/Netherlands/602/2009 | 4 μg (1 μg each) | i.m., 1 × 25 μl |
| | | H3N2 A/Hong Kong/4801/2014 | LNP-III-3 formulated | |
| | | HA B/Brisbane/60/2008 | | |
| | | HA B/Phuket/3073/2013 | | |
| E | 9 | H1N1 A/California/07/2009 | 1 μg (0.25 μg each) | i.m., 1 × 25 μl |
| | | H3N2 A/Hong Kong/4801/2014 | LNP-III-3 formulated | |
| | | HA B/Brisbane/60/2008 | | |
| | | HA B/Phuket/3073/2013 | | |
| F | 9 | H1N1 A/California/07/2009 | 4 μg (1 μg each) | i.m., 1 × 25 μl |
| | | H3N2 A/Hong Kong/4801/2014 | LNP-III-3 formulated | |
| | | HA B/Brisbane/60/2008 | | |
| | | HA B/Phuket/3073/2013 | | |

[1424] 12.1. Determination of Anti HA Protein Specific IgG1 and IgG2a Antibodies by ELISA:

[1425] ELISA assay was performed essentially as commonly known in the art, or as described above. ELISA was performed for each antigen comprised in the mRNA vaccine composition (as indicated in Table A). Results are shown in FIG. 25 (H1N1 (A/California/7/2009)), FIG. 27 (H3N2 (A/HongKong/4801/2014)), FIG. 29 (Influenza B (B/Brisbane/60/2008)) and FIG. 30 (Influenza B (B/Phuket/3073/2013)).

[1426] 12.2. Hemagglutination Inhibition Assay (HI):

[1427] In a 96-well plate, the obtained sera were mixed with HA H1N1 antigen (A/California/07/2009 (H1N1); NIBSC) or HA H3N2 antigen and red blood cells (4% erythrocytes; Lohmann Tierzucht). In the presence of HA neutralizing antibodies, an inhibition of hemagglutination of erythrocytes can be observed. The lowest level of titered serum that resulted in a visible inhibition of hemagglutination was the assay result. The results are shown in FIG. 26 ((H1N1 (A/California/7/2009)) and FIG. 28 (H3N2 (A/HongKong/4801/2014)).

[1428] 12.3. Detection of T-Cell Responses:

[1429] Splenocytes from vaccinated mice were isolated according to a standard protocol known in the art. Briefly, isolated spleens were grinded through a cell strainer and washed in PBS/1% FBS followed by red blood cell lysis. After an extensive washing step with PBS/1% FBS splenocytes were seeded into 96-well plates (2×10⁶ cells per well). The cells were stimulated with a pool of overlapping 15mer peptides of H1N1 (A/California/07/2009) for determining CD8+ T-cell responses or they were stimulated with recombinant HA protein for determining CD4+ T-cell responses. After stimulation, cells were washed and stained for intracellular cytokines using the Cytofix/Cytoperm reagent (BD Biosciences) according to the manufacturer's instructions. The following antibodies were used for staining: CD3-FITC (1:100), CD8-PE-Cy7 (1:200), TNF-PE (1:100), IFNγ-APC (1:100) (eBioscience), CD4-BD Horizon V450 (1:200) (BD Biosciences) and incubated with Fcγ-block diluted 1:100. Aqua Dye was used to distinguish live/dead cells (Invitrogen). Cells were acquired using a Canto II flow cytometer (Beckton Dickinson). Flow cytometry data was analyzed using FlowJo software package (Tree Star, Inc.). Results for CD4+ T-cells are shown in FIG. 31; the results for CD8+ T-cells are shown in FIG. 32.

[1430] Results:

[1431] The data shows that IgG1 and IgG2a antibodies could be detected after vaccination with the LNP formulated mRNA combination vaccines. Notably, for all mRNA encoded antigens comprised in the respective combination, specific IgG1 and IgG2a antibodies could be detected demonstrating that all mRNAs comprised in the respective compositions are translated into protein and trigger a humoral immune response in mice as shown in FIG. 25 (H1N1 (A/California/7/2009)), FIG. 27 (H3N2 (A/HongKong/4801/2014)), FIG. 29 (Influenza B (B/Brisbane/60/2008)) and FIG. 30 (Influenza B (B/Phuket/3073/2013)). Compared to mice vaccinated with the approved Influsplit® vaccine, the responses were stronger or at least equally strong for all tested antigens.

[1432] Functional neutralizing antibodies were demonstrated for H1N1 (A/California/7/2009) and H3N2 (A/HongKong/4801/2014) (see FIGS. 26 and 28). Compared to mice vaccinated with the approved Influsplit® vaccine, the induction of functional neutralizing antibodies was more pronounced and more durable for mRNA combination vaccines. Notably, the tested mRNA combination vaccine often reached HI titers >40 already after one immunization.

[1433] FIG. 31 shows that the tested influenza mRNA combinations stimulated robust CD4+ IFNγ/TNF-α T-cell responses in spleen of immunized mice for all antigens.

[1434] FIG. 32 shows that the tested influenza mRNA combinations stimulated robust CD8+ IFN-γ/TNF-α T-cell responses in spleen of immunized mice as shown for H1N1 (A/California/07/2009), whereas, notably, the approved Influsplit® vaccine did not induce CD8+ T-cell responses.

[1435] Overall, the data demonstrates that LNP formulated mRNA based combination vaccines for HA antigens derived from different influenza viruses (A types and B types) induce strong and durable humoral immune responses and T-cell mediated cellular immune responses.

### Example 13: Vaccination Experiment with a Combination of LNP-III-3 Formulated mRNAs Encoding HA of Different Influenza Viruses

[1436] Female BALB/c mice were immunized intramuscularly (i.m.) with LNP-III-3 formulated mRNA vaccine compositions with doses, application routes and vaccination schedules as indicated in Table B (mRNA Sequences according to Example 1). As a negative control, one group of mice was injected with buffer (ringer lactate, Rila).). As a positive control, one group of mice was vaccinated with an approved Influenza vaccine (Fluarix®; A/California/07/2009, A/Switzerland/9715293/2013, B/Brisbane/60/2008, B/Phuket/3073/2013). All animals were vaccinated on day 0 and day 21. Blood samples were collected on day 21, 35, and 49 for the determination of binding antibody titers (using ELISA), blocking antibody titers (using a HI assay) and the determination of virus neutralizing titers (VNTs). T cell responses were analyzed by intracellular cytokine staining (ICS) using splenocytes isolated on day 49. Detailed descriptions of the performed experiments are provided below.

TABLE B
mmunization regimen (Example 13)

| | No. of | Treatment groups | | |
|---|---|---|---|---|
| Group | mice | (control/mRNA compositions) | Dose/formulation | Treatment |
| A | 6 | Rila buffer | — | i.m., 2 × 25 μl |
| B | 6 | Fluarix ® | 1/10 human dose | i.m., 2 × 25 μl |
| C | 9 | H1N1 A/Netherlands/602/2009 | 0.25 μg (0.06 μg each) | i.m., 1 × 25 μl |
| | | H3N2 A/Hong Kong/4801/2014 | LNP-III-3 formulated | |
| | | HA B/Brisbane/60/2008 | | |
| | | H5N1 A/Vietnam/1203/2004 | | |
| D | 9 | H1N1 A/Netherlands/602/2009 | 1 μg (0.25 μg each) | i.m., 1 × 25 μl |
| | | H3N2 A/Hong Kong/4801/2014 | LNP-III-3 formulated | |
| | | HA B/Brisbane/60/2008 | | |
| | | H5N1 A/Vietnam/1203/2004 | | |
| E | 9 | H1N1 A/Netherlands/602/2009 | 4 μg (1 μg each) | i.m., 1 × 25 μl |
| | | H3N2 A/Hong Kong/4801/2014 | LNP-III-3 formulated | |
| | | HA B/Brisbane/60/2008 | | |
| | | H5N1 A/Vietnam/1203/2004 | | |

[1437] 13.1. Determination of Anti HA Protein Specific IgG1 and IgG2a Antibodies by ELISA:

[1438] ELISA assay was performed essentially as commonly known in the art, or as described above. ELISA was performed for each antigen comprised in the mRNA vaccine composition (as indicated in Table B). Results are shown in FIG. 33 (H1N1 (A/California/7/2009)), FIG. 35 (H3N2 (A/HongKong/4801/2014)), FIG. 37 (Influenza B (B/Brisbane/60/2008)), and FIG. 38(H5N1 (A/Vietnam/1203/2004)). 13.2. Hemagglutination inhibition assay (HI) and virus neutralizing assay: HI-assay was performed as described above. The results are shown in FIG. 34 ((H1N1 (A/California/7/2009)) and FIG. 36 (H3N2 (A/HongKong/4801/2014)). 13.3. Detection of T-Cell Responses:

[1439] Splenocytes from vaccinated mice were isolated according to a standard protocol known in the art. ICS experiment was performed essentially as described in Example 12. Results for CD4+ T-cells are shown in FIG. 39; the results for CD8+ T-cells are shown in FIG. 40.

[1440] Results:

[1441] The data shows that IgG1 and IgG2a antibodies could be detected after vaccination with the LNP formulated mRNA combination vaccines. Notably, for all mRNA encoded antigens comprised in the respective combination, specific IgG1 and IgG2a antibodies could be detected demonstrating that all mRNAs comprised in the respective compositions are translated into protein and trigger a humoral immune response in mice as shown in FIG. 33 (H1N1 (A/California/7/2009)), FIG. 35 (H3N2 (A/HongKong/4801/2014)), FIG. 37 (Influenza B (B/Brisbane/60/2008)) and FIG. 38 H5N1 (A/Vietnam/1203/2004)). Compared to mice vaccinated with the approved Fluarix® vaccine, the responses were often stronger or at least equally strong for all tested antigens, even for the lowest mRNA vaccine dose tested.

[1442] Functional neutralizing antibodies were demonstrated for H1N1 (A/California/7/2009) and H3N2 (A/HongKong/4801/2014) (see FIG. 34 and FIG. 36). Compared to mice vaccinated with the approved Fluarix® vaccine, the induction of functional neutralizing antibodies was more pronounced and more durable for mRNA combination vaccines. Notably, the tested mRNA combination vaccine reached HI titers >40 already after one immunization for the highest tested dose.

[1443] FIG. 39 shows that the tested influenza mRNA combinations stimulated robust CD4+ IFNγ/TNF-α T-cell responses in spleen of immunized mice for all antigens, with higher responses as observed for Fluarix®.

[1444] FIG. 40 shows that the tested influenza mRNA combinations stimulated robust CD8+ IFN-γ/TNF-α T-cell responses in spleen of immunized mice as shown for H1N1 (A/California/07/2009) and H5N1 (A/Vietnam/1203/2004), whereas, notably, the approved Fluarix® vaccine did not induce CD8+ T-cell responses.

[1445] Overall, the data demonstrates that LNP formulated mRNA based combination vaccines for HA antigens derived from different influenza viruses (A types and B types) induce strong and durable humoral immune responses and T-cell mediated cellular immune responses.

### Example 14: Vaccination Experiment with LNP-III-3 Formulated mRNA Encoding Neuraminidase NA1 of Influenza Virus

[1446] Female BALB/c mice were immunized intramuscularly (i.m.) with LNP-III-3 formulated mRNA vaccine compositions with doses, application routes and vaccination schedules as indicated in Table C (mRNA Sequences according to Example 1). As a negative control, one group of mice was injected with buffer (ringer lactate, Rila). As positive control, one group of mice was injected i.m. with Influsplit Tetra® 2016/2017 (A/California/7/2009 (H1N1); A/Hong Kong/4801/2014 (H3N2); B/Brisbane/60/2008; B/Phuket/3073/2013). All animals were vaccinated on day 0 and day 21. Blood samples were collected on day 21, 35, and 49 for determination of immune responses. T cell responses were analyzed by intracellular cytokine staining (ICS) using splenocytes isolated on day 49.

TABLE C
Immunization regimen (Example 14)

| | No. of | Treatment groups | | |
|---|---|---|---|---|
| Setup | mice | (control/mRNA compositions) | Dose/formulation | Route, Volume |
| A | 6 | Rila | — | i.m., 1 × 25 μl |
| B | 6 | Influsplit Tetra ® 2016/2017 | 1/10 of human dose | i.m., 2 × 25 μl |
| C | 6 | NA1 A/California/07/2009 | 1 μg; LNP-III-3 formulated | i.m., 1 × 25 μl |
| D | 6 | NA1 A/California/07/2009 | 2.5 μg; LNP-III-3 formulated | i.m., 1 × 25 μl |

[1447] 14.1. Determination of Immune Responses for N1 NA (A/California/7/2009):

[1448] Functional NA-specific antibodies were analyzed using an enzyme-linked lectin assay (ELLA), essentially performed as previously described in the art. ELLA was performed in 96 well plates coated with a large glycoprotein substrate fetuin. NA cleaves terminal sialic acids from fetuin, exposing the penultimate sugar, galactose. Peanut agglutinin (PNA) is a lectin with specificity for galactose and therefore the extent of desialylation can be quantified using a PNA-horseradish peroxidase conjugate, followed by addition of a chromogenic peroxidase substrate. The optical density that is measured is proportional to NA activity. To measure functional NA inhibiting (NI) antibody titers, serial dilutions of sera were incubated on fetuin-coated plates with A/California/7/2009(H1N1) virus (pre-treated with Triton-X-100). The reciprocal of the highest serum dilution that results in >50% inhibition of NA activity is designated as the NI antibody titer. The result is shown in FIG. 41.

[1449] To determine T-cell responses, an ICS experiment was performed, essentially as outlined above. Cells were stimulated with NA specific peptide mixture and CD8+ T-cell responses and CD4+ T-cell responses were determined. The results are shown in FIG. 42 (CD4+) and FIG. 43 (CD4+).

[1450] Results:

[1451] As shown in FIG. 41, strong and specific functional immune responses could be detected in mice vaccinated with LNP formulated mRNA coding for NA1 A/California/2009, whereas only weak responses could be determined for mice injected with Influsplit® vaccine.

[1452] As shown in FIGS. 42 and 43, the tested NA1 mRNA vaccine stimulated robust CD4+ and CD8+ T-cell responses in spleen of immunized mice as shown, whereas, notably, the approved Influsplit® vaccine did not induce CD8+ T-cell responses.

### Example 15: Vaccination Experiment with LNP-III-3 Formulated mRNAs Encoding Rabies Virus Antigen in Mice and Evaluation of Pro-Inflammatory Environment and Injection of LNP-III-3 Formulated Fluorescently Labeled mRNA (F*-mRNA) in Mice and Analysis of Composition and Activation Status of Immune Cells in Draining Lymph-Nodes (dLNs)

[1453] F*-mRNA corresponds to a fluorescently labeled PpLuc mRNA (60%-UTP-40%-5-Aminoallyl-UTP) which cannot be translated into a protein due to the labeling (SEQ ID NO: 224286).

[1454] The activation of the innate immune system is required to mount efficacious adaptive immune responses after vaccination. Therefore, the inventive LNP-III-3-formulated mRNA according to the invention was tested for their potency to (transiently) induce pro-inflammatory cytokines and chemokines after i.m. administration of LNP-formulated RABV-G mRNA in mice.

[1455] BALB/c mice (n=6/group) were vaccinated i.m. with 10 pg non-formulated (mRNA) or LNP-formulated RABV-G-mRNA (mRNA/LNP), or with buffer control. Muscle tissues, dLNs and serum samples were isolated 4h, 14h, 24h and 96h after i.m. application and cytokine or chemokine content was measured in protein lysates and sera by Cytometric Bead Array (CBA). The results are shown in FIGS. 44-49.

[1456] To elucidate whether the pro-inflammatory environment translates into activation and changes in the composition of immune cells, the number and activation status of leukocytes in the dLNs was analyzed. To ensure that any observed effect was independent of the mRNA-encoded protein, a fluorescently labeled mRNA that cannot be translated (F*-mRNA) was used. BALB/c mice (n=3/group) were injected i.m. in both legs with 10 pg non-formulated (F*mRNA) or LNP-formulated F*mRNA (F*mRNA/LNP), or with buffer. Right and left dLNs were isolated 4h, 24h and 48h after i.m. application and analyzed separately by flow cytometry. Numbers of each cell population (50A) and frequency of activated immune cells (50B) in the dLNs are shown in FIGS. 50A/B.

[1457] Results:

[1458] As shown in FIGS. 44-46, LNP-formulated RABV-G mRNA induces a pronounced but transient release of the pro-inflammatory cytokines TNF and IL-6 with peak concentrations at 14h after injection. Importantly for the safety of the approach, the cytokine release was local and no systemic release of TNF (in serum) was observed. Transiently, 10-fold lower IL-6 concentrations were detected in the serum compared to the injection site, which returned to baseline at 96h after injection (see FIG. 46).

[1459] As shown in FIGS. 47-49, LNP-formulated RABV-G mRNA induces a pronounced but transient release of pro-inflammatory chemokines. Among the strongly upregulated chemokines were MIP-13, which plays a pivotal role in the chemotaxis of macrophages, monocytes and NK cells, and CXCL-9, which recruits T cells, NK cells and NKT cells to the site of inflammation. Moreover, there was a transient elevation in the concentrations of MCP-1, MIP-1α, and CXCL1, which attract a variety of immune cells such as monocytes, macrophages, dendritic cells and neutrophils. We also observed a transient increase in serum concentrations of the chemokines described above, but to a much lower extent compared to those detected at the injection site or in the dLNs.

[1460] As shown in FIGS. 50A and 50B, intramuscular injection of the LNP-formulated F*-mRNA induced a strong increase in cellularity, which was absent after injection of unformulated F*-mRNA. The strongest elevation in cell numbers was observed 24 h after injection, except for NK cells which increased over time. CD11b+Gr1+ cells, consisting mainly of monocytes and granulocytes, accounted for the largest increase in leukocytes. The increase in cellularity in dLNs was accompanied by a strong activation of both adaptive and innate immune cells, which peaked at 24 hours after injection, when more than 90% of the T and B cells expressed the activation marker CD69.

[1461] Taken together, these results suggest that i.m. injection of LNP-formulated mRNA vaccines induces a broad but transient local immunostimulatory milieu, which is relevant for the induction of strong adaptive immune responses.

### Example 16: Vaccination Experiment with LNP-III-3 Formulated mRNAs Encoding Rabies Virus Antigen in Non-Human Primates

[1462] LNP-III-3 formulated RABV-G mRNA vaccines as prepared in the previous example were used for vaccination.

[1463] Studies with cynomolgus monkeys (Macaca fascicularis) were conducted at Envigo CRS, S.A.U., Santa Perpètua de Mogoda, Spain. Animals were of Vietnamese origin, bred in captivity, nulliparous and not pregnant. Animals had at treatment start an age of 2.5 to 3.5 years and a body weight of 2.2-3.3 kg. NHPs were vaccinated i.m. at days 0 and 28 into the biceps femoris muscle with a single dose of 500 pl. Vaccination with the licensed human rabies vaccine Rabipur® (Novartis) was performed i.m. in NHPs with the full human dose according to the pre-exposure prophylaxis schedule on days 0, 7, and 28 or on a reduced schedule on days 0 and 28. VNTs of vaccinated monkeys were analyzed as described above. T-cell responses (CD 4+ and CD8+) were analyzed as described above. The results are shown in FIGS. 51-55.

[1464] Results:

[1465] FIG. 51 shows that already a single i.m. immunization with 1 μg LNP-formulated RABV-G-mRNA induced robust VNTs at or above the protective titer of 0.5 IU/ml in all animals at day 28 after prime vaccination. The observed immunogenicity was dose dependent with a 10-fold higher mRNA dose yielding 10-fold higher VNTs.

[1466] FIG. 52 shows that the observed primary responses could be boosted with a second vaccination with RABV-G-mRNA at day 28 was performed resulting in a 20-fold increase in VNTs. Monitoring of the antibody titers for six months demonstrated that after initial decline titers stabilized at a protective level of about 40 IU/ml for the 01 μg mRNA dose and about 4 IU/ml for the 1 μg mRNA dose.

[1467] FIG. 53 shows the existence of B cell memory. To demonstrate the existence of B cell memory five months after completed vaccination a third vaccination (recall vaccination) was performed and VNTs were measured five days later. In both dose groups a very rapid 10-fold increase in VNTs was observed, demonstrating the induction of a strong recall-response by the mRNA vaccine.

[1468] FIG. 54 shows that the LNP-formulated RABV-G-mRNA vaccine induced protective neutralizing antibody titers above 0.5 IU/ml after a single vaccination, which were comparable or higher compared to a full human dose of the licensed rabies vaccine Rabipur®. Four weeks after a single vaccination mean VNTs measured for mRNA vaccinated monkeys were dramatically increased compared to Rabipur® vaccinated monkeys. Boost vaccination at day 28 further increased VNT levels reaching up to 1000 IU/ml for mRNA vaccinated monkeys outperforming Rabipur® induced VNTs by a factor of 10. These data suggest that vaccination with two injections of the LNP-formulated RABV-G-mRNA vaccine is sufficient to induce protection against rabies virus infections. For the 100 pg dose of LNP-formulated RABV-G-mRNA, even a single administration may be sufficient to induce protective and sustained antibody titers. This is a particular advantage over the state-of-the-art rabies vaccine Rabipur® that has to be applied three times.

[1469] FIGS. 55 and 56 shows that the inventive LNP-formulated RABV-G mRNA vaccine induced specific cellular responses after vaccination, effects that were not observed in in Rabipur®-vaccinated animals. RABV-G-specific IFN-γ+/IL-2+CD4+ T cells (FIG. 55) were observed for both mRNA vaccine doses, whereas RABV-G-specific IFN-γ+/GrzB+CD8+T (FIG. 56) cells were detected in animals receiving the 100 pg dose. Notably, only minor cellular responses were observed in monkeys that received Rabipur®.

### Example 17: Vaccination Experiment with LNP-III-3 Formulated mRNAs Encoding Influenza H1N1 or Influenza H3N2 HA Antigens in Non-Human Primates

[1470] LNP-III-3 formulated HA-mRNA Influenza A/California/7/2009 (H1N1) or HA-mRNA Influenza A/Hong Kong/4801/2014 (H3N2) vaccine as described in the previous example were used for vaccination.

[1471] Studies with cynomolgus monkeys (Macaca fascicularis) were conducted at Envigo CRS, S.A.U., Santa Perpètua de Mogoda, Spain. Animals were of Vietnamese origin, bred in captivity, nulliparous and not pregnant. Animals had at treatment start an age of 2.5 to 3.5 years and a body weight of 2.2-3.3 kg. NHPs were vaccinated with 10 pg of either the H1N1-HA or the H3N2-HA vaccine and measured functional antibodies against the respective viruses by hemagglutination inhibition (HI) assays. As control, a group of animals was vaccinated with a full human dose of Fluad®.

[1472] Naïve NHPs were vaccinated i.m. with 10 pg of either the H1N1-HA or the H3N2-HA vaccine at days 0 and 28 into the biceps femoris muscle with a single dose of 500 pl. Functional antibodies against the respective viruses were measured by hemagglutination inhibition (HI) assays. The results are shown in FIGS. 57-59. T-cell responses were analyzed as described above. The results are shown in FIGS. 60A-B.

[1473] Results:

[1474] FIG. 57 shows that already a single i.m. immunization with 10 pg LNP-formulated H1N1-HA mRNA or H3N2-HA mRNA induced HI titers at or above the titer of 1:40 in all animals at day 28 after prime vaccination which is considered to be protective in human.

[1475] FIG. 58 shows that the observed primary responses could be boosted with a second vaccination with the respective H1N1-HA mRNA at day 28 resulting in a strong increase of the measured HI titers. Monitoring of the antibody titers for more than 12 months (544 days) demonstrated that after initial decline titers stabilized at a protective H1N1 HI-titer of about 640. Importantly, all vaccinated animals maintained HI titers clearly above the protective limit until the end of the observation period one year after prime vaccination, confirming the remarkable longevity of the H1N1 HA antigen specific humoral immune response.

[1476] FIG. 59 shows that the LNP-formulated H3N2-HA mRNA vaccine induce protective H3N2-HI titers after a single vaccination with responses comparable to the potent flu vaccine Fluad® (season 2016/17; contains the surface antigens HA and neuraminidase of the influenza strains H1N1, H3N2 and B/Brisbane, as well as the adjuvant MF59C.1). A single dose of the LNP formulated mRNA vaccine was sufficient to induce protective H3N2-HI titers, comparable to titers induced by a full human dose of Fluad®. A second dose further increased the HI titers, with a much stronger effect for the LNP formulated H3N2-HA mRNA vaccine.

[1477] FIG. 60 shows that the inventive LNP-formulated H3N2-HA mRNA vaccine induced specific IFN-γ+/IL-2+CD4+ T-cell responses and TNFα+/IL-2+CD4+ T-cell responses after vaccination, effects that were not observed in Fluad®-vaccinated animals.

### Example 18: Vaccination Experiment with a Combination of mRNAs Encoding Different Influenza Antigens in Non-Human Primates

[1478] Non-human primates (NHPs) are immunized (6 animals per group) with LNP-III-3 formulated mRNA vaccines with doses, application routes and vaccination schedules as indicated in Table D (mRNA Sequences preferably according to Example 1). As vaccines, an mRNA composition comprising four HA antigens is used (“tetravalent HA”) or an mRNA composition comprising seven HA+NA antigens (four HA, three NA; heptavalent or “septavalent HA+NA”) is used. All animals are vaccinated on day 0 and day 28. Blood samples are collected on day 0, 14, 28, 56, 77, and 84 for determination of antibody responses. T cell responses are analyzed by intracellular cytokine staining (ICS) using isolated splenocytes. Analysis of immune responses performed essentially as described above (ELLA, HI assay, ELISA, ICS, VNTs).

TABLE D
Immunization regimen

| Treatment | Dose/formulation | Route, Volume |
|---|---|---|
| HA A/California/7/2009 H1N1 | 40 μg* | i.m., 500 μl |
| HA A/Hong Kong/4801/2014 H3N2 | LNP-III-3 | |
| HA B/Brisbase/60/2008 | | |
| HA B/Phuket/3073/2013 | | |
| “Tetravalent HA” | | |
| HA A/California/7/2009 H1N1 | 200 μg* | i.m., 500 μl |
| HA A/Hong Kong/4801/2014 H3N2 | LNP-III-3 | |
| HA B/Brisbase/60/2008 | | |
| HA B/Phuket/3073/2013 | | |
| “Tetravalent HA” | | |
| NA1 A/California/07/2009 | 70 μg* | i.m., 500 μl |
| NA2 A/Hong Kong/4801/2014 | LNP-III-3 | |
| NA B/Brisbane/60/2008) | | |
| HA A/California/7/2009 H1N1 | | |
| HA A/Hong Kong/4801/2014 H3N2 | | |
| HA B/Brisbase/60/2008 | | |
| HA B/Phuket/3073/2013 | | |
| “Septavalent HA + NA” | | |
| NA1 A/California/07/2009 | 200 μg* | i.m., 500 μl |
| NA2 A/Hong Kong/4801/2014 | LNP-III-3 | |
| NA B/Brisbane/60/2008) | | |
| HA A/California/7/2009 H1N1 | | |
| HA A/Hong Kong/4801/2014 H3N2 | | |
| HA B/Brisbase/60/2008 | | |
| HA B/Phuket/3073/2013 | | |
| “Septavalent HA + NA” | | |
| Licensed vaccines | 1 human dose | i.m., 500 μl |

*Each mRNA represented equally in the composition, i.e. 4 × 10 μg, 4 × 50 μg, 7 × 10 μg, or 7 × 50 μg

### Example 19: Clinical Development of an LNP-III-3 Formulated Influenza mRNA Vaccine

[1479] To demonstrate safety and efficiency of the Influenza mRNA vaccine composition, a randomized, double blind, placebo-controlled clinical trial (phase I) is initiated.

[1480] For clinical development, GMP-grade RNA is produced using an established GMP process, implementing various 5 quality controls on DNA level and RNA level as described in detail in WO 2016/180430 A1.

[1481] In the clinical trial, human volunteers (adult subjects, 18-45 years of age) are intramuscularly (i.m.) injected for at least two times with an mRNA composition comprising one mRNA coding for one influenza antigen as specified herein (“monovalent”, H3N2 A/Hong Kong/4801/2014), or with an mRNA composition comprising four HA influenza antigens as specified herein (“tetravalent HA”), or with an mRNA composition comprising four HA and three NA influenza antigens as specified herein(“septavalent HA+NA”) or with an mRNA composition comprising multiple HA and multiple NA influenza antigens as specified herein (“multivalent HA+NA”). In addition, a group of elderly volunteers is treated (elderly adults >65 years of age). The design of the studies is indicated in Tables E-H below.

TABLE E
Clinical design of a tetravalent HA influenza study

| | | | | | No. |
|---|---|---|---|---|---|
| | | | | | human |
| | | Total | | Clinical | of adult |
| | | mRNA per | Formulation/ | dose vol- | sub- |
| Group | Treatment | dose (μg) | Route | ume (ml) | jects |
| 1 | Control (saline) | 0 | — | 0.5 | 30 |
| 2 | tetravalent HA | 20* | LNP-III-3 (i.m.) | 0.5 | 30 |
| 3 | tetravalent HA | 40* | LNP-III-3 (i.m.) | 0.5 | 30 |
| 4 | tetravalent HA | 80* | LNP-III-3 (i.m.) | 0.5 | 30 |
| 5 | Licensed | — | i.m. | 0.5 | 30 |
| | vaccine control | | | | |
| 6 elderly | mRNA vaccine | 40 ot 80* | LNP-III-3 (i.m.) | 0.5 | 30 |

*each mRNA represented equally in the composition

TABLE F
Clinical design of a monovalent influenza study (H3N2)

| | | | | | No. |
|---|---|---|---|---|---|
| | | | | | human |
| | | Total | | Clinical | of adult |
| | | mRNA per | Formulation/ | dose vol- | sub- |
| Group | Treatment | dose (μg) | Route | ume (ml) | jects |
| 1 | Control (saline) | 0* | i.m. | 0.5 | 30 |
| 2 | monovalent HA | 20* | LNP-III-3 (i.m.) | 0.5 | 30 |
| 3 | monovalent HA | 40* | LNP-III-3 (i.m.) | 0.5 | 30 |
| 4 | monovalent HA | 80* | LNP-III-3 (i.m.) | 0.5 | 30 |
| 5 | Licensed | — | i.m. | 0.5 | 30 |
| | vaccine control | | | | |
| 6 elderly | monovalent HA | 40 or 80* | LNP-III-3 (i.m.) | 0.5 | 30 |

*each mRNA represented equally in the composition

TABLE G
Clinical design of a heptavalent/septavalent HA + NA influenza study

| | | Total | | | |
|---|---|---|---|---|---|
| | | mRNA per | Formulation/ | Clinical dose | No. human of |
| Group | Treatment | dose (μg) | Route | volume (ml) | adult subjects |
| 1 | Control (saline) | 0 | i.m. | 0.5 | 30 |
| 2 | septavalent HA + NA | 20* | LNP-III-3 (i.m.) | 0.5 | 30 |
| 3 | septavalent HA + NA | 40* | LNP-III-3 (i.m.) | 0.5 | 30 |
| 4 | septavalent HA + NA | 80* | LNP-III-3 (i.m.) | 0.5 | 30 |
| 5 | Licensed vaccine | — | i.m. | 0.5 | 30 |
| | control | | | | |
| 6 elderly | septavalent HA + NA | 40 or 80* | LNP-III-3 (i.m.) | 0.5 | 30 |

*each mRNA represented equally in the composition

TABLE H
Clinical design of a multivalent HA + NA influenza study

| | | | | | No. |
|---|---|---|---|---|---|
| | | | | | human |
| | | Total | | Clinical | of adult |
| | | mRNA per | Formulation/ | dose vol- | sub- |
| Group | Treatment | dose (μg) | Route | ume (ml) | jects |
| 1 | Control (saline) | 0 | i.m. | 0.5 | 30 |
| 2 | Multivalent | 20* | LNP-III-3 (i.m.) | 0.5 | 30 |
| | HA + NA | | | | |
| 3 | Multivalent | 40* | LNP-III-3 (i.m.) | 0.5 | 30 |
| | HA + NA | | | | |
| 4 | Multivalent | 80* | LNP-III-3 (i.m.) | 0.5 | 30 |
| | HA + NA | | | | |
| 5 | Licensed | — | i.m. | 0.5 | 30 |
| | vaccine control | | | | |
| 6 elderly | Multivalent | 40 or 80* | LNP-III-3 (i.m.) | 0.5 | 30 |
| | HA + NA | | | | |

*each mRNA represented equally in the composition

[1482] In order to assess the safety profile of the Influenza vaccine compositions according to the invention, subjects are monitored after administration (vital signs, vaccination site tolerability assessments, hematologic analysis).

[1483] The efficacy of the immunization is analysed by determination of HI-titers and ELLA assay. Blood samples are collected on day 0 as baseline and after completed vaccination. Sera are analyzed for functional antibodies (HI assay, ELLA, VNTs (FAVN test)). In addition, a RFFIT assay is performed to analyze the presence of early VNTs using the rapid fluorescent foci inhibition test using the cell culture-adapted challenge virus strain CVS 11 as recommended by the World Organization for Animal Health. In brief, heat-inactivated sera are tested in serial two-fold dilutions for their potential to neutralize a 100 tissue culture infectious dose 50% of CVS. Sera dilutions are incubated with virus for about 70 min at 37° C. (in a water-jacket incubator with 5% CO2). 30,000 BHK-21 cells are added per well. Infected cell cultures are incubated for 22 hours at 37° C. and 5% CO2. Cells are fixed using 80% acetone/20% PBS at −20° C. for 10 min and stained using FITC-conjugated anti-rabies globulin. Plates are washed twice using PBS and excess of PBS is removed. Cell cultures are scored positive or negative for the presence of rabies virus detected by FITC-positive signals. Negative scored cells in sera treated wells represent neutralization of rabies virus. Each RFFIT test includes WHO or OIE standard serum (positive reference serum), which serves as reference for standardisation of the assay. Neutralization activity of test sera is calculated with reference to the standard serum provided by the WHO and displayed as International Units/ml (IU/ml).

[1484] Furthermore, a subset of healthy subjects is challenged with live Influenza virus or placebo by oral administration. Subjects are followed post-challenge for symptoms of Influenza associated illness, infection and immune responses.

### Example 20: Stability of LNPs (LNP-III-3) Stored at 5° C. for 3 Months

[1485] To compare immunogenicity and reactogenicity of LNP-III-3 formulated RABV-G mRNA stored at 5° C. for 3 months, immunogenicity was assessed by determining humoral responses, including functional antibodies and cellular immune responses two weeks post boost vaccination (see Table J).

[1486] RABV-G-specific antibody titers were determined by Virus Neutralization Assay as described above.

TABLE J
Immunization protocol (of Example 20):

| Strain | Mice | Treatment | Route, | Immunisation | Retroblur |
|---|---|---|---|---|---|
| sex | # | RNA/mouse | Volume | schedule | bleeding |
| BALB/c | 8 | 0.9 μg LNP-III-3 formulated RABV-G mRNA | i.m. | d0, d21 | d0, d21, d35 |
| Female | | (LNP-batch freshly prepared) | 1 × 25 μl | | |
| BALB/c | 8 | 0.9 μg LNP-III-3 formulated RABV-G mRNA | i.m. | d0, d21 | d0, d21, d35 |
| Female | | (LNP-batch stored at 5° C. for three month) | 1 × 25 μl | | |
| BALB/c | 8 | 0.3 μg LNP-III-3 formulated RABV-G mRNA | i.m. | d0, d21 | d0, d21, d35 |
| Female | | (LNP-batch freshly prepared) | 1 × 25 μl | | |
| BALB/c | 8 | 0.3 μg LNP-III-3 formulated RABV-G mRNA | i.m. | d0, d21 | d0, d21, d35 |
| Female | | (LNP-batch stored at 5° C. for three month) | 1 × 25 μl | | |
| BALB/c | 6 | PBS | i.m. | d0, d21 | d0, d21, d35 |
| Female | | | 2 × 25 μl | | |

[1487] As apparent from FIGS. 62A and 62B, surprisingly the stability of LNPs was not negatively influenced after storage at 5° C. for three months, i.e. such LNPs only showed minor effects in vivo and were sufficient to generate very high VNTs after prime and after boost vaccination.

### Example 21: Toxicity Analysis of LNPs (LNP-III-3)

[1488] The aim of this example was to evaluate the toxicity of the inventive LNPs (LNP-III-3). To this end, several in vivo toxicity studies were carried out in different animal models (e.g. mice, rats, or rabbits) with different mRNA doses (f.e. 1 μg, 10 pg, 40 pg, 100 pg, or 200 pg). The results showed that the inventive LNPs showed no significant toxicity in vivo, evidenced by analysis of local reactions, pain, food consumption, body weight, organ weight, clinical chemistry (i.e. no adverse test substance related changes observed) and hematology (i.e. no adverse test substance related changes observed). Only minor local reactions like erythemas and edemas, i.e. normal reactions to vaccines which usually occur within 1-3 days, were found in a minority of the animals vaccinated with e.g. 10 pg and 100 pg.

### Example 22: Vaccination Experiment with a Combination of LNP-III-3 Formulated mRNAs Encoding HA of Different Influenza Viruses in Ferrets

[1489] Ferrets (Mustela putorius furo; 6-12 months old) were immunized intramuscularly (i.m.) with LNP-III-3 formulated mRNA vaccine compositions comprising mRNA constructs encoding H1N1 A/California/07/2009, H3N2 A/Hong Kong/4801/2014, HA B/Brisbane/60/2008, and HA B/Phuket/3073/2013, herein referred to as “tetravalent mRNA vaccine” (see Table K). Respective mRNA sequences according to Example 1. As a positive control, one group of ferrets was vaccinated with an approved Influenza vaccine (Fluad® tetra 2016/2017). All animals were injected with the respective composition on day 0 and day 21. Blood samples were collected on day 0, 21, 35, and 49 for the determination of blocking antibody titers for each encoded antigen (using a HI assay as described above and MN assay). The results are shown in FIG. 63.

TABLE K
Immunization regimen (Example 22)

| Group | No. of ferrets | Treatment groups | Dose | Treatment |
|---|---|---|---|---|
| A | 3 | tetravalent mRNA vaccine | 160 μg (40 μg each mRNA) | i.m. |
| | | | | 1 × 250 μl |
| B | 3 | tetravalent mRNA vaccine | 40 μg (10 μg each mRNA) | i.m. |
| | | | | 1 × 250 μl |
| C | 3 | tetravalent mRNA vaccine | 10 μg (2.5 μg each mRNA) | i.m. |
| | | | | 1 × 250 μl |
| D | 6 | Fluarix ® | full human dose | i.m., 2 × 250 μl |

[1490] Results:

[1491] As shown in FIG. 63, blocking antibody titers were detected for each encoding antigen. FIGS. 63A and B show that for H1N1 and H3N2 a clear dose response was observable and that protective HI titers (>40) were induced after the second vaccination for all tested groups. Notably, for the 160 pg group and the 80 pg group protective HI titers were already achieved after prime vaccination. FIGS. 63C and D shows that protective HI titers were also detectable for B/Brisbane for the 160 pg concentration. MN titers were observed for B/Phuket (FIG. 63D).

[1492] Overall, the results demonstrate that the herein used tetravalent mRNA vaccine induces functional antibody responses for all four antigens. Moreover, the antibody responses were comparable to those observed for the approved vaccine Fluad, showing the enormous potential of the inventive LNP-formulated vaccine.

### Example 23: Challenge Vaccination Experiment with a Combination of LNP-III-3 Formulated mRNAs Encoding HA of Different Influenza Viruses in Ferrets

[1493] Ferrets (Mustela putorius furo; 6-12 months old) are immunized intramuscularly (i.m.) with LNP-III-3 formulated tetravalent mRNA vaccine of Example 22. As a positive control, groups are vaccinated with Fluad® tetra 2016/2017. As negative control, groups are injected with placebo. For each group, 6 animals are treated (“immunization phase” in Table L).

[1494] To simulate a past season infection with influenza virus, some groups are also infected prior to the vaccination experiment with influenza virus. Group 5-8 are infected with H3N2 A/Fukui/20/2004 virus and group 13-16 were infected with B/Massachusetts/2/2012 Yamagata lineage (see “prime phase” in Table L)

[1495] After immunization, ferrets are challenged intratracheal with influenza virus. Group 5-8 were challenged with HA A/Netherlands/602/2009 virus and group 13-16 were challenged with B/Brisbane/60/2008 Victoria lineage (see “challenge phase” in Table L). Day 1-3 post virus challenge ferrets are analysed for virus load (nose, throat, swabs) and health parameters (fever, body weight). 4 days after virus challenge, animals are euthanized and analysed for immune responses (HI titers, IgG, Mn etc).

TABLE L
Experimental procedure (Example 23)

| | prime phase | Vaccination schedule | | Challenge phase | |
|---|---|---|---|---|---|
| 1 | No treatment | placebo | day 49 | H1N1 | Nose, |
| 2 | | Fluad | day 49 | influenza A | Throat, |
| 3 | | tetravalent | day 49 | | Swabs, |
| 4 | | mRNA vaccine | day 28 | | Body |
| | | | day 49 | | weight |
| 5 | H3N2 | placebo | day 49 | | |
| 6 | day 21 | Fluad | day 49 | | |
| 7 | | tetravalent | day 49 | | |
| 8 | H3N2 | mRNA vaccine | day 28 | | |
| | day 0 | | day 49 | | |
| 9 | No treatment | placebo | day 49 | B Brisbane | Nose, |
| 10 | | Fluad | day 49 | | Throat, |
| 11 | | tetravalent | day 49 | | Swabs, |
| 12 | | mRNA vaccine | day 28 | | Body |
| | | | day 49 | | weight |
| 13 | B Massachusetts | placebo | day 49 | | |
| 14 | day 21 | Fluad | day 49 | | |
| 15 | | tetravalent | day 49 | | |
| 16 | * Massachusetts | mRNA vaccine | day 28 | | |
| | day 0 | | day 49 | | |

### Example 24: Vaccination Experiment with LNP-III-3 Formulated mRNAs Encoding Three Different NA Antigens (Trivalent NA mRNA Vaccine)

[1496] As exemplarily shown in Example 14, LNP-III-3 formulated mRNA encoding neuraminidase induces strong and effective immune responses. In the present example, a trivalent mRNA composition comprising mRNA encoding NA of Influenza A/California/07/2009 (H1N1), mRNA encoding NA Influenza A/Hong Kong/4801/2014 (H3N2) and mRNA encoding encoding NA of Influenza B/Brisbane/60/2008 was vaccinated (herein referred to as “Trivalent NA mRNA vaccine”). Respective mRNA sequences according to Example 1

[1497] Female BALB/c mice were injected at day 0 and day 21 with a trivalent NA mRNA vaccine, Influsplit Tetra (2016/2017) as positive control or a buffer control (RiLa) according to a regimen as provided in Table M below. Serum samples were taken for the determination of specific antibody titers (ELLA assay, performed according to Example 14). Results of the ELLA assay are shown in FIG. 64.

TABLE M
Immunization regimen (Example 24):

| Group | No. of mice | Treatment groups | Dose | Treatment |
|---|---|---|---|---|
| 1 | 13 | trivalent NA mRNA vaccine | 7.5 μg (2.5 μg each mRNA) | i.m., |
| | | LNP-III-3 formulated | | 1 × 25 μl |
| 2 | 6 | Influsplit Tetra 2016/2017 | Full human dose | i.m., |
| | | | | 1 × 25 μl |
| 3 | 3 | RiLa buffer | | i.m., |
| | | | | 1 × 25 μl |

[1498] Results:

[1499] As shown in FIG. 64, strong and specific functional immune responses could be detected in mice vaccinated with LNP formulated mRNA coding for three different NA antigens (trivalent NA mRNA vaccine). Compared to the responses detected after vaccination with a full human dose Influsplit Tetra, the responses obtained with the inventive trivalent LNP-III-3 formulated NA mRNA vaccine were more pronounced. The results show that for each NA antigen strong functional immune responses were induced after vaccination with a LNP-III-3 formulated trivalent NA mRNA vaccine.

### Example 25: Vaccination Experiment with LNP-III-3 Formulated mRNAs Encoding Three Different NA Antigens and Four Different HA Antigens (Septavalent mRNA Vaccine)

[1500] As exemplarily shown in the Examples above, LNP-III-3 formulated tetravalent HA mRNA vaccines and trivalent NA mRNA vaccines induce strong and effective immune responses for each encoded antigen. In the present example, an LNP-III-3 formulated mRNA composition encoding three different NA antigens (mRNA encoding NA of Influenza A/California/07/2009 (H1N1), mRNA encoding NA of Influenza A/Hong Kong/4801/2014 (H3N2) and mRNA encoding encoding NA of Influenza B/Brisbane/60/2008 was vaccinated) and four different HA antigens (mRNA encoding HA of Influenza A/California/07/2009 (H1N1), mRNA encoding HA of Influenza A/Hong Kong/4801/2014 (H3N2) and mRNA encoding HA of Influenza B/Brisbane/60/2008 and mRNA encoding encoding HA of Influenza B) was vaccinated (herein referred to as “septavalent HA/NA mRNA vaccine”). Respective mRNA sequences according to Example 1.

[1501] Female BALB/c mice were injected i.m. at day 0 and day 21 with LNP-III-3 formulated tetravalent HA mRNA vaccine, LNP-III-3 formulated trivalent NA mRNA vaccine, or LNP-III-3 formulated septavalent HA/NA mRNA vaccine. As positive control, one group of mice was injected with Influsplit Tetra® 2016/2017. As negative control, one group of mice was injected with RiLa buffer. Serum samples for the analysis of immune responses (HI titer, ELISA) were collected at day 21, 35, 49 (assays performed as described above). Splenocytes collected at day 49 (ICS). Experimental details provided in Table N. ELISA and HI-titer results are shown in FIGS. 65-70.

TABLE N
Immunization regimen (Example 25)

| Group | No. of mice | Treatment groups | Dose | Treatment |
|---|---|---|---|---|
| 1 | 8 | Tetravalent HA mRNA vaccine | 4 μg (1 μg each) | i.m., 1 × 25 μl |
| 2 | 8 | Trivalent NA mRNA vaccine | 3 μg (1 μg each) | i.m., 1 × 25 μl |
| 3 | 8 | septavalent HA/NA mRNA vaccine | 7 μg (1 μg each) | i.m., 1 × 25 μl |
| 4 | 8 | septavalent HA/NA mRNA vaccine | 7 μg (0.5 μg each) | |
| 5 | 6 | Influsplit Tetra | 1/10 human dose | i.m., 2 × 25 μl |
| 6 | 6 | RiLa | — | i.m., 1 × 25 μl |

[1502] Results:

[1503] The results show that the LNP-III-3 formulated septavalent HA/NA mRNA vaccine induces strong and effective immune responses in vaccinated mice.

[1504] FIG. 65-FIG. 68: shows the presence of total IgG1 and IgG2a antibodies for each of the four HA antigens. Of note: No differences were detected between the immune responses detected in mice vaccinated with tetravalent HA mRNA vaccine, showing that the addition of further mRNA constructs encoding NA antigens did not reduce the effectiveness of the septavalent mRNA vaccine.

[1505] FIG. 69: shows the presence of specific antibodies for each of the three NA antigens. Of note: No differences were detected between the immune responses detected in mice vaccinated with trivalent NA mRNA vaccine, showing that the addition of further mRNA constructs encoding HA antigens did not reduce the effectiveness of the septavalent mRNA vaccine.

[1506] FIG. 70: shows that vaccination of mice with LNP formulated septavalent HA/NA mRNA vaccine induces functional antibodies.

### Example 26: Vaccination Experiment with LNP-III-3 Formulated mRNAs Encoding Ebola GP

[1507] In the present example, the inventive mRNA LNP-III-3 formulation was compared with an established mRNA vaccine format (Protamine formulation; see Example 6) using mRNA encoding glycoprotein GP of Ebola virus (ZEBOV GP Sierra Leone 2014).

[1508] Protamine formulation of mRNA encoding GP of Ebola virus (SEQ ID NO: 224362) as described in Example 6. LNP formulation of mRNA encoding GP of Ebola virus (SEQ ID NO: 224362) as described above.

[1509] Immunogenicity of Ebola GP mRNA Vaccine in Mice:

[1510] Female BALB/c mice were injected at day 0 and day 21 with a LNP-III-3 formulated mRNA encoding GP of Ebola virus (RNA ID “R3875”; intramuscular (i.m.)) or protamine formulated mRNA encoding GP of Ebola virus (RNA ID “R3875”; intradermal (i.d.)). As negative control, one group of mice was injected with RiLa buffer. Serum samples for the analysis of IgG endpoint titers (ELISA) were collected at day 35. ELISA was performed using recombinant ZEBOV Mayinga GP protein (lacking the transmembrane domain) for coating. ELISA results are shown in FIG. 71. The outline of the vaccination experimental is provided in Table O.

TABLE O
Immunization regimen (Example 26)

| Group | No. of mice | Treatment groups | Dose | Treatment |
|---|---|---|---|---|
| 1 | 8 | GP Ebola; Protamine formulated | 80 μg | i.d., 1 × 50 μl |
| 2 | 8 | GP Ebola; LNP formulated | 5 μg | i.m., 1 × 25 μl |
| 3 | 8 | GP Ebola; LNP formulated | 7 μg (1 μg each) | i.m., 1 × 25 μl |
| 4 | 8 | RiLa | 7 μg (0.5 μg each) | i.d., 1 × 50 μl |

[1511] Results:

[1512] FIG. 71 shows that LNP-III-3 formulated mRNA encoding GP of Ebola virus induce strong humoral immune responses in mice (i.m. application). Compared with the established protamine mRNA vaccine format (i.d. application), the mRNA amount needed for similar immune response could be dramatically reduced. Moreover, LNP-III-3 formulated mRNA vaccines can be applied intramuscularily which is an important feature for prophylactic vaccines (easy and fails-safe intramuscular application of the vaccine in e.g. human subjects).

### Example 27: Vaccination Experiment with LNP-III-3 Formulated mRNAs Encoding H3N2 Administered Subcutaneously

[1513] As described in the previous examples, LNP-III-3 formulated mRNA vaccines induce strong and effective immune responses when administered intramuscularily or intradermally (e.g. see Example 4). To evaluate the effectivity of the inventive vaccine format for other suitable administration routes, sub-cutaneous injection was tested.

[1514] Non-human primates (Macaca fascicularis) were injected with LNP-III-3 formulated mRNA encoding Influenza A/Hong Kong/4801/2014 H3N2 (mRNA sequences according to Example 1). Three groups were vaccinated subcutaneously (sc) with different vaccine doses (10 pg, 50 pg, 100 pg) and one control group was vaccinated intramuscularily. HI titers at day 0, day 28, day 49 and day 70 were determined as described herein. Results of the experiment are shown in FIG. 72. The outline of the vaccination experimental is provided in Table P.

TABLE P
Immunization regimen (Example 27)

| Group | No. of NHP | Treatment groups | Dose | Treatment |
|---|---|---|---|---|
| 1 | 8 | LNP-III-3 formulated H3N2 | 10 μg, subcutaneous | Day 0, Day 28 |
| 2 | 8 | LNP-III-3 formulated H3N2 | 50 μg, subcutaneous | Day 0, Day 28 |
| 3 | 8 | LNP-III-3 formulated H3N2 | 100 μg, subcutaneous | Day 0, Day 28 |
| 4 | 8 | LNP-III-3 formulated H3N2 | 100 μg, i.m. | Day 0, Day 28 |

[1515] Results: As shown in FIG. 72, the inventive LNP-III-3 formulated mRNA vaccine format induces strong protective antibody titers against the encoded antigen when administered sub-cutaneously. Notably, the HI titers were comparable to those achieved through i.m. administration. Moreover, protective titers were already achieved after one administration (day 28). Stable protective titers were detected for s.c. vaccinated animals for 50 pg and 100 pg. Summarizing the above, the results demonstrate that the inventive LNP-III-3 formulated mRNA vaccine format is suitable for intradermal, intramuscular and also sub-cutaneous administration.

### Example 28: Vaccination Experiment with LNP-III-3 Formulated OVA mRNA Vaccine

[1516] For vaccination 9 mice (C57 BL/6) per group were intradermally injected 3 times within 3 weeks with 1 μg LNP formulated Ova mRNA (Component A) and 32 pg protamine formulated Ova mRNA (Component B), as negative control RiLa was injected (see Table Q).

[1517] Levels of circulating antigen-specific CD8 positive T cells were measured with OVA-specific dextramers (bind to antigen specific T cell receptors of CD8 positive cells) at day 7 and 21. 1 μg LNP formulated Ova mRNA (Component A) vaccine induces high and boostable levels of circulating antigen-specific CD8 positive T cells after intradermal application (see FIG. 73 and FIG. 74).

TABLE Q
Components, treatment and RNA diltuion (Example 28)

| Component | Treatment | RNA dose | Route (Volume) | Mice # |
|---|---|---|---|---|
| A | OVA mRNA formulated in LNP | 1 μg | i.d (25 μl)/1 site of injection | 9 |
| B | Ova mRNA formulated with | 32 μg | i.d (100 μl)/4 sites of | 9 |
| | protamine | | injection (state of the art) | |
| C | Rila buffer | — | i.d (25 μl)/1 site of injection | 3 |

[1518] Levels of multifunctional antigen-specific CD8 positive T cells (IFNγ/TNFα) were measured by intracellular cytokine staining (ICS). Therefore splenocytes were isolated from the vaccinated mice one week after the last vaccination and CD8 positive T cells were stimulated with OVA specific peptides (SIINFEKL and TEWTSSNVMEERKIKV) (see FIG. 75). FIG. 75 shows that 1 μg LNP formulated Ova mRNA vaccine (Component A) induces high levels of multifunctional CD8 positive T cells after intradermal application compare to protamine formulated Ova mRNA (Component B).

[1519] Detection of B-cell immune responses was carried out by detecting OVA-specific IgG2c titers. Therefore, serum samples were taken from the vaccinated mice one week after the last vaccination and analyzed by ELISA. 1 μg of LNP-formulated OVA-mRNA vaccine leads to increased OVA-specific IgG2c titers after intradermal application compare to protamine formulated Ova mRNA (see FIG. 76).

[1520] The results demonstrate that the inventive LNP-III-3 formulated mRNA vaccine format is suitable to induce anti-tumor responses in vivo and therefore useable for vaccination against tumor.

### Example 29: Tumor Challenge Experiment with LNP-III-3 Formulated OVA mRNA Vaccine

[1521] C57BL/6 mice were injected subcutaneously (s.c.) with 3×105 E.G7-OVA cells per mouse (in a volume of 100 pl PBS) on the right flank on day 0 of the experiment. Intradermal (i.d.) therapy started at day 4 and continued twice a week for three weeks. Mice were injected with 1 μg OVA mRNA and an irrelevant PpLuc mRNA formulated in LNPs. To control for anti-tumor effects due to injection procedure, mice were injected with buffer (RiLa).

[1522] The results of the experiment are shown in FIG. 77 and FIG. 78, wherein FIG. 77 shows the effect of the inventive composition on tumor growth and FIG. 78 shows the effect of the inventive composition on survival.

[1523] Tumor growth was monitored by measuring the tumor size in three dimensions using a calliper. Tumor volume was calculated according to the following formula:

$$volume ( {mm}^{3} ) = \frac{length ( mm ) \times π \times {width}^{2} ( {mm}^{2} )}{6}$$

[1524] The results in FIG. 77 show that the inventive Component A (LNP formulated Ova mRNA) strongly decreased the median tumor volume compared to the other treatment with an irrelevant mRNA (Component B). In addition, the results in FIG. 78 show that the inventive Component A (LNP formulated Ova mRNA) strongly increased the survival of tumor challenged mice compared to the other treatments (Component B and Buffer).

TABLE R
Components, treatment and RNA dilution (Example 29)

| | | RNA | | | |
|---|---|---|---|---|---|
| Component | Treatment | dose | Route (Volume) | Schedule | Mice # |
| A | OVA mRNA formulated in LNP | 1 μg | i.d (25 μl)/1 site | 2 × week | 10 |
| | | | of injection | | |
| B | PpLuc mRNA formulated in LNP | 1 μg | i.d (25 μl)/1 site | 2 × week | 10 |
| | | | of injection | | |
| C | RiLa | — | i.d (25 μl)/1 site of | 2 × week | 6 |
| | | | injection | | |

[1525] The results demonstrate that the inventive LNP-III-3 formulated mRNA vaccine format is suitable for tumor vaccination.

### Example 30: Vaccination Experiment with LNP-III-3 Formulated Endogene Tumor Associated Antigens mRNA Vaccine in Combination with Checkpoint Inhibitor

[1526] C57BL/6 mice were injected subcutaneously (s.c.) with 1×10⁵ B16.F10 cells (murine melanoma cell line) per mouse on the right flank on day 0 of the experiment. At day 6 after tumor challenge, mice were vaccinated intradermal with LNP formulated Trp2 mRNA (Component A) and irrelevant LNP formulated PpLuc mRNA (Component B). In addition immune checkpoint inhibitors anti-PD1 (Clone: RMP1-14) and anti-CTLA4 (clone: 9H10) (both BioXCell) were administered intraperitoneal (i.p.), median tumor size and survival rates were analyzed. To exclude an anti-tumor effect due to the checkpoint inhibitors, mice were injected with component B and a control antibody (rat IgG2a, BioXCell).

[1527] Tumor-bearing mice treated with vaccine against mTrp2 and checkpoint inhibitors anti-PD1 and anti-CTLA4 show delayed tumor growth and increased survival compared to other treatments with irrelevant mRNA (Component B) in combination with checkpoint inhibitors anti-PD1 and anti-CTLA4 or a control antibody (see FIGS. 79 and 80).

TABLE S
Components, treatment and RNA/Antibody dilution

| | | RNA dose (i.d)/ | | | Mice |
|---|---|---|---|---|---|
| | Treatment | volume | Antibody (i.p) | Schedule | # |
| A | mTrp2 mRNA formulated in | 1 μg/25 μl | Anti-PD1 + anti-CTLA4 | 2 × week | 10 |
| | LNP | | | | |
| B | PpLuc mRNA formulated in | 1 μg/25 μl | Isotype | 2 × week | 10 |
| | LNP | | | | |
| C | PpLuc mRNA formulated in | 1 μg/25 μl | Anti-PD1 + anti-CTLA4 | 2 × week | 10 |
| | LNP | | | | |

[1528] The results demonstrate that the inventive LNP-III-3 formulated mRNA vaccine format is suitable for the combination with checkpoint inhibitors for anti-tumor therapy.

1. A lipid nanoparticle comprising
(i) a cationic lipid with the formula III: [chemical structure]
or a pharmaceutically acceptable salt, tautomer, prodrug or stereoisomer thereof, wherein:
L¹ or L² is each independently —O(C═O)—, —(C═O)O—, —C(═O)—, —O—, —S(O)ₓ—, —S—S—, —C(═O)S—, —SC(═O)—,
—NR^{a}C(═O)—, —C(═O)NR^{a}—, —NR^{a}C(═O)NR^{a}—, —OC(═O)NR^{a}— or —NR^{a}C(═O)O—, preferably L¹ or L² is —O(C═O)— or
—(C═O)O—;
G¹ and G² are each independently unsubstituted C₁-C₁₂ alkylene or C₁-C₁₂ alkenylene;
G³ is C₁-C₂₄ alkylene, C₁-C₂₄ alkenylene, C₃-C₈ cycloalkylene, or C₃-C₈ cycloalkenylene;
R^{a} is H or C₁-C₁₂ alkyl;
R¹ and R² are each independently C₆-C₂₄ alkyl or C₆-C₂₄ alkenyl;
R³ is H, OR⁵, CN, —C(═O)OR⁴, —OC(═O)R⁴ or —NR⁵C(═O)R⁴;
R⁴ is C₁-C₁₂ alkyl;
R⁵ is H or C₁-C₆ alkyl; and
x is 0, 1 or 2;
or a PEG lipid with the formula (IV) [chemical structure]
wherein R⁸ and R⁹ are each independently a straight or branched, saturated or unsaturated alkyl chain containing from 10 to 30 carbon atoms, wherein the alkyl chain is optionally interrupted by one or more ester bonds;
and w has a mean value ranging from 30 to 60;
or a cationic lipid with the formula I: [chemical structure]
or a pharmaceutically acceptable salt, tautomer, prodrug or stereoisomer thereof, wherein:
L¹ and L² are each independently —O(C═O)—, —(C═O)O— or a carbon-carbon double bond;
R^{1a} and R^{1b} are, at each occurrence, independently either (a) H or C₁-C₁₂ alkyl, or (b) R^{1a} is H or C₁-C₁₂ alkyl, and R^{1b} together with the carbon atom to which it is bound is taken together with an adjacent R^{1b} and the carbon atom to which it is bound to form a carbon-carbon double bond;
R^{2a} and R^{2b} are, at each occurrence, independently either (a) H or C₁-C₁₂ alkyl, or (b) R^{2a} is H or C₁-C₁₂ alkyl, and R^{2b} together with the carbon atom to which it is bound is taken together with an adjacent R^{2b} and the carbon atom to which it is bound to form a carbon-carbon double bond;
R^{3a} and R^{3b} are, at each occurrence, independently either (a) H or C₁-C₁₂ alkyl, or (b) R^{3a} is H or C₁-C₁₂ alkyl, and R^{3b} together with the carbon atom to which it is bound is taken together with an adjacent R^{3b} and the carbon atom to which it is bound to form a carbon-carbon double bond;
R^{4a} and R^{4b} are, at each occurrence, independently either (a) H or C₁-C₁₂ alkyl, or (b) R^{4a} is H or C₁-C₁₂ alkyl, and R^{4b} together with the carbon atom to which it is bound is taken together with an adjacent R^{4b} and the carbon atom to which it is bound to form a carbon-carbon double bond;
R⁵ and R⁶ are each independently methyl or cycloalkyl;
R⁷ is, at each occurrence, independently H or C₁-C₁₂ alkyl;
R⁸ and R⁹ are each independently C₁-C₁₂ alkyl; or R⁸ and R⁹, together with the nitrogen atom to which they are attached, form a 5, 6 or 7-membered heterocyclic ring comprising one nitrogen atom;
a and d are each independently an integer from 0 to 24;
b and c are each independently an integer from 1 to 24; and
e is 1 or 2;
or a cationic lipid with the formula II: [chemical structure]
or a pharmaceutically acceptable salt, tautomer, prodrug or stereoisomer thereof, wherein:
L¹ and L² are each independently —O(C═O)—, —(C═O)O—, —C(═O)—, —O—, —S(O)ₓ—, —S—S—, —C(═O)S—,
—SC(═O)—, —NR^{a}C(═O)—, —C(═O)NR^{a}—, —NR^{a}C(═O)NR^{a}—, —OC(═O)NR^{a}—, —NR^{a}C(═O)O—, or a direct bond;
G¹ is C₁-C₂ alkylene, —(C═O)—, —O(C═O)—, —SC(═O)—, —NR^{a}C(═O)— or a direct bond
G² is —C(═O)—, —(C═O)O—, —C(═O)S—, —C(═O)NR^{a}— or a direct bond;
G³ is C₁-C₆ alkylene;
R^{a} is H or C₁-C₁₂ alkyl;
R^{1a} and R^{1b} are, at each occurrence, independently either: (a) H or C₁-C₁₂ alkyl; or (b) R^{1a} is H or C₁-C₁₂ alkyl, and R^{1b} together with the carbon atom to which it is bound is taken together with an adjacent R^{1b} and the carbon atom to which it is bound to form a carbon-carbon double bond;
R^{2a} and R^{2b} are, at each occurrence, independently either: (a) H or C₁-C₁₂ alkyl; or (b) R^{2a} is H or C₁-C₁₂ alkyl, and R^{2b} together with the carbon atom to which it is bound is taken together with an adjacent R^{2b} and the carbon atom to which it is bound to form a carbon-carbon double bond;
R^{3a} and R^{3b} are, at each occurrence, independently either: (a) H or C₁-C₁₂ alkyl; or (b) R^{3a} is H or C₁-C₁₂ alkyl, and R^{3b} together with the carbon atom to which it is bound is taken together with an adjacent R^{3b} and the carbon atom to which it is bound to form a carbon-carbon double bond;
R^{4a} and R^{4b} are, at each occurrence, independently either: (a) H or C₁-C₁₂ alkyl; or (b) R^{4a} is H or C₁-C₁₂ alkyl, and R^{4b} together with the carbon atom to which it is bound is taken together with an adjacent R^{4b} and the carbon atom to which it is bound to form a carbon-carbon double bond;
R⁵ and R⁶ are each independently H or methyl;
R⁷ is C₄-C₂₀ alkyl;
R⁸ and R⁹ are each independently C₁-C₁₂ alkyl; or R⁸ and R⁹, together with the nitrogen atom to which they are attached, form a 5, 6 or 7-membered heterocyclic ring;
a, b, c and d are each independently an integer from 1 to 24; and
x is 0, 1 or 2;
and (ii) a mRNA compound comprising an mRNA sequence encoding at least one antigenic peptide or protein, wherein the mRNA compound optionally does not comprise a nucleoside modification, in particular not a base modification;
wherein the mRNA compound is encapsulated in or associated with said lipid nanoparticle.

2-4. (canceled)

5. The lipid nanoparticle of claim 1, comprising the cationic lipid of any one of formulae (I), (II), or (III) and additionally comprising
(iii) a PEG lipid with the formula (IV): [chemical structure]
wherein R⁸ and R⁹ are each independently a straight or branched, saturated or unsaturated alkyl chain containing from 10 to 30 carbon atoms, wherein the alkyl chain is optionally interrupted by one or more ester bonds;
and w has a mean value ranging from 30 to 60.

6-8. (canceled)

9. The lipid nanoparticle of claim 1, wherein the cationic lipid is selected from structures I-1 to I-41, II-1 to II-34 or III-1 to III-36:

| No. | Structure |
|---|---|
| I-1 | [chemical structure] |
| I-2 | [chemical structure] |
| I-3 | [chemical structure] |
| I-4 | [chemical structure] |
| I-5 | [chemical structure] |
| I-6 | [chemical structure] |
| I-7 | [chemical structure] |
| I-8 | [chemical structure] |
| I-9 | [chemical structure] |
| I-10 | [chemical structure] |
| I-11 | [chemical structure] |
| I-12 | [chemical structure] |
| I-13 | [chemical structure] |
| I-14 | [chemical structure] |
| I-15 | [chemical structure] |
| I-16 | [chemical structure] |
| I-17 | [chemical structure] |
| I-18 | [chemical structure] |
| I-19 | [chemical structure] |
| I-20 | [chemical structure] |
| I-21 | [chemical structure] |
| I-22 | [chemical structure] |
| I-23 | [chemical structure] |
| I-24 | [chemical structure] |
| I-25 | [chemical structure] |
| I-26 | [chemical structure] |
| I-27 | [chemical structure] |
| I-28 | [chemical structure] |
| I-29 | [chemical structure] |
| I-30 | [chemical structure] |
| I-31 | [chemical structure] |
| I-32 | [chemical structure] |
| I-33 | [chemical structure] |
| I-34 | [chemical structure] |
| I-35 | [chemical structure] |
| I-36 | [chemical structure] |
| I-37 | [chemical structure] |
| I-38 | [chemical structure] |
| I-39 | [chemical structure] |
| I-40 | [chemical structure] |
| I-41 | [chemical structure] |
| No. | Structure |
|---|---|
| II-1 | [chemical structure] |
| II-2 | [chemical structure] |
| II-3 | [chemical structure] |
| II-4 | [chemical structure] |
| II-5 | [chemical structure] |
| II-6 | [chemical structure] |
| II-7 | [chemical structure] |
| II-8 | [chemical structure] |
| II-9 | [chemical structure] |
| II-10 | [chemical structure] |
| II-11 | [chemical structure] |
| II-12 | [chemical structure] |
| II-13 | [chemical structure] |
| II-14 | [chemical structure] |
| II-15 | [chemical structure] |
| II-16 | [chemical structure] |
| II-17 | [chemical structure] |
| II-18 | [chemical structure] |
| II-19 | [chemical structure] |
| II-20 | [chemical structure] |
| II-21 | [chemical structure] |
| II-22 | [chemical structure] |
| II-23 | [chemical structure] |
| II-24 | [chemical structure] |
| II-25 | [chemical structure] |
| II-26 | [chemical structure] |
| II-27 | [chemical structure] |
| II-28 | [chemical structure] |
| II-29 | [chemical structure] |
| II-30 | [chemical structure] |
| II-31 | [chemical structure] |
| II-32 | [chemical structure] |
| II-33 | [chemical structure] |
| II-34 | [chemical structure] |
| II-35 | [chemical structure] |
| II-36 | [chemical structure] |
| No. | Structure |
|---|---|
| III-1 | [chemical structure] |
| III-2 | [chemical structure] |
| III-3 | [chemical structure] |
| III-4 | [chemical structure] |
| III-5 | [chemical structure] |
| III-6 | [chemical structure] |
| III-7 | [chemical structure] |
| III-8 | [chemical structure] |
| III-9 | [chemical structure] |
| III-10 | [chemical structure] |
| III-11 | [chemical structure] |
| III-12 | [chemical structure] |
| III-13 | [chemical structure] |
| III-14 | [chemical structure] |
| III-15 | [chemical structure] |
| III-16 | [chemical structure] |
| III-17 | [chemical structure] |
| III-18 | [chemical structure] |
| III-19 | [chemical structure] |
| III-20 | [chemical structure] |
| III-21 | [chemical structure] |
| III-22 | [chemical structure] |
| III-23 | [chemical structure] |
| III-24 | [chemical structure] |
| III-25 | [chemical structure] |
| III-26 | [chemical structure] |
| III-27 | [chemical structure] |
| III-28 | [chemical structure] |
| III-29 | [chemical structure] |
| III-30 | [chemical structure] |
| III-31 | [chemical structure] |
| III-32 | [chemical structure] |
| III-33 | [chemical structure] |
| III-34 | [chemical structure] |
| III-35 | [chemical structure] |
| III-36 | [chemical structure] |

10. (canceled)

11. The lipid nanoparticle of claim 1, wherein in the PEG lipid R⁸ and R⁹ are saturated alkyl chains.

12. The lipid nanoparticle according to claim 11, wherein the PEG lipid is [chemical structure]
wherein n has a mean value ranging from 30 to 60.

13. The lipid nanoparticle of claim 1, wherein the mRNA compound comprises at least one chemical modification, and wherein the mRNA compound preferably does not comprise a nucleoside modification, wherein said nucleoside modification is optionally a base modification, and wherein said base modification is optionally a 1-methylpseudouridine modification.

14. (canceled)

15. The lipid nanoparticle of claim 1, wherein the mRNA sequence is an artificial mRNA sequence.

16. The lipid nanoparticle of claim 1, wherein the coding region of the mRNA sequence encoding the at least one antigenic peptide or protein comprises a sequence modification.

17-18. (canceled)

19. The lipid nanoparticle of claim 1, wherein the mRNA sequence additionally comprises
a) a 5′-CAP structure, and/or
b) a poly(A) sequence, and/or
c) a poly (C) sequence.

20. (canceled)

21. The lipid nanoparticle of claim 1, wherein the mRNA sequence additionally comprises at least one histone stem loop.

22-24. (canceled)

25. The lipid nanoparticle of claim 1, wherein the mRNA sequence comprises, preferably in 5′ to 3′-direction, the following elements:
a) a 5′-CAP structure, preferably m7GpppN,
b) at least one coding region encoding at least one antigenic peptide or protein,
c) a poly(A) tail, preferably consisting of 10 to 200, 10 to 100, 40 to 80 or 50 to 70 adenosine nucleotides,
d) optionally a poly(C) tail, preferably consisting of 10 to 200, 10 to 100, 20 to 70, 20 to 60 or 10 to 40 cytosine nucleotides, and
e) optionally a histone stem-loop, preferably comprising the RNA sequence according to SEQ ID NO: 224306.

26-30. (canceled)

31. The lipid nanoparticle of claim 1, wherein the mRNA sequence comprises, preferably in 5′ to 3′-direction, the following elements:
a) a 5′-CAP structure, preferably m7GpppN,
b) at least one coding region encoding at least one antigenic peptide or protein,
c) a 3′-UTR element comprising or consisting of a nucleic acid sequence which is derived from an alpha globin gene, preferably comprising the corresponding RNA sequence of the nucleic acid sequence according to SEQ ID NO: 224297, a homolog, a fragment or a variant thereof;
d) a poly(A) tail, preferably consisting of 10 to 200, 10 to 100, 40 to 80 or 50 to 70 adenosine nucleotides,
e) optionally a poly(C) tail, preferably consisting of 10 to 200, 10 to 100, 20 to 70, 20 to 60 or 10 to 40 cytosine nucleotides, and
f) optionally a histone stem-loop, preferably comprising the RNA sequence according to SEQ ID NO: 224306.

32-36. (canceled)

37. The lipid nanoparticle of claim 1, wherein the mRNA sequence comprises, preferably in 5′ to 3′-direction, the following elements:
a) a 5′-CAP structure, preferably m7GpppN,
b) a 5′-UTR element which comprises or consists of a nucleic acid sequence which is derived from the 5′-UTR of a TOP gene, preferably comprising or consisting of the corresponding RNA sequence of a nucleic acid sequence according to SEQ ID NO: 224287 or 224289, a homolog, a fragment or a variant thereof;
c) at least one coding region encoding at least one antigenic peptide or protein;
d) a 3′-UTR element comprising or consisting of a nucleic acid sequence which is derived from an albumin gene, preferably comprising the corresponding RNA sequence of the nucleic acid sequence according to SEQ ID NO: 224303, a homolog, a fragment or a variant thereof;
e) a poly(A) tail, preferably consisting of 10 to 200, 10 to 100, 40 to 80 or 50 to 70 adenosine nucleotides,
f) optionally a poly(C) tail, preferably consisting of 10 to 200, 10 to 100, 20 to 70, 20 to 60 or 10 to 40 cytosine nucleotides, and
g) optionally a histone stem-loop, preferably comprising the RNA sequence according to SEQ ID NO: 224306.

38-60. (canceled)

61. The lipid nanoparticle of claim 1, wherein the mRNA compound comprises at least two mRNA sequences, wherein the at least two mRNA sequences encode two different antigenic peptides and/or proteins.

62-66. (canceled)

67. A method for the preparation of a lipid nanoparticle of claim 1, comprising the steps of:
(i) providing
a) a cationic lipid
of formula (I) [chemical structure]
as defined above or a pharmaceutically acceptable salt, tautomer, prodrug or stereoisomer thereof,
and/or
of formula (II) [chemical structure]
as defined above or a pharmaceutically acceptable salt, tautomer, prodrug or stereoisomer thereof,
and/or
of formula III: [chemical structure]
as defined above or a pharmaceutically acceptable salt, tautomer, prodrug or stereoisomer thereof;
and/or
b) a PEG lipid with the formula (IV): [chemical structure]
as defined above;
c) at least one mRNA compound comprising an mRNA sequence encoding at least one antigenic peptide or protein, wherein the mRNA compound optionally does not comprise a nucleoside modification, in particular not a base modification; and
d) optionally a steroid; and
e) optionally a neutral lipid;
(ii) solubilizing the cationic lipid and/or the PEG lipid and optionally the neutral lipid and/or the steroid or a steroid derivative in ethanol;
(iii) mixing the ethanolic lipid solution with an aqueous solution comprising the mRNA polynucleotide
(iv) removing the ethanol; and optionally
(v) separating or purifying the lipid nanoparticles.

68-69. (canceled)

70. A pharmaceutical composition comprising at least one lipid nanoparticle of claim 1.

71-72. (canceled)

73. A method of treating or preventing a disease or disorder in a subject in need thereof comprising administering to the subject an effective amount of a lipid nanoparticle of claim 1.

74-81. (canceled)

82. A method for raising an immune response in a subject in need thereof, comprising administering to the subject a lipid nanoparticle of claim 1.

83. The method of claim 73, wherein the disease or disorder is cancer or a tumour disease, an infectious disease, an allergy, or an autoimmune disease or disorder related thereto

84. The lipid nanoparticle of claim 1, whereby the lipid nanoparticle has a molar ratio (mol %) of 47.4:10:40.9:1.7 (cationic lipid, DSPC, cholesterol and PEG-lipid).

85-88. (canceled)

The application's sequence listing, which the Patent Office published only in electronic form, follows.

SEQUENCE LISTING (224364 sequences)

SEQ ID NO: 1 - protein, 566 aa, Artificial Sequence
  derived and/or modified protein sequence (wt) from hemagglutinin__InfluenzaA__AAA16879
MEAKLFVLFCTFTVLKADTICVGYHANNSTDTVDTVLEKNVTVTHSVNLLEDSHNGKLCSLNGIAPLQLGKCNVAGWLLGNPECDLLLTANSWSYIIETSNSENGTCYPGEFIDYEELREQLSSVSSFEKFEIFPKASSWPNHETTKGVTAACSYSGASSFYRNLLWITKKGTSYPKLSKSYTNNKGKEVLVLWGVHHPPTTSEQQSLYQNADAYVSVGSSKYNRRFTPEIAARPKVRGQAGRMNYYWTLLDQGDTITFEATGNLIAPWYAFALNKGSDSGIITSDAPVHNCDTRCQTPHGALNSSLPFQNVHPITIGECPKYIKSTKLRMATGLRNVPSIQSRGLFGAIAGFIEGGWTGMIDGWYGYHHQNEQGSGYAADQKSTQNAIDGITNKVNSVIEKMNTQFTAVGKEFNNLERRIENLNKKVDDGFLDVWTYNAELLVLLENERTLDFHDSNVRNLYEKVKSQLRNNAKELGNGCFEFYHKCDDECMEREKNGTYDYPKYSEESKLNREEIDGVKLESMGVYQILAIYSTVASSLVLLVSLGAISFWMCSNGSLQCRICI

SEQ ID NO: 2 - protein, 566 aa, Artificial Sequence
  derived and/or modified protein sequence (wt) from hemagglutinin__InfluenzaA__AAA16880
MEAKLFVLFCTFTVLKADTICVGYHANNSTDTVDTVLEKNVTVTHSVNLLEDSHNGKLCSLNGIAPLQLGKCNVAGWLLGNPECDLLLTANSWSYIIETSNSENGTCYPGEFIDYEELREQLSSVSSFEKFEIFPKASSWPNHETTKGVTAACSYSGASSFYRNLLWITKKGTSYPTLSKSYTNNKGKEVLVLWGVHHPPTVNEQQSLYQNADAYVSVGSSKYNRRFTPEIAARPKVRGQAGRMNYHWTLLDQGDTITFEATGNLIAPWYAFALNKGSDSGIITSDAPVHNCDTRCQTPHGALNSSLPFQNVHPITIGECPKYVKSTKLRMATGLRNVPSIQSRGLFGAIAGFIEGGWTGMIDGWYGYHHQNEQGSGYAADQKSTQNAIDGITNKVNSVIEKMNTKFTAVGKEFNNLERRIENLNKKVDDGFLDVWTYNAELLVLLENERTLDFHDSNVRNLYEKVKSQLRNNAKELGNGCFEFYHKCDDECIESVKNGTYDYPKYSEESKLNREEIDGVKLESMGVYQILAIYSTVASSLVLLVSLGAISFWMCSNGSLQCRICI

SEQ ID NO: 3 - protein, 562 aa, Artificial Sequence
  derived and/or modified protein sequence (wt) from hemagglutinin__InfluenzaA__AAA64362
MAIIYLILLFTAVRGDQICIGYHANNSTEKVDTILERNVTVTHAKDILEKTHNGKLCKLNGIPPLELGDCSIAGWLLGNPECDRLLSVPEWSYIMEKENPRDGLCYPGSFNDYEELKYLLSSVKHFEKVKILPKDRWTQHTTTGGSRACAVSGNPSFFRNMVWLTKKGSDYPVAKGSYNNTSGEQMLIIWGVHHPNDETEQRTLYQNVGTYVSVGTSTLNKRSTPEIATRPKVNGLGSRMEFSWTLLDMWDTINFESTGNLIAPEYGFKISKRGSSGIMKTEGTLENCETKCQTPLGAINTTLPFHNVHPLTIGECPRYVKSEKLVLATGLRNVPQIESRGLFGAIAGFIEGGWQGMVDGWYGYHHSNDQGSGYAADKESTQKAFDGITNKVNSVIEKMNTQFEAVGKEFSNLERRLENLNKKMEDGFLDVWTYNAELLVLMENERTLDFHDSNVKNLYDKVRMQLRDNVKELGNGCFEFYHKCDDECMNSVKNGTYDYPKYEEESKLNRNEIKGVKLSSMGVYQILAIYATVAGSLSLAIMMAGISFWMCSNGSLQCRICI

SEQ ID NO: 4 - protein, 562 aa, Artificial Sequence
  derived and/or modified protein sequence (wt) from hemagglutinin__InfluenzaA__AAA64363
MAIIYLILLFTAVRGDQICIGYHANNSTEKVDTILERNVTVTHAKDILEKTHNGKLCKLNGIPPLELGDCSIAGWLLGNPECDRLLSVPEWSYIMEKENPRDGLCYPGSFNDYEELKHLLSSVKHFEKVKILPKDRWTQHTTTGGSRACAVSGNPSFFRNMVWLTKKGSNYPVAKGSYNNTSGEQMLIIWGVHHPNDETEQRTLYQNVGTYVSVGTSTLNKRSTPDIATRPKVNGQGGRMEFSWTLLDMWDTINFESTGNLIAPEYGFKISKRGSSGIMKTEGTLGNCETKCQTPLGAINTTLPFHNVHPLTIGECPKYVKSEKLVLATGLRNVPQIESRGLFGAIAGFIEGGWQGMVDGWYGYHHSNDQGSGYAADKESTQKAFDGITNKVNSVIEKINTQFEAVEKEFSNLERRLENLNKKMEDGFLDVWTYNAELLVLMENERTLDFHDSSVKNLYDKVRMQLRDNVKELGNGCFEFYHKCDDECMNSVKNGTYDYPKYEEESKLNRNEIKGVKLSSMGIYQILAIYATVAGSLSLAIMMAGISFWMCSNGSLQCRICI

SEQ ID NO: 5 - protein, 562 aa, Artificial Sequence
  derived and/or modified protein sequence (wt) from hemagglutinin__InfluenzaA__AAA64365
MAIIYLILLFTAVRGDQICIGYHANNSTEKVDTILERNVTVTHAKDILEKTHNGKLCKLNGIPPLELGDCSIAGWLLGNPECDRLLSVPEWSYIMEKENPRDGLCYPGSFNDYEELKHLLSSVKHFEKVKILPKDRWTQHTTTGGSRACAVSGNPSFFRNMVWLTKKGSNYPVAKGSYNNTSGEQMLIIWGVHHPNDETEQRTLYQNVGTYVSVGTSTLNKRSTPDIATRPKVDGLGSRMEFSWTLLDMWDTINFESTGNLIAPEYGFKISKRGSSGIMKTEGTLGNCETKCQTPLGAINTTLPFHNVHPLTIGECPKYVKSEKLVLATGLRNVPQIESRGLFGAIAGFIEGGWQGMVDGWYGYHHSNDQGSGYAADKESTQKAFDGITNKVNSVIEKMNTQFEAVEKEFSNLERRLENLNKKMEDGFLDVWTYNAELLVLMENERTLDFHDSNVKNLYNKVRMQLRDNVKELGNGCFEFYHKCDDECMNSVKNGTYDYPKYEEESKLNRNEIKGVKLSSMGIYQILAIYATVAGSLSLAIMMAGISFWMCSNGSLQCRICI

SEQ ID NO: 6 - protein, 562 aa, Artificial Sequence
  derived and/or modified protein sequence (wt) from hemagglutinin__InfluenzaA__AAA64366
MAIIYLILLFTAVRGDQICIGYHANNSTEKVDTILERNVTVTHAKDILEKTHNGKLCKLNGIPPLELGDCSIAGWLLGNPECDRLLSVPEWSYIMEKENPRDGLCYPGSFNDYEELKHLLSSVKHFEKVKILPKDRWTQHTTTGGSRACAVSGNPSFFRNMVWLTKKESNYPVAKGSYNNTSGEQMLIIWGVHHPNDETEQRTLYQNVGTYVSVGTSTLNKRSTPDIATRPKVNGLGSRMEFSWTLLDMWDTINFESTGNLIAPEYGFKISKRGSSGIMKTEGTLENCETKCQTPLGAINTTLPFHNVHPLTIGECPKYVKSEKLVLATGLRNVPQIESRGLFGAIAGFIEGGWQGMVDGWYGYHHSNDQGSGYAADKESTQKAFDGITNKVNSVIEKMNTQFEAVGKEFSNLERRLENLNKKMEDGFLDVWTYNAELLVLMENERTLDFHDSNVKNLYDKVRMQLRDNVKELGNGCFEFYHKCDDECMNSVKNGTYDYPKYEEESKLNRNEIKGVKLSSMGVYQILAIYATVAGSLSLAIMMAGISFWMCSNGSLQCRICI

SEQ ID NO: 7 - protein, 566 aa, Artificial Sequence
  derived and/or modified protein sequence (wt) from hemagglutinin__InfluenzaA__AAA85781
MKTIIALSYIFCLVFAQDLPGNDNSTATLCLGHHAVPNGTLVKTITNDQIEVTNATELVQSSSTGKICDNPHRILDGINCTLIDALLGDPHCDGFQNEKWDLFVERSKAFSNCYPYDVPDYASLRSLVASSGTLEFINEGFNWTGVTQNGGSSACKRGPDNGFFSRLNWLYKSGSTYPVQNVTMPNNDNSDKLYIWGVHHPSTDKEQTNLYVQASGKVTVSTKRSQQTVIPNVGSRPWVRGLSSRVSIYWTIVKPGDILVINSNGNLIAPRGYYKMRTGKSSIMRSDAPIGTCSSECITPNGSIPNDKPFQNVNKITYGACPKYVKQNTLKLATGMRNVPEKQIRGIFGAIAGFIENGWEGMIDGWYGFRHQNSEGTGQAADLKSTQAAIDQINGKLNRVIEKTNEKFHQIEKEFSEVEGRIQDLEKYVEDTKIDLWSYNAELLVALENQHTIDLTDSEMNKLFEKTRRQLRENAEDMGNGCFKIYHKCDNPCIGSIRNGTYDHDVYRDEALNNRFQIKGVELKSGYKDWILWISFAISCFLLCVVLLGFIMWACQKGNIRCNICI

SEQ ID NO: 8 - protein, 568 aa, Artificial Sequence
  derived and/or modified protein sequence (wt) from hemagglutinin__InfluenzaA__AAC14418
MERIVLLLATVSLVKSDQICIGYHANNSTEQVDTIMEKNVTVTHAQDILERTHNGKLCDLNGVKPLILRDCSVAGWLLGNPMCDEFINVPEWSYIVEKASPANDLCYPGNFNDYEELKHLLSRINHFEKIQIIPKSSWSNHDASSGVSSACPYLGRSSFFRNVVWLIKKNSTYPTIKRSYNNTNQEDLLVLWGIHHPNDAAEQTKLYQNPTTYISVGTSTLNQRLVPEIATRPKVNGQSGRMEFFWTILKPNDAINFESNGNFIAPEYAYKIVKKGDSTIMKSELEYGNCNTKCQTPMGAINSSMPFHNIHPLTIGECPKYVKSNRLVLATGLRNAPQRERRRKKRGLFGAIAGFIEGGWQGMVDGWYGYHHSNEQGSGYAADQESTQKAIDGVTNKVNSIINKMNTQFEAVGREFNNLERRIENLNKKMEDGFLDVWTYNAELLVLMENERTLDFHDSNVKNLYDKVRLQLRDNAKELGNGCFEFYHKCDNECMESVKNGTYDYPQYSEEARLNREEISGVKLESMGTYQILSIYSTVASSLALAIMVAGLSLWMCSNGSLQCRICI

SEQ ID NO: 9 - protein, 568 aa, Artificial Sequence
  derived and/or modified protein sequence (wt) from hemagglutinin__InfluenzaA__AAC40508
MERTVLLLATVSLVKSDQICIGYHANNSTEQVDTIMEKNVTVTHAQDILERTHNGKLCDLNGVKPLILRDCSVAGWLLGNPMCDEFINVPEWSYIVEKASPANDLCYPGNFNDYEELKHLLSRINHFEKIQIIPKSSWSNHDASSGVSSACPYLGRSSFFRNVVWLIKKNSAYPTIKRSYNNTNQEDLLVLWGVHHPNDAAEQTKLYQNPTTYISVGTSTLNQRLVPEIATRPKVNGQSGRMEFFWTILKPNDAINFESNGNFIAPEYAYKIVKKGDSTIMKSELEYGNCNTKCQTPMGAINSSMPFHNIHPLTIGECPKYVKSNRLVLATGLRNTPQRERRRKKRGLFGAIAGFIEGGWQGMVDGWYGYHHSNEQGSCYSADKESTQKAIDGVTNKVNSIINKMNTQFEAVGREFNNLERRIENLNKKMEDGFLDVWTYNAELLVLMENERTLDFHDSNVKNLYDKVRLQLRDNAKELGNGCFEFYHKCDNECMESVKNGTYDYPQYSEEARLNREEISGVKLESMGTYQILSIYSTVASSLALAIMVAGLSLWMCSNGSLQCRICI

SEQ ID NO: 10 - protein, 566 aa, Artificial Sequence
  derived and/or modified protein sequence (wt) from hemagglutinin__InfluenzaA__AAF87274
MKAILVVLLYTFTTANADTLCIGYHANNSTDTVDTVLEKNVTVTHSVNLLENRHNGKLCKLKGVAPLHLGKCNIAGWLLGNPECELLFTASSWSYIVETSNSDNGTCYPGDFINYEELREQLSSVSSFERFEIFPKANSWPNHETNRGVTSACPYAGANSFYRNLIWLVKKGNSYPKLSKSYINNKGKEVLVLWGIHHPPTSNDQQSLYQNADAYVFVGSSKYNKKFMPEIATRPKVRGQAGRMNYYWTLIEPGDTITFEATGNLVAPRYAFAMERGSGSGIIISDTPVHDCNATCQTPKGAINTNLPFQNIHPVTIGECPKYVKSTRLRMATGLRNIPSIQSRGLFGAIAGFIEGGWTGMIDGWYGYHHQNEQGSGYAADRKSTQNAIDGITNKVNSVIEKMNTQFTAVGKEFNHLEKRIKNLNKKVDDGFLDVWTYNAELLVLLENERTLDYHDSNVKNLYEKVRSQLRNNAKEIGNGCFEFYHKCDDTCMESIKNGTYDYPKYSEEAKLTREEIDGVKLESTRIYQILAIYSTIASSLVLLVSLGAISFWMCSNGSLQCRICI

SEQ ID NO: 11 - protein, 566 aa, Artificial Sequence
  derived and/or modified protein sequence (wt) from hemagglutinin__InfluenzaA__AAF87275
MKAILVVLLYTFTTANADTLCIGYHANNSTDTVDTVLEKNVTVTHSVNLLENRHNGKLCKLKGVAPLHLGKCNIAGWLLGNPECELLFTASSWSYIVETSNSDNGTCYPGDFINYEELREQLSSVSSFERFEIFPKANSWPNHETNRGVTSACPYAGANSFYRNLIWLVKKGNSYPKLSKSYINNKGKEVLVLWGIHHPPTSNDQQSLYQNADAYVFVGSSKYNKKFMPEIATRPKVRGQAGRMNYYWTLIEPGDTITFEATGNLVAPRYAFAMERGSGSGIIISDTPVHDCNATCQTPKGAINTNLPFQNIHPVTIGECPKYVKSTRLRMATGLRNIPSIQSRGLFGAIAGFIEGGWTGMIDGWYGYHHQNEQGSGYAADRKSTQNAIDGITNKVNSVIEKMNTQFTAVGKEFNHLEKRIENLNKKVDDGFLDVWTYNAELLVLLENERTLDYHDSNVKNLYEKVRSQLRNNAKEIGNGCFEFYHKCDDTCMESIKNGTYDYPKYSEEAKLTREEIDGVKLESTRIYQILAIYSTIASSLVLLVSLGAISFWMCSNGSLQCRICI

SEQ ID NO: 12 - protein, 566 aa, Artificial Sequence
  derived and/or modified protein sequence (wt) from hemagglutinin__InfluenzaA__AAF87277
MKAILLVLLYTFTAANADTLCIGYHANNSTDTVDTVLEKNVTVTHSVNLLEDRHNGKLCKLRGIAPLHLGKCNIAGWLLGNPECELLFTASSWSYIVETSNSDNGTCYPGDFINYEELREQLSSVSSFERFEIFPKASSWPDHETNRGVTAACPYAGANSFYRNLIWLVKKGNSYPKLSKSYINNKEKEVLVLWGIHHPPTSTDQQSLYQNADAYVFVGSSKYNKKFKPEIASRPKVRGQAGRMDYYWTLVEPGDTITFEATGNLVVPRYAFAMKRGSGSGIIISDTPVHDCNTTCQTPKGAINTSLPFQNIHPVTIGECPKYVKSTKLRMATGLRNIPSIQSRGLFGAIAGFIEGGWTGMIDGWYGYHHQNEQGSGYAADRKSTQNAIDGVTNKVNSVIEKMNTQFTAVGKEFNHLEKRIENLNKKVDDGFLDVWTYNAELLVLLENERTLDYHDSNVKNLYEKVRSQLKNNAKEIGNGCFEFYHKCDDTCMESVKNGTYDYPKYSEESKLNREEIDGVKLESTRIYQILAIYSTVASSLILLVSLGAISFWMCSNGSLQCRICI

SEQ ID NO: 13 - protein, 566 aa, Artificial Sequence
  derived and/or modified protein sequence (wt) from hemagglutinin__InfluenzaA__AAF87278
MKAILLVLLYTFTAANADTLCIGYHANNSTDTVDTVLEKNVTVTHSVNLLEDRHNGKLCKLRGIAPLHLGKCNIAGWLLGNPECELLFTASSWSYIVETSNSDNGTCYPGDFINYEELREQLSSVSSFERFEIFPKASSWPNHETNRGVTAACPYAGANSFYRNLIWLVKKGNSYPKLSKSYINNKEKEVLVLWGIHHPPTSTDQQSLYQNADAYVFVGSSKYNKKFKPEIASRPKVRGQAGRMDYYWTLVEPGDTITFEATGNLVVPRYAFAMKRGSGSGIIISDTPVHDCNTTCQTPKGAINTSLPFQNIHPVTIGECPKYVKSTKLRMATGLRNIPSIQSRGLFGAIAGFIEGGWTGMIDGWYGYHHQNEQGSGYAADRKSTQNAIDGVTNKVNSVIEKMNTQFTAVGKEFNHLEKRIENLNKKVDDGFLDVWTYNAELLVLLENERALDYHDSNVKNLYEKVRSQLKNNAKEIGNGCFEFYHKCDDTCMESVKNGTYDYPKYSEESKLNREEIDGVKLESTRIYQILAIYSTVASSLILLVSLGAISFWMCSNGSLQCRICI

SEQ ID NO: 14 - protein, 566 aa, Artificial Sequence
  derived and/or modified protein sequence (wt) from hemagglutinin__InfluenzaA__AAF87279
MKAILLVLLYTFTAANADTLCIGYHANNSTDTVDTVLEKNVTVTHSVNLLEDRHNGKLCKLRGIAPLHLGKCNIAGWLLGNPECELLFTASSWSYIVETSNSDNGTCYPGDFINYEELREQLSSVSSFERFEIFPKASSWPNHETNRGVTAACPYAGANSFYRNLIWLVKKGNSYPKLSKSYINNKEKEVLVLWGIHHPPTSTDQQSLYQNADAYVFVGSSKYNKKFKPEIASRPKVRGQAGRMDYYWTLVEPGDTITFEATGNLVVPRYAFAMKRGSGSGIIISDTPVHDCNTTCQTPKGAINTSLPFQNIHPVTIGECPKYVKSTKLRMATGLRNIPSIQSRGLFGAIAGFIEGGWTGMIDGWYGYHHQNEQGSGYAADRKSTQNAIDGVTNKVNSVIEKMNTQFTAVGKEFNHLEKRIENLNKKVDDGFLDVWTYNAELLVLLENERTLDYHDSNVKNLYEKVRSQLKNNAKEIGNGCFEFYHKCDDTCMESVKNGTYDYPKYSEESKLNREEIDGVKLESTRIYQILAIYSTVASSLILLVSLGAISFWMCSNGSLQCRICI

SEQ ID NO: 15 - protein, 566 aa, Artificial Sequence
  derived and/or modified protein sequence (wt) from hemagglutinin__InfluenzaA__AAF87281
MKAILVVLLYTFTTANADTLCIGYHANNSTDTVDTVLEKNVTVTHSVNLLEDRHNGKLCKLKGIAPLHLGKCNIAGWLLGNPECELLFTASSWSYIVETSNSDNGTCYPGDFINYEELREQLSSVSSFERFEIFPKASSWPNHETNRGVTSACPYAGANSFYRNLIWLVKKGNSYPKLSKSYINNKGKKVLVLWGIHHPPTSTDQQSLYQNADAYVFVGSSKYNKKFMPEIATRPKVRGQAGRMNYYWTLIEPGDTITFEATGNLVVPRYAFAMERGYGSGIIISDTPVHDCNTTCQTPKGAINTSLPFQNIHPVTIGECPKYVKSTKLRMATGLRNIPSIQSRGLFGAIAGFIEGGWTGMIDGWYGYHHQNEQGSGYAADRKSTQNAIDGITNKVNSVIEKMNTQFTAVGKEFNHLEKRIENLNKKVDDGFLDVWTYNAELLVLLENERTLDYHDSNVKNLYEKVKSQLKNNAKEIGNGCFEFYHKCDDTCMESVKNGTYDYPKYSEEAKLNREEIDGVKLESTRIYQILAIYSTIASSLVLLVSLGAISFWMCSNGSLQCRICI

SEQ ID NO: 16 - protein, 566 aa, Artificial Sequence; identical to SEQ ID NO: 14
  derived and/or modified protein sequence (wt) from hemagglutinin__InfluenzaA__AAF87282

SEQ ID NO: 17 - protein, 566 aa, Artificial Sequence
  derived and/or modified protein sequence (wt) from hemagglutinin__InfluenzaA__AAF87283
MKAILVVLLYAFTTANADTLCIGYHANNSTDTVDTVLEKNVTVTHSVNLLEDRHNGKLCKLKGVAPLHLGKCNIAGWLLGNPECELLFTASSWSYIVETSNSDNGTCYPGDFINYEELREQLSSVSSFERFEIFPKASSWPNHETNRGVTSACPYSGANSFYRNLIWLVKKGNSYPKLSKSYINNKGKEVLVLWGIHHPPTSTDQQSLYQNADAYVFVGSSKYNKKFMPEIATRPKVRGQAGRMNYYWTLIEPGDTITFEATGNLVAPRYAFAMERGSGSGIIISDTPVYDCNTACQTPKGAINTSLPFQNIHPVTIGECPKYVKSTKLRMATGLRNIPSIQSRGLFGAIAGFIEGGWTGMIDGWYGYHHQNEQGSGYAPDRKSTQNAIDGITNKVNSVIEKMNTQFTAVGKEFNHLEKRIENLNKKVDDGFLNVWTYNAELLVLLENERTLDYHDSNVKNLYEKVRSQLKNNAKEIGNGCFEFYHKCDDTCMESVKNGTYDYPKYSEEARLNREEIDGVKLESTRIYQILAIYSTIASSLVLLVSLGAISFWMCSNGSLQCRICI

SEQ ID NO: 18 - protein, 566 aa, Artificial Sequence
  derived and/or modified protein sequence (wt) from hemagglutinin__InfluenzaA__AAF87284
MKAILVVLLYAFTTANADTLCIGYHANNSTDTVDTVLEKNVTVTHSVNLLEDRHNGKLCKLKGVAPLHLGKCNIAGWLLGNPECELLFTASSWSYIVETSNSDNGTCYPGDFINYEELREQLSSVSSFERFEIFPKASSWPNHETNRGVTSACLLFWSKQLLQKLNMAGKKGNSYPKLSKSYINNKGKEVLVLWGIHHPPTSTDQQSLYQNADAYVFVGSSKYNKKFMPEIATRPKVRGQAGRMNYYWTLIEPGDTITFEATGNLVAPRYAFAMERGSGSGIIISDTPVYDCNTACQTPKGAINTSLPFQNIHPVTIGECPKYVKSTKLRMATGLRNIPSIQSRGLFGAIAGFIEGGWTGMIDGWYGYHHQNEQGSGYAADRKSTQNAIDGITNKVNSVIEKMNTQFTAVGKEFNHLEKRIENLNKKVDDGFLNVWTYNAELLVLLENERTLDYHDSNVKNLYEKVRSQLKNNAKEIGNGCFEFYHKCDDTCMESVKNGTYDYPKYSEEARLNREEIDGVKLESTRIYQILAIYSTIASSLVLLVSLGAISFWMCSNGSLQCRICI

SEQ ID NO: 19 - protein, 566 aa, Artificial Sequence
  derived and/or modified protein sequence (wt) from hemagglutinin__InfluenzaA__AAG01749
MSTIIALSYILCLVFAQKLPGNDNSTATLCLGHHAVPNGTLVKTITNDQIEVTNATELVQSSSTGRICDSPHRILDGKNCTLIDALLGDPHCDGFQNKEWDLFVERSKAYSNCYPYDVPDYASLRSLVASSGTLEFTNEGFNWTGVAQDGTSYACKRGSVKSFFSRLNWLHKLEYKYPALNVTMPNNDKFDKLYIWGVHHPSTDSDQTSLYVQASGRVTVSTKRSQQTVIPNIGSRPWVRGISSRISIYWTIVKPGDILLINSTGNLIAPRGYFKIRSGKSSIMRSDAPIDNCNSECITPNGSIPNEKPFQNVNRITYGACPRYVKQNTLKLATGMRNVPEKQTRGIFGAIAGFIENGWEGMVDGWYGFRHQNSEGTGQAADLKSTQAAINQINGKLNRLIEKTNEKFHQIEKEFSEVEGRIQDLEKYVEDTKIDLWSYNAELLVALENQHTIDLTDSEMNKLFERTRKQLRENAEDMGNGCFKIYHKCDNACIGSIRNGTYDHDVYRDEALNNRFQIKGVELKSGYKDWILWISFAISCFLLCVVLLGFIMWACQKGNIRCNICI

SEQ ID NO: 20 - protein, 566 aa, Artificial Sequence
  derived and/or modified protein sequence (wt) from hemagglutinin__InfluenzaA__AAG01767
MNTIIALSYILCLVFAQKLPGNDNSTATLCLGHHAVPNGTLVKTITNDQIEVTNATELVQSSSTGRICDSPHRILDGKNCTLIDALLGDPHCDGFQNKEWDLFIERSKAYSNCYPYDVPDYSSLRSLVASSGTLEFTNEDFNWTGVAQDGGSYSCKRESVKSFFSRLNWLHKLEYKYPALNVTMPNNDKFDKLYIWGVHHPSTDSEQTSLYVQAIGRVTVSTKSSQQTVIPNIGSRPWVRGISSRISIYWTIVKPGDILLISSTGNLIAPRGYFKIRNGKSSIMRSDAPIDNCYSECITPNGSIPNDKPFQNVNRITYGACPKYVKQKTLKLATGMRNVPEKQTRGIFGAIAGFIENGWEGMVDGWYGFRHQNSEGTGQAADLKSTQAAIDQVNGKLNRLIEKTNEKFHQIEKEFSEVEGRIQDLEKYVEDTKIDLWSYNAELLVALENQHTIDLTDSEMNKLFEKTRKQLRENAEDMGNGCFKIYHKCDNACIGSIRNGTYDHDVYRDEALNNRFQIKGVELKSGYKDWILWISFAISCFLLCVVLLGFIMWACQKGNIRCNICI

SEQ ID NO: 21 - protein, 566 aa, Artificial Sequence
  derived and/or modified protein sequence (wt) from hemagglutinin__InfluenzaA__AAG01776
MNTIIALSYILCLVFAQKLPGNDNSTATLCLGHHAVPNGTLVKTITNDQIEVTNATELVQSSSTGRICDSPHRILDGKNCTLIDALLGDPHCDGFQNKEWDLFIERSKAYSNCYPYDVPDYSSLRSLVASSGTLEFTNEDFNWTGVAQDGGSYSCKRESVKSFFSRLNWLHKLEYKYPALNVTMPNNDKFDKLYIWGVHHPSTDSEQTSLYVQAIGRVTVSTKSSQQTVIPNIGSRPWVRGISSRISIYWTIVKPGDILLISSTGNLIAPRGYFKIRNGKSSIMRSDAPIDNCYSECITPNGSIPNDKPFQNVNRITYGACPKYVKQKTLKLATGMRNVPEKQTRGIFGAIAGFIENGWEGMVDGWYGFRHQNSEGTGQAADLKSTQAAIDQVNGKLNWLIEKTNEKFHQIEKEFSEVEGRIQDLEKYVEDTKIDLWSYNAELLVALENQHTIDLTDSEMNKLFEKTRKQLRENAEDMGNGCFKIYHKCDNACIGSIRNGTYDHDVYRDEALNNRFQIKGVELKSGYKDWILWISFAISCFLLCVVLLGFIMWACQKGNIRCNICI

SEQ ID NO: 22 - protein, 566 aa, Artificial Sequence
  derived and/or modified protein sequence (wt) from hemagglutinin__InfluenzaA__AAG01785
MKTIIALSYILCLVFAQKLPGNDNSTATLCLGHHAVPNGTLVKTITNDQIEVTNATELVQSSSTGRICDSPHRILDGKNCTLIDALLGDPHCDGFQNKEWDLFIERSKAYSNCYPYDVPDYSSLRSLVASSGTLEFTNEDFNWTGVAQDGGSYSCKRESVKSFFSRLNWLHKLEYKYPALNVTMPNNDKFDKLYIWGVHHPSTDSEQTSLYVQAIGRVTVSTKSSQQTVIPNIGSRPWVRGISSRISIYWTIVKPGDILLISSTGNLIAPRGYFKIRNGKSSIMRSDAPIDNCYSECITPNGSIPNDKPFQNVNRITYGACPKYVKQKTLKLATGMRNVPEKQTRGIFGAIAGFIENGWEGMVDGWYGFRHQNSEGTGQAADLKSTQAAIDQVNGKLNRLIEKTNEKFHQIEKEFSEVEGRIQDLEKYVEDTKIDLWSYNAELLVALENQHTIDLTDSEMNKLFEKTRKQLRENAEDMGNGCFKIYHKCDNACIGSIRNGTYDHDVYRDEALNNRFQIKGVELKSGYKDWILWISFAISCFLLCVVLLGFIMWACQKGNIRCNICI

SEQ ID NO: 23 - protein, 566 aa, Artificial Sequence
  derived and/or modified protein sequence (wt) from hemagglutinin__InfluenzaA__AAK52911
MKTIIALSYILCLVFAQKLPGNDNSTATLCLGHHAVPNGTLVKTITNDQIEVTNATELVQSSSTGRICDSPHQILDGKNCTLIDALLGDPHCDGFQNKEWDLFVERSTAYSNCYPYDVPDYASLRSLVASSGTLEFTKEGFNWTGVAQDGTSYACKRGSVKSFFSRLNWLHKLEYKYPALNVTMPNNDKFDKLYIWGVHHPSTDSDQTSLYVQASGRVTVSTKRSQQTVIPNIGSRPWVRGVSSRISIYWTIVKPGDILLINSTGNLIAPRGYFKIRSGKSSIMRSDAPIDNCNSECITPNGSIPNDKPFQNVNRITYGACPRYVKQNTLKLATGMRNVPEKQTRGIFGAIAGFIENGWEGMVDGWYGFRHQNSEGTGQAADLKSTQAAINQINGKLNRLIEKTNEKFHQIEKEFSEVEGRIQDLEKYVEDTKIDLWSYNAELLVALENQHTIDLTDSEMNKLFERTRKQLRENAEDMGNGCFKIYHKCDNACIGSIRNGTYDHDVYRDEALNNRFQIKGVELKSGYKDWILWISFAISCFLLCVVLLGFIMWACQKGNIRCNICI

SEQ ID NO: 24 - protein, 566 aa, Artificial Sequence
  derived and/or modified protein sequence (wt) from hemagglutinin__InfluenzaA__AAK52912
MKTIIALSYILCLVFAQKLPGNDNSTATLCLGHHAVPNGTLVKTITNDQIEVTNATELVQSSSTGRICDSPHRILDGKNCTLIDALLGDPHCDGFQNKEWDLFVERTKAYSNCYPYDVPDYASLRSLVASSGTLEFTNEGFNWTGVAQNGTSYACKRGSVKSFFSRLNWLHKLEYKYPALNVTMPNNDKFDKLYIWGVHHPSTDSDQTSLYVQASGRVTVSTKRSQQTVIPNIGSRPWVRGVSSRISIYWTIVKPGDILLINSTGNLIAPRGYFKIRSGKSSIMRSDAPIGNCNSECITPNGSIPNDKPFQNVNRITYGACPRYVKQNTLKLATGMRNVPEKQTRGIFGAIAGFIENGWEGMVDGWYGFRHQNSEGTGQAADLKSTQAAINQINGKLNRLIEKTNEKFHQIEKEFSEVEGRIQDLEKYVEDTKIDLWSYNAELLVALENQHTIDLTDSEMNKLFERTRKQLRENAEDMGNGCFKIYHKCDNACIGSIRNGTYDHDVYRDEALNNRFQIKGVELKSGYKDWILWISFAISCFLLCVVLLGFIMWACQKGNIRCNICI

SEQ ID NO: 25 - protein, 566 aa, Artificial Sequence
  derived and/or modified protein sequence (wt) from hemagglutinin__InfluenzaA__AAK71687
MKAILVVLLYTFTTANADTLCIGYHANNSTDTVDTVLEKNVTVTHSVNLLEDRHNGKLCKLRGVAPLHLGKCNIAGWLLGNPECESLFTASSWSYIVETSNSDNGTCYPGDFINYEELREQLSSVSSFERFEIFPETSSWPNHDTNRGVTAACPHAGANSFYRNLIWLAKKGDSYPKLSKSYINNKGKEVLVLWGIHHPPTSADQQSLYQNADAYVFVGSSRYSKKFKPEIATRPKVRGQAGRMNYYWTLVEPGDKITFEATGNLVVPRYAFAMKRNSESGIIISDISVHDCNTTCQTPKGAINTSLPFQNIHPVTIGECPKYVKSTKLRMATGLRNVPSIQSRGLFGAIAGFIEGGWTGMIDGWYGYHHQNEQGSGYAADLKSTQNAIDGITNKVNSVIEKMNTQFTVVGKEFNHLEKRIENLNKKVDDGFLDIWTYNAELLVLLENERTLDYHDSNVKNLYEKVRSQLKNNAKEIGNGCFEFYHKCDDTCMESVKNGTYDYPKYSEEAKLNREEIDGVKLESTRIYQILAIYSTVASSLVLVVSLGTISFWMCSNGSLQCRICI

SEQ ID NO: 26 - protein, 568 aa, Artificial Sequence
  derived and/or modified protein sequence (wt) from hemagglutinin__InfluenzaA__AAS65618
MEKIVLLFAIVSLVKSDQICIGYHANNSTEQVDTIMEKNVTVTHAQDILEKTHNGKLCDLDGVKPLILRDCSVAGWLLGNPMCDEFINVPEWSYIVEKANPVNDLCYPGDFNDYEELKHLLSRINHFEKIQIIPKSSWSSHEVSLGVSSACPYQGKSSFFRNVVWLIKKNSTYPTIKRSYNNTNQEDLLVLWGIHHPNDAAEQTKLYQNPTTYISVGTSTLNQRLVPRIATRSKVNGQSGRMEFFWTILKPNDAINFESNGNFIAPEYAYKIVKKGDSTIMKSELEYGNCNTKCQTPMGAINSSMPFHNIHPLTIGECPKYVKSNRLVLATGLRNSPQRERRRKKRGLFGAIAGFIEGGWQGMVDGWYGYHHSNEQGSGYAAAKESTQKAIDGVTNKVNSIIDKMNTQFEAVGREFNNLERRIENLNKKMEDGFLDVWTYNAELLVLMENERTLDFHDSNVKNLYDKVRLQLKDNAKELGNGCFEFYHKCDNECMESVRNGTYDYPQYSEEARLKREEISGVKLESIGIYQILSIYSTVASSLALAIMVAGLSLWMCSNGSLQCRICI

SEQ ID NO: 27 - protein, 567 aa, Artificial Sequence
  derived and/or modified protein sequence (wt) from hemagglutinin__InfluenzaA__AAT38819
MNTQILAFIACMLIGTKGDKICLGHHAVANGTKVNTLTERGIEVVNATETVETVNIKKICTQGKRPTDLGQCGLLGTLIGPPQCDQFLEFDANLIIERREGTDVCYPGKFTNEESLRQILRGSGGIDKESMGFTYSGIRTNGATSACRRSGSSFYAEMKWLLSNSDNAAFPQMTKSYRNPRNKPALIIWGVHHSGSATEQTKLYGSGNKLITVGSSKYQQSFTPSPGARPQVNGQSGRIDFHWLLLDPNDTVTFTFNGAFIAPDRASFFRGESLGVQSDVPLDSGCEGDCFHSGGTIVSSLPFQNINPRTVGKCPRYVKQTSLLLATGMRNVPENPKQAYQKQMTRGLFGAIAGFIENGWEGLIDGWYGFRHQNAQGEGTAADYKSTQSAIDQITGKLNRLIDKTNQQFELIDNEFSEIEQQIGNVINWTRDSMTEVWSYNAELLVAMENQHTIDLADSEMNKLYERVRKQLRENAEEDGTGCFEIFHKCDDQCMESIRNNTYDHTQYRTESLQNRIQIDPVKLSSGYKDIILWFSFGASCFLLLAIAMGLVFICIKNGNMRCTICI

SEQ ID NO: 28 - protein, 568 aa, Artificial Sequence
  derived and/or modified protein sequence (wt) from hemagglutinin__InfluenzaA__AAV32636
MEKIVLLFAIVSLVKSDQICIGYHANNSTEQVDTIMEKNVTVTHAQDILEKTHNGKLCDLDGVKPLILRDCSVAGWLLGNPMCDEFINVPEWSYIVEKANPVNDLCYPGDFNDYEELKHLLSRINHFEKIQIIPKSSWSSHEASLGVSSACPYQGKSSFFRNVVWLIKKNSTYPTIKRSYNNTNQEDLLVLWGIHHPNDAAEQTKLYQNPTTYISVGTSTLNQRLVPRIATRSKVNGQSGRMEFFWTILKPNDAINFESNGNFIAPEYAYKIVKKGDSTIMKSELEYGNCNTKCQTPMGAINSSMPFHNIHPLTIGECPKYVKSNRLVLATGLRNSPQRERRRKKRGLFGAIAGFIEGGWQGMVDGWYGYHHSNEQGSGYAADKESTQKAIDGVTNKVNSIIDKMNTQFEAVGREFNNLERRIENLNKKMEDGFLDVWTYNAELLVLMENERTLDFHDSNVKNLYDKVRLQLRDNAKELGNGCFEFYHKCDNECMESVRNGTYDYPQYSEEARLKREEISGVKLESIGIYQILSIYSTVASSLALAIMVAGLSLWMCSNGSLQCRICI

SEQ ID NO: 29 - protein, 568 aa, Artificial Sequence; identical to SEQ ID NO: 28
  derived and/or modified protein sequence (wt) from hemagglutinin__InfluenzaA__AAV34704

SEQ ID NO: 30 - protein, 568 aa, Artificial Sequence
  derived and/or modified protein sequence (wt) from hemagglutinin__InfluenzaA__AAV65826
MEKIVLLFAIVSLVKSDQICIGYHANNSTEQVDTIMEKNVTVTHAQDILEKTHNGKLCDLDGVKPLILRDCSVAGWLLGNPMCDEFINVPEWSYIVEKANPVNDLCYPGDFNDYEELKHLLSRINHFEKIQIIPKSSWSSHEASLGVSSACPYQGKSSFFRNVVWLIKKNSTYPTIKRSYNNTNQEDLLVLGGIHHPNDAAEQTKLYQNPTTYISVGTSTLNQRLVPRIATRSKVNGQSGRMEFFWTILKPNDAINFESNGNFIAPEYAYKIVKKGDSTIMKSELEYGNCNTKCQTPMGAINSSMPFHNIHPLTIGECPKYVKSNRLVLATGLRNSPQRERRRKKRGLFGAIAGFIEGGWQGMVDGWYGYHHSNEQGSGYAADKESTQKAIDGVTNKVNSIIDKMNTQFEAVGREFNNLERRIENLNKKMEDGFLDVWTYNAELLVLMENERTLDFHDSNVKNLYDKVRLQLRDNAKELGNGCFEFYHKCDNECMESVRNGTYDYPQYSEEARLKREEISGVKLESIGIYQILSIYSTVASSLALAIMVAGLSLWMCSNGSLQCRICI

SEQ ID NO: 31 - protein, 566 aa, Artificial Sequence
  derived and/or modified protein sequence (wt) from hemagglutinin__InfluenzaA__AAX11505
MKTIIALSYILCLVFAQKLPGNDNSTATLCLGHHAVPNGTIVKTITNDQIEVTNATELVQSSSTGGICDSPHQILDGENCTLIDALLGDPQCDGFQNKKWDLFVERSKAYSNCYPYDVPDYASLRSLVASSGTLEFNNESFNWTGVTQNGTSSACERRSNKSFFSRLNWLTHLKYKYPALNVTMPNNEKFDKLYIWGVHHPGTDSDQISLYAQASGRITVSTKRSQQTVIPNIGSRPRVRDVSSRISIYWTIVKPGDILLINSTGNLIAPRGYFKIRSGKSSIMRSDAPIGKCNSECITPNGSIPNDKPFQNVNRITYGACPRYVKQNTLKLATGMRNVPEKQTRGIFGAIAGFIENGWEGMVDGWYGFRHQNSEGTGQAADLKSTQAAINQINGKLNRLIGKTNEKFHQIEKEFSEVEGRIQDLEKYVEDTKIDLWSYNAELLVALENQHTIDLTDSEMNKLFERTKKQLRENAEDMGNGCFKIYHKCDNACIGSIRNGTYDHDVYRDEALNNRFQIKGVELKSGYKDWILWISFAISCFLLCVALLGFIMWACQKGNIRCDICI

SEQ ID NO: 32 - protein, 566 aa, Artificial Sequence
  derived and/or modified protein sequence (wt) from hemagglutinin__InfluenzaA__AAX11525
MKTIIALSYILCLVFAQKLPGNDNSTATLCLGHHAVPNGTIVKTITNDQIEVTNATELVQSSSTGGICDSPHQILDGENCTLIDALLGDPQCDGFQNKKWDLFVERSKAYSNCYPYDVPDYASLRSLVASSGTLEFNNESFDWTGVTQNGTSSACKRRSNKSFFSRLNWLTHLKYKYPALNVTMPNNEKFDKLYIWGVHHPGTDSDQISLYAQASGRITVSTKRSQQTVIPNIGSRPRVRDVSSRISIYWTIVKPGDILLINSTGNLIAPRGYFKIRSGKSSIMRSDAPIGKCNSECITPNGSIPNDKPFQNVNRITYGACPRYVKQNTLKLATGMRNVPEKQTRGIFGAIAGFIENGWEGMVDGWYGFRHQNSEGTGQAADLKSTQAAINQINGKLNRLIGKTNEKFHQIEKEFSEVEGRIQDLEKYVEDTKIDLWSYNAELLVALENQHTIDLTDSEMNKLFERTKKQLRENAEDMGNGCFKIYHKCDNACIGSIRNGTYDHDVYRDEALNNRFQIKGVELKSGYKDWILWISFAISCFLLCVALLGFIMWACQKGNIRCNICI

SEQ ID NO: 33 - protein, 566 aa, Artificial Sequence; identical to SEQ ID NO: 32
  derived and/or modified protein sequence (wt) from hemagglutinin__InfluenzaA__AAX11535

SEQ ID NO: 34 - protein, 566 aa, Artificial Sequence; identical to SEQ ID NO: 32
  derived and/or modified protein sequence (wt) from hemagglutinin__InfluenzaA__AAX11545

SEQ ID NO: 35 - protein, 566 aa, Artificial Sequence; identical to SEQ ID NO: 31
  derived and/or modified protein sequence (wt) from hemagglutinin__InfluenzaA__AAX11555

SEQ ID NO: 36 - protein, 566 aa, Artificial Sequence; identical to SEQ ID NO: 32
  derived and/or modified protein sequence (wt) from hemagglutinin__InfluenzaA__AAX11565

SEQ ID NO: 37 - protein, 566 aa, Artificial Sequence
  derived and/or modified protein sequence (wt) from hemagglutinin__InfluenzaA__AAX11585
MKTIIALSYILCLVFAQKLPGNDNSTATLCLGHHAVPNGTIVKTITNDQIEVTNATELVQISSTGGICDSPHQILDGENCTLIDALLGDPQCDGFQNKKWDLFVERSKAYSNCYPYDVPDYASLRSLVASSGTLEFNNESFDWTGVTQNGTSSACKRRSNKSFFSRLNWLTHLKYKYPALNVTMPNNEKFDKLYIWGVHHPGTDNDQISLYAQASGRITVSTKRSQQTVIPNIGSRPRVRDVSSQISIYWTIVKPGDILLINSTGNLIAPRGYFKIRSGKSSIMRSDAPIGKCNSECITPNGSIPNDKPFQNVNRITYGACPRYVKQNTLKLATGMRNVPEKQTRGIFGAIAGFIENGWEGMVDGWYGFRHQNSEGTGQAADLKSTQAAINQINGKLNRLIGKTNEKFHQIEKEFSEVEGRIQDLEKYVEDTKIDLWSYNAELLVALENQHTIDLTDSEMNKLFERTKKQLRENAEDMGNGCFKIYHKCDNACIGSIRNGTYDHDVYRDEALNNRFQIKGVELKSGYKDWILWISFAISCFLLCVALLGFIMWACQKGNIRCNICI

SEQ ID NO: 38 - protein, 566 aa, Artificial Sequence; identical to SEQ ID NO: 32
  derived and/or modified protein sequence (wt) from hemagglutinin__InfluenzaA__AAX11605

SEQ ID NO: 39 - protein, 566 aa, Artificial Sequence; identical to SEQ ID NO: 32
  derived and/or modified protein sequence (wt) from hemagglutinin__InfluenzaA__AAX11615

SEQ ID NO: 40 - protein, 566 aa, Artificial Sequence
  derived and/or modified protein sequence (wt) from hemagglutinin__InfluenzaA__AAX11625
MKTIIALSYILCLVFAQKLPGNDNSTATLCLGHHAVPNGTLVKTITNDQIEVTNATELVQSSSTSRICDSPHQILDGENCTLIDALLGDPHCDGFQNKEWDLFVERSKAYSNCYPYDVPDYVSLRSLVASSGTLEFNNESFNWTGVAQNGTSSACKRRSDKSFFSRLNWLHQLKYKYPALNVTMPNNEKFDKLYIWGVHHPGTDSDQISLYAQASGRVTVSTKRSQQTVIPNIGSGPWVRGVSSRISIYWTIVKPGDILLINSTGNLIAPRGYFKIRSGKSSIMRSDAPIGKCNSECITPNGSIPNDKPFQNVNRITYGACPRYVKQNTLKLATGMRNVPEKQARGIFGAIAGFIENGWEGMMDGWYGFRHQNSEGTGQAADLKSTQAAINQINGKLNRLIEKTNEKFHQIEKEFSEVEGRIQDLEKYVEDTKIDLWSYNAELLVALENQHTIDLTDSEMNKLFERTKKQLRENAEDMGNGCFKIYHKCDNACIGSIRNGTYDHDVYRDEALNNRFQIKGVELKSGYKDWILWISFAISCFLLCIVLLGFIMWACQKGNIRCNICI

SEQ ID NO: 41 - protein, 566 aa, Artificial Sequence; identical to SEQ ID NO: 32
  derived and/or modified protein sequence (wt) from hemagglutinin__InfluenzaA__AAX12731

SEQ ID NO: 42 - protein, 566 aa, Artificial Sequence
  derived and/or modified protein sequence (wt) from hemagglutinin__InfluenzaA__AAX12741
MKTIIALSYILCLVFAQKLPGNDNSTATLCLGHHAVPNGTIVKTITNDQIEVTNATELVQSSSTGGICDSPHQILDGENCTLIDALLGDPQCDGFQNKKWDLFVERSKAYSNCYPYDVPDYASLRSLVASSGTLEFNNESFDWTGVTQNGTSSACKRRSNKSFFSRLNWLTHLKYKYPALNVTMPNNEKFDKLYIWGVHHPGTDSDQISLYAQASGRITVSTKRSQQTVIPNIGSRPRVRDVSSRISIYWTIVKPGDILLINSTGNLIAPRGYFKIRSGKSSIMRSDAPIGKCNSECITPNGSIPNDKPFQNVNRITYGACPRYVKQNTLKLATGMRNVPEKQTRGIFGAIAGFIENGWEGMVDGWYGFRHQNSEGTGQAADLKSTQAAINQINGKLNRLIGKTNEKFHQIEKEFSEVEGRIQDLEKYVEDTKIDLWSYNAELLVALENQHTIDLTDSEMNKLFERTKKQLRENAEDMGNGCFKIYHKCDNACIGSIRNGTYDHDVYRDEALNNRFQIKGVELKSGYKDWILWISFATSCFLLCVALLGFIMWACQKGNIRCNICI

SEQ ID NO: 43 - protein, 566 aa, Artificial Sequence; identical to SEQ ID NO: 32
  derived and/or modified protein sequence (wt) from hemagglutinin__InfluenzaA__AAX12751

SEQ ID NO: 44 - protein, 566 aa, Artificial Sequence
  derived and/or modified protein sequence (wt) from hemagglutinin__InfluenzaA__AAX12761
MKTIIALSYILCLVFAQKLPGNDNSTATLCLGHHAVPNGTLVKTITNDQIEVTNATELVQSSSTGRICDSPHQILDGENCTLIDALLGDPHCDGFQNKEWDLFVERSKAYSNCYPYDVPDYVSLRSLVASSGTLEFNNESFNWTGVAQNGTSSACKRRSDKSFFSRLNWLHQLKYKYPALNVTMPNNEKFDKLYIWGVHHPGTDSDQISLYAQASGRVTVSTKRSQQTVIPNIGSRPWVRGVSSRISIYWTIVKPGDILLINSTGNLIAPRGYFKIRSGKSSIMRSDAPIGKCNSECITPNGSIPNDKPFQNVNRITYGPCPRYVKQNTLKLATGMRNVPEKQTRGIFGAIAGFIENGWEGMMDGWYGFRHQNSEGTGQAADLKSTQAAINQINGKLNRLIEKTNEKFHQIEKEFSEVEGRIQDLEKYVEDTKIDLWSYNAELLVALENQHTIDLTDSEMNKLFERTKKQLRENAEDMGNGCFKIYHKCDNVCIGSIRNGTYDHDVYRDEALNNRFQIKGVELKSGYKDWILWISFAISCFLLCIVLLGFIMWACQKGNIRCNICI

SEQ ID NO: 45 - protein, 566 aa, Artificial Sequence
  derived and/or modified protein sequence (wt) from hemagglutinin__InfluenzaA__AAX12791
MKTIIALSYILCLVFAQKLPGNDNSMATLCLGHHAVPNGTLVKTITNDQIEVTNATELVQSSSTGRICDSPHQILDGENCTLIDALLGDPHCDGFQNKEWDLFVERSKAYSNCYPYDVPDYVSLRSLVASSGTLEFNNESFNWTGVAQNGTSSACKRRSDKSFFSRLNWLHQLKYKYPALNVTMPNNEKFDKLYIWGVHHPGTDSDQISLYAQASGRVTVSTKRSQQTVIPNIGSGPWVRGVSSRISIYWTIVKPGDILLINSTGNLIAPRGYFKIRSGKSSIMRSDAPIDKCNSECITPNGSIPNDKPFQNVNRITYGLCPRYVKQNTLKLATGMRNVPEKQTRGIFGAIAGFIENGWEGMMDGWYGFRHQNSEGTGQAADLKSTQAAINQINGKLNRLIEKTNEKFHQIEKEFSEVEGRIQDLEKYVEDTKIDLWSYNAELLVALENQHTIDLTDSEMNKLFERTKKQLRENAEDMGNGCFKIYHKCDNACIGSIRNGTYDHDVYRDEALNNRFQIKGVELKSGYKDWILWISFAISCFLLCIVLLGFIMWACQKGNIRCNICI

SEQ ID NO: 46 - protein, 566 aa, Artificial Sequence
  derived and/or modified protein sequence (wt) from hemagglutinin__InfluenzaA__AAX12801
MKTIIALSYILCLVFAQKFPGNDNSTATLCLGHHAVPNGTLVKTITNDQIEVTNATELVQSSSTDRICDSPHQILDGENCTLIDALLGDPHCDGFQNKEWDLFVERSKAYSNCYPYDVPDYVSLRSLVASSGTLEFNNESFNWTGVAQNGTSSACKRRSDKSFFSRLNWLHQLKYKYPALNVTMPNNEKFDKLYIWGVHHPGTDSDQISLYAQASGRVTVSTKRSQQTVIPNIGSRPWVRGVSSRISIYWTIVKPGDILLINSTGNLIAPRGYFKIRSGKSSIMRSDAPIGKCNSECITPNGSIPNDKPFQNVNRITYGACPRYVKQNTLKLATGMRNVPEKQTRGIFGAIAGFIENGWEGMMDGWYGFRHQNSEGTGQAADLKSTQAAINQINGKLNRLIEKTNEKFHQIEKEFSEVEGRIQDLEKYVEDTKIDLWSYNAELLVALENQHTIDLTDSEMNKLFERTKKQLRENAEDMGNGCFKIYHKCDNACIGSIRNGTYDHDVYRDEALNNRFQIKGVELKSGYKDWILWISFAISCFLLCIVLLGFIMWACQKGNIRCNICI

SEQ ID NO: 47 - protein, 566 aa, Artificial Sequence
  derived and/or modified protein sequence (wt) from hemagglutinin__InfluenzaA__AAX12811
MKTIIALSYILCLVFAQKLPGNDNSTATLCLGHHAVPNGTLVKTITNDQIEVTNATELVQSSSTSRICDSPHQILDGENCTLIDALLGDPHCDGFQNKEWDLFVERSKAYSNCYPYDVPDYVSLRSLVASSGTLEFNNESFNWTGVAQNGTSSACKRRSDKSFFSRLNWLHQLKYKYPALNVTMPNNEKFDKLYIWGVHHPGTDSDQISLYAQASGRVTVSTKRSQQTVIPNIGSRPWVRGVSSRISIYWTIVKPGDILLINSTGNLIAPRGYFKIRSGKSSIMRSDAPIGKCNSECITPNGSIPNDKPFQNVNRITYGACPRYVKQNTLKLATGMRNVPEKQTRGIFGAIAGFIENGWEGMMDGWYGFRHQNSEGTGQAADLKSTQAAINQINGKLNRLIEKTNEKFHQIEKEFSEVEGRIQDLEKYVEDTKIDLWSYNAELLVALENQHTIDLTDSEMNKLFERTKKQLRENAEDMGNGCFKIYHKCDNACIGSIRNGTYDHDVYRDEALNNRFQIKGVELKSGYKDWILWISFAISCFLLCIVLLGFIMWACQKGNIRCNICI

SEQ ID NO: 48 - protein, 566 aa, Artificial Sequence
  derived and/or modified protein sequence (wt) from hemagglutinin__InfluenzaA__AAX34061
MKTIIALSYILCLVFAQKLPGNDNSTATLCLGHHAVPNGTIVKTITNDQIEVTNATELVQSSSTGEICDSPHQILDGENCTLIDALLGDPQCDGFQNKKWDLFVERSKAYSNCYPYDVPDYASLRSLVASSGTLEFNNESFDWTGVTQNGTSSACKRRSNKSFFSRLNWLTHLKYKYPALNVTMPNNEKFDKLYIWGVHHPGTDSDQISLYAQASGRITVSTKRSQQTVIPNIGSRPRVRDVSSRISIYWTIVKPGDILLINSTGNLIAPRGYFKIRSGKSSIMRSDAPIGKCNSECITPNGSIPNDKPFQNVNRITYGACPRYIKQNTLKLATGMRNVPEKQTRGIFGAIAGFIENGWEGMVDGWYGFRHQNSEGTGQAADLKSTQAAINQINGKLNRLIGKTNEKFHQIEKEFSEVEGRIQDLEKYVEDTKIDLWSYNAELLVALENQHTIDLTDSEMNKLFERTKKQLRENAEDMGNGCFKIYHKCDNACIGSIRNGTYDHDVYRDEALNNRFQIKGVELKSGYKDWILWISFAISCFLLCVALLGFIMWACQKGNIRCNICI

SEQ ID NO: 49 - protein, 566 aa, Artificial Sequence
  derived and/or modified protein sequence (wt) from hemagglutinin__InfluenzaA__AAX35821
MKTIIALSYILCLVFAQKLPGNDNSTATLCLGHHAVPNGTIVKTITNDQIEVTNATELVQSSSTGGICDSPHQILDGENCTLIDALLGDPQCDGFQNKKWDLFVERSKAYSNCYPYDVPDYASLRSLVASSGTLEFNNESFNWTGVTQNGTSSACKRKSNKSFFSRLNWLTHLKYKYPALNVTMPNNEKFDKLYIWGVHHPGTDNDQISLYAQASGRITVSTKRSQQTVIPNIGSRPRVRDVSSRISIYWTIVKPGDILLINSTGNLIAPRGYFKIRSGKSSIMRSDAPIGKCNSECITPNGSIPNDKPFQNVNRITYGACPRYVKQNTLKLATGMRNVPERQTRGIFGAIAGFIENGWEGMVDGWYGFRHQNSEGTGQAADLKSTQAAINQINGKLNRLIGKTNEKFHQIEKEFSEVEGRIQDLEKYVEDTKIDLWSYNAELLVALENQHTIDLTDSEMNKLFERTKKQLRENAEDMGNGCFKIYHKCDNACIGSIRNGTYDHDVYRDEALNNRFQIKGVELKSGYKDWILWISFAISCFLLCVALLGFIMWACQKGNIRCNICI

SEQ ID NO: 50 - protein, 566 aa, Artificial Sequence; identical to SEQ ID NO: 31
  derived and/or modified protein sequence (wt) from hemagglutinin__InfluenzaA__AAX35831

SEQ ID NO: 51 - protein, 566 aa, Artificial Sequence
  derived and/or modified protein sequence (wt) from hemagglutinin__InfluenzaA__AAX35851
MKTIIALSYILCLVFAQKLPGNDNSTATLCLGHHAVPNGTLVKTITNDQIEVTNATELVQSSSTGRICDSPHQILDGENCTLIDALLGDPHCDGFQNKEWDLFVERSKAYSNCYPYDVPDYVSLRSLVASSGTLEFNNESFNWTGVAQNGTSSACKRRSDKSFFSRLNWLHQLKYKYPALNVTMPNNEKFDKLYIWGVHHPGTDSDQISLYAQASGRVTVSTKRSQQTVIPNIGSRPWVRGVSSRISIYWTIVKPGDILLINSTGNLIAPRGYFKIRSGKSSIMRSDAPIGKCNSECITPNGSIPNDKPFQNVNRITYGPCPRYVKQNTLKLATGMRNVPEKQTRGIFGAIAGFIENGWEGMMDGWYGFRHQNSEGTGQAADLKSTQAAINQINGKLNRLIEKTNEKFHQIEKEFSEVEGRIQDLEKYVEDTKIDLWSYNAELLVALENQHTIDLTDSEMNKLFERTKKQLRENAEDMGNGCFKIYHKCDNACIGSIRNGTYDHDVYRDEALNNRFQIKGVELKSGYKDWILWISFAISCFLLCIVLLGFIMWACQKGNIRCNICI

SEQ ID NO: 52 - protein, 566 aa, Artificial Sequence
  derived and/or modified protein sequence (wt) from hemagglutinin__InfluenzaA__AAX35861
MKTIIALSYILCLVFAQKLPGNDNSTATLCLGHHAVPNGTLVKTITNDQIEVTNATELVQSSSTSRICDSPHQILDGENCTLIDALLGDPHCDGFQNKEWDLFVERSKAYSNCYPYDVPDYVSLRSLVASSGTLEFNNESFNWTGVAQNGTSSACKRRSDKSFFSRLNWLHQLKYKYPALNVTMPNNEKFDKLYIWGVHHPGTDSDQISLYAQASGRITVSTKRSQQTVIPNIGSGPWVRGVSSRISIYWTIVKPGDILLINSTGNLIAPRGYFKIRSGKSSIMRSDAPIGKCNSECITPNGSIPNDKPFQNVNRITYGACPRYVKQNTLKLATGMRNVPEKQTRGIFGAIAGFIENGWEGMMDGWYGFRHQNSEGTGQAADLKSTQAAINQINGKLNRLIEKTNEKFHQIEKEFSEVEGRIQDLEKYVEDTKIDLWSYNAELLVALENQHTIDLTDSEMNKLFERTKKQLRENAEDMGNGCFKIYHKCDNACIGSIRNGTYDHDVYRDEALNNRFQIKGVELKSGYKDWILWISFAISCFLLCIVLLGFIMWACQKGNIRCNICI

SEQ ID NO: 53 - protein, 566 aa, Artificial Sequence
  derived and/or modified protein sequence (wt) from hemagglutinin__InfluenzaA__AAX35871
MKTIIALSYILCLVFAQKLPGNDNSTATLCLGHHAVPNGTLVKTITNDQIEVTNATELVQSSSASRICDSPHQILDGENCTLIDALLGDPHCDGFQNKEWDLFVERSKAYSNCYPYDVPDYVSLRSLVASSGTLEFNNESFNWTGVAQNGTSFACKRRSDKSFFSRLNWLHQLKYKYPALNVTMPNNEKFDKLYIWGVHHPGTDSDQISLYAQASGRVTVSTKRSQQTVIPNIGSGPWVRGVSSRISIYWTIVKPGDILLINSTGNLIAPRGYFKIRSGKSSIMRSDAPIGKCNSECITPNGSIPNDKPFQNVNRITYGACPRYVKQNTLKLATGMRNVPEKQTRGIFGAIAGFIENGWEGMMDGWYGFRHQNSEGTGQAADLKSTQAAINQINGKLNRLIEKTNEKFHQIEKEFSEVEGRIQDLEKYVEDTKIDLWSYNAELLVALENQHTIDLTDSEMNKLFERTKKQLRENAEDMGNGCFKIYHKCDNACIGSIRNGTYDHDVYRDEALNNRFQIKGVELKSGYKDWILWISFAISCFLLCIVLLGFIMWACQKGNIRCNICI

SEQ ID NO: 54 - protein, 566 aa, Artificial Sequence; identical to SEQ ID NO: 47
  derived and/or modified protein sequence (wt) from hemagglutinin__InfluenzaA__AAX38237

SEQ ID NO: 55 - protein, 566 aa, Artificial Sequence
  derived and/or modified protein sequence (wt) from hemagglutinin__InfluenzaA__AAX47515
MKAIIALSYILCLVFAQKLPGNDNSTATLCLGHHAVPNGTLVKTITNDQIEVTNATELVQSSSTGRICDSPHQILDGENCTLIDALLGDPHCDGFQNKEWDLFVERSKAYSNCYPYDVPDYVSLRSLVASSGTLEFNNESFNWTGVAQNGTSSACKRRSDKSFFSRLNWLHQLKYKYPALNVTMPNNEKFDKLYIWGVHHPGTDSDQISLYAQASGRVTVSTKRSQQTVIPNIGSRPWVRGVSSRISIYWTIVKPGDILLINSTGNLIAPRGYFKIRSGKSSIMRSDAPIGKCNSECITPNGSIPNDKPFQNVNRITYGACPRYVKQNTLKLATGMRNVPEKQTRGIFGAIAGFIENGWEGMMDGWYGFRHQNSEGTGQAADLKSTQAAINQINGKLNRLIEKTNEKFHQIEKEFSEVEGRIQDLEKYVEDTKIDLWSYNAELLVALENQHTIDLTDSEMNKLFERTKKQLRENAEDMGNGCFKIYHKCDNACIGSIRNGTYDHDVYRDEALNNRFQIKGVELKSGYKDWILWISFAISCFLLCIVLLGFIMWACQKGNIRCNICI

SEQ ID NO: 56 - protein, 566 aa, Artificial Sequence
  derived and/or modified protein sequence (wt) from hemagglutinin__InfluenzaA__AAX47525
MKTIIALSYILCLVFAQKLPGNDNSTATLCMGHHAVPNGTLVKTITNDQIEVTNATELVQSSSTGRICDSPHQILDGENCTLIDALLGDPHCDGFQNKEWDLFVERSKAYSNCYPYDVPDYVSLRSLVASSGTLEFNNESFNWTGVAQNGTSSACKRRSNKSFFSRLNWLHQLKYKYPALNVTMPNNEKFDKLYIWGVHHPDTDSNQISLYAQASGRVTVSTKRSQQTVIPNIGSGPWVRGVSSRISIYWTIVKPGDILLINSTGNLIAPRGYFKIRSGKSSIMRSDAPIGKCNSECITPNGSIPNDKPFQNVNRITYGACPRYVKQNTLKLATGMRNVPEKQTRGIFGAIAGFIENGWEGMMDGWYGFRHQNSEGTGQAADLKSTQAAINQINGKLNRLIEKTNEKFHQIEKEFSEVEGRIQDLEKYVEDTKIDLWSYNAELLVALENQHTIDLTDSEMNKLFERTKKQLRENAEDMGNGCFKIYHKCDNACIGSIRNGTYDHDVYRDEALNNRFQIKGVELKSGYKDWILWISFAISCFLLCIVLLGFIMWACQKGNIRCNICI

SEQ ID NO: 57 - protein, 566 aa, Artificial Sequence; identical to SEQ ID NO: 47
  derived and/or modified protein sequence (wt) from hemagglutinin__InfluenzaA__AAX47535

SEQ ID NO: 58 - protein, 566 aa, Artificial Sequence; identical to SEQ ID NO: 31
  derived and/or modified protein sequence (wt) from hemagglutinin__InfluenzaA__AAX56380

SEQ ID NO: 59 - protein, 566 aa, Artificial Sequence; identical to SEQ ID NO: 31
  derived and/or modified protein sequence (wt) from hemagglutinin__InfluenzaA__AAX56390

SEQ ID NO: 60 - protein, 566 aa, Artificial Sequence
  derived and/or modified protein sequence (wt) from hemagglutinin__InfluenzaA__AAX56400
MKTIIALSYILCLVFAQKLPGNDNSTATLCLGHHAVPNGTIVKTITNDQIEVTNATELVQSSSTGGICDSPHQILDGENCTLIDALLGDPQCDGFQNKKWDLFVERSKAYSNCYPYDVPDYASLRSLVASSGTLEFNNESFNWTGVTQNGTSSACERRSNKSFFSRLNWLTHLKYKYPALNVTMPNNEKFDKLYIWGVHHPGTDSDQISLYAQASGRITVSTKRSQQTVIPNIGSRPRVRDISSRISIYWTIVKPGDILLINSTGNLIAPRGYFKIRSGKSSIMRSDAPIGKCNSECITPNGSIPNDKPFQNVNRITYGACPRYVKQNTLKLATGMRNVPEKQTRGIFGAIAGFIENGWEGMVDGWYGFRHQNSEGTGQAADLKSTQAAINQINGKLNRLIGKTNEKFHQIEKEFSEVEGRIQDLEKYVEDTKIDLWSYNAELLVALENQHTIDLTDSEMNKLFERTKKQLRENAEDMGNGCFKIYHKCDNACIGSIRNGTYDHDVYRDEALNNRFQIKGVELKSGYKDWILWISFAISCFLLCVALLGFIMWACQKGNIRCDICI

SEQ ID NO: 61 - protein, 566 aa, Artificial Sequence; identical to SEQ ID NO: 31
  derived and/or modified protein sequence (wt) from hemagglutinin__InfluenzaA__AAX56410

SEQ ID NO: 62 - protein, 566 aa, Artificial Sequence
  derived and/or modified protein sequence (wt) from hemagglutinin__InfluenzaA__AAX56420
MKTIIALSYFLCLVFAQKLPGNDNSTATLCLGHHAVPNGTIVKTITNDQIEVTNATELVQSSSTGGICDSPHQILDGENCTLIDALLGDPQCDGFQNKKWDLFVERSKAYSNCYPYDVPDYASLRSLVASSGTLEFNNESFDWTGVTQNGTSSACKRRSNKSFFSRLNWLTHLKYKYPALNVTMPNNEKFDKLYIWGVHHPGTDSDQISLYAQASGRITVSTKRSQQTVIPNIGSRPRVRDVSSRISIYWTIVKPGDILLINSTGNLIAPRGYFKIRSGKSSIMRSDAPIGKCNSECITPNGSIPNDKPFQNVNRITYGACPRYVKQNTLKLATGMRNVPEKQTRGIFGAIAGFIENGWEGMVDGWYGFRHQNSEGTGQAADLKSTQAAINQINGKLNRLIGKTNEKFHQIEKEFSEVEGRIQDLEKYVEDTKIDLWSYNAELLVALENQHTIDLTDSEMNKLFERTKKQLRENAEDMGNGCFKIYHKCDNACIGSIRNGTYDHDVYRDEALNNRFQIKGVELKSGYKDWILWISFAISCFLLCVALLGFIMWACQKGNIRCNICI

SEQ ID NO: 63 - protein, 566 aa, Artificial Sequence
  derived and/or modified protein sequence (wt) from hemagglutinin__InfluenzaA__AAX56430
MKTIIALSYILCLVFTQKLPGNDNSTATLCLGHHAVPNGTIVKTITNDQIEVTNATELVQSSSTGGICDSPHQILDGENCTLIDALLGDPQCDGFQNKKWDLFVERSKAYSNCYPYDVPDYASLRSLVASSGTLEFNNESFNWTGVTQNGTSSACERRSNKSFFSRLNWLTHLKYKYPALNVTMPNNEKFDKLYIWGVHHPGTDSDQISLYAQASGRITVSTKRSQQTVIPNIGSRPRVRDVSSRISIYWTIVKPGDILLINSTGNLIAPRGYFKIRSGKSSIMRSDAPIGKCNSECITPNGSIPNDKPFQNVNRITYGACPRYVKQNTLKLATGMRNVPEKQTRGIFGAIAGFIENGWEGMVDGWYGFRHQNSEGTGQAADLKSTQAAINQINGKLNRLIGKTNEKFHQIEKEFSEVEGRIQDLEKYVEDTKIDLWSYNAELLVALENQHTIDLTDSEMNKLFERTKKQLRENAEDMGNGCFKIYHKCDNACIGSIRNGTYDHDVYRDEALNNRFQIKGVELKSGYKDWILWISFAISCFLLCVALLGFIMWACQKGNIRCDICI

SEQ ID NO: 64 - protein, 566 aa, Artificial Sequence
  derived and/or modified protein sequence (wt) from hemagglutinin__InfluenzaA__AAX56440
MKTIIALSYILCLVFAQKLPGNDNSTATLCLGHHAVPNGTLVKTITNDQIEVTNATELVQNSSTGRICDSPHQILDGENCTLIDALLGDPHCDGFQNKEWDLFVERSKAYSNCYPYDVPDYVSLRSLVASSGTLEFNNESFNWTGVAQNGTSSACKRRSDKSFFSRLNWLHQLKYKYPALNVTMPNNEKFDKLYIWGVHHPGTDNDQISLYAQASGRVTVSTKRSQQTVIPNIGSGPWVRGVSSRISIYWTIVKPGDILLINSTGNLIAPRGYFKIRSGKSSIMRSDAPIGKCNSECITPNGSIPNDKPFQNVNRITYGPCPRYVKQNTLKLATGMRNVPEKQTRGIFGAIAGFIENGWEGMMDGWYGFRHQNSEGTGQAADLKSTQAAINQINGKLNRLIEKTNEKFHQIEKEFSEVEGRIQDLEKYVEDTKIDLWSYNAELLVALENQHTIDLTDSEMNKLFERTKKQLRENAEDMGNGCFKIYHKCDNACIGSIRNGTYDHDVYRDEALNNRFQIKGVELKSGYKDWILWISFAISCFLLCIVLLGFIMWACQKGNIRCNICI

SEQ ID NO: 65 - protein, 566 aa, Artificial Sequence; identical to SEQ ID NO: 47
  derived and/or modified protein sequence (wt) from hemagglutinin__InfluenzaA__AAX56450

SEQ ID NO: 66 - protein, 566 aa, Artificial Sequence
  derived and/or modified protein sequence (wt) from hemagglutinin__InfluenzaA__AAX56460
MKTIIALSYILCLVFAQKLPENDNSTATLCLGHHAVPNGTLVKTITNDQIEVTNATELVQSSSTGRICDSPHQILDGENCTLIDALLGDPHCDGFQNKEWDLFVERSKAYSNCYPYDVPDYVSLRSLVASSGTLEFNNESFNWTGVAQNGTSSACKRRSDKSFFSRLNWLHQLKYKYPALNVTMPNNEKFDKLYIWGVHHPGTDSDQISLYAQASGRVTVSTKRSQQTVIPNIGSRPWVRGVSSRISIYWTIVKPGDILLINSTGNLIAPRGYFKIRSGKSSIMRSDAPIGKCNSECITPNGSIPNDKPFQNVNRITHGPCPRYVKQNTLKLATGMRNVPEKQTRGIFGAIAGFIENGWEGMMDGWYGFRHQNSEGTGQAADLKSTQAAINQINGKLNRLIEKTNEKFHQIEKEFSEVEGRIQDLEKYVEDTKIDLWSYNAELLVALENQHTIDLTDSEMNKLFERTKKQLRENAEDMGNGCFKIYHKCDNACIGSIRNGTYDHDVYRDEALNNRFQIKGVELKSGYKDWILWISFAISCFLLCIVLLGFIMWACQKGNIRCNICI

SEQ ID NO: 67 - protein, 566 aa, Artificial Sequence
  derived and/or modified protein sequence (wt) from hemagglutinin__InfluenzaA__AAX56470
MKTIIALSYILCLVFAQKLPGNDNSTATLCLGHHAVPNGTLVKTITNDQIEVTNATELVQSSSTGRICDSPHQILDGENCTLIDALLGDPHCDGFQNKEWDLFVERSKAYSNCYPYDVPDYVSLRSLVASSGTLEFNNESFNWTGVAQNGTSSACKRRSDKSFFSRLNWLHQLKYKYPALNVTMPNNEKFDKLYIWGVHHPGTDSDQISLYAQASGRVTVSTKRSQQTVIPNIGSRPWVRGVSSRISIYWTIVKPGDILLINSTGNLIAPRGYFKMRSGKSSIMRSDAPIGKCNSECITPNGSIPNDKPFQNVNRITYGPCPRYVKQNTLKLATGMRNVPEKQTRGIFGAIAGFIENGWEGMMDGWYGFRHQNSEGTGQAADLKSTQAAINQINGKLNRLIEKTNEKFHQIEKEFSEVEGRIQDLEKYVEDTKIDLWSYNAELLVALENQHTIDLTDSEMNKLFERTKKQLRENAEDMGNGCFKIYHKCDNACIGSIRNGTYDHDVYRDEALNNRFQIKGVELKSGYKDWILWISFAISCFLLCIVLLGFIMWACQKGNIRCNICI

SEQ ID NO: 68 - protein, 566 aa, Artificial Sequence; identical to SEQ ID NO: 51
  derived and/or modified protein sequence (wt) from hemagglutinin__InfluenzaA__AAX56480

SEQ ID NO: 69 - protein, 566 aa, Artificial Sequence
  derived and/or modified protein sequence (wt) from hemagglutinin__InfluenzaA__AAX56510
MKTIIALSYILCLVFAQKLPGNDNSTATLCLGHHAVPNGTLVKTITNDQIEVTNATELVQSSSTGRICDSPHQILDGENCTLIDALLGDPHCDGFQNKEWDLFVERSKAYSNCYPYDVPDYVSLRSLVASSGTLEFNNESFNWTGVAQNGTSSACKRRSDKSFFSRLNWLHQLKYKYPALNVTMPNNEKFDKLYIWGVHHPGTDSDQISLYAQASGRVTVSTKRSQQTVIPNIGSRPWVRGVSSKISIYWTIVKPGDILLINSTGNLIAPRGYFKIRSGKSSIMRSDAPIGKCNSECITPNGSIPNDKPFQNVNRITYGACPRYVKQNTLKLATGMRNVPEKQTRGIFGAIAGFIENGWEGMMDGWYGFRHQNSEGTGQAADLKSTQAAINQINGKLNRLIEKTNEKFHQIEKEFSEVEGRIQDLEKYVEDTKIDLWSYNAELLVALENQHTIDLTDSEMNKLFERTKKQLRENAEDMGNGCFKIYHKCDNACIGSIRNGTYDHDVYRDEALNNRFQIKGVELKSGYKDWILWISFAISCFLLCIVLLGFIMWACQKGNIRCNICI

SEQ ID NO: 70 - protein, 566 aa, Artificial Sequence; identical to SEQ ID NO: 47
  derived and/or modified protein sequence (wt) from hemagglutinin__InfluenzaA__AAX56520

SEQ ID NO: 71 - protein, 566 aa, Artificial Sequence
  derived and/or modified protein sequence (wt) from hemagglutinin__InfluenzaA__AAX56530
MKAKLLVLLCAFTATYADTICIGYHANNSTDTVDTVLEKNVTVTHSVNLLEDSHNGKLCRLKGTAPLQLGNCSIAGWILGNPECESLFSKESWSYIAETPNPKNGTCYPGYFADYEELREQLSSVSSFERFEIFPKDSSWPNHTVTKGVTASCSHNGKSSFYKNLLWLTEKNGLYPNLSKSYVNKKGKEVLVLWGVHHPSNMGDQRAIYHKENAYVSVLSSHYSRRFTPEIAKRPKVRDQEGRINYYWTLLEPGDTIIFEANGNLIAPWYAFALSRGFGSGIIISNASMGECDAKCQTPQGAINSSLPFQNVHPVTIGECPKYVRSTKLRMVTGLRNVPSIQSRGLFGAIAGFIEGGWTGMIDGWYGYHHQNEQGSGYAADQKSTQNAINGITNKVNSIIEKMNTQFTAVGKEFNKLEKRMENLNKKVDDGFLDIWTYNAELLVLLENERTLDFHDLNVKNLYEKVKNQLKNNAKEIGNGCFEFYHKCNNECMESVKNGTYDYPKYSKESKLNREKIDGVKLESMGVYQILAIYSTVASSLVLLVSLGAISFWMCSNGSLQCRICI

SEQ ID NO: 72 - protein, 566 aa, Artificial Sequence
  derived and/or modified protein sequence (wt) from hemagglutinin__InfluenzaA__AAX56550
MKTIIALSYILCLVFAQKLPVNDNSTATLCLGHHAVPNGTLVKTITNDHIEVTNATELVQSSSTGRICDSPHQILDGENCTLIDALLGDPHCDGFQNKEWDLFVERSTAYSNCYPYDVPDYASLRSLVASSGTLEFNNESFNWTGVAQNGTSSACKRRSIKSFFSRLNWLHQLKYKYPALNVTMPNNEKFDKLYIWGVHHPSTDSDQISLYAQASGRVTVSTKRSQQTVIPNIGSRPWVRGVSSRISIYWTIVKPGDILLINSTGNLIAPRGYFKIRSGKSSIMRSNAPIGKCNSECITPNGSIPNDKPFQNVNRITYGACPRYVKQNTLKLATGMRNVPEKQTRGIFGAIAGFIENGWEGMVDGWYGFRHQNSEGTGQAADLKSTQAAINQINGKLNRLIEKTNEKFHQIEKEFSEVEGRIQDLEKYVEDTKIDLWSYNAELLVALENQHTIDLTDSEMNKLFERTRKQLRENAEDMGNGCFKIYHKCDNACIGSIRNGTYDHDVYRDEALNNRFQIKGVELKSGYKDWILWISFAISCFLLCVVLLGFIMWACQKGNIRCNICI

SEQ ID NO: 73 - protein, 566 aa, Artificial Sequence
  derived and/or modified protein sequence (wt) from hemagglutinin__InfluenzaA__AAX56560
MKTIIALSYILCLVFAQKLPGNDNSTATLCLGHHAVPNGTIVKTITNDQIEVTNATELVQISSTGGICDSPHQILDGENCTLIDALLGDPQCDGFQNKKWDLFVERSKAYSNCYPYDVPDYASLRSLVASSGTLEFNNESFDWTGVTQNGTSSACKRRSNKSFFSRLNWLTHLKYKYPALNVTMPNNEKFDKLYIWGVHHPGTDSDQISLYAQASGRITVSTKRSQQTVIPNIGSRPRVRDVSSRISIYWTIVKPGDILLINSTGNLIAPRGYFKIRSGKSSIMRSDAPIGKCNSECITPNGSIPNDKPFQNVNRITYGACPRYVKQNTLKLATGMRNVPEKQTRGIFGAIAGFIENGWEGMVDGWYGFRHQNSEGTGQAADLKSTQAAINQINGKLNRLIGKTNEKFHQIEKEFSEVEGRIQDLEKYVEDTKIDLWSYNAELLVALENQHTIDLTDSEMNKLFERTKKQLRENAEDMGNGCFKIYHKCDNACIGSIRNGTYDHDVYRDEALNNRFQIKGVELKSGYKDWILWISFAISCFLLCVALLGFIMWACQKGNIRCNICI

SEQ ID NO: 74 - protein, 566 aa, Artificial Sequence
  derived and/or modified protein sequence (wt) from hemagglutinin__InfluenzaA__AAX56570
MKTIIALSYILCLVFAQKLPGNDNSTATLCLGHHAVPNGTLVKTITNDQIEVTNATELVQSSSTSRICDSPHQILDGENCTLIDALLGDPHCDGFQNKEWDLFVERSKAYSNCYPYDVPDYVSLRSLVASSGTLEFNNESFNWTGVAQNGTSSACKRRSDKSFFSRLNWLHQLKYKYPALNVTMPNNEKFDKLYIWGVHHPGTDSDQISLYAQASGRVTVSTKRSQQTVIPNIGSRPWVRGVSSGISIYWTIVKPGDILLINSTGNLIAPRGYFKIRSGKSSIMRSDAPIGKCNSECITPNGSIPNDKPFQNVNRITYGACPRYVKQNTLKLATGMRNVPEKQTRGIFGAIAGFIENGWEGMMDGWYGFRHQNSEGTGQAADLKSTQAAINQINGKLNRLIEKTNEKFHQIEKEFSEVEGRIQDLEKYVEDTKIDLWSYNAELLVALENQHTIDLTDSEMNKLFERTKKQLRENAEDMGNGCFKIYHKCDNACIGSIRNGTYDHDVYRDEALNNRFQIKGVELKSGYKDWILWISFAISCFLLCIVLLGFIMWACQKGNIRCNICI

SEQ ID NO: 75 - protein, 566 aa, Artificial Sequence
  derived and/or modified protein sequence (wt) from hemagglutinin__InfluenzaA__AAX56590
MKTIIALSYILCLVFAQKLPGNDNSTATLCLGHHAVPNGTLVKTITNDQIEVTNATELVQSSSTSRICDSPHQILDGENCTLIDALLGDPHCDGFQNKEWDLFVERSKAYSNCYPYDVPDYVSLRSLVASSGTLEFNNESFNWTGVAQNGTSSACKRRSDKSFFSRLNWLHQLKYKYPALNVTMPNNEKFDKLYIWGVHHPSTDSDQISLYAQASGRVTVSTKRSQQTVIPNIGSRPWVRGVSSRISIYWTIVKPGDILLINSTGNLIAPRGYFKIRSGKSSIMRSDAPIGKCNSECITPNGSIPNDKPFQNVNRITYGACPRYVKQNTLKLATGMRNVPEKQTRGIFGAIAGFIENGWEGMMDGWYGFRHQNSEGTGQAADLKSTQAAINQINGKLNRLIEKTNEKFHQIEKEFSEVEGRIQDLEKYVEDTKIDLWSYNAELLVALENQHTIDLTDSEMNKLFERTKKQLRENAEDMGNGCFKIYHKCDNACIGSIRNGTYDHDVYRDEALNNRFQIKGVELKSGYKDWILWISFAISCFLLCIVLLGFIMWACQKGNIRCNICI

SEQ ID NO: 76 - protein, 566 aa, Artificial Sequence; identical to SEQ ID NO: 73
  derived and/or modified protein sequence (wt) from hemagglutinin__InfluenzaA__AAX56600

SEQ ID NO: 77 - protein, 566 aa, Artificial Sequence
  derived and/or modified protein sequence (wt) from hemagglutinin__InfluenzaA__AAX57644
MKTIIALSYILCLVFAQKLPGNDNSTATLCLGHHAVPNGTIVKTITNDQIEVTNATELVQSSSTGGICDSPHQILDGENCTLIDALLGDPQCDGFQNKKWDLFVERSKAYSNCYPYDVPDYASLRSLVASSGTLEFNNESFDWTGVTQNGTSSACKRRSNKSFFSRLNWLTHLKYKYPALNVTMPNNEKFDKLYIWGVHHPGTDSDQISLYAQASGRITVSTKRSQQTVIPNIGSRPRVRDVSSRISIYWTVVKPGDILLINSTGNLIAPRGYFKMRSGKSSIMRSDAPIGKCNSECITPNGSIPNDKPFQNVNRITYGACPRYVKQNTLKLATGMRNVPEKQTRGIFGAIAGFIENGWEGMVDGWYGFRHQNSEGTGQAADLKSTQAAINQINGKLNRLIGKTNEKFHQIEKEFSEVEGRIQDLEKYVEDTKIDLWSYNAELLVALENQHTIDLTDSEMNKLFERTKKQLRENAEDMGNGCFKIYHKCDNACIGSIRNGTYDHDVYRDEALNNRFQIKGVELKSGYKDWILWISFAISCFLLCVALLGFIMWACQKGNIRCNICI

SEQ ID NO: 78 - protein, 566 aa, Artificial Sequence; identical to SEQ ID NO: 31
  derived and/or modified protein sequence (wt) from hemagglutinin__InfluenzaA__AAX57654

SEQ ID NO: 79 - protein, 566 aa, Artificial Sequence; identical to SEQ ID NO: 47
  derived and/or modified protein sequence (wt) from hemagglutinin__InfluenzaA__AAX57664

SEQ ID NO: 80 - protein, 566 aa, Artificial Sequence
  derived and/or modified protein sequence (wt) from hemagglutinin__InfluenzaA__AAX57684
MKTIIALSYILCLVFAQKLPGNDNSTATLCLGHHAVPNGTLVKTITNDQIEVTNATELVQSSSTSRICDSPHQILDGENCTLIDALLGDPHCDGFQNKEWDLFVERSKAYSNCYPYDVPDYVSLRSLVASSGTLEFNNESFNWTGVAQNGTSSACKRRSDKSFFSRLNWLHQLKYKYPALNVTMPNNEKFDKLYIWGVHHPGTDSDQISLYAQASGRVTVSTKRSQQTVIPNIGSGPWVRGVSSRISIYWTIVKPGDILLINSTGNLIAPRGYFKIRSGKSSIMRSDAPIGKCNSECITPNGSIPNDKPFQNVNRITYGACPRYVKQNTLKLATGMRNVPEKQTRGIFGAIAGFIENGWEGMMDGWYGFRHQNSEGTGQAADLKSTQAAINQINGKLNRLIEKTNEKFHQIEKEFSEVEGRIQDLEKYVEDTKIDLWSYNAELLVALENQHTIDLTDSEMNKLFERTKKQLRENAEDMGNGCFKIYHKCDNACIGSIRNGTYDHDVYRDEALNNRFQIKGVELKSGYKDWILWISFAISCFLLCIVLLGFIMWACQKGNIRCNICI

SEQ ID NO: 81 - protein, 566 aa, Artificial Sequence; identical to SEQ ID NO: 51
  derived and/or modified protein sequence (wt) from hemagglutinin__InfluenzaA__AAX57694

SEQ ID NO: 82 - protein, 566 aa, Artificial Sequence; identical to SEQ ID NO: 73
  derived and/or modified protein sequence (wt) from hemagglutinin__InfluenzaA__AAX57704

SEQ ID NO: 83 - protein, 566 aa, Artificial Sequence; identical to SEQ ID NO: 51
  derived and/or modified protein sequence (wt) from hemagglutinin__InfluenzaA__AAX57714

SEQ ID NO: 84 - protein, 566 aa, Artificial Sequence; identical to SEQ ID NO: 80
  derived and/or modified protein sequence (wt) from hemagglutinin__InfluenzaA__AAX57733

SEQ ID NO: 85 - protein, 566 aa, Artificial Sequence
  derived and/or modified protein sequence (wt) from hemagglutinin__InfluenzaA__AAX57734
MKTIIALSYILCLVFAQKLPGNDNSTATLCLGHHAVPNGTLVKTITNDQIEVTNATELVQSSSTSRICNSPHQILDGENCTLIDALLGDPHCDGFQNKEWDLFVERSKAYSNCYPYDVPDYVSLRSLVASSGTLEFNNESFNWTGVAQNGTSSACKRRSDKSFFSRLNWLHQLKYKYPALNVTMPNNEKFDKLYIWGVHHPGTDSDQISLYAQASGRVTVSTKRSQQTVIPNIGSGPWVRGVSSRISIYWTIVKPGDILLINSTGNLIAPRGYFKIRSGKSSIMRSDAPIGKCNSECITPNGSIPNDKPFQNVNRITYGACPRYVKQNTLKLATGMRNVPEKQTRGIFGAIAGFIENGWEGMMDGWYGFRHQNSEGTGQAADLKSTQAAINQINGKLNRLIEKTNEKFHQIEKEFSEVEGRIQDLEKYVEDTKIDLWSYNAELLVALENQHTIDLTDSEMNKLFERTKKQLRENAEDMGNGCFKIYHKCDNACIGSIRNGTYDHDVYRDEALNNRFQIKGVELKSGYKDWILWISFAISCFLLCIVLLGFIMWACQKGNIRCNICI

SEQ ID NO: 86 - protein, 566 aa, Artificial Sequence; identical to SEQ ID NO: 72
  derived and/or modified protein sequence (wt) from hemagglutinin__InfluenzaA__AAX57744

SEQ ID NO: 87 - protein, 566 aa, Artificial Sequence; identical to SEQ ID NO: 72
  derived and/or modified protein sequence (wt) from hemagglutinin__InfluenzaA__AAX57764

SEQ ID NO: 88 - protein, 566 aa, Artificial Sequence; identical to SEQ ID NO: 72
  derived and/or modified protein sequence (wt) from hemagglutinin__InfluenzaA__AAX57774

SEQ ID NO: 89 - protein, 566 aa, Artificial Sequence
  derived and/or modified protein sequence (wt) from hemagglutinin__InfluenzaA__AAX57784
MKTIIALSYILCLVFAQKLPGNDNSTATLCLGHHAVPNGTLVKTITNDQIEVTNATELVQNSSTSRICDSPHQILDGENCTLIDALLGDPHCDGFQNKEWDLFVERSKAYSNCYPYDVPDYVSLRSLVASSGTLEFNNESFNWTGVAQNGTSSACKRRSDKSFFSRLNWLHQLKYKYPALNVTMPNNEKFDKLYIWGVHHPGTDSDQISLYAQASGRVTVSTKRSQQTVIPNIGSRPWVRGVSSRISIYWTIVKPGDILLINSTGNLIAPRGYFKIRSGKSSIMRSDAPIGKCNSECITPNGSIPNDKPFQNVNRITYGACPRYVKQNTLKLATGMRNVPEKQTRGIFGAIAGFIENGWEGMMDGWYGFRHQNSEGTGQAADLKSTQAAINQINGKLNRLIEKTNEKFHQIEKEFSEVEGRIQDLEKYVEDTKIDLWSYNAELLVALENQHTIDLTDSEMNKLFERTKKQLRENAEDMGNGCFKIYHKCDNACIGSIRNGTYDHDVYRDEALNNRFQIKGVELKSGYKDWILWISFAISCFLLCIVLLGFIMWACQKGNIRCNICI

SEQ ID NO: 90 - protein, 566 aa, Artificial Sequence
  derived and/or modified protein sequence (wt) from hemagglutinin__InfluenzaA__AAX57794
MKTIIALSYILCLVFAQKLPVNDNSTATLCLGHHAVPNGTLVKTITNDHIEVTNATELVQSSSTGRICDSPHQILDGENCTLIDALLGDPHCDGFQNKEWDLFVERSTAYSNCYPYDVPDYASLRSLVASSGTLEFNNESFNWTGVAQNGTSSACKRRSIKSFFSRLNWLHQLKYKYPALNVTMPNNEKFDKLYIWGVHHPSTDSDQISLYAQASGRVTVSTKRSQQTVIPNIGSRPWVRGVSSRISIHWTIVKPGDILLINSTGNLIAPRGYFKIRSGKSSIMRSNAPIGKCNSECITPNGSIPNDKPFQNVNRITYGACPRYVKQNTLKLATGMRNVPEKQTRGIFGAIAGFIENGWEGMVDGWYGFRHQNSEGTGQAADLKSTQAAINQINGKLNRLIEKTNEKFHQIEKEFSEVEGRIQDLEKYVEDTKIDLWSYNAELLVALENQHTIDLTDSEMNKLFERTRKQLRENAEDMGNGCFKIYHKCDNACIGSIRNGTYDHDVYRDEALNNRFQIKGVELKSGYKDWILWISFAISCFLLCVVLLGFIMWACQKGNIRCNICI

SEQ ID NO: 91 - protein, 566 aa, Artificial Sequence; identical to SEQ ID NO: 72
  derived and/or modified protein sequence (wt) from hemagglutinin__InfluenzaA__AAX57814

SEQ ID NO: 92 - protein, 566 aa, Artificial Sequence
  derived and/or modified protein sequence (wt) from hemagglutinin__InfluenzaA__AAX57824
MKTIIALSYILCMVFAQKLPVNDNSTATLCLGHHAVPNGTLVKTITNDHIEVTNATELVQSSSTGRICDSPHQILDGENCTLIDALLGDPHCDGFQNKEWDLFVERSTAYSNCYPYDVPDYASLRSLVASSGTLEFNNESFNWTGVAQNGTSSACKRRSIKSFFSRLNWLHQLKYKYPALNVTMPNNEKFDKLYIWGVHHPSTDSDQISLYAQASGRVTVSTKRSQQTVIPNIGSRPWVRGVSSRISIYWTIVKPGDILLINSTGNLIAPRGYFKIRSGKSSIMRSNAPIGKCNSECITPNGSIPNDKPFQNVNRITYGACPRYVKQNTLKLATGMRNVPEKQTRGIFGAIAGFIENGWEGMVDGWYGFRHQNSEGTGQAADLKSTQAAINQINGKLNRLIEKTNEKFHQIEKEFSEVEGRIQDLEKYVEDTKIDLWSYNAELLVALENQHTIDLTDSEMNKLFERTRKQLRENAEDMGNGCFKIYHKCDNACIGSIRNGTYDHDVYRDEALNNRFQIKGVELKSGYKDWILWISFAISCFLLCVVLLGFIMWACQKGNIRCNICI

SEQ ID NO: 93 - protein, 566 aa, Artificial Sequence; identical to SEQ ID NO: 72
  derived and/or modified protein sequence (wt) from hemagglutinin__InfluenzaA__AAX57834

SEQ ID NO: 94 - protein, 566 aa, Artificial Sequence; identical to SEQ ID NO: 72
  derived and/or modified protein sequence (wt) from hemagglutinin__InfluenzaA__AAX57844

SEQ ID NO: 95 - protein, 566 aa, Artificial Sequence
  derived and/or modified protein sequence (wt) from hemagglutinin__InfluenzaA__AAX57864
MKTIIALSYFLCLVFAQKLPVNDNSTATLCLGHHAVPNGTLVKTITNDHIEVTNATELVQSSSTGRICDSPHQILDGENCTLIDALLGDPHCDGFQNKEWDLFVERSTAYSNCYPYDVPDYASLRSLVASSGTLEFNNESFNWTGVAQNGTSSACKRRSIKSFFSRLNWLHQLKYKYPALNVTMPNNEKFDKLYIWGVHHPSTDSDQISLYAQASGRVTVSTKRSQQTVIPNIGSRPWVRGVSSRISIYWTIVKPGDILLINSTGNLIAPRGYFKIRSGKSSIMRSNAPIGKCNSECITPNGSIPNDKPFQNVNRITYGACPRYVKQNTLKLATGMRNVPEKQTRGIFGAIAGFIENGWEGMVDGWYGFRHQNSEGTGQAADLKSTQAAINQINGKLNRLIEKTNEKFHQIEKEFSEVEGRIQDLEKYVEDTKIDLWSYNAELLVALENQHTIDLTDSEMNKLFERTRKQLRENAEDMGNGCFKIYHKCDNACIGSIRNGTYDHDVYRDEALNNRFQIKGVELKSGYKDWILWISFAISCFLLCVVLLGFIMWACQKGNIRCNICI

SEQ ID NO: 96 - protein, 566 aa, Artificial Sequence; identical to SEQ ID NO: 72
  derived and/or modified protein sequence (wt) from hemagglutinin__InfluenzaA__AAX57874

SEQ ID NO: 97 - protein, 566 aa, Artificial Sequence; identical to SEQ ID NO: 72
  derived and/or modified protein sequence (wt) from hemagglutinin__InfluenzaA__AAX57884

SEQ ID NO: 98 - protein, 566 aa, Artificial Sequence
  derived and/or modified protein sequence (wt) from hemagglutinin__InfluenzaA__AAX57894
MKTIIALSYILCLVFAQKLPVNDNSTATLCLGHHAVPNGTLVKTITNDHIEVTNATELVQSSSTGRICDSPHQVLDGENCTLIDALLGDPHCDGFQNKEWDLFVERSTAYSNCYPYDVPDYASLRSLVASSGTLEFNNESFNWTGVAQNGTSSACKRRSIKSFFSRLNWLHQLKYKYPALNVTMPNNEKFDKLYIWGVHHPSTDSDQISLYAQASGRVTVSTKRSQQTVIPNIGSRPWVRGVSSRISIYWTIVKPGDILLINSTGNLIAPRGYFKIRSGKSSIMRSNAPIGKCNSECITPNGSIPNDKPFQNVNRITYGACPRYVKQNTLKLATGMRNVPEKQTRGIFGAIAGFIENGWEGMVDGWYGFRHQNSEGTGQAADLKSTQAAINQINGKLNRLIEKTNEKFHQIEKEFSEVEGRIQDLEKYVEDTKIDLWSYNAELLVALENQHTIDLTDSEMNKLFERTRKQLRENAEDMGNGCFKIYHKCDNACIGSIRNGTYDHDVYRDEALNNRFQIKGVELKSGYKDWILWISFAISCFLLCVVLLGFIMWACQKGNIRCNICI

SEQ ID NO: 99 - protein, 566 aa, Artificial Sequence
  derived and/or modified protein sequence (wt) from hemagglutinin__InfluenzaA__AAX57924
MKTIIALSYILCLVFAQKLPVNDNSTATLCLGHHAVPNGTLVKTITNDHIEVTNATELVQSSSTGRICDSPHQILDGENCTLIDALLGDPHCDGFQNKEWDLFVERSTAYSNCYPYDVPDYASLRSLVASSGTLEFNNESFNWTGVAQNGTSFACKRRSIKSFFSRLNWLHQLKYKYPALNVTMPNNEKFDKLYIWGVHHPSTDSDQISLYAQASGRVTVSTKRSQQTVIPNIGSRPWVRGVSSRISIYWTIVKPGDILLINSTGNLIAPRGYFKIRSGKSSIMRSNAPIGKCNSECITPNGSIPNDKPFQNVNRITYGACPRYVKQNTLKLATGMRNVPEKQTRGIFGAIAGFIENGWEGMVDGWYGFRHQNSEGTGQAADLKSTQAAINQINGKLNRLIEKTNEKFHQIEKEFSEVEGRIQDLEKYVEDTKIDLWSYNAELLVALENQHTIDLTDSEMNKLFERTRKQLRENAEDMGNGCFKIYHKCDNACIGSIRNGTYDHDVYRDEALNNRFQIKGVELKSGYKDWILWISFAISCFLLCVVLLGFIMWACQKGNIRCNICI

SEQ ID NO: 100 - protein, 566 aa, Artificial Sequence; identical to SEQ ID NO: 72
  derived and/or modified protein sequence (wt) from hemagglutinin__InfluenzaA__AAX57934

SEQ ID NO: 101 - protein, 566 aa, Artificial Sequence
  derived and/or modified protein sequence (wt) from hemagglutinin__InfluenzaA__AAX57944
MKTIIALSYILCLVFAQKLPGNDNSTATLCLGHHAVPNGTLVKTITNDQIEVTNATELVQSSSTGRICDSPHQILDGENCTLIDALLGDPHCDGFQNKEWDLFVERSKAYSNCYPYDVPDYVSLRSLVASSGTLEFNNESFNWTGVAQNGTSSACKRRSDKSFFSRLNWLHQLKYKYPALNVTMPNNEKFDKLYIWGVHHPGTDSDQISLYAQASGRVTVSTKRSQQTVIPNIGSGPWVRGVSSRISIYWTIVKPGDILLINSTGNLIAPRGYFKIRSGKSSIMRSDAPIGKCNSECITPNGSIPNGKPFQNVNRITYGACPRYVKQNTLKLATGMRNVPEKQTRGIFGAIAGFIENGWEGMMDGWYGFRHQNSEGTGQAADLKSTQAAINQINGKLNRLIEKTNEKFHQIEKEFSEVEGRIQDLEKYVEDTKIDLWSYNAELLVALENQHTIDLTDSEMNKLFERTKKQLRENAEDMGNGCFKIYHKCDNACIGSIRNGTYDHDVYRDEALNNRFQIKSVELKSGYKDWILWISFAISCFLLCIVLLGFIMWACQKGNIRCNICI

SEQ ID NO: 102 - protein, 566 aa, Artificial Sequence
  derived and/or modified protein sequence (wt) from hemagglutinin__InfluenzaA__AAX76623
MKTIIALSYILCLVFAQKLPGNDKSTATLCLGHHAVPNGTIVKTITNDQIEVTNATELVQSSSTGGICDSPHQILDGENCTLIDALLGDPQCDGFQNKKWDLFVERSKAYSNCYPYDVPDYASLRSLVASSGTLEFNNESFDWTGVTQNGTSSACKRRSNKSFFSRLNWLTHLKYKYPALNVTMPNNEKFDKLYIWGVHHPGTDSDQISLYAQASGRITVSTKRSQQTVIPNIGSRPRVRDISSRISIYWTIVKPGDILLINSTGNLIAPRGYFKIRSGKSSIMRSDAPIGKCNSECITPNGSIPNDKPFQNVNRITYGACPRYVKQNTLKLATGMRNVPEKQTRGIFGAIAGFIENGWEGMVDGWYGFRHQNSEGTGQAADLKSTQAAINQINGKLNRLIGKTNEKFHQIEKEFSEVEGRIQDLEKYVEDTKIDLWSYNAELLVALENQHTIDLTDSEMNKLFERTKKQLRENAEDMGNGCFKIYHKCDNACIGSIRNGTYDHDVYRDEALNNRFQIKGVELRSGYKDWILWISFAISCFLLCVASLGFIMWACQKGNIRCNICI

SEQ ID NO: 103 - protein, 566 aa, Artificial Sequence
  derived and/or modified protein sequence (wt) from hemagglutinin__InfluenzaA__AAX76643
MKTIIALSYFLCLVFAQKLPGNDNSTATLCLGHHAVPNGTIVKTITNDQIEVTNATELVQSSSTGGICDSPHQILDGENCTLIDALLGDPQCDGFQNKKWDLFVERSKAYSNCYPYDVPDYASLRSLVASSGTLEFNNESFNWTGVTQNGTSSACERRSNKSFFSRLNWLTHLKYKYPALNVTMPNNEKFDKLYIWGVHHPGTDSDQISLYAQASGRITVSTKRSQQTVIPNIGSRPRVRDVSSRISIYWTIVKPGDILLINSTGNLIAPRGYFKIRSGKSSIMRSDAPIGKCNSECITPNGSIPNDKPFQNVNRITYGACPRYVKQNTLKLATGMRNVPEKQTRGIFGAIAGFIENGWEGMVDGWYGFRHQNSEGTGQAADLKSTQAAINQINGKLNRLIGKTNEKFHQIEKEFSEVEGRIQDLEKYVEDTKIDLWSYNAELLVALENQHTIDLTDSEMNKLFERTKKQLRENAEDMGNGCFKIYHKCDNACIGSIRNGTYDHDVYRDEALNNRFQIKGVELKSGYKDWILWISFAISCFLLCVALLGFIMWACQKGNIRCDICI

SEQ ID NO: 104 - protein, 566 aa, Artificial Sequence
  derived and/or modified protein sequence (wt) from hemagglutinin__InfluenzaA__AAX76653
MKTIIALSYFLCLVFAQKLPGNDNSTATLCLGHHAVPNGTIVKTITNDQIEVTNATELVQSSSTGGICDSPHQILDGENCTLIDALLGDPQCDGFQNKKWDLFVERSKAYSNCYPYDVPDYASLRSLVASSGTLEFNNESFNWTGVTQNGTSSACERRSNKSFFSRLNWLTHLKYKYPALNVTMPNNEKFDKLYIWGVHHPGTDSDQISLFAQASGRITVSTKRSQQTVIPNIGSGPRVRDVSSRISIYWTIVKPGDILLINSTGNLIAPRGYFKIRSGKSSIMRSDAPIGKCNSECITPNGSIPNDKPFQNVNRITYGACPRYVKQNTLKLATGMRNVPEKQTRGIFGAIAGFIENGWEGMVDGWYGFRHQNSEGTGQAADLKSTQAAINQINGKLNRLIGKTNEKFHQIEKEFSEVEGRIQDLEKYVEDTKIDLWSYNAELLVALENQHTIDLTDSEMNKLFERTKKQLRENAEDMGNGCFKIYHKCDNACIGSIRNGTYDHDVYRDEALNNRFQIKGVELKSGYKDWILWISFAISCFLLCVALLGFIMWACQKGNIRCDICI

SEQ ID NO: 105 - protein, 566 aa, Artificial Sequence
  derived and/or modified protein sequence (wt) from hemagglutinin__InfluenzaA__AAX76663
MKTIIALSYILCLVFAQKLPGNDNSTATLCLGHHAVPNGTLVKTITNDQIEVTNATELVQSSSTGRICDSPHQILDGENCTLIDALLGDPHCDGFQNKEWDLFVERSKAYSNCYPYDVPDYVSLRSLVASSGTLEFNNESFNWTGVAQNGTSSACKRRSDKSFFSRLNWLHQLKYKYPALNVTMPNNEKFDKLYIWGVHHPGTDSDQISLYAQASGRVTVSTKRSQQTVIPNIGSGPWVRGVSSRISIYWTIVKPGDILLINSTGNLIAPRGYFKIRSGKSSIMRSDAPIGKCNSECITPNGSIPNDKPFQNVNRITYGPCPRYVKQNTLKLATGMRNVPEKQTRGIFGAIAGFIENGWEGMMDGWYGFRHQNSEGTGQAADLKSTQAAINQINGKLNRLIEKTNEKFHQIEKEFSEVEGRIQDLEKYVEDTKIDLWSYNAELLVALENQHTIDLTDSEMNKLFERTKKQLRENAEDMGNGCFKIYHKCDNACIGSIRNGTYDHDVYRDEALNNRFQIKGVELKSGYKDWILWISFAISCFLLCIVLLGFIMWACQKGNIRCNICI

SEQ ID NO: 106 - protein, 566 aa, Artificial Sequence
  derived and/or modified protein sequence (wt) from hemagglutinin__InfluenzaA__AAX76673
MKTIIALSYILCLVFAQKLPVNDNSTATLCLGHHAVPNGTLVKTITNDHIEVTNATELVQSSSTGRICDSPHQILDGENCTLIDALLGDPHCDGFQNKEWDLFVERSTAYSNCYPYDVPDYASLRSLVASSGTLEFNNESFNWTGVAQNGTSSACKRRSIKSFFSRLNWLHQLKYKYPALNVTMPNNEKFDKLYIWGVHHPSTDSDQISLYAQASGRVTVSTKRSQQTVIPNIGSRPWVRGVSSRISIYWTIVKPGDILLINSTGNLIAPRGYFKIRSGKSSIMRSNAPIGKCNSECITPNGSIPNDKPFQNVNRITYGACPRYVKQNTLKLATGMRNVPEKQTRGIFGAIAGFIENGWEGMVDGWYGFRHQNSEGTGQAADLKSTQAAINQINGKLNRLIEKTNEKFHQIEKEFSEVEGRIQDLERYVEDTKIDLWSYNAELLVALENQHTIDLTDSEMNKLFERTRKQLRENAEDMGNGCFKIYHKCDNACIGSIRNGTYDHDVYRDEALNNRFQIKGVELKSGYKDWILWISFAISCFLLCVVLLGFIMWACQKGNIRCNICI

SEQ ID NO: 107 - protein, 566 aa, Artificial Sequence
  derived and/or modified protein sequence (wt) from hemagglutinin__InfluenzaA__AAX76683
MKTIIALSYILCLVFAQKLPVNDNSTATLCLGHHAVPNGTLVKTITNDHIEVTNATELVQSSSTGRICDSPHQILDGENCTLIDALLGDPHCDGFQNKEWDLFVERSTAYSNCYPYDVPDYASLRSLVASSGTLEFNNESFNWTGVAQNGTSSACKRRSIKSFFSRLNWLHQLKYKYPALNVTMPNNEKFDKLYIWGVHHPSTDSDQISLYAQASGRVTVSTKRSQQTVIPNIGSRPWVRGVSSRISIYWTIVKPGDILLINSTGNLIAPRGYFKIRSGKSSVMRSNAPIGKCNSECITPNGSIPNDKPFQNVNRITYGACPRYVKQNTLKLATGMRNVPEKQTRGIFGAIAGFIENGWEGMVDGWYGFRHQNSEGTGQAADLKSTQAAINQINGKLNRLIEKTNEKFHQIEKEFSEVEGRIQDLEKYVEDTKIDLWSYNAELLVALENQHTIDLTDSEMNKLFERTRKQLRENAEDMGNGCFKIYHKCDNACIGSIRNGTYDHDVYRDEALNNRFQIKGVELKSGYKDWILWISFAISCFLLCVVLLGFIMWACQKGNIRCNICI

SEQ ID NO: 108 - protein, 566 aa, Artificial Sequence; identical to SEQ ID NO: 72
  derived and/or modified protein sequence (wt) from hemagglutinin__InfluenzaA__AAX76713

SEQ ID NO: 109 - protein, 566 aa, Artificial Sequence
  derived and/or modified protein sequence (wt) from hemagglutinin__InfluenzaA__AAX76723
MKTIIALSYILCLVFAQKLPVNDNSTATLCLGHHAVPNGTLVKTITNDHIEVTNATELVQSSSTGRICDSPHQILDGENCTLIDALLGDPHCDGFQNKEWDLFVERSTAYSNCYPYDVPDYASLRSLVASSGTLEFNNESFNWTGVAQNGTSSACKRRSIKSFFSRLNWLHQLKYKYPALNVTMPNNEEFDKLYIWGVHHPSTDSDQISLYAQASGRVTVSTKRSQQTVIPNIGSRPWVRGVSSIISIYWTIVKPGDILLINSTGNLIAPRGYFKIRSGKSSIMRSNAPIGKCNSECITPNGSIPNDKPFQNVNRITYGACPRYVKQNTLKLATGMRNVPEKQTRGIFGAIAGFIENGWEGMVDGWYGFRHQNSEGTGQAADLKSTQAAINQINGKLNRLIEKTNEKFHQIEKEFSEVEGRIQDLEKYVEDTKIDLWSYNAELLVALENQHTIDLTDSEMNKLFERTRKQLRENAEDMGNGCFKIYHKCDNACIGSIRNGTYDHDVYRDEALNNRFQIKGVELKSGYKDWILWISFAISCFLLCVVLLGFIMWACQKGNIRCNICI

SEQ ID NO: 110 - protein, 566 aa, Artificial Sequence
  derived and/or modified protein sequence (wt) from hemagglutinin__InfluenzaA__AAX76733
MKTIIALSYILCLVFAQKLPGNDNSTATLCLGHHAVPNGTLVKTITNDQIEVTNATELVQSSSTDRICDSPHQILDGGNCTLIDALLGDPHCDGFQNKEWDLFVERSKAYSNCYPYDVPDYVSLRSLVASSGTLEFNNESFNWTGVAQNGTSSACKRRSDKSFFSRLNWLHQLKNKYPALNVAMPNNEKFDKLYIWGVHHPGTDSDQISLYAQASGRVTVSTKRSQQTVIPNIGSRPRVRDISSRISIYWTIVKPGDILLINSTGNLIAPRGYFKIRSGKSSIMRSDAPIGKCNSECITPNGSIPNDKPFQNVNRITYGACPRYVKQNTLKLATGMRNVPEKQTRGIFGAIAGFIENGWEGMVDGWYGFRHQNYEGTGQAADLKSTQAAINQINGKLNRLIEKTNEKFHQIEKEFSEVEGRIQDLEKYVEDTKIDLWSYNAELLVALENQHTIDLTDSEMNKLFERTKKQLRENAEDMGNGCFKIYHKCDNACIGSIRNGTYDHDVYRDEALNNRFQIKGVELKSGYKDWILWISFAISCFLLCIVLLGFIMWACQKGNIRCNICI

SEQ ID NO: 111 - protein, 566 aa, Artificial Sequence
  derived and/or modified protein sequence (wt) from hemagglutinin__InfluenzaA__AAX76743
MKTIIALSYILCLVFAQKLPGNDNSTATLCLGHHAVPNGTLVKTITNDQIEVTNATELVQSSSTGRICDSPHQILDGENCTLIDALLGDPHCDGFQNKEWDLFVERSKAYSNCYPYDVPDYVSLRSLVASSGTLEFNNESFNWTGVAQNGTSSACKRRSNKSFFSRLNWLHQLKNKYPALNVAMPNNEKFDKLYIWGVHHPGTDSDQISLYAQASGRVTVSTKRSQQTVIPNIGSRPRVRDISSRISIYWTIVKPGDILLINSTGNLIAPRGYFKIRSGKSSIMRSDAPIGKCNSECITPNGSIPNDKPFQNVNRITYGACPRYVKQNTLKLATGMRNVPEKQTRGIFGAIAGFIENGWEGMMDGWYGFRHQNSEGTGQAADLKSTQAAINQINGKLNRLIEKTNEKFHQIEKEFSEVEGRIQDLEKYVEDTKIDLWSYNAELLVALENQHTIDLTDSEMNKLFERTKKQLRENAEDMGNGCFKIYHKCDNACIGSIRNGTYDHDVYRDEALNNRFQIKGVELKSGYKDWILWISFAISCFLLCIVLLGFIMWACQKGNIRCNICI

SEQ ID NO: 112 - protein, 566 aa, Artificial Sequence
  derived and/or modified protein sequence (wt) from hemagglutinin__InfluenzaA__AAX76763
MKTIIALSYILCLVFAQKLPGNDNSTATLCLGHHAVPNGTIVKTITNDQIEVTNATELVQSSSTGGICDSPHQILDGENCTLIDALLGDPQCDGFQNKKWDLFVERSKAYSNCYPYDVPDYASLRSLVASSGTLEFNNESFDWTGVTQNGTSSACKRRSNKSFFSRLNWLTHLKYKYPALNVTMPNNEKFDKLYIWGVHHPGTDSDQISLYAQASGRITVSTKRSQQTVIPNIGSRPRVRDISSRISIYWTIVKPGDILLINSTGNLIAPRGYFKIRSGKSSIMRSDAPIGKCNSECITPNGSIPNDKPFQNVNRITYGACPRYVKQNTLKLATGMRNVPEKQTRGIFGAIAGFIENGWEGMVDGWYGFRHQNSEGTGQAADLKSTQAAINQINGKLNRLIGKTNEKFHQIEKEFSEVEGRIQDLEKYVEDTKIDLWSYNAELLIALENQHTIDLTDSEMNKLFERTKKQLRENAEDMGNGCFKIYHKCDNACIGSIRNGTYDHDVYRDEALNNRFQIKGVELKSGYKDWILWISFAISCFLLCVALLGFIMWACQKGNIRCNICI

SEQ ID NO: 113 - protein, 566 aa, Artificial Sequence; identical to SEQ ID NO: 32
  derived and/or modified protein sequence (wt) from hemagglutinin__InfluenzaA__AAY18086

SEQ ID NO: 114 - protein, 566 aa, Artificial Sequence
  derived and/or modified protein sequence (wt) from hemagglutinin__InfluenzaA__AAY18096
MKTIIALSCILCLVFAQKLPGNDNSTATLCLGHHAVPNGTIVKTITNDQIEVTNATELVQSSSTGGICDSPHQILDGENCTLIDALLGDPQCDGFQNKKWDLFVERSKAYSNCYPYDVPDYASLRSLVASSGTLEFNNESFNWTGVTQNGTSSACERRSNKSFFSRLNWLTHLKYKYPALNVTMPNNEKFDKLYIWGVHHPGTDSDQISLYAQASGRITVSTKRSQQTVIPNIGSRPRVRDVSSRISIYWTIVKPGDILLINSTGNLIAPRGYFKIRSGKSSIMRSDAPIGKCNSECITPNGSIPNDKPFQNVNRITYGACPRYVKQNTLKLATGMRNVPEKQTRGIFGAIAGFIENGWEGMVDGWYGFRHQNSEGTGQAADLKSTQAAINQINGKLNRLIGKTNEKFHQIEKEFSEVEGRIQDLEKYVEDTKIDLWSYNAELLVALENQHTIDLTDSEMNKLFERTKKQLRENAEDMGNGCFKIYHKCDNACIGSIRNGTYDHDVYRDEALNNRFQIKGVELKSGYKDWILWISFAISCFLLCVALLGFIMWACQKGNIRCDICI

SEQ ID NO: 115 - protein, 566 aa, Artificial Sequence; identical to SEQ ID NO: 47
  derived and/or modified protein sequence (wt) from hemagglutinin__InfluenzaA__AAY18106

SEQ ID NO: 116 - protein, 566 aa, Artificial Sequence; identical to SEQ ID NO: 47
  derived and/or modified protein sequence (wt) from hemagglutinin__InfluenzaA__AAY18116

SEQ ID NO: 117 - protein, 566 aa, Artificial Sequence
  derived and/or modified protein sequence (wt) from hemagglutinin__InfluenzaA__AAY18126
MKTIIALSYILCLVFAQKLPGNDNSTATLCLGHHAVPNGTIVKTITNDQIEVTNATELVQSSSTGGICDSPHQILDGENCTLIDALLGDPQCDGFQNKKWDLFVERSKAYSNCYPYDVPDYASLRSLVASSGTLEFNNEGFNWTGVTQNGTSSACKRKSNKSFFSRLNWLTHLKYKYPALNVTMPNNEKFDKLYIWGVHHPGTDNDQISLYAQASGRITVSTKRSQQTVIPNIGSRPRVRDVSSRISIYWTIVKPGDILLINSTGNLIAPRGYFKIRSGKSSIMRSDAPIGKCNSECITPNGSIPNDKPFQNVNRITYGACPRYVKQNTLKLATGMRNVPEKQTRGIFGAIAGFIENGWEGMVDGWYGFRHQNSEGTGQAADLKSTQAAINQINGKLNRLIGKTNEKFHQIEKEFSEVEGRIQDLEKYVEDTKIDLWSYNAELLVALENQHTIDLTDSEMNKLFERTKKQLRENAEDMGNGCFKIYHKCDNACIGSIRNGTYDHDVYRDEALNNRFQIKGVELKSGYKDWILWISFAISCFLLCVALLGFIMWACQKGNIRCNICI

SEQ ID NO: 118 - protein, 566 aa, Artificial Sequence
  derived and/or modified protein sequence (wt) from hemagglutinin__InfluenzaA__AAY18136
MKTIIALSYILCLVFAQKLPGNDNSTATLCLGHHAVPNGTIVKTITNDQIEVTNATELVQSSSTGGICDSPHQILDGENCTLIDALLGDPQCDGFQNKKWDLFVERSKAYSNCYPYDVPDYASLRSLVASSGTLEFNNESFDWTGVTQNGTSSACKRRSNKSFFSRLNWLTHLKYKYPALNVTMPNNEKFDKLYIWGVHHPGTDSDQISLYAQASGRITVSTKRSQQTVIPNIGSRPRVRDVSSRISIYWTIVKPGDILLINSTGNLIAPRGYFKIRSGKSSIMRSDAPIGKCNSECITPNGSIPNDKPFQNVNRITYGACPRYIKQNTLKLATGMRNVPEKQTRGIFGAIAGFIENGWEGMVDGWYGFRHQNSEGTGQAADLKSTQAAINQINGKLNRLIGKTNEKFHQIEKEFSEVEGRIQDLEKYVEDTKIDLWSYNAELLVALENQHTIDLTDSEMNKLFERTKKQLRENAEDMGNGCFKIYHKCDNACIGSIRNGTYDHDVYRDEALNNRFQIKGVELKSGYKDWILWISFAISCFLLCVALLGFIMWACQKGNIRCNICI

SEQ ID NO: 119 - protein, 566 aa, Artificial Sequence; identical to SEQ ID NO: 72
  derived and/or modified protein sequence (wt) from hemagglutinin__InfluenzaA__AAY18156

SEQ ID NO: 120 - protein, 566 aa, Artificial Sequence; identical to SEQ ID NO: 72
  derived and/or modified protein sequence (wt) from hemagglutinin__InfluenzaA__AAY18176

SEQ ID NO: 121 - protein, 566 aa, Artificial Sequence; identical to SEQ ID NO: 72
  derived and/or modified protein sequence (wt) from hemagglutinin__InfluenzaA__AAY18186

SEQ ID NO: 122 - protein, 566 aa, Artificial Sequence; identical to SEQ ID NO: 73
  derived and/or modified protein sequence (wt) from hemagglutinin__InfluenzaA__AAY18564

SEQ ID NO: 123 - protein, 566 aa, Artificial Sequence
  derived and/or modified protein sequence (wt) from hemagglutinin__InfluenzaA__AAY18585
MKTIIALSYILCLVFAQKLPENDNSTATLCLGHHAVPNGTLVKTITNDQIEVTNATELVQSSSTGRICDSPHQILDGENCTLIDALLGDPHCDGFQNKEWDLFVERSKAYSNCYPYDVPDYVSLRSLVASSGTLEFNNESFNWTGVAQNGTSSACKRRSDKSFFSRLNWLHQLKYKYPALNVTMPNNEKFDKLYIWGVHHPGTDSDQISLYAQASGRVTVSTKRSQQTVIPNIGSRPWVRGVSSRISIYWTIVKPGDILLINSTGNLIAPRGYFKIRSGKSSIMRSDAPIGKCNSECITPNGSIPNDKPFQNVNRITYGPCPRYVKQNTLKLATGMRNVPEKQTRGIFGAIAGFIENGWEGMMDGWYGFRHQNSEGTGQAADLKSTQAAINQINGKLNRLIEKTNEKFHQIEKEFSEVEGRIQDLEKYVEDTKIDLWSYNAELLVALENQHTIDLTDSEMNKLFERTKKQLRENAEDMGNGCFKIYHKCDNACIGSIRNGTYDHDVYRDEALNNRFQIKGVELKSGYKDWILWISFAISCFLLCIVLLGFIMWACQKGNIRCNICI

SEQ ID NO: 124 - protein, 566 aa, Artificial Sequence; identical to SEQ ID NO: 32
  derived and/or modified protein sequence (wt) from hemagglutinin__InfluenzaA__AAY18611

SEQ ID NO: 125 - protein, 566 aa, Artificial Sequence; identical to SEQ ID NO: 73
  derived and/or modified protein sequence (wt) from hemagglutinin__InfluenzaA__AAY27843

SEQ ID NO: 126 - protein, 566 aa, Artificial Sequence; identical to SEQ ID NO: 32
  derived and/or modified protein sequence (wt) from hemagglutinin__InfluenzaA__AAY27853

SEQ ID NO: 127 - protein, 566 aa, Artificial Sequence
  derived and/or modified protein sequence (wt) from hemagglutinin__InfluenzaA__AAY27863
MKTIIALSYILCLVFAQKLPGNDNSTATLCLGHHAVPNGTIVKTITNDQIEVTNATELVQSSSTGGICDSPHQIIDGENCTLIDALLGDPQCDGFQNKKWDLFVERSKAYSNCYPYDVPDYASLRSLVASSGTLEFNNESFDWTGVTQNGTSSACKRRSNKSFFSRLNWLTHLKYKYPALNVTMPNNEKFDKLYIWGVHHPGTDSDQISLYAQASGRITVSTKRSQQTVIPNIGSRPRVRDVSSRISIYWTIVKPGDILLINSTGNLIAPRGYFKIRSGKSSIMISDAPIGKCNSECITPNGSIPNDKPFQNVNRITYGACPRYVKQNTLKLATGMRNVPEKQTRGIFGAIAGFIENGWEGMVDGWYGFRHQNSEGTGQAADLKSTQAAINQINGKLNRLIGKTNEKFHQIEKEFSEVEGRIQDLEKYVEDTKIDLWSYNAELLVALENQHTIDLTDSEMNKLFERTKKQLRENAEDMGNGCFKIYHKCDNACIGSIRNGTYDHDVYRDEALNNRFQIKGVELKSGYKDWILWISFAISCFLLCVALLGFIMWACQKGNIRCNICI

SEQ ID NO: 128 - protein, 566 aa, Artificial Sequence; identical to SEQ ID NO: 51
  derived and/or modified protein sequence (wt) from hemagglutinin__InfluenzaA__AAY27959

SEQ ID NO: 129 - protein, 566 aa, Artificial Sequence; identical to SEQ ID NO: 31
  derived and/or modified protein sequence (wt) from hemagglutinin__InfluenzaA__AAY27994

SEQ ID NO: 130 - protein, 566 aa, Artificial Sequence; identical to SEQ ID NO: 31
  derived and/or modified protein sequence (wt) from hemagglutinin__InfluenzaA__AAY28004

SEQ ID NO: 131 - protein, 566 aa, Artificial Sequence; identical to SEQ ID NO: 31
  derived and/or modified protein sequence (wt) from hemagglutinin__InfluenzaA__AAY28265

SEQ ID NO: 132 - protein, 566 aa, Artificial Sequence
  derived and/or modified protein sequence (wt) from hemagglutinin__InfluenzaA__AAY28275
MKTIIALSYILCLVFAQKLPGNDNSTATLCLGHHAVPNGTLVKTITNDQIEVTNATELVQSSSTGRICDSPHQILDGENCTLIDALLGDPHCDGFQNKEWDLFVERSKAYSNCYPYDVPDYASLRSLVASSGTLEFNNESFNWTGVAQNGTSSACKRRSNKSFFSRLNWLHQLKYKYPALNVTMPNNEKFDKLYIWGVHHPSTDSDQISLYAQASGRVTVSTKRSQQTVIPNIGSRPWVRGVSSRISIYWTIVKPGDILLINSTGNLIAPRGYFKIRSGKSSVMRSDASIGKCNSECITPNGSIPNDKPFQNVNRITYGACPRYVKQNTLKLATGMRNVPEKQTRGIFGAIAGFIENGWEGMVDGWYGFRHQNSEGTGQAADLKSTQAAINQINGKLNRLIEKTNEKFHQIEKEFSEVEGRIQDLEKYVEDTKIDLWSYNAELLVALENQHTIDLTDSEMNKLFERTKKQLRENAEDMGNGCFKIYHKCDNACIGSIRNGTYDHDVYRDEALNNRFQIKGVELKSGYKDWILWISFAISCFLLCVVLLGFIMWACQKGNIRCNICI

SEQ ID NO: 133 - protein, 566 aa, Artificial Sequence
  derived and/or modified protein sequence (wt) from hemagglutinin__InfluenzaA__AAY28285
MKTIIALSYILCLVFAQKLPGNDNSTATLCLGHHAVPNGTLVKTITNDQIEVTNATELVQNSSTGRICDSPHQILDGENCTLIDALLGDPHCDGFQNKEWDLFVERSKAYSNCYPYDVPDYVSLRSLVASSGTLEFNNESFNWTGVAQNGTSSACKRRSDKSFFSRLNWLHQLKYKYPALNVTMPNNEKFDKLYIWGVHHPGTDNDQISLYAQASGRVTVSTKRSQQTVIPNIGSRPWVRGVSSRISIYWTIVKPGDILLINSTGNLIAPRGYFKIRSGKSSIMRSDAPIGKCNSECITPNGSIPNDKPFQNVNRITYGPCPRYVKQNTLKLATGMRNVPEKQTRGIFGAIAGFIENGWEGMMDGWYGFRHQNSEGTGQAADLKSTQAAINQINGKLNRLIEKTNEKFHQIEKEFSEVEGRIQDLEKYVEDTKIDLWSYNAELLVALENQHTIDLTDSEMNKLFERTKKQLRENAEDMGNGCFKIYHKCDNACIGSIRNGTYDHDVYRDEALNNRFQIKGVELKSGYKDWILWISFAISCFLLCIVLLGFIMWACQKGNIRCNICI

SEQ ID NO: 134 - protein, 566 aa, Artificial Sequence
  derived and/or modified protein sequence (wt) from hemagglutinin__InfluenzaA__AAY28295
MKTIIALSYILCLVFAQKLPGNDNSTATLCLGHHAVPNGTIVKTITNDQIEVTNATELVQSSSTGGICDSPHQILDGENCTLIDALLGDPQCDGFQNKKWDLFVERSKAYSNCYPYDVPDYASLRSLVASSGTLEFNNESFDWTGVTQNGTSSACKRRSNKSFFSRLNWLTHLKYKYPALNVTMPNNEKFDKLYIWGVHHPGTDSDQISLYAQASGKITVSTKRSQQTVIPNIGSRPRVRDVSSRISIYWTIVKPGDILLINSTGNLIAPRGYFKIQSGKSSIMRSDAPIGKCNSECITPNGSIPNDKPFQNVNRITYGACPRYVKQKTLKLATGMRNVPEKQTRGIFGAIAGFIENGWEGMVDGWYGFRHQNSEGTGQAADLKSTQAAINQINGKLNRLIGKTNEKFHQIEKEFSEVEGRIQDLEKYVEDTKIDLWSYNAELLVALENQHTIDLTDSEMNKLFERTKKQLRENAEDMGNGCFKIYHKCDNACIGSIRNGTYDHDVYRDEALNNRFQIKGVELKSGYKDWILWISFAISCFLLCVALLGFIMWACQKGNIRCNICI

SEQ ID NO: 135 - protein, 566 aa, Artificial Sequence
  derived and/or modified protein sequence (wt) from hemagglutinin__InfluenzaA__AAY28305
MKAIIALSYILCLVFAQKLPGNDNSTATLCLGHHAVPNGTLVKTITNDQIEVTNATELVQSSSTGRICDSPHQILDGENCTLIDALLGDPHCDGFQNKEWDLFVERSKAYSNCYPYDVPDYVSLRSLVASSGTLEFNNESFNWTGVAQNGTSSACKRRSDKSFFSRLNWLHQLKYKYPALNVTMPNNEKFDKLYIWGVHHPGTDSDQISLYAQASGRVTVSTKRSQQTVIPNIGSGPWVRGVSSRISIYWTIVKPGDILLINSTGNLIAPRGYFKIRSGKSSIMRSDAPIGKCNSECITPNGSIPNDKPFQNVNRITYGACPRYVKQNTLKLATGMRNVPEKQTRGIFGAIAGFIENGWEGMMDGWYGFRHQNSEGTGQAADLKSTQAAINQINGKLNRLIEKTNEKFHQIEKEFSEVEGRIQDLEKYVEDTKIDLWSYNAELLVALENQHTIDLTDSEMNKLFERTKKQLRENAEDMGNGCFKIYHKCDNACIGSIRNGTYDHDVYRDEALNNRFQIKGVELKSGYKDWILWISFAISCFLLCIVLLGFIMWACQKGNIRCNICI

SEQ ID NO: 136 - protein, 566 aa, Artificial Sequence
  derived and/or modified protein sequence (wt) from hemagglutinin__InfluenzaA__AAY28325
MKTIIALSYILCLVFAQKLPGNDNSTATLCLGHHAVPNGTLVKTITNDQIEVTNATELVQSSSTSRICDSPHQILDGENCTLIDALLGDPHCDGFQNKEWDLFVERSKAYSNCYPYDVPDYVSLRSLVASSGTLEFNNESFNWTGVAQNGTSSACKRRSDKSFFSRLNWLHQLKYKYPALNVTMPNNEKFDKLYIWGVHHPGTDSDQISLYAQASGRVIVSTKRSQQTVIPNIGSGPWVRGVSSRISIYWTIVKPGDILLINSTGNLIAPRGYFKIRSGKSSIMRSDAPIGKCNSECITPNGSIPNDKPFQNVNRITYGACPRYVKQNTLKLATGMRNVPEKQTRGIFGAIAGFIENGWEGMMDGWYGFRHQNSEGTGQAADLKSTQAAINQINGKLNRLIEKTNEKFHQIEKEFAEVEGRIQDLEKYVEDTKIDLWSYNAELLVALENQHTIDLTDSEMNKLFERTKKQLRENAEDMGNGCFKIYHKCDNACIGSIRNGTYDHDVYRDEALNNRFQIKGVELKSGYKDWILWISFAISCFLLCIVLLGFIMWACQKGNIRCNICI

SEQ ID NO: 137 - protein, 566 aa, Artificial Sequence
  derived and/or modified protein sequence (wt) from hemagglutinin__InfluenzaA__AAY28335
MKTIIALSYILCLVSAQKLPGNDNSTATLCLGHHAVPNGTLVKTITNDQIEVTNATELVQSSSTSRICDSPHQILDGENCTLIDALLGDPHCDGFQNKEWDLFVERSKAYSNCYPYDVPDYVSLRSLVASSGTLEFNNESFNWTGVAQNGTSSACKRRSDKSFFSRLNWLHQLKYKYPALNVTMPNNEKFDKLYIWGVHHPGTDSDQISLYAQASGRVTVSTKRSQQTVIPNIGSRPWVRGVSSRISIYWTIVKPGDILLINSTGNLIAPRGYFKIRSGKSSIMRSDAPIGKCNSECITPNGSIPNDKPFQNVNRITYGACPRYVKQNTLKLATGMRNVPEKQTRGIFGAIAGFIENGWEGMMDGWYGFRHQNSEGTGQAADLKSTQAAINQINGKLNRLIEKTNEKFHQIEKEFSEVEGRIQDLEKYVEDTKVDLWSYNAELLVALENQHTIDLTDSEMNKLFERTKKQLRENAEDMGNGCFKIYHKCDNACIGSIRNGTYDHDVYRDEALNNRFQIKGVELKSGYKDWILWISFAISCFLLCIVLLGFIMWACQKGNIRCNICI

SEQ ID NO: 138 - protein, 566 aa, Artificial Sequence; identical to SEQ ID NO: 32
  derived and/or modified protein sequence (wt) from hemagglutinin__InfluenzaA__AAY28345

SEQ ID NO: 139 - protein, 566 aa, Artificial Sequence; identical to SEQ ID NO: 72
  derived and/or modified protein sequence (wt) from hemagglutinin__InfluenzaA__AAY28355

SEQ ID NO: 140 - protein, 566 aa, Artificial Sequence
  derived and/or modified protein sequence (wt) from hemagglutinin__InfluenzaA__AAY28363
MKTIIALSYILCMVFAQKLPVNDNSTATLCLGHHAVPNGTLVKTITNDHIEVTNATELVQSSSTGRICDSPHQILDGENCTLIDALLGDPHCDGFQNKEWDLFVERSTAYSNCYPYDVPDYASLRSLVASSGTLEFNNESFNWTGVAQNGTSSACKRRSIKSFFSRLNWLHQLKYKYPSLNVTMPNNEKFDKLYIWGVHHPSTDSDQISLYAQASGRVTVSTKRSQQTVIPNIGSRPWVRGVSSRISIYWTIVKPGDILLINSTGNLIAPRGYFKIRSGKSSIMRSNAPIGKCNSECITPNGSIPNDKPFQNVNRITYGACPRYVKQNTLKLATGMRNVPEKQTRGIFGAIAGFIENGWEGMVDGWYGFRHQNSEGTGQAADLKSTQAAINQINGKLNRLIEKTNEKFHQIEKEFSEVEGRIQDLEKYVEDTKIDLWSYNAELLVALENQHTIDLTDSEMNKLFERTRKQLRENAEDMGNGCFKIYHKCDNACIGSIRNGTYDHDVYRDEALNNRFQIKGVELKSGYKDWILWISFAISCFLLCVVLLGFIMWACQKGNIRCNICI

SEQ ID NO: 141 - protein, 566 aa, Artificial Sequence; identical to SEQ ID NO: 72
  derived and/or modified protein sequence (wt) from hemagglutinin__InfluenzaA__AAY28375

SEQ ID NO: 142 - protein, 566 aa, Artificial Sequence; identical to SEQ ID NO: 32
  derived and/or modified protein sequence (wt) from hemagglutinin__InfluenzaA__AAY28385

SEQ ID NO: 143 - protein, 566 aa, Artificial Sequence
  derived and/or modified protein sequence (wt) from hemagglutinin__InfluenzaA__AAY28395
MKTIIALSYILCLVFAQKLPGNDNSTATLCLGHHAVPNGTIVKTITNDQIEVTNATELVQSSSTGGICDSPHQILDGENCTLIDALLGDPQCDGFQNKKWDLFVERSKAYSNCYPYDVPDYASLRSLVASSGTLEFNNESFDWTGVTQNGTSSACKRRSNKSFFSRLNWLTHLKYKYPALNVTMPNNEKFDKLYIWGVHHPGTDSDQINLYAQASGRITVSTKRSQQTVIPNIGSRPRVRDVSSRISIYWTIVKPGDILLINSTGNLIAPRGYFKIRSGKSSIMRSDAPIGKCNSECITPNGSIPNDKPFQNVNRITYGACPRYIKQNTLKLATGMRNVPEKQTRGIFGAIAGFIENGWEGMVDGWYGFRHQNSEGTGQAADLKSTQAAINQINGKLNRLIGKTNEKFHQIEKEFSEVEGRIQDLEKYVEDTKIDLWSYNAELLVALENQHTIDLTDSEMNKLFERTKKQLRENAEDMGNGCFKIYHKCDNACIGSIRNGTYDHDVYRDEALNNRFQIKGVELKSGYKDWILWISFAISCFLLCVALLGFIMWACQKGNIRCNICI

SEQ ID NO: 144 - protein, 566 aa, Artificial Sequence
  derived and/or modified protein sequence (wt) from hemagglutinin__InfluenzaA__AAY28405
MKTIIALSYILCLVFAQKLPGNDNSTATLCLGHHAVPNGTLVKTITNDQIEVTNATELVQISSTGRICDNPHQILDGENCTLIDALLGDPHCDGFQNKEWDLFVERSKAYSNCYPYDVPDYVSLRSLVASSGTLEFNNESFNWTGVAQNGTSSACKRRSDKSFFSRLNWLHQLKYKYPALNVTMPNNEKFDKLYIWGVHHPGTDSDQISLYAQASGRVTVSTKRSQQTVIPNIGSRPWVRGVSSRISIYWTIVKPGDILLINSTGNLIAPRGYFKIRSGKSSIMRSDAPIGKCNSECITPNGSIPNDKPFQNVNRITYGPCPRYVKQNTLKLATGMRNVPEKQTRGIFGAIAGFIENGWEGMMDGWYGFRHQNSEGTGQAADLKSTQAAINQINGKLNRLIEKTNEKFHQIEKEFSEVEGRIQDLEKYVEDTKIDLWSYNAELLVALENQHTIDLTDSEMNKLFERTKKQLRENAEDMGNGCFKIYHKCDNACIGSIRNGTYDHDVYRDEALNNRFQIKGVELKSGYKDWILWISFAISCFLLCIVLLGFIMWACQKGNIRCNICV

SEQ ID NO: 145 - protein, 566 aa, Artificial Sequence; identical to SEQ ID NO: 32
  derived and/or modified protein sequence (wt) from hemagglutinin__InfluenzaA__AAY28486

SEQ ID NO: 146 - protein, 566 aa, Artificial Sequence; identical to SEQ ID NO: 32
  derived and/or modified protein sequence (wt) from hemagglutinin__InfluenzaA__AAY28521

SEQ ID NO: 147 - protein, 566 aa, Artificial Sequence; identical to SEQ ID NO: 31
  derived and/or modified protein sequence (wt) from hemagglutinin__InfluenzaA__AAY28531

SEQ ID NO: 148 - protein, 566 aa, Artificial Sequence; identical to SEQ ID NO: 32
  derived and/or modified protein sequence (wt) from hemagglutinin__InfluenzaA__AAY28541

SEQ ID NO: 149 - protein, 566 aa, Artificial Sequence
  derived and/or modified protein sequence (wt) from hemagglutinin__InfluenzaA__AAY28551
MKTIIALSYILCLVFAQKLPVNDNSTATLCLGHHAVPNGTLVKTITNDHIEVTNATELVQSSSTGRICDSPHQILDGENCTLIDALLGDPHCDGFQNKEWDLFVERSTAYSNCYPYDVPDYASLRSLVASSGTLEFNNESFNWTGVAQNGTSSACKRRSIKSFFSRLNWLHQLKYKYPALNVTMPNNEKFDKLYIWGVHHPSTDSDQISLYAQASGRVTVSTKRSQQTVIPNIGSGPWVRGVSSRISIYWTIVKPGDILLINSTGNLIAPRGYFKIRSGKSSIMRSNAPIGKCNSECITPNGSIPNDKPFQNVNRITYGACPRYVKQNTLKLATGMRNVPEKQTRGIFGAIAGFIENGWEGMVDGWYGFRHQNSEGTGQAADLKSTQAAINQINGKLNRLIEKTNEKFHQIEKEFSEVEGRIQDLEKYVEDTKIDLWSYNAELLVALENQHTIDLTDSEMNKLFERTRKQLRENAEDMGNGCFKIYHKCDNACIGSIRNGTYDHDVYRDEALNNRFQIKGVELKSGYKDWILWISFAISCFLLCVVLLGFIMWACQKGNIRCNICI

SEQ ID NO: 150 - protein, 566 aa, Artificial Sequence; identical to SEQ ID NO: 32
  derived and/or modified protein sequence (wt) from hemagglutinin__InfluenzaA__AAY28561

SEQ ID NO: 151 - protein, 566 aa, Artificial Sequence; identical to SEQ ID NO: 47
  derived and/or modified protein sequence (wt) from hemagglutinin__InfluenzaA__AAY28581

SEQ ID NO: 152 - protein, 566 aa, Artificial Sequence
  derived and/or modified protein sequence (wt) from hemagglutinin__InfluenzaA__AAY28591
MKTIIALSYILCLVFAQKLPVNDNSTATLCLGHHAVPNGTLVKTITNDHIEVTNATELVQSSSTGRICDSPHQILDGENCTLIDALLGDPHCDGFQNKEWDLFVERSTAYSNCYPYDVPDYASLRSLVASSGTLEFNNESFNWTGVAQNGTSSACKRRSIKSFFSRLNWLHQLKYKYPALDVTMPNNEKFDKLYIWGVHHPSTDSDQISLYAQASGRVTVSTKRSQQTVIPNIGSRPWVRGVSSRISIYWTIVKPGDILLINSTGNLIAPRGYFKIRSGKSSIMRSNAPIGKCNSECITPNGSIPNDKPFQNVNRITYGACPRYVKQNTLKLATGMRNVPEKQTRGIFGAIAGFIENGWEGMVDGWYGFRHQNSEGTGQAADLKSTQAAINQINGKLNRLIEKTNEKFHQIEKEFSEVEGRIQDLEKYVEDTKIDLWSYNAELLVALENQHTIDLTDSEMNKLFERTRKQLRENAEDMGNGCFKIYHKCDNACIGSIRNGTYDHDVYRDEALNNRFQIKGVELKSGYKDWILWISFAISCFLLCVVLLGFIMWACQKGNIRCNICI

SEQ ID NO: 153 - protein, 566 aa, Artificial Sequence; identical to SEQ ID NO: 72
  derived and/or modified protein sequence (wt) from hemagglutinin__InfluenzaA__AAY28608

SEQ ID NO: 154 - protein, 566 aa, Artificial Sequence
  derived and/or modified protein sequence (wt) from hemagglutinin__InfluenzaA__AAY28618
MKTIIALSYILCLVFAQKLPGNDNSTATLCLGHHAVPNGTIVKTITNDQIEVTNATELVQSSSTGGICDSPHQILDGENCTLIDALLGDPQCDGFQNKKWDLFVERSKAYSNCYPYDVPDYASLRSLVASSGTLEFNNESFNWTGVTQNGTSSACKRRSNKSFFSRLNWLTHLKYKYPALNVTMPNNEKFDKLYIWGVHHPGTDSDQISLYAQASGRITVSTKRSQQTVIPNIGSRPRVRDVSSRMSIYWTIVKPGDILLINSTGNLIAPRGYFKIRSGKSSIMRSDAPIGKCNSECITPNGSIPNDKPFQNVNRITYGACPRYVKQNTLKLATGMRNVPEKQTRGIFGAIAGFIENGWEGMVDGWYGFRHQNSEGTGQAADLKSTQAAINQINGKLNRLIGKTNEKFHQIEKEFSEVEGRIQDLEKYVEDTKIDLWSYNAELLVALENQHTIDLTDSEMNKLFERTKKQLRENAEDMGNGCFKIYHKCDNACIESIRNGTYDHDVYRDEALNNRFQIKGVELKSGYKDWILWISFAISCFLLCVALLGFIMWACQKGNIRCNICI

SEQ ID NO: 155 - protein, 566 aa, Artificial Sequence; identical to SEQ ID NO: 47
  derived and/or modified protein sequence (wt) from hemagglutinin__InfluenzaA__AAY28638

SEQ ID NO: 156 - protein, 566 aa, Artificial Sequence
  derived and/or modified protein sequence (wt) from hemagglutinin__InfluenzaA__AAY28648
MKTIIALSYILCLVFAQKLPGNDNSTATLCLGHHAVPNGTLVKTITNDQIEVTNATELVQSSSTGRICDSPHQILDGENCTLIDALLGDPHCDGFQNKEWDLFVERSKAYSNCYPYDVPDYVSLRSLVASSGTLEFNNESFNWTGVAQNGTSSACKRRSDKSFFSRLNWLHQLKYKYPALNVTMPNNEKFDKLYIWGVHHPGTDSDQISLYAQASGRVTVSTKRSQQTVIPNIGSGPWVRGVSSRISIYWTIVKPGDILLINSTGNLIAPRGYFKIRSGKSSIMRSDAPIGKCNSECITPNGSIPNDKPFQNVNRITYGACPRYVKQNTLKLATGMRNVPEKQTRGIFGAIAGFIENGWEGMMDGWYGFRHQNSEGTGQAADLKSTQAAINQINGKLNRLIEKTNEKFHQIEKEFSEVEGRIQDLEKYVEDTKIDLWSYNAELLVALENQHTIDLTDSEMNKLFERTKKQLRENAEDMGNGCFKIYHKCDNACIGSIRNGTYDHDVYRDEALNNRFQIKGVELKSGYKDWILWISFAISCFLLCIVLLGFIMWACQKGNIRCNICI

SEQ ID NO: 157 - protein, 566 aa, Artificial Sequence
  derived and/or modified protein sequence (wt) from hemagglutinin__InfluenzaA__AAY44610
MKTIIALSYILCLVFAQKLPGNDNSTATLCLGHHAVPNGTIVKTITNDQIEVTNATELVQSSSTGGICDSPHQILDGENCTLIDALLGDPQCDGFQNKKWDLFVERNKAYSNCYPYDVPDYASLRSLVASSGTLEFNNESFDWTGVTQNGTSSACKRRSNKSFFSRLNWLTHLKYKYPALNVTMPNNEKFDKLYIWGVHHPGTDSDQISLYAQASGRITVSTKRSQQTVIPNIGSRPRVRDVSSRISIYWTIVKPGDILLINSTGNLIAPRGYFKIRSGKSSIMRSDAPIGKCNSECITPNGSIPNDKPFQNVNRITYGACPRYVKQNTLKLATGMRNVPEKQTRGIFGAIAGFIENGWEGMVDGWYGFRHQNSEGTGQAADLKSTQAAINQINGKLNRLIGKTNEKFHQIEKEFSEVEGRIQDLEKYVEDTKIDLWSYNAELLVALENQHTIDLTDSEMNKLFERTKKQLRENAEDMGNGCFKIYHKCDNACIGSIRNGTYDHDVYRDEALNNRFQIKGVELKSGYKDWILWISFAISCFLLCVALLGFIMWACQKGNIRCNICI

SEQ ID NO: 158 - protein, 566 aa, Artificial Sequence
  derived and/or modified protein sequence (wt) from hemagglutinin__InfluenzaA__AAY44620
MKTIIALSYILCLVFAQKLPGNDNSTATLCLGHHAVPNGTLVKTITNDQIEVTNATELVQSSSTGRICDSPHQILDGENCTLIDALLGDPHCDGFQNKEWDLFVERSKAYSNCYPYDVPDYVSLRSLVASSGTLEFNNESFNWTGVAQNGTSSACKRRSDKSFFSRLNWLHQLKYKYPALNVTMPNNEKFDKLYIWGVHHPGTDSDQISLYAQASGRVTVSTKRSQQTVIPNIGSRPWVRGVSSRISIYWTIVKPGDILLINSTGNLIAPRGYFKIRSGKSSIMRSDAPIGKCNSECITPNGSIPNDKPFQNVNRITYGPCPRYVKQNTLKLATGMRNVPEKQTRGIFGAIAGFIENGWEGMMDGWYGFRHQNSEGTGQAADLKSTQAAINQINEKLNRLIEKTNEKFHQIEKEFSEVEGRIQDLEKYVEDTKIDLWSYNAELLVALENQHTIDLTDSEMNKLFERTKKQLRENAEDMGNGCFKIYHKCDNACIGSIRNGTYDHDVYRDEALNNRFQIKGVELKSGYKDWILWISFAISCFLLCIVLLGFIMWACQKGNIRCNICI

SEQ ID NO: 159 - protein, 566 aa, Artificial Sequence; identical to SEQ ID NO: 80
  derived and/or modified protein sequence (wt) from hemagglutinin__InfluenzaA__AAY44621

SEQ ID NO: 160 - protein, 566 aa, Artificial Sequence; identical to SEQ ID NO: 47
  derived and/or modified protein sequence (wt) from hemagglutinin__InfluenzaA__AAY44631

SEQ ID NO: 161 - protein, 566 aa, Artificial Sequence
  derived and/or modified protein sequence (wt) from hemagglutinin__InfluenzaA__AAY44641
MKTIIALSYILCLVFAQKLPGNDNSTATLCLGHHAVPNGTLVKTITNDQIEVTNATELVQSSSTGRICDSPHQILDGENCTLIDALLGDPHCDGFQNKEWDLFVERSKAYSNCYPYDVPDYVSLRSLVASSGTLEFNNESFNWTGVAQNGTSSACKRRSDKSFFSRLNWLHQLKYKYPALNVTMPNNEKFDKLYIWGVHHPGTDSDQISLYAQASGRVTVSTKRSQQTVIPNIGSRPWVRGVSSRISIYWTIVKPGDILLINSTGNLIAPRGYFKIRSGKSSIMRSDAPIGKCNSECITPNGSIPNDKPFQNVNRITYGPCPRYVKQNTLKLATGMRNVPEKQTRGIFGAIAGFIENGWEGMMDGWYGFRHQNSEGTGQAADLKSTQAAINQINGKLNRLIEKTNEKFHQIEKEFSEVEGRIQDLEKYVEDTKIDLWSYNAELLVALENQHTIDLTDSEMNKLFERTKKQLRENAEDMGNGCFKIYHKCDNACIGSIRNGTYDHDVYRDEALNNRFQIKGVELKSGYKDWILWISFAISCFLLCIGLLGFIMWACQKGNIRCNICI

SEQ ID NO: 162 - protein, 566 aa, Artificial Sequence
  derived and/or modified protein sequence (wt) from hemagglutinin__InfluenzaA__AAY44651
MKTIIALSYILCLVFAQKLPVNDNSTATLCLGHHAVPNGTLVKTITNDHIEVTNATELVQSSSTGRICDSPHQILDGENCTLIDALLGDPHCDGFQNKEWDLFVERSTAYSNCYPYDVPDYASLRSLVASSGTLEFNNESFNWTGVAQNGTSSACKRRSIKSFFSRLNWLHQLKYKYPALNVTMPNNEKFDKLYIWGVHHPSTDSDQISLYAQASGRVTVSTKRSQQTVIPNIGSRPWERGVSSRISIYWTIVKPGDILLINSTGNLIAPRGYFKIRSGKSSIMRSNAPIGKCNSECITPNGSIPNDKPFQNVNRITYGACPRYVKQNTLKLATGMRNVPEKQTRGIFGAIAGFIENGWEGMVDGWYGFRHQNSEGTGQAADLKSTQAAINQINGKLNRLIEKTNEKFHQIEKEFSEVEGRIQDLEKYVEDTKIDLWSYNAELLVALENQHTIDLTDSEMNKLFERTRKQLKENAEDMGNGCFKIYHKCDNACIGSIRNGTYDHDVYRDEALNNRFQIKGVELKSGYKDWILWISFAISCFLLCVVLLGFIMWACQKGNIRCNICI

SEQ ID NO: 163 - protein, 566 aa, Artificial Sequence
  derived and/or modified protein sequence (wt) from hemagglutinin__InfluenzaA__AAY44755
MKTIIALSYILCLVFAQKLPGNDNSTATLCLGHHAVPNGTLVKTITNDQIEVTNATELVQSSSTGRICDSPHQILDGENCTLIDALLGDPHCDGFQNKEWDLFVERSKAYSNCYPYDVPDYASLRSLVASSGTLEFNNESFNWTGVAQNGTSSACKRRSNKSFFSRLNWLHQLKYKYPALNVTMPNNEKFDKLYIWGVHHPSTDSDQISLYAQASGRVTVSTKRGQQTVIPNIGSRPWVRGVSSIISIYWTIVKPGDILLINSTGNLIAPRGYFKIRSGKSSVMRSDASIGKCNSECITPNGSIPNDKPFQNVNRITYGACPRYVKQNTLKLATGMRNVPEKQTRGIFGAIAGFIENGWEGMVDGWYGFRHQNSEGTGQAADLKSTQAAINQINGKLNRLIEKTNEKFHQIEKEFSEVEGRIQDLEKYVEDTKIDLWSYNAELLVALENQHTIDLTDSEMNKLFERTKKQLRENAEDMGNGCFKIYHKCDNACIGSIRNGTYDHDVYRDEALNNRFQIKGVELKSGYKDWILWISFAISCFLLCVVLLGFIMWACQKGNIRCNICI

SEQ ID NO: 164 - protein, 566 aa, Artificial Sequence
  derived and/or modified protein sequence (wt) from hemagglutinin__InfluenzaA__AAY44775
MKTIIALSYILCLVFAQKLPVNDNSTATLCLGHHAVPNGTLVKTITNDHIEVTNATELVQSSSTGRICDSPHQILDGENCTLIDALLGDPHCDGFQDKEWDLFVERSTAYSNCYPYDVPDYASLRSLVASSGTLEFNNESFNWTGVAQNGTSSACKRRSIKSFFSRLNWLHQLKYKYPALNVTMPNNEKFDKLYIWGVHHPSTDSDQISLYAQASGRVTVSTKRSQQTVIPNIGSRPWVRGVSSRISIYWTIVKPGDILLINSTGNLIAPRGYFKIRSGKSSIMRSNAPIGKCNSECITPNGSIPNDKPFQNVNRITYGACPRYVKQTTLKLATGMRNVPEKQTRGIFGAIAGFIENGWEGMVDGWYGFRHQNSEGTGQAADLKSTQAAINQINGKLNRLIEKTNEKFHQIEKEFSEVEGRIQDLEKYVEDTKIDLWSYNAELLVALENQHTIDLTDSEMNKLFERTRKQLRENAEDMGNGCFKIYHKCDNACIGSIRNGTYDHDVYRDEALNNRFQIKGVELKSGYKDWILWISFAISCFLLCVVLLGFIMWACQKGNIRCNICI

SEQ ID NO: 165 - protein, 566 aa, Artificial Sequence; identical to SEQ ID NO: 72
  derived and/or modified protein sequence (wt) from hemagglutinin__InfluenzaA__AAY44785

SEQ ID NO: 166 - protein, 566 aa, Artificial Sequence
  derived and/or modified protein sequence (wt) from hemagglutinin__InfluenzaA__AAY44795
MKTIIALSYILCLVFAQKLPVNDNSTATLCLGHHAVPNGTLVKTITNDHIEVTNATELVQSSSTGRICDSTHQILDGENCTLIDALLGDPHCDGFQNKEWDLFVERSTAYSNCYPYDVPDYASLRSLVASSGTLEFNNESFNWTGVAQNGTSSACKRRSIKSFFSRLNWLHQLKYKYPALNVTMPNNEKFDKLYIWGVHHPSTDSDQISLYAQASGRVTVSTKRSQQTVIPNIGSRPWVRGVSSRISIYWTIVKPGDILLINSTGNLIAPRGYFKIRSGKSSIMRSNAPIGKCNSECITPNGSIPNDKPFQNVNRITYGACPRYVKQNTLKLATGMRNVPEKQTRGIFGAIAGFIENGWEGMVDGWYGFRHQNSEGTGQAADLKSTQAAINQINGKLNRLIEKTNEKFHQIEKEFSEVEGRIQDLEKYVEDTKIDLWSYNAELLVALENQHTIDLTDSEMNKLFERTRKQLRENAEDMGNGCFKIYHKCDNACIGSIRNGTYDHDVYRDEALNNRFQIKGVELKSGYKDWILWISFAISCFLLCVVLLGFIMWACQKGNIRCNICI

SEQ ID NO: 167 - protein, 566 aa, Artificial Sequence
  derived and/or modified protein sequence (wt) from hemagglutinin__InfluenzaA__AAY44796
MKTIIALSYTLCLVFAQKLPGNDNSTATLCLGHHAVPNGTIVKTITNDQIEVTNATELVQSSSTGGICDSPHQILDGENCTLIDALLGDPQCDGFQNKKWDLFVERSKAYSNCYPYDVPDYASLRSLVASSGTLEFNNESFDWTGVTQNGTSSACKRRSNKSFFSRLNWLTHLKYKYPALNVTMPNNEKFDKLYIWGVHHPGTDSDQISLYAQASGRITVSTKRSQQTVIPNIGSRPRVRDVSSRISIYWTIVKPGDILLINSTGNLIAPRGYFKIRSGKSSIMRSDAPIGKCNSECITPNGSIPNDKPFQNVNRITYGACPRYIKQNTLKLATGMRNVPEKQTRGIFGAIAGFIENGWEGMVDGWYGFRHQNSEGTGQAADLKSTQAAINQINGKLNRLIGKTNEKFHQIEKEFSEVEGRIQDLEKYVEDTKIDLWSYNAELLVALENQHTIDLTDSEMNKLFERTKKQLRENAEDMGNGCFKIYHKCDNACIGSIRNGTYDHDVYRDEALNNRFQIKGVELKSGYKDWILWISFAISCFLLCVALLGFIMWACQKGNIRCNICI

SEQ ID NO: 168 - protein, 566 aa, Artificial Sequence; identical to SEQ ID NO: 47
  derived and/or modified protein sequence (wt) from hemagglutinin__InfluenzaA__AAY44896

SEQ ID NO: 169 - protein, 566 aa, Artificial Sequence
  derived and/or modified protein sequence (wt) from hemagglutinin__InfluenzaA__AAY44906
MKTIIALSYILCLVFAQKLPGNDNSTATLCLGHHAVPNGTIVKTITNDQIEVTNATELVQSSSTGGICDSPHQILDGENCTLIDALLGDPQCDGFQNKKWDLFVERSKAYSNCYPYDVPDYASLRSLVASSGTLEFNNESFDWTGVTQNGTSSACKRRSNKSFFSRLNWLTHLKYKYPALNVTMPNNEKFDKLYIWGVHHPGTDSDQISLYAQASGRITVSTKRSQQTVIPNIGSRPRVRDVSSRISIYWTIVKPGDILLINSTGNLIAPRGYFKIRSGKSSIMRSDAPIGKCNSECITPNGSIPNDKPFQNVNRITYGACPRYVKQNTLKLATGMRNVPERQTRGIFGAIAGFIENGWEGMVDGWYGFRHQNSEGTGQAADLKSTQAAINQINGKLNRLIGKTNEKFHQIEKEFSEVEGRIQDLEKYVEDTKIDLWSYNAELLVALENQHTIDLTDSEMNKLFERTKKQLRENAEDMGNGCFKIYHKCDNACIGSIRNGTYDHDVYRDEALNNRFQIKGVELKSGYKDWILWISFAISCFLLCVALLGFIMWACQKGNIRCNICI

SEQ ID NO: 170 - protein, 566 aa, Artificial Sequence
  derived and/or modified protein sequence (wt) from hemagglutinin__InfluenzaA__AAY46371
MKTIIALSYILCLVFAQKLPGNDNSTATLCLGHHAVPNGTLVKTITSDQIEVTNATELVQSSSTGRICDSPHRILDGENCTLIDALLGDPHCDGFQNKEWDLFVERSKAYSNCYPYDVPDYASLRSLVASSGTLEFNNESFNWTGVAQNGTSFACKRRSIKSFFSRLNWLHQLKYKYPALNVTMPNNDKFDKLYIWGVHHPGTDSDQTSLYAQASGRVTVSTKRSQQTVIPNIGSRPWVRGVSSRISIYWTIVKPGDILLINSTGNLIAPRGYFKIRSGKSSIMRSDAPIGKCNSECITPNGSIPNGKPFQNVNRITYGACPRYVKQNTLKLATGMRNVPEKQTRGIFGAIAGFIENGWEGMVDGWYGFRHQNSEGTGQAADLKSTQAAINQINGKLNRLIEKTNEKFHQIEKEFTEVEGRIQDLEKYVEDTKIDLWSYNAELLVALENQHTIDLTDSEMNKLFERTRKQLRENAEDMGNGCFKIYHKCDNACIGSIRNGTYDHDVYRDEALNNRFQIKGVELKSGYKDWILWISFATSCFLLCVVLLGFIMWACQKGNIRCNICI

SEQ ID NO: 171 - protein, 566 aa, Artificial Sequence; identical to SEQ ID NO: 32
  derived and/or modified protein sequence (wt) from hemagglutinin__InfluenzaA__AAY46381

SEQ ID NO: 172 - protein, 566 aa, Artificial Sequence
  derived and/or modified protein sequence (wt) from hemagglutinin__InfluenzaA__AAY46391
MKTIIALSYILCLVFAQKLPVNDNSTATLCLGHHAVPNGTLVKTITNDHIEVTNATELVQSSSTGRICDSPHQILDGENCTLIDALLGDPHCDGFQNKEWDLFVERSTAYSNCYPYDVPDYASLRSLVASSGTLEFNNESFNWTGVAQNGTSSACKRRSIKSFFSRLNWLHQLKYKYPALNVTMPNNEKFDKLYIWGVHHPSTDSDQISLYAQASGRVTVSTKRSQQTVIPNIGSRPWVRGVSSIISIYWTIVKPGDILLINSTGNLIAPRGYFKIRSGKSSIMRSNAPIGKCNSECITPNGSIPNDKPFQNVNRITYGACPRYVKQNTLKLATGMRNVPEKQTRGIFGAIAGFIENGWEGMVDGWYGFRHQNSEGTGQAADLKSTQAAINQINGKLNRLIEKTNEKFHQIEKEFSEVEGRIQDLEKYVEDTKIDLWSYNAELLVALENQHTIDLTDSEMNKLFERTRKQLRENAEDMGNGCFKIYHKCDNACIGSIRNGTYDHDVYRDEALNNRFQIKGVELKSGYKDWILWISFAISCFLLCVVLLGFIMWACQKGNIRCNICI

SEQ ID NO: 173 - protein, 566 aa, Artificial Sequence
  derived and/or modified protein sequence (wt) from hemagglutinin__InfluenzaA__AAY46426
MKTIIALSYILCLVFAQKLPGNDNSTATLCLGHHAVPNGTLVKTITNDQIEVTNATELVQSSSTGRICDSPHQILDGENCTLIDALLGDPHCDGFQNKEWDLFVERSKAYSNCYPYDVPDYASLRSLVASSGTLEFNNESFNWTGVAQNGTSSACKRRSNKSFFSRLNWLHQLKYKYPALNVTMPNNKKFDKLYIWGVHHPSTDSDQISLYAQASGRVTVSTKRSQQTVIPNIGSRPWVRGVSSRISIYWTIVKPGDILLINSTGNLIAPRGYFKIRSGKSSIMRSDAPIGKCNSECITPNGSIPNDKPFQNVNRITYGACPRYVKQNTLKLATGMRNIPEKQTRGIFGAIAGFIENGWEGMVDGWYGFRHQNSEGTGQAADLKSTQAAINQINGKLNRLIEKTNEKFHQIEKEFSEVEGRIQDLEKYVEDTKIDLWSYNAELLVALENQHTIDLTDSEMNKLFERTKKQLRENAEDMGNGCFKIYHKCDNACIGSIRNGTYDHDVYRDEALNNRFQIKGVELKSGYKDWILWISFAISCFLLCVVLLGFIMWACQKGNIRCNICI

SEQ ID NO: 174 - protein, 566 aa, Artificial Sequence
  derived and/or modified protein sequence (wt) from hemagglutinin__InfluenzaA__AAY47013
MKTIIALSYILCLVFAQKLPGNDNSTATLCLGHHAVPNGTLVKTITNDQIEVTNATELVQSSSTGRICDSPHQILDGENCTLIDALLGDPHCDGFQNKEWDLFVERSKAYSNCYPYDVPDYVSLRSLVASSGTLEFNNESFNWTGVAQNGTSSACKRRSDKSFFSRLNWLHQLKYKYPALNVTMPNNEKFDKLYIWGVHHPGTDSDQISLYAQASGRVTVSTKRSQQTVIPNIGSGPWVRGVSSRISIYWTIVKPGDILLINSTGNLIAPRGYFKIRSGKSSIMRSDAPIGKCNSECITPNGSIPNDKPFQNVNRITYGPCPRYVKQNTLKLATGMRNVPEKQTRGIFGAIAGFIENGWEGMMDGWYGFRHQNSEGTGQAADLKSTQAAINQINGKLNRLIKKTNEKFHQIEKEFSEVEGRIQDLEKYVEDTKIDLWSYNAELLVALENQHTIDLTDSEMNKLFERTKKQLRENAEDMGNGCFKIYHKCDNACIGSIRNGTYDHDVYRDEALNNRFQIKGVELKSGYKDWILWISFAISCFLLCIVLLGFIMWACQKGNIRCNICI

SEQ ID NO: 175 - protein, 566 aa, Artificial Sequence
  derived and/or modified protein sequence (wt) from hemagglutinin__InfluenzaA__AAY47023
MKTIIALSYILCLVFAQKLPGNDNSTATLCLGHHAVPNGTLVKTITNDQIEVTNATELVQSSSTSRICDSPHQILDGENCTLIDALLGDPHCDGFQNKEWGLFVERSKAYSNCYPYDVPDYVSLRSLVASSGTLEFNNESFNWTGVAQNGTSSACKRRSDKSFFSRLNWLHQLKYKYPALNVTMPNNEKFDKLYIWGVHHPGTDSDQISLYAQASGRVTVSTKRSQQTVIPNIGSRPWVRGVSSRISIYWTIVKPGDILLINSTGNLIAPRGYFKIRSGKSSIMRSDAPIGKCNSECITPNGSIPNDKPFQNVNRITYGACPRYVKQNTLKLATGMRNVPEKQARGIFGAIAGFIENGWEGMMDGWYGFRHQNSEGTGQAADLKSTQAAINQINGKLNRLIEKTNEKFHQIEKEFSEVEGRIQDLEKYVEDTKIDLWSYNAELLVALENQHTIDLTDSEMNKLFERTKKQLRENAEDMGNGCFKIYHKCDNACIGSIRNGTYDHDVYRDEALNNRFQIKGVELKSGYKDWILWISFAISCFLLCIVLLGFIMWACQKGNIRCNICI

SEQ ID NO: 176 - protein, 566 aa, Artificial Sequence; identical to SEQ ID NO: 172
  derived and/or modified protein sequence (wt) from hemagglutinin__InfluenzaA__AAY47052

SEQ ID NO: 177 - protein, 566 aa, Artificial Sequence
  derived and/or modified protein sequence (wt) from hemagglutinin__InfluenzaA__AAY47075
MKTIIALSYILCLVFAQKLPGNDNSMATLCLGHHAVPNGTLVKTITNDQIEVTNATELVQSSSTGRICDSPHQILDGENCTLIDALLGDPHCDGFQNKEWDLFVERSKAYSNCYPYDVPDYVSLRSLVASSGTLEFNNESFNWTGVAQNGTSSACKRRSNKSFFSRLNWLHQLKNKYPALNVTMPNNEKFDKLYIWGVHHPGTDSDQISLYAQASGRVTVSTKRSQQTVIPNIGSRPRVRDISSRISIYWTIVKPGDILLINSTGNLIAPRGYFKIRSGKSSIMRSDAPIGKCNSECITPNGSIPNDKPFQNVNRITYGACPRYVKQNTLKLATGMRNVPEKQTRGIFGAIAGFIENGWEGMMDGWYGFRHQNSEGTGQAADLKSTQAAINQINGKLNRLIEKTNEKFHQIEKEFSEVEGRIQDLEKYVEDTKIDLWSYNAELLVALENQHTIDLTDSEMNKLFERTKKQLRENAEDMGNGCFKIYHKCDNACIGSIRNGTYDHDVYRDEALNNRFQIKGVELKSGYKDWILWISFAISCFLLCIVLLGFIMWACQKGNIRCNICI

SEQ ID NO: 178 - protein, 566 aa, Artificial Sequence
  derived and/or modified protein sequence (wt) from hemagglutinin__InfluenzaA__AAY47085
MKTIIALSYILCLVFAQKLPGNDNSTATLCLGHHAVPNGTIVKTITNDQIEVTNATELVQSSSTGGICDSPHQILDGENCTLIDALLGDPQCDGFQNKKWDLFVERSKAYSNCYPYDVPDYASLRSLVASSGTLEFNNESFNWTGVTQNGTSSACKRRSNKSFFSRLNWLTHLKYKYPALNVTMPNNEKFDKLYIWGVHHPGTDSDQISLYAQASGRITVSTKRSQQTVIPNVGSRPRVRDVSSRISIYWTIVKPGDILLINSTGNLIAPRGYFKIRSGKSSIMRSDAPIGKCNSECITPNGSIPNDKPFQNVNRITYGACPRYVKQNTLKLATGMRNVPEKQTRGIFGAIAGFIENGWEGMVDGWYGFRHQNSEGTGQAADLKSTQAAINQINGKLNRLIGKTNEKFHQIEKEFSEVEGRIQDLEKYVEDTKIDLWSYNAELLVALENQHTIDLTDSEMNKLFERTKKQLRENAEDMGNGCFKIYHKCDNACIESIRNGTYDHDVYRDEALNNRFQIKGVELKSGYKDWILWISFAISCFLLCVALLGFIMWACQKGNIRCNICI

SEQ ID NO: 179 - protein, 566 aa, Artificial Sequence
  derived and/or modified protein sequence (wt) from hemagglutinin__InfluenzaA__AAY58320
MKTIIALSYILCLVFAQKLPGNDNSTATLCLGHHAVPNGTIVKTITNDQIEVTNATELVQSSSTGGICDSPHQILDGENCTLIDALLGDPQCDGFQNKKWDLFVERSKAYSNCYPYDVPDYASLRSLVASSGTLEFNNESFDWTGVTQNGTSSACKRRSNKSFFSRLNWLTHLKYKYPALNVTMPNNEKFDKLYIWGVHHPGTDSDQISLYAQASGRITVSTKRSQQTVIPNIGSRPRVRDISSRISIYWTIVKPGDILLINSTGNLIAPRGYFKIRSGKSSIMRSDAPIGKCNSECITPNGSIPNDKPFQNVNRITYGACPRYVKQNTLKLATGMRNVPEKQTRGIFGAIAGFIENGWEGMVDGWYGFRHQNSEGTGQAADLKSTQAAINQINGKLNRLIGKTNEKFHQIEKEFSEVEGRIQDLEKYVEDTKIDLWSYNAELLVALENQHTIDLTDSEMNKLFERTKKQLRENAEDMGNGCFKIYHKCDNACIGSIRNGTYDHDVYRDEALNNRFQIKGVELKSGYKDWILWISFAISCFLLCVALLGFIMWACQKGNIRCNICI

SEQ ID NO: 180 - protein, 566 aa, Artificial Sequence
  derived and/or modified protein sequence (wt) from hemagglutinin__InfluenzaA__AAY59035
MKTIIALSYILCLVFAQKLTVNDNSTATLCLGHHAVPNGTLVKTITNDHIEVTNATELVQSSSTGRICDSPHQILDGENCTLIDALLGDPHCDGFQNKEWDLFVERSTAYSNCYPYDVPDYASLRSLVASSGTLEFNNESFNWTGVAQNGTSSACKRRSIKSFFSRLNWLHQLKYKYPALNVTMPNNEKFDKLYIWGVHHPSTDSDQISLYAQASGRVTVSTKRSQQTVIPNIGSRPWVRGVSSRISIYWTIVKPGDILLINSTGNLIAPRGYFKIRSGKSSIMRSNAPIGKCNSECITPNGSIPNDKPFQNVNRITYGACPRYVKQNTLKLATGMRNVPEKQTRGIFGAIAGFIENGWEGMVDGWYGFRHQNSEGTGQAADLKSTQAAINQINGKLNRLIEKTNEKFHQIEKEFSEVEGRIQDLEKYVEDTKIDLWSYNAELLVALENQHTIDLTDSEMNKLFERTRKQLRENAEDMGNGCFKIYHKCDNACIGSIRNGTYDHDVYRDEALNNRFQIKGVELKSGYKDWILWISFAISCFLLCVVLLGFIMWACQKGNIRCNICI

SEQ ID NO: 181 - protein, 566 aa, Artificial Sequence
  derived and/or modified protein sequence (wt) from hemagglutinin__InfluenzaA__AAY64202
MKTIIALSYILCLVFAQKLPGNDNSTATLCLGHHAVPNGTIVKTITNDQIEVTNATELVQSSSTGGICDSPHQILDGENCTLIDALLGDPQCDGFQNKKWDLFVERSKAYSNCYPYDVPDYASLRSLVASSGTLEFNNESFNWTGVTQNGTSSACERRSNKSFFSRLNWLTHLKYKYPALNVTMPNNEKFDKLYIWGVHHPGTDSDQISLYAQASGRITVSTKRSQQTVIPNIGSRPRVRDVSSRISIYWTIVKPGDILLINSTGNLIAPRGYFKIRSGKSSIMRSDAPIGKCNSECITPNGSIPNDKPFQNVNRITYGACPRYVKQNTLKLATGMRNVPEKQNRGIFGAIAGFIENGWEGMVDGWYGFRHQNSEGTGQAADLKSTQAAINQINGKLNRLIGKTNEKFHQIEKEFSEVEGRIQDLEKYVEDTKIDLWSYNAELLVALENQHTIDLTDSEMNKLFERTKKQLRENAEDMGNGCFKIYHKCDNACIGSIRNGTYDHDVYRDEALNNRFQIKGVELKSGYKDWILWISFAISCFLLCVALLGFIMWACQKGNIRCDICI

SEQ ID NO: 182 - protein, 566 aa, Artificial Sequence
  derived and/or modified protein sequence (wt) from hemagglutinin__InfluenzaA__AAY64212
MKTIIALSYILCLVFAQKIPVNDNSTATLCLGHHAVPNGTLVKTITNEHIEVTNATELVQSSSTGRICDSPHQILDGENCTLIDALLGDPHCDGFQNKEWDLFVERSTAYSNCYPYDVPDYASLRSLVASSGTLEFNNESFNWTGVAQNGTSSACKRRSIKSFFSRLNWLHQLKYKYPALNVTMPNNEKFDKLYIWGVHHPSTDSDQISLYAQASGRVTVSTKRSQQTVIPNIGSRPWVRGVSSRISIYWTIVKPGDILLINSTGNLIAPRGYFKIRSGKSSIMRSNALIGKCNSECITPNGSIPNDKPFQNVNRITYGACPRYVKQNTLKLATGMRNVPEKQTRGIFGAIAGFIENGWEGMVDGWYGFRHQNSEGTGQAADLKSTQAAINQINGKLNRLIEKTNEKFHQIEKEFSEVEGRIQDLEKYVEDTKIDLWSYNAELLVALENQHTIDLTDSEMNKLFERTRKQLRENAEDMGNGCFKIYHKCDNACIGSIRNGTYDHDVYRDEALNNRFQIKGVELKSGYKDWILWISFAISCFLLCVVLLGFIMWACQKGNIRCNICI

SEQ ID NO: 183 - protein, 566 aa, Artificial Sequence
  derived and/or modified protein sequence (wt) from hemagglutinin__InfluenzaA__AAY64222
MKTIIALSYILCLVFAQKLPGNDNSTATLCLGHHAVPNGTLVKTITNDQIEVTNATELVQSSSIGRICDSPHQILDGENCTLIDALLGDPHCDGFQNKEWDLFVERSKAYSNCYPYDVPDYVSLRSLVASSGTLEFNNESFNWTGVAQNGTSSSCKRRSDKSFFSRLNWLHQLKYKYPALNVTMPNNEKFDKLYIWGVHHPGTDSDQISLYAQASGRVTVSTKRSQQTVIPNIGSRPWVRGVSSRISIYWTIVKPGDILLINSTGNLIAPRGYFKIRSGKSSIMRSDAPIGKCNSECITPNGSIPNDKPFQNVNRITYGPCPRYVKQNTLKLATGMRNVPEKQTRGIFGAIAGFIENGWEGMMDGWYGFRHQNSEGTGQAADLKSTQAAINQINGKLNRLIEKTNEKFHQIEKEFSEVEGRIQDLEKYVEDTKIDLWSYNAELLVALENQHTIDLTDSEMNKLFEKTKKQLRENAEDMGNGCFKIYHKCDNACIGSIRNGTYDHDVYRDEALNNRFQIKGVELKSGYKDWILWISFAISCFLLCIVLLGFIMWACQKGNIRCNICI

SEQ ID NO: 184 - protein, 566 aa, Artificial Sequence
  derived and/or modified protein sequence (wt) from hemagglutinin__InfluenzaA__AAY64262
MKTIIALSYILCLVFAQKLPGNDNSTATLCLGHHAVPNGTLVKTITNDQIEVTNATELVQSSSTGRICDSPHQILDGENCTLIDALLGDPHCDGFQNKEWDLFVERSKAYSNCYPYDVPDYASLRSLVASSGTLEFNNESFNWTGVAQNGTSSACKRRSNKSFFSRLNWLHQLKYKYPALNVTMPNNEKFDKLYIWGVHHPSTDSDQISLYAQASGRVTVSTKRSQQTVIPNIGSRPWVRGVSSRISIYWTIVKPGDILLINSTGNLIAPRGYFKIRSGKSSIMRSDAPIGKCNSECITPNGSIPNDKPFQNVNRITYGACPRYVKQNTLKLATGMRNVPEKQTRGIFGAIAGFIENGWEGMVDGWYGFRHQNSEGTGQAADLKSTQAAINQINGKLNRLIEKTNEKFHQIEKEFSEVEGRIQDLEKYVEDTKIDLWSYNAELLVALENQHTIDLTDSEMNKLFERTKKQLRENAEDMGNGCFKIYHKCDNACMGSIRNGTYDHDVYRDEALNNRFQIKGVELKSGYKDWILWISFAISCFLLCVVLLGFIMWACQKGNIRCNICI

SEQ ID NO: 185 - protein, 566 aa, Artificial Sequence
  derived and/or modified protein sequence (wt) from hemagglutinin__InfluenzaA__AAY64272
MKTIIALSYILCLVFAQKLPGNDNSTATLCLGHHAVPNGTIVKTITNDQIEVTNATELVQSSSTGGICDSPHQILDGENCTLIDALLGDPQCDGFQNKKWDLFVERSKAYSNCYPYDVPDYASLRSLVASSGTLEFNNESFNWTGVTQNGTSSACKRRSNKSFFSRLNWLTHLKYKYPALNVTMPNNEKFDKLYIWGVHHPGTDSDQISLYAQASGRITVSTKRSQQTVIPNIGSRPRVRDVSSRISIYWTIVKPGDILLINSTGNLIAPRGYFKIRSGKSSIMRSDAPIGKCNSECITPNGSIPNDKPFQNVNRITYGACPRYVKQNTLKLATGMRNVPEKQTRGIFGAIAGFIENGWEGMVDGWYGFRHQNSEGTGQAADLKSTQAAINQINGKLNRLIGKTNEKFHQIEKEFSEVEGRIQDLEKYVEDTKIDLWSYNAELLVALENQHTIDLTDSEMNKLFERTKKQLRENAEDMGNGCFKIYHKCDNACIESIRNGTYDHDVYRDEALNNRFQIKGVELKSGYKDWILWISFAISCFLLCVALLGFIMWACQKGNIRCNICI

SEQ ID NO: 186 - protein, 566 aa, Artificial Sequence
  derived and/or modified protein sequence (wt) from hemagglutinin__InfluenzaA__AAY64282
MKTIIALSYILCLVFAQKLPGNDNSTATLCLGHHAVPNGTLVKTITNDQIEVTNATELVQSSSTGRICDSPHQILDGENCTLIDALLGDPHCDGFQNKEWDLFVERSKAYSNCYPYDVPDYASLRSLVASSGTLEFNNESFNWTGVAQNGTSSACKRRSNKSFFSRLNWLHQLKYKYPALNVTMPNNEKFDKLYIWGVHHPSTDSDQISLYAQASGRVTVSTKRSQQTVIPNIGSRPWVRGVSSRISIYWTIVKPGDILLINSTGNLIAPRGYFKIRSGKSSIMRSDAPIGKCNSECITPNGSIPNDKPFQNVNRITYGACPRYVKQNTLKLATGMRNVPEKQTRGIFGAIAGFIENGWEGMVDGWYGFRHQNSEGTGQAADLKSTQAAINQINGKLNRLIEKTNEKFHQIEKEFSEVEGRIQDLEKYVEDTKIDLWSYNAELLVALENQHTIDLTDSEMNKLFERTKKQLRENAEDMGNGCFKIYHKCDNACIGSIRNGTYDHDVYRDEALNNRFQIKGVELKSGYKDWILWISFAISCFLLCVVLLGFIMWACQKGNIRCNICI

SEQ ID NO: 187 - protein, 566 aa, Artificial Sequence
  derived and/or modified protein sequence (wt) from hemagglutinin__InfluenzaA__AAY64292
MKTIIALSYILCLVFAQKLPGNDNSTATLCLGHHAVPNGTLVKTITNDQIEVTNATELVQSSSTDKICDSPHQILDGGNCTLIDALLGDPHCDGFQNKEWDLFVERSKAYSNCYPYDVPDYVSLRSLVASSGTLEFNNESFNWTGVAQNGTSSACKRRSDKSFFSRLNWLHQLKNKYPALNVTMPNNEKFDKLYIWGVHHPGTDSDQISLYAQASGRVTVSTKRSQQTVIPNIGSRPRVRDISSRISIYWTIVKPGDILLINSTGNLIAPRGYFKIRSGKSSIMRSDAPIGKCNSECITPNGSIPNDKPFQNVNRITYGACPRYVKQNTLKLATGMRNVPEKQTRGIFGAIAGFIENGWEGMVDGWYGFRHQNSEGTGQAADLKSTQAAINQINGKLNRLIEKTNEKFHQIEKEFSEVEGRIQDLEKYVEDTKIDLWSYNAELLVALENQHTIDLTDSEMNKLFERTKKQLRENAEDMGNGCFKIYHKCDNACIGSIRNGTYDHDVYRDEALNNRFQIKGVELKSGYKDWILWISFAISCFLLCIVLLGFIMWACQKGNIRCNICI

SEQ ID NO: 188 - protein, 566 aa, Artificial Sequence
  derived and/or modified protein sequence (wt) from hemagglutinin__InfluenzaA__AAY64302
MKTIIALSYILCLVFAQKLPGNDNSTATLCLGHHAVPNGTLVKTITSDQIEVTNATELVQSSSTGRICDSPHRILDGENCTLIDALLGDPHCDGFQNKEWDLFVERSKAYSNCYPYDVPDYASLRSLVASSGTLEFNNESFNWTGVAQNGTSFACKRRSIKSFFSRLNWLHQLKYKYPALNVTMPNNDKFDKLYIWGVHHPSTDSDQTSLYAQASGRVTVSTKRSQQTVIPNIGSRPWVRGVSSRISIYWTIVKPGDILLINSTGNLIAPRGYFKIRSGKSSIMKSDAPIGKCNSECITPNGSIPNDKPFQNVNRITYGACPRYVKQNTLKLATGMRNVPEKQTRGIFGAIAGFIENGWEGMVDGWYGFRHQNSEGTGQAADLKSTQAAINQINGKLNRLIEKTNEKFHQIEKEFTEVEGRIQDLEKYVEDTKIDLWSYNAELLVALENQHTIDLTDSEMNKLFERTRKQLRENAEDMGNGCFKIYHKCDNVCIGSIRNGTYDHDVYRDEALNNRFQIKGVELKSGYKDWILWISFATSCFLLCVVLLGFIMWACQKGNIRCNICI

SEQ ID NO: 189 - protein, 566 aa, Artificial Sequence; identical to SEQ ID NO: 183
  derived and/or modified protein sequence (wt) from hemagglutinin__InfluenzaA__AAY64312

SEQ ID NO: 190 - protein, 566 aa, Artificial Sequence; identical to SEQ ID NO: 186
  derived and/or modified protein sequence (wt) from hemagglutinin__InfluenzaA__AAY64322

SEQ ID NO: 191 - protein, 566 aa, Artificial Sequence
  derived and/or modified protein sequence (wt) from hemagglutinin__InfluenzaA__AAY64332
MKTIIALSYILCLVFTQKLPGNDNSTATLCLGHHAVPNGTIVKTITNDQIEVTNATELVQSSSTGGICDSPHQILDGENCTLIDALLGDPQCDGFQNKKWDLFVERSKAYSNCYPYDVPDYASLRSLVASSGTLEFNNESFDWTGVTQNGTSSACKRRSNKSFFSRLNWLTHLKFKYPALNVTMPNNEKFDKLYIWGVHHPGTDSDQISLYAQASGRITVSTKRSQQTVIPNIGSRPRVRDVSSRISIYWTIVKPGDILLINSTGNLIAPRGYFKIRSGKSSIMRSDAPIGKCNSECITPNGSIPNDKPFQNVNRITYGACPRYVKQNTLKLATGMRNVPEKQTRGIFGAIAGFIENGWEGMVDGWYGFRHQNSEGTGQAADLKSTQAAINQINGKLNRLIGKTNEKFHQIEKEFSEVEGRIQDLEKYVEDTKIDLWSYNAELLVALENQHTIDLTDSEMNKLFERTKKQLRENAEDMGNGCFKIYHKCDNACIGSIRNGTYDHDVYRDEALNNRFQIKGVELKSGYKDWILWISFAISCFLLCVALLGFIMWACQKGNIRCDICI

SEQ ID NO: 192 - protein, 566 aa, Artificial Sequence
  derived and/or modified protein sequence (wt) from hemagglutinin__InfluenzaA__AAY64342
MKTIIALSYILCLVFAQKLPGNDNSTATLCLGHHAVPNGTLVKTITNDQIEVTNATELVQSSSTGRICDSPHQILDGENCTLIDALLGDPHCDGFQNKEWDLFVERSKAYSNCYPYDVPDYASLRSLVASSGTLEFNNESFNWTGVAQNGTSSACKRRSNKSFFSRLNWLHQLKYKYPALNVTMPNNEKFDKLYIWGVHHPSTDSDQISLYAQASGRVTVSTKRSQQTVIPNIGSRPWVRGVSSRISIYWTIVKPGDILLINSTGNLIAPRGYFKIRSGKSSIMRSDAPIGKCNSECITPNGSIPNDKPFQNVNRITYGACPRYVKQNTLKLATGMRNVPEKQTRGIFGAIAGFIENGWEGMVDGWYGFRHQNSEGTGQAADLKSTQAAINQINGKLNRLIEKTNEKFHQIEKEFSEVEGRIQDLEKYVEDTKIDLWSYNAELLVALENQHTIDLTDSEMNKLFERTKKQLRENAEDMGNGCFKIYHKCDNACIGSIRNGTYDHDVYRDEALNNRFQIKGVELKSGYKDWILWISFATSCFLLCVVLLGFIMWACQKGNIRCNICI

SEQ ID NO: 193 - protein, 566 aa, Artificial Sequence; identical to SEQ ID NO: 32
  derived and/or modified protein sequence (wt) from hemagglutinin__InfluenzaA__AAY64352

SEQ ID NO: 194 - protein, 566 aa, Artificial Sequence
  derived and/or modified protein sequence (wt) from hemagglutinin__InfluenzaA__AAY64362
MKTIIALSYILCLVFAQKLPGNDNSTATLCLGHHAVPNGTIVKTITNDQIEVTNATELVQSSSTGEICDSPHQILDGENCTLIDALLGDPQCDGFQNKKWDLFVERSKAYSNCYPYDVPDYASLRSLVASSGTLEFNNESFDWTGVTQNGTSSACKRRSNKSFFSRLNWLTHLKYKYPALNVTMPNNEKFDKLYIWGVHHPGTDSDQISLYAQASGRITVSTKRSQQTVIPNIGSRPRVRDISSRISIYWTIVKPGDILLINSTGNLIAPRGYFKIRSGKSSIMRSDAPIGKCNSECITPNGSIPNDKPFQNVNRITYGACPRYIKQNTLKLATGMRNVPEKQTRGIFGAIAGFIENGWEGMVDGWYGFRHQNSEGTGQAADLKSTQAAINQINGKLNRLIGKTNEKFHQIEKEFSEVEGRIQDLEKYVEDTKIDLWSYNAELLVALENQHTIDLTDSEMNKLFERTKKQLRENAEDMGNGCFKIYHKCDNACIGSIRNGTYDHDVYRDEALNNRFQIKGVELKSGYKDWILWISFAISCFLLCVALLGFIMWACQKGNIRCNICI

SEQ ID NO: 195 - protein, 566 aa, Artificial Sequence; identical to SEQ ID NO: 186
  derived and/or modified protein sequence (wt) from hemagglutinin__InfluenzaA__AAY64382

SEQ ID NO: 196 - protein, 566 aa, Artificial Sequence
  derived and/or modified protein sequence (wt) from hemagglutinin__InfluenzaA__AAY64392
MKTIIALSYILCLVFAQKLPGNDNSTATLCLGHHAVPNGTIVKTITNDQIEVTNATELVQSSSTGGICDSPHQILDGENCTLIDALLGDPQCDGFQNKKWDLFVERSKAYSNCYPYDVPDYASLRSLVASSGTLEFNNESFNWTGVTQNGTSSACKRRSNKSFFSRLNWLTHLKYKYPALNVTMPNNEKFDKLYIWGVHHPGTDNDQISLYAQASGRITVSTKRSQQTVIPNIGSRPRVRDVSSRISIYWTIVKPGDILLINSTGNLIAPRGYFKIRSGKSSIMRSDAPIGKCNSECITPNGSIPNDKPFQNVNRITYGACPRYVKQNTLKLATGMRNVPEKQTRGIFGAIAGFIENGWEGMVDGWYGFRHQNSEGTGQAADLKSTQAAINQINGKLNRLIGKTNEKFHQIEKEFSEVEGRIQDLEKYVEDTKIDLWSYNAELLVALENQHTIDLTDSEMNKLFERTKKQLRENAEDMGNGCFKIYHKCDNACIGSIRNGTYDHDVYRDEALNNRFQIKGVELKSGYKDWILWISFAISCFLLCVALLGFIMWACQKGNIRCNICI

SEQ ID NO: 197 - protein, 566 aa, Artificial Sequence; identical to SEQ ID NO: 188
  derived and/or modified protein sequence (wt) from hemagglutinin__InfluenzaA__AAY64402

SEQ ID NO: 198 - protein, 566 aa, Artificial Sequence; identical to SEQ ID NO: 186
  derived and/or modified protein sequence (wt) from hemagglutinin__InfluenzaA__AAY98037

SEQ ID NO: 199 - protein, 566 aa, Artificial Sequence; identical to SEQ ID NO: 186
  derived and/or modified protein sequence (wt) from hemagglutinin__InfluenzaA__AAY98047

SEQ ID NO: 200 - protein, 566 aa, Artificial Sequence; identical to SEQ ID NO: 47
  derived and/or modified protein sequence (wt) from hemagglutinin__InfluenzaA__AAY98057

SEQ ID NO: 201 - protein, 566 aa, Artificial Sequence
  derived and/or modified protein sequence (wt) from hemagglutinin__InfluenzaA__AAY98067
MKTIIALSYILCLVFAQELPGNDNSTATLCLGHHAVPNGTLVKTITNDQIEVTNATELVQSSSTGRICDSPHQILDGENCTLIDALLGDPHCDGFQNKEWDLFVERSKAYSNCYPYDVPDYVSLRSLVASSGTLEFNNESFNWTGVAQNGTSSACKRRSDKSFFSRLNWLHQLKYKYPALNVTMPNNEKFDKLYIWGVHHPGTDSDQISLYAQASGRVTVSTKRSQQTVIPNIGSGPWVRGVSSRISIYWTIVKPGDILLINSTGNLIAPRGYFKIRSGKSSIMRSDAPIGKCNSECITPNGSIPNDKPFQNVNRITYGPCPRYVKQNTLKLATGMRNVPEKQTRGIFGAIAGFIENGWEGMMDGWYGFRHQNSEGTGQAADLKSTQAAINQINGKLNRLIEKTNEKFHQIEKEFSEVEGRIQDLEKYVEDTKIDLWSYNAELLVALENQHTIDLTDSEMNKLFERTKKQLRENAEDMGNGCFKIYHKCDNACIGSIRNGTYDHDVYRDEALNNRFQIKGVELKSGYKDWILWISFAISCFLLCIVLLGFIMWACQKGNIRCNICI

SEQ ID NO: 202 - protein, 566 aa, Artificial Sequence
  derived and/or modified protein sequence (wt) from hemagglutinin__InfluenzaA__AAY98077
MKTIIALSYILCLVFAQKLPGNDNSTATLCLGHHAVPNGTLVKTITNDQIEVTNATELVQSSSASRICDSPHQILDGENCTLIDALLGDPHCDGFQNKEWDLFVERSKAYSNCYPYDVPDYVSLRSLVASSGTLEFNNESFNWTGVAQNGTSSACKRRSDKSFFSRLNWLHQLKYKYPALNVTMPNNEKFDKLYIWGVHHPGTDSDQISLYAQASGRVTVSTKRSQQTVIPNIGSRPWVRGVSSRISIYWTIVKPGDILLINSTGNLIAPRGYFKIRSGKSSIMRSDAPIGKCNSECITPNGSIPNDKPFQNVNRITYGACPRYVKQNTLKLATGMRNVPEKQTRGIFGAIAGFIENGWEGMMDGWYGFRHQNSEGTGQAADLKSTQAAINQINGKLNRLIEKTNEKFHQIEKEFSEVEGRIQDLEKYVEDTKIDLWSYNAELLVALENQHTIDLTDSEMNKLFERTKKQLRENAEDMGNGCFKIYHKCDNACIGSIRNGTYDHDVYRDEALNNRFQIKGVELKSGYKDWILWISFAISCFLLCIVLLGFIMWACQKGNIRCNICI

SEQ ID NO: 203 - protein, 566 aa, Artificial Sequence
  derived and/or modified protein sequence (wt) from hemagglutinin__InfluenzaA__AAY98087
MKTIIALSYILCLVFAQKLPGNDNSTATLCLGHHAVPNGTLVKTITNDQIEVTNATELVQSSSTGRICDSPHRILDGENCTLIDALLGDPHCDGFQNKEWDLFVERSKAYSNCYPYDVPDYASLRSLVASSGTLEFNNESFNWTGVAQNGTSSACKRRSIKSFFSRLNWLHQLKYKYPALNVTMPNNDKFDKLYIWGVHHPSTDSDQTSLYAQASGRVTVSTKRSQQTVIPNIGSRPWVRGVSSRISIYWTIVKPGDILLINSTGNLIAPRGYFKIRSGKSSIMRSDAPIGKCNSECITPNGSIPNDKPFQNVNRITYGACPRYVKQNTLKLATGMRNVPEKQTRGIFGAIAGFIENGWEGMVDGWYGFRHQNSEGTGQAADLKSTQAAINQINGKLNRLIEKTNEKFHQIEKEFSEVEGRIQDLEKYVEDTKIDLWSYNAELLVALENQHTIDLTDSEMNKLFERTRKQLRENAEDMGNGCFKIYHKCDNACIGSIRNGTYDHDVYRDEALNNRFQIKGVELKSGYKDWILWISFAISCFLLCVVLLGFIMWACQKGNIRCNICI

SEQ ID NO: 204 - protein, 566 aa, Artificial Sequence; identical to SEQ ID NO: 186
  derived and/or modified protein sequence (wt) from hemagglutinin__InfluenzaA__AAY98097

SEQ ID NO: 205 - protein, 566 aa, Artificial Sequence; identical to SEQ ID NO: 186
  derived and/or modified protein sequence (wt) from hemagglutinin__InfluenzaA__AAY98107

SEQ ID NO: 206 - protein, 566 aa, Artificial Sequence
  derived and/or modified protein sequence (wt) from hemagglutinin__InfluenzaA__AAY98117
MKTIIALSYILCLVFAQKLPGNDNSTATLCLGHHAVPNGTLVKTITNDQIEVTNATELVQSSSTGRICDSPHQILDGENCTLIDALLGDPHCDGFQNKEWDLFVERSKAYSNCYPYDVPDYASLRSLVASSGTLEFNNESFNWTGVAQNGTSSACKRGSNKSFFSRLNWLHQLKYKYPALNVTMPNNEKFEKLYIWGVHHPSTDSDQISLYAQASGRVTVSTKRSQQTVIPNIGSRPWVRGVSSRISIYWTIVKPGDILLINSTGNLIAPRGYFKIRSGKSSIMRSDAPIGKCNSECITPNGSIPNDKPFQNVNRITYGACPRYVKQNTLKLATGMRNVPEKQTRGIFGAIAGFIENGWEGMVDGWYGFRHQNSEGTGQAADLKSTQAAINQINGKLNRLIEKTNEKFHQIEKEFSEVEGRIQDLEKYVEDTKIDLWSYNAELLVALENQHTIDLTDSEMNKLFERTKKQLRENAEDMGNGCFKIYHKCDNACIGSIRNGTYDHDVYRDEALNNRFQIKGVELKSGYKDWILWISFAISCFLLCVVLLGFIMWACQKGNIRCNICI

SEQ ID NO: 207 - protein, 566 aa, Artificial Sequence; identical to SEQ ID NO: 186
  derived and/or modified protein sequence (wt) from hemagglutinin__InfluenzaA__AAY98147

SEQ ID NO: 208 - protein, 566 aa, Artificial Sequence; identical to SEQ ID NO: 186
  derived and/or modified protein sequence (wt) from hemagglutinin__InfluenzaA__AAY98157

SEQ ID NO: 209 - protein, 566 aa, Artificial Sequence
  derived and/or modified protein sequence (wt) from hemagglutinin__InfluenzaA__AAY98167
MKTIIALSYILCLVFAQKLPGNDNSTATLCLGHHAVPNGTLVKTITNDQIEVTNATELVQSSSTGRICDSPHQILDGENCTLIDALLGDPHCDGFQNKEWDLFVERSKAYSNCYPYDVPDYASLRSLVASSGTLEFNNESFNWTGVAQNGTSSACKRRSNKSFFSRLNWLHQLKYKYPALNVTMPNNEKFDKLYIWGVHHPSTDSDQISLYAQASGRVTVSTQRSQQTVIPNIGSRPWVRGVSSRISIYWTIVKPGDILLINSTGNLIAPRGYFKIRSGKSSIMRSDAPIGKCNSECITPNGSIPNDKPFQNVNRITYGACPRYVKQNTLKLATGMRNVPEKQTRGIFGAIAGFIENGWEGMVDGWYGFRHQNSEGTGQAADLKSTQAAINQINGKLNRLIEKTNEKFHQIEKEFSEVEGRIQDLEKYVEDTKIDLWSYNAELLVALENQHTIDLTDSEMNKLFERTKKQLRENAEDMGNGCFKIYHKCDNACIGSIRNGTYDHDVYRDEALNNRFQIKGVELKSGYKDWILWISFAISCFLLCVVLLGFIMWACQKGNIRCNICI

SEQ ID NO: 210 - protein, 566 aa, Artificial Sequence
  derived and/or modified protein sequence (wt) from hemagglutinin__InfluenzaA__AAY98177
MKTIIALSYILCLVFAQKLPGNDNSTATLCLGHHAVPNGTLVKTITNDQIEVTNATELVQSSSTGRICDSPHQILDGENCTLIDALLGDPHCDGFQNKEWDLFVERSKAYSNCYPYDVPDYASLRSLVASSGTLEFNNESFNWTGVAQNGTSSACKRRSNKSFFSRLNWLHQLKYKYPALNVTMPNNEKFDKLYIWGVHHPSTDSDQISLYAQASGRVTVSTKRSQQTVIPNIGSRPWVRGVSSRISIYWTIVKPGDILLINSTGNLIAPRGYFKIRSGKSSIMRSDAPIGKCNSECITPNGSIPNDKPFQNVNRITYGACPRYVKQNTLKLATGMRNVPEKQTRGIFGAIAGFIENGWEGMVDGWYGFRHQNSEGTGQAADLKSTQAAINQINGKLNRLIEKTNEKFHQIEKEFSEVEGRIQDLEKYVEDTKIDLWSYNAGLLVALENQHTIDLTDSEMNKLFERTKKQLRENAEDMGNGCFKIYHKCDNACIGSIRNGTYDHDVYRDEALNNRFQIKGVELKSGYKDWILWISFAISCFLLCVVLLGFIMWACQKGNIRCNICI

SEQ ID NO: 211 - protein, 566 aa, Artificial Sequence
  derived and/or modified protein sequence (wt) from hemagglutinin__InfluenzaA__AAY98195
MKTIIALSYILCLVFAQKLPGNDNSTATLCLGHHAVPNGTLVKTITNDQIEVTNATELVQSSSTGRICDSPHQILDGENCTLIDALLGDPHCDGFQNKEWDLFVERSKAYSNCYPYDVPDYASLRSLVASSGTLEFNNESFNWTGVAQNGTSSACKRRSNKSFFSRLNWLHQLKYKYPALNVTMPNNEKFDKLYIWGVHHPSTDSDQISLYAQASGRVTVSTKRSQQTVIPNIGSRPWVRGVSSRISIYWTIVKPGDILLINSTGNLIAPRGYFKIRSGKSSIMRSDAPIGKCNSECITPNGSIPNDKPFQNVNRITYGACPRYVKQNTLKLATGMRNVPEKQTRGIFGAIAGFIENGWEGMVDGWYGFRHQNSEGTGQAADLKSTQAAINQINGKLNRLIEKTNEKFHQIEKEFSEVEGRIQDLEKYVEDTKIDLWSYNAELLVALENQHTIDLTDSEMNKLFERTRKQLRENAEDMGNGCFKIYHKCDNACIGSIRNGTYDHDVYRDEALNNRFQIKGVELKSGYKDWILWISFAISCFLLCVVLLGFIMWACQKGNIRCNICI

SEQ ID NO: 212 - protein, 566 aa, Artificial Sequence; identical to SEQ ID NO: 186
  derived and/or modified protein sequence (wt) from hemagglutinin__InfluenzaA__AAY98207

SEQ ID NO: 213 - protein, 566 aa, Artificial Sequence; identical to SEQ ID NO: 188
  derived and/or modified protein sequence (wt) from hemagglutinin__InfluenzaA__AAY98217

SEQ ID NO: 214 - protein, 566 aa, Artificial Sequence; identical to SEQ ID NO: 186
  derived and/or modified protein sequence (wt) from hemagglutinin__InfluenzaA__AAY98227

SEQ ID NO: 215 - protein, 566 aa, Artificial Sequence; identical to SEQ ID NO: 186
  derived and/or modified protein sequence (wt) from hemagglutinin__InfluenzaA__AAY98237

SEQ ID NO: 216 - protein, 566 aa, Artificial Sequence
  derived and/or modified protein sequence (wt) from hemagglutinin__InfluenzaA__AAY98247
MKTIIALSYILCLVFAQKLPGNDNSTATLCLGHHAVPNGTLVKTITNDQIEVTNATELVQSSSTGRICDSPHQILDGENCTLIDALLGDPHCDGFQNKEWDLFVERSKAYSNCYPYDVPDYASLRSLVASSGTLEFNNESFNWTGVAQNGTSSACKRRSNKSFFSRLNWLHQLKYKYPALNVTMPNNEKFDKLYIWGVHHPSTDSDQISLYAQASGRVTVSTKRSQQTVIPNIGSRPWVRGVSSRISIYWTIVKPGDILLINSTGNLIAPRGYFKIRSGKSSIMRSDAPIGKCNSECITPNGSIPNDKPFQNVNRITYGACPRYIKQNTLKLATGMRNVPEKQTRGIFGAIAGFIENGWEGMVDGWYGFRHQNSEGTGQAADLKSTQAAINQINGKLNRLIEKTNEKFHQIEKEFSEVEGRIQDLEKYVEDTKIDLWSYNAELLVALENQHTIDLTDSEMNKLFERTKKQLRENAEDMGNGCFKIYHKCDNACIGSIRNGTYDHDVYRDEALNNRFQIKGVELKSGYKDWILWISFAISCFLLCVVLLGFIMWACQKGNIRCNICI

SEQ ID NO: 217 - protein, 566 aa, Artificial Sequence; identical to SEQ ID NO: 186
  derived and/or modified protein sequence (wt) from hemagglutinin__InfluenzaA__AAY98319

SEQ ID NO: 218 - protein, 566 aa, Artificial Sequence
  derived and/or modified protein sequence (wt) from hemagglutinin__InfluenzaA__AAY98329
MKTIIALSYILCLVFAQKLPGNDNSTATLCLGHHAVPNGTLVKTITNDQIEVTNATELVQSSSTGRICDSPHQILDGENCTLIDALLGDPHCDGFQNKEWDLFVERSKAYSNCYPYDVPDYASLRSLVASSGTLEFNNESFNWTGVAQNGTSSACKRRSNKSFFSRLNWLHQLKYKYPALNVTMPNNEKFDKLYIWGVHHPSTDSDQISLYAQALGRVTVSTKRSQQTVIPNIGSRPWVRGVSSRISIYWTIVKPGDILLINSTGNLIAPRGYFKIRSGKSSIMRSDAPIGKCNSECITPNGSIPNDKPFQNVNRITYGACPRYVKQNTLKLATGMRNVPEKQTRGIFGAIAGFIENGWEGMVDGWYGFRHLNSEGTGQAADLKSTQAAINQINGKLNRLIEKTNEKFHQIEKEFSEVEGRIQDLEKYVEDTKIDLWSYNAELLVALENQHTIDLTDSEMNKLFERTKKQLRENAEDMGNGCFKIYHKCDNACIGSIRNGTYDHDVYRDEALNNRFQIKGVELKSGYKDWILWISFAISCFLLCVVLLGFIMWACQKGNIRCNICI

SEQ ID NO: 219 - protein, 566 aa, Artificial Sequence; identical to SEQ ID NO: 186
  derived and/or modified protein sequence (wt) from hemagglutinin__InfluenzaA__AAY98339

SEQ ID NO: 220 - protein, 566 aa, Artificial Sequence; identical to SEQ ID NO: 186
  derived and/or modified protein sequence (wt) from hemagglutinin__InfluenzaA__AAY98353

SEQ ID NO: 221 - protein, 566 aa, Artificial Sequence
  derived and/or modified protein sequence (wt) from hemagglutinin__InfluenzaA__AAY98366
MKTIIALSYILCLVFAQKLPGNDNSTATLCLGHHAVPNGTLVKTITSDQIEVTNATELVQSSSTGRICDSPHRILDGENCTLIDALLGDPHCDGFQNKEWDLFVERSKAYSNCYPYDVPDYASLRSLVASSGTLEFNNESFNWTGVAQNGTSFACKRRSIKSFFSRLNWLHQLKYKYPALNVTMPNNDKFDKLYIWGVHHPGTDSDQTSLYAQASGRVTVSTKRSQQTVIPNIGSRPWVRGVSSRISIYWTIVKPGDILLINSTGNLIAPRGYFKIRSGKSSIMRSDAPIGKCNSECITPNGSIPNDKPFQNVNRITYGACPRYVKQNTLKLATGMRNVPEKQTRGIFGAIAGFIENGWEGMVDGWYGFRHQNSEGTGQAADLKSTQAAINQINGKLNRLIEKTNEKFHQIEKEFTEVEGRIQDLEKYVEDTKIDLWSYNAELLVALENQHTIDLTDSEMNKLFERTRKQLRENAEDMGNGCFKIYHKCDNACIGSIRNGTYDHDVYRDEALNNRFQIKGVELKSGYKDWILWISFATSCFLLCVVLLGFIMWACQKGNIRCNICI

SEQ ID NO: 222 - protein, 566 aa, Artificial Sequence
  derived and/or modified protein sequence (wt) from hemagglutinin__InfluenzaA__AAY98376
MKTIIALSYILCLVFAQKLPGNDNSTATLCLGHHAVPNGTLVKTITNDQIEVTNATELVQSSSTGRICDSPHQILDGENCTLIDALLGDPHCDGFQNKEWDLFVERSKAYSNCYPYDVPDYASLRSLVASSGTLEFNNESFNWTGVAQNGTSSACKRRSIKSFFSRLNWLHQLKYKYPALNVTMPNNDKFDKLYIWGVHHPSTDSDQTSLYAQASGRVTVSTKRSQQTVIPNIGSRPWVRGVSSRISIYWTIVKPGDILLINSTGNLIAPRGYFKIRSGKSSIMRSDAPIGKCNSECITPNGSIPNDKPFQNVNRITYGACPRYVKQNTLKLATGMRNVPEKQTRGIFGAIAGFIENGWEGMVDGWYGFRHQNSEGTGQAADLKSTQAAINQINGKLNRLIEKTNEKFHQIEKEFSEVEGRIQDLEKYVEDTKIDLWSYNAELLVALENQHTIDLTDSEMNKLFERTRKQLRENAEDMGNGCFKIYHKCDNACIGSIRNGTYDHDVYRDEALNNRFQIKGVELKSGYKDWILWISFAISCFLLCVVLLGFIMWACQKGNIRCNICI

SEQ ID NO: 223 - protein, 566 aa, Artificial Sequence
  derived and/or modified protein sequence (wt) from hemagglutinin__InfluenzaA__AAY98386
MKTIIALSYILCLVFAQKLPGNDNSTATLCLGHHAVPNGTLVKTITNDQIEVTNATELVQSSSTGRICDSPHQILDGGNCTLIDALLGDPHCDGFQNKEWDLFVERSKVYSNCYPYDVPDYASLRSLVASSGTLEFNNESFNWTGVAQNGTSSACKRRSIKSFFSRLNWLHQLKYKYPALNVTMPNNEKFDKLYIWGVHHPSTDSDQISLYAQASGRVTVSTKRSQQTVIPNIGSRPWVRGVSSRISIYWTIVKPGDILLINSTGNLIAPRGYFKIRSGKSSIMRSDAPIGKCNSECITPNGSIPNDKPFQNVNRITYGACPRYVKQNTLKLATGMRNVPEKQTRGIFGAIAGFIENGWEGMVDGWYGFRHQNSEGTGQAADLKSTQAAINQINGKLNRLIEKTNEKFHQIEKEFSEVEGRIQDLEKYVEDTKIDLWSYNAELLVALENQHTIDLTDSEMNKLFERTKKQLRENAEDMGNGCFKIYHKCDNACIGSIRNGTYDHDVYRDEALNNRFQIKGVELKSGYKDWILWISFAISCFLLCVVLLGFIMWACQKGNIRCNICI

SEQ ID NO: 224 - protein, 566 aa, Artificial Sequence; identical to SEQ ID NO: 186
  derived and/or modified protein sequence (wt) from hemagglutinin__InfluenzaA__AAY98396

SEQ ID NO: 225 - protein, 566 aa, Artificial Sequence; identical to SEQ ID NO: 186
  derived and/or modified protein sequence (wt) from hemagglutinin__InfluenzaA__AAY98406

SEQ ID NO: 226 - protein, 566 aa, Artificial Sequence
  derived and/or modified protein sequence (wt) from hemagglutinin__InfluenzaA__AAZ32946
MKTIIALSYILCLVFAQKLPGNDNSTATLCLGHHAVPNGTIVKTITNDQIEVTNATELVQSSSTGGICDSPHQILDGENCTLIDALLGDPQCDGFQNKKWDLFVERSEAYSNCYPYDVPDYASLRSLIASSGTLEFTNESFNWTGVTQNGTSSACKRRSNKSFFSRLNWLTHLKYKYPALNVTMPNNEKFDKLYIWGVHHPGTDSDQISLYAQASGRITVSTKRSQQTVIPNIGSRPRVRDVSSRISIYWTIVKPGDILLINSTGNLIAPRGYFKIRSGKSSIMRSDAPIGKCNSECITPNGSIPNDKPFQNINRITYGTCPRYVKQNTLKLATGMRNVPEKQTRGIFGAIAGFIENGWEGMVDGWYGFRHQNSEGTGQAADLKSTQAAINQINGKLNRLIGKTNEKFHQIEKEFSEVEGRIQDLEKYVEDTKIDLWSYNAELLVALENQHTIDLTDSEMNKLFERTKKQLRENAEDMGNGCFKIYHKCDNACIGSIRNGTYDHDVYRDEALNNRFQIKGVELKSGYKDWILWISFAISCFLLCVVLLGFIMWACQKGNIRCNICI

SEQ ID NO: 227 - protein, 566 aa, Artificial Sequence
  derived and/or modified protein sequence (wt) from hemagglutinin__InfluenzaA__AAZ32949
MKTIIALSYILCLVFAQKLPGNDNSTATLCLGHHAVPNGTIVKTITNDQIEVTNATELVQSSSTGGICDSPHQILDGENCTLIDALLGDPQCDGFQNKKWDLFVERSEAYSNCYPYDVPDYASLRSLIASSGTLEFTNESFNWTGVTQNGTSSACKRRSNKSFFSRLNWLTHLKYKYPALNVTMPNNEKFDKLYIWGVHHPGTDSDQISLYAQASGRITVSTKRSQQTVIPNIGSRPRVRDISSRISIYWTIVKPGDILLINSTGNLIAPRGYFKIRSGKSSIMRSDAPIGKCNSECITPNGSIPNDKPFQNINRITYGACPRYVKQNTLKLATGMRNVPEKQTRGIFGAIAGFIENGWEGMVDGWYGFRHQNSEGTGQAADLKSTQAAINQINGKLNRLIGKTNEKFHQIEKEFSEVEGRIQDLEKYVEDTKIDLWSYNAELLVALENQHTIDLTDSEMNKLFERTKKQLRENAEDMGNGCFKIYHKCDNACIGSIRNGTYDHDVYRDEALNNRFQIKGVELKSGYKDWILWISFAISCFLLCVVLLGFIMWACQKGNIRCNICI

SEQ ID NO: 228 - protein, 566 aa, Artificial Sequence
  derived and/or modified protein sequence (wt) from hemagglutinin__InfluenzaA__AAZ32950
MKTIIALSYILCLVFAQKLPGNDNSTATLCLGHHAVPNGTIVKTITNDQIEVTNATELVQSSSTGGICDSPHQILDGENCTLIDALLGDPQCDGFQNKKWDLFVERSEAYSNCYPYDVPDYASLRSLIASSGTLEFTNESFNWTGVTQNGTSSACKRRSNKSFFSRLNWLTHLKYKYPALNVTMPNNEKFDKLYIWGVHHPGTDSDQISLYAQASGRITVSTKRSQQTVIPNIGSRPRVRDVSSRISIYWTIVKPGDILLINSTGNLIAPRGYFKIRSGKSSIMRSDAPIGKCNSECITPNGSIPNDKPFQNINRITYGACPRYVKQNTLKLATGMRNVPEKQTRGIFGAIAGFIENGWEGMVDGWYGFRHQNSEGTGQAADLKSTQAAINQINGKLNRLIGKTNEKFHQIEKEFSEVEGRIQDLEKYVEDTKIDLWSYNAELLVALENQHTIDLTDSEMNKLFERTKEQLRENAEDMGNGCFKIYHKCDNACIGSIRNGTYDHDVYRDEALNNRFQIKGVELKSGYKDWILWISFAISCFLLCVVLLGFIMWACQKGNIRCNICI

SEQ ID NO: 229 - protein, 566 aa, Artificial Sequence
  derived and/or modified protein sequence (wt) from hemagglutinin__InfluenzaA__AAZ32951
MKTIIALSYILCLVFAQKIPGNDNSTATLCLGHHAVPNGTLVKTITNDQIEVTNATELVQSSSTGGICDSPHQILDGENCTLIDALLGDPHCDGFQNKKWDLFVERSKAYSNCYPYDVPDYASLRSLVASSGTLEFNNESFNWTGVTQNGTSSACKRRSNKSFFSRLNWLHQLKYKYPALNVAMPNNEKFDKLYIWGVHHPGTDSDQISLYAQASGRITVSTKRSQQTVIPNIGSRPRVRDISSRISIYWTIVKPGDILLINSTGNLIAPRGYFKIRSGKSSIMRSDAPIGKCNSECITPNGSIPNDKPFQNVNRITYGACPRYVKQNTLKLATGMRNVPEKQTRGIFGAIAGFIENGWEGMVDGWYGFRHQNSEGTGQAADLKSTQAAINQINGKLNRLIGKTNEKFHQIEKEFSEVEGRIQDLEKYVEDTKIDLWSYNAELLVALENQHTIDLTDSEMNKLFERTKKQLRENAEDMGNGCFKIYHKCDNACIGSIRNGTYDHDVYRDEALNNRFQIKGVELKSGYKDWILWISFAISCFLLCVALLGFIMWACQKGNIRCNICI

SEQ ID NO: 230 - protein, 566 aa, Artificial Sequence
  derived and/or modified protein sequence (wt) from hemagglutinin__InfluenzaA__AAZ32952
MKTIIALSYILCLVFAQKIPGNDNSTATLCLGHHAVPNGTLVKTITNDQIEVTNATELVQSSSTGGICDSPHQILDGENCTLIDALLGDPHCDGFQNKKWDLFVERSKAYSNCYPYDVPDYASLRSLVASSGTLEFNNESFNWTGVTQNGTSSACKRRSNKSFFSRLNWLHQLKYKYPALNVAMPNNEKFDKLYIWGVHHPGTDSDQISLYAQASGRITVSTKRSQQTVIPNIGSRPRVRDVSSRISIYWTIVKPGDILLINSTGNLIAPRGYFKIRSGKSSIMRSDAPIGKCNSECITPNGSIPNDKPFQNVNKITYGACPRYVKQNTLKLATGMRNVPEKQTRGIFGAIAGFIENGWEGMVDGWYGFRHQNSEGTGQAADLKSTQAAINQINGKLNRLIGKTNEKFHQIEKEFSEVEGRIQDLEKYVEDTKIDLWSYNAELLVALENQHTIDLTDSEMNKLFERTKKQLRENAEDMGNGCFKIYHKCDNACIGSIRNGTYDHDVYRDEALNNRFQIKGVELKSGYKDWILWISFAISCFLLCVALLGFIMWACQKGNIRCNICI

SEQ ID NO: 231 - protein, 566 aa, Artificial Sequence
  derived and/or modified protein sequence (wt) from hemagglutinin__InfluenzaA__AAZ32953
MKTIIALSYILCLVFAQKIPGNDNSTATLCLGHHAVPNGTLVKTITNDQIEVTNATELVQSSSTGGICDSPHQILDGENCTLIDALLGDPHCDGFQNKKWDLFVERSKAYSNCYPYDVPDYASLRSLVASSGTLEFNNESFNWTGVTQNGTSSACKRRSNKSFFSRLNWLHQLKYKYPALNVAMPNNEKFDKLYIWGVHHPGTDSDQISLYAQASGRITVSTKRSQQTVIPNIGSRPRVRDVSSRISIYWTIVKPGDILLINSTGNLIAPRGYFKIRSGKSSIMRSDAPIGKCNSECITPNGSIPNDKPFQNVNRITYGACPRYVKQNTLKLATGMRNVPEKQTRGIFGAIAGFIENGWEGMVDGWYGFRHQNSEGTGQAADLKSTQAAINQINGKLNRLIGKTNEKFHQIEKEFSEVEGRIQDLEKYVEDTKIDLWSYNAELLVALENQHTIDLTDSEMNKLFERTKKQLRENAEDMGNGCFKIYHKCDNACIGSIRNGTYDHDVYRDEALNNRFQIKGVELKSGYKDWILWISFAISCFLLCVALLGFIMWACQKGNIRCNICI

SEQ ID NO: 232 - protein, 566 aa, Artificial Sequence
  derived and/or modified protein sequence (wt) from hemagglutinin__InfluenzaA__AAZ38462
MKTIIALSYILCLVFAQKLPGNDNSTATLCLGHHAVPNGTLVKTITSDQIEVTNATELVQSSSTGRICDSPHRILDGENCTLIDALLGDPHCDGFQNKEWDLFVERSKAYSNCYPYDVPDYASLRSLVASSGTLEFNNESFNWTGVAQNGTSFACKRRSIKSFFSRLNWLHQLKYKYPALNVTMPNNDKFDKLYIWGVHYPGTDSDQTSLYAQASGRVTVSTKRSQQTVIPNIGSRPWVRGVSSRISIYWTIVKPGDILLINSTGNLIAPRGYFKIRSGKSSIMRSDAPIGKCNSECITPNGSIPNGKPFQNVNRITYGACPRYVKQNTLKLATGMRNVPEKQTRGIFGAIAGFIENGWEGMVDGWYGFRHQNSEGTGQAADLKSTQAAINQINGKLNRLIEKTNEKFHQIEKEFTEVEGRIQDLEKYVEDTKIDLWSYNAELLVALENQHTIDLTDSEMNKLFERTRRQLRENAEDMGNGCFKIYHKCDNACIGSIRNGTYDHDVYRDEALNNRFQIKGVELKSGYKDWILWISFATSCFLLCVVLLGFIMWACQKGNIRCNICI

SEQ ID NO: 233 - protein, 566 aa, Artificial Sequence
  derived and/or modified protein sequence (wt) from hemagglutinin__InfluenzaA__AAZ38473
MKTIIALSYILCLVFAQKLPGNDNSTATLCLGHHAVPNGTLVKTITSDQIEVTNATELVQSSSTGRICDSPHRILDGENCTLIDALLGDPHCDGFQNKEWDLFVERSKAYSNCYPYDVPDYASLRSLVASSGTLEFNNESFNWTGVAQNGTSFTCKRRSIKSFFSRLNWLHQLKYKYPALNVTMPNNDKFDKLYIWGVHHPSTDSDQTSLYAQASGRVTVSTKRSQQTVIPNIGSRPWVRGVSSRISIYWTIVKPGDILLINSTGNLIAPRGYFKIRSGKSSIMKSDAPIGKCNSECITPNGSIPNDKPFQNVNRITYGACPRYVKQNTLKLATGMRNVPEKQTRGIFGAIAGFIENGWEGMVDGWYGFRHQNSEGTGQAADLKSTQAAINQINGKLNRLIEKTNEKFHQIEKEFTEVEGRIQDLEKYVEDTKIDLWSYNAELLVALENQHTIDLTDSEMNKLFERTRKQLRENAEDMGNGCFKIYHKCDNVCIGSIRNGTYDHDVYRDEALNNRFQIKGVELKSGYKDWILWISFATSCFLLCVVLLGFIMWACQKGNIRCNICI

SEQ ID NO: 234 - protein, 566 aa, Artificial Sequence; identical to SEQ ID NO: 186
  derived and/or modified protein sequence (wt) from hemagglutinin__InfluenzaA__AAZ38484

SEQ ID NO: 235 - protein, 566 aa, Artificial Sequence
  derived and/or modified protein sequence (wt) from hemagglutinin__InfluenzaA__AAZ38495
MKTIIALSYILCLVFAQKLPGNDNSTATLCLGHHAVPNGTLVKTITNDQIEVTNATELVQSSSTGRICDSPHQILDGENCTLIDALLGDPHCDGFQNKEWDLFVERSKAYSNCYPYDVPDYASLRSLVASSGTLEFNNESFNWTGVAQNGTSSACKRRSNKSFFSRLNWLHQLKYKYPALNVTMPNNEKFDKLYIWGVHHPSTDSDQISLYAQASGRVTVSTKRSQQTVIPNIGSRPWVRGVSSKISIYWTIVKPGDILLINSTGNLIAPRGYFKIRSGKSSIMRSDAPIGKCNSECITPNGSIPNDKPFQNVNRITYGACPRYVKQNTLKLATGMRNVPEKQTRGIFGAIAGFIENGWEGMVDGWYGFRHQNSEGTGQAADLKSTQAAINQINGKLNRLIEKTNEKFHQIEKEFSEVEGRIQDLEKYVEDTKIDLWSYNAELLVALENQHTIDLTDSEMNKLFERTKKQLRENAEDMGNGCFKIYHKCDNACIGSIRNGTYDHDVYRDEALNNRFQIKGVELKSGYKDWILWISFAISCFLLCVVLLGFIMWACQKGNIRCNICI

SEQ ID NO: 236 - protein, 566 aa, Artificial Sequence
  derived and/or modified protein sequence (wt) from hemagglutinin__InfluenzaA__AAZ38517
MKTIIALSYILCLVFAQKLPGNDNSTATLCLGHHAVPNGTIVKTITNDQIEVTNATELVQSSSTGGICDSPHQILDGENCTLIDALLGDPQCDGFQNKKWDLFVERSKAYSNCYPYDVPDYASLRSLVASSGTLEFNNESFNWTGVTQNGTSSACKRRSNNSFFSRLNWLTHLKFKYPALNVTMPNNEKFDKLYIWGVHHPGTDNDQISLYAQASGRITVSTKRSQQTVIPNIGSRPRVRDIPSRISIYWTIVKPGDILLINSTGNLIAPRGYFKIRSGKSSIMRSDAPIGKCNSECITPNGSIPNDKPFQNVNRITYGACPRYVKQNTLKLATGMRNVPEKQTRGIFGAIAGFIENGWEGMVDGWYGFRHQNSEGIGQAADLKSTQAAINQINGKLNRLIGKTNEKFHQIEKEFSEVEGRIQDLEKYVEDTKIDLWSYNAELLVALENQHTIDLTDSEMNKLFERTKKQLRENAEDMGNGCFKIYHKCNNACIGSIRNGTYDHDVYRDEALNNRFQIKGVELKSGYKDWILWISFAISCFLLCVVLLGFIMWACQKGNIRCNICI

SEQ ID NO: 237 - protein, 566 aa, Artificial Sequence
  derived and/or modified protein sequence (wt) from hemagglutinin__InfluenzaA__AAZ38539
MKTIIALSYILCLVFAQKLPGNDNSTATLCLGHHAVPNGTLVKTITNDQIEVTNATELVQSSSTGRICDSPHQILDGENCTLIDALLGDPHCDGFQNKEWDLFVERSKAYSNCYPYDVPDYVSLRSLVASSGTLEFNNESFNWTGVAQNGTSSACKRRSDKSFFSRLNWLHQLKYKYPALNVTMPNNEKFDKLYIWGVHHPGTDSDQISLYAQASGRVTVSTKRSQQTVIPNIGSRPWVRGVSSKISIYWTIVKPGDIFLINSTGNLIAPRGYFKIRSGKSSIMRSDAPIGKCNSECITPNGSIPNDKPFQNVNRITYGPCPRYVKQNTLKLATGMRNVPEKQTRGIFGAIAGFIENGWEGMMDGWYGFRHQNSEGTGQAADLKSTQAAINQINGKLNRLIEKTNEKFHQIEKEFSEVEGRIQDLEKYVEDTKIDLWSYNAELLVALENQHTIDLTDSEMNKLFERTKKQLRENAEDMGNGCFKIYHKCDNACIGSIRNGTYDHDVYRDEALNNRFQIKGVELKSGYKDWILWISFAISCFLLCIVLLGFIMWACQKGNIRCNICI

SEQ ID NO: 238 - protein, 566 aa, Artificial Sequence; identical to SEQ ID NO: 186
  derived and/or modified protein sequence (wt) from hemagglutinin__InfluenzaA__AAZ38561

SEQ ID NO: 239 - protein, 566 aa, Artificial Sequence
  derived and/or modified protein sequence (wt) from hemagglutinin__InfluenzaA__AAZ38583
MKTIIALSYILCLVFAQKIPGNDNSTATLCLGHHAVPNGTIVKTITNDQIEVTNATELVQSSSTGGICDSPHQILDGENCTLIDALLGDPQCDGFQNKKWDLFVERSKAYSNCYPYDVPDYASLRSLVASSGTLEFNNESFNWTGVTQNGTSSACKRRSNNSFFSRLNWLTHLKFKYPALNVTMPNNEKFDKLYIWGVHHPGTNNDQISLYAQASGRITVSTKRSQQTVIPNIGSRPRVRDIPSRISIYWTIVKPGDILLINSTGNLIAPRGYFKIRSGKSSIMRSDAPIGKCNSECITPNGSIPNDKPFQNVNRITYGACPRYVKQNTLKLATGMRNVPEKQTRGIFGAIAGFIENGWEGMVDGWYGFRHQNSEGIGQAADLKSTQAAINQINGKLNRLIGKTNEKFHQIEKEFSEVEGRIQDLEKYVEDTKIDLWSYNAELLVALENQHTIDLTDSEMNKLFERTKKQLRENAEDMGNGCFKIYHKCDNACIGSIRNGTYDHDVYRDEALNNRFQIKGVELKSGYKDWIIWISFAISCFLLCVALLGFIMWACQKGNIRCNICI

SEQ ID NO: 240 - protein, 566 aa, Artificial Sequence
  derived and/or modified protein sequence (wt) from hemagglutinin__InfluenzaA__AAZ38594
MKTIIALSYILCLVFAQKLPGNDNSTATLCLGHHAVPNGTIVKTITNDQIEVTNATELVQSSSTGGICDSPHQILDGENCTLIDALLGDPQCDGFQNKKWDLFVERSKAYSNCYPYDVPDYASLRSLVASSGTLEFNNESFNWTGVTQNGTSSACKRRSNSSFFSRLNWLTHLKFKYPALNVTMPNNEKFDKLYIWGVHHPGTDNDQISLYAQASGRITVSTKRSQQTVIPNIGSRPRVRDIPSRISIYWTIVKPGDILLINSTGNLIAPRGYFKIRSGKSSIMRSDAPIGKCNSECITPNGSIPNDKPFQNVNRITYGACPRYVKQNTLKLATGMRNVPEKQTRGIFGAIAGFIENGWEGMVDGWYGFRHQNSEGIGQAADLKSTQAAINQINGKLNRLIGKTNEKFHQIEKEFSEVEGRIQDLEKYVEDTKIDLWSYNAELLVALENQHTIDLTDSEMNKLFERTKKQLRENAEDMGNGCFKIYHKCDNACIGSIRNGTYDHDVYRDEALNNRFQIKGVELKSGYKDWILWISFAISCFLLCVALLGFIMWACQKGNIRCNICI

SEQ ID NO: 241 - protein, 566 aa, Artificial Sequence
  derived and/or modified protein sequence (wt) from hemagglutinin__InfluenzaA__AAZ38605
MKTIIALSYILCLVFTQKLPGNDNSTATLCLGHHAVPNGTIVKTITNDQIEVTNATELVQSSSTGGICDSPHQILDGENCTLIDALLGDPQCDGFQNKKWDLFVERSKAYSNCYPYDVPDYASLRSLVASSGTLEFNNESFNWTGVTQNGTSSACKRRSNNSFFSRLNWLTHLKFKYPALNVTMPNNEKFDKLYIWGVHHPGTDNDQISLYAQASGRITVSTKRSQQTVIPSIGSRPRIRDVPSRISIYWTIVKPGDILLINSTGNLIAPRGYFKIRSGKSSIMRSDAPIGKCNSECITPNGSIPNDKPFQNVNRITYGACPRYVKQNTLKLATGMRNVPEKQTRGIFGAIAGFIENGWEGMVDGWYGFRHQNSEGTGQAADLKSTQAAINQINGKLNRLIGKTNEKFHQIEKEFSEVEGRIQDLEKYVEDTKIDLWSYNAELLVALENQHTIDLTDSEMNKLFERTKKQLRENAEDMGNGCFKIYHKCDNACIGSIRNGTYDHDVYRDEALNNRFQIKGVELKSGYKDWILWISFAISCFLLCVALLGFIMWACQKGNIRCNICI

SEQ ID NO: 242 - protein, 565 aa, Artificial Sequence
  derived and/or modified protein sequence (wt) from hemagglutinin__InfluenzaA__AAZ38627
MKAKLLVLLCTFTATYADTICIGYHANNSTDTVDTVLEKNVTVTHSVNLLEDSHNGKLCLLKGIAPLQLGNCSVAGWILGNPECELLISKESWSYIVETPNPENGTCYPGYFADYEELREQLSSVSSFERFEIFPKGSSWPNHTVTGVSASCSHNGKSSFYRNLLWLTGKNGLYPNLSMSYVNNKEKEVLVLWGVHHPPNIGDQRALYHTENAYVSVVSSHYSRRFTPEIAKRPKVRDQEGRINYYWTLLEPGDTIIFEANGNLIAPWYAFALSRGFGSGIITSNAPMDECDAKCQTPQGAINSSLPFQNVHPVTIGECPKYVRSAKLRMATGLRNIPSIQSRGLFGAIAGFIEGGWTGMVDGWYGYHHQNEQGSGYAADQKSTQNAINGITNKVNSVIEKMNTQFTAVGKEFNKLERRMENLNKKVDDGFLDIWTYNAELLVLLENERTLDFHDSNVKNLYEKVKSQLKNNAKEIGNGCFEFYHKCNNECMESVKNGTYDYPKYSEESKLNREKIDGVKLESMGVYQILAIYSTVASSLVLLVSLGAISFWMCSNGSLQCRICI

SEQ ID NO: 243 - protein, 566 aa, Artificial Sequence
  derived and/or modified protein sequence (wt) from hemagglutinin__InfluenzaA__AAZ38638
MKTIIALSYILCLVFAQKLPGNDNSTATLCLGHHAVPNGTIVKTITNDQIEVTNATELVQSSSTGGICDSPHQILDGENCTLIDALLGDPQCDGFQNKKWDLFVERSKAYSNCYPYDVPDYASLRSLVASSGTLEFNNESFNWTGVTQNGTSSACKRRSNNSFFSRLNWLTHLKFKYPALNVTMPNNEKFDKLYIWGVHHPGTDNDQISLYAQASGRITVSTKRSQQTVIPNIGSRPRVRDIPSRISIYWTIVKPGDILLINSTGNLIAPRGYFKIRSGKSSIMRSDAPIGKCNSECITPNGSIPNDKPFQNVNRITYGACPRYVKQNTLKLATGMRNVPEKQTRGIFGAIAGFIENGWEGMVDGWYGFRHQNSEGIGQAADLKSTQAAINQINGKLNRLIGKTNEKFHQIEKEFSEVEGRIQDLEKYVEDTKIDLWSYNAELLVALENQHTIDLTDSEMNKLFERTKKQLRENAEDMGNGCFKIYHKCDNACIGSIRNGTYDHDVYRDEALNNRFQIKGVELKSGYKDWILWISFAISCFLLCVALLGFIMWACQKGNIRCNICI

SEQ ID NO: 244 - protein, 566 aa, Artificial Sequence; identical to SEQ ID NO: 243
  derived and/or modified protein sequence (wt) from hemagglutinin__InfluenzaA__AAZ38650

SEQ ID NO: 245 - protein, 566 aa, Artificial Sequence
  derived and/or modified protein sequence (wt) from hemagglutinin__InfluenzaA__AAZ43370
MKTIIALSYIFCLVFAQKLPGNDNSTATLCLGHHAVPNGTLVKTITNDQIEVTNATELVQSSSTGRICDSPHRILDGKNCTLIDALLGDPHCDGFQNEKWDLFIERSKAFSNCYPYDVPDYASLRSLVASSGTLEFINEGFNWTGVTQSGGSYACKRGSVKSFFSRLNWLYESEYKYPALNVTMPNNGKFDKLYIWGVHHPSTEKEQTNLYVRASGRVTVSTKRSQQTVIPNIGSRPWVRGLSSRISIYWTIVKPGDILLINSTGNLIAPRGYFKIRTGKSSIMRSDAPIGTCSSECITPNGSIPNDKPFQNVNKITYGACPRYVKQNTLKLATGMRNVPEKQTRGIFGAIAGFIENGWEGMVDGWYGFRHQNSEGTGQAADLKSTQAAIDQINGKLNRLIEKTNEKFHQIEKEFSEVEGRIQDLEKYVEDTKIDLWSYNAELLVALENQHTIDLTDSEMNKLFEKTRKQLRENAEDMGNGCFKIYHKCDNACIGSIRNGTYDHDVYRDEALNNRFQIKGVELKSGYKDWILWISFAISCFLLCVVLLGFIMWACQKGNIRCNICI

SEQ ID NO: 246 - protein, 566 aa, Artificial Sequence; identical to SEQ ID NO: 118
  derived and/or modified protein sequence (wt) from hemagglutinin__InfluenzaA__AAZ43394

SEQ ID NO: 247 - protein, 566 aa, Artificial Sequence
  derived and/or modified protein sequence (wt) from hemagglutinin__InfluenzaA__AAZ43405
MKTIIALSYILCLVFAQKLPGNDNSTATLCLGHHAVPNGTLVKTITNDQIEVTNATELVQSSSTGRICDSPHQILDGENCTLIDALLGDPHCDGFQNKEWDLFVERSKAYSNCYPYDVPDYASLRSLVASSGTLEFNNESFNWTGVAQNGTSSACKRRSNKSFFSRLNWLHQLKYKYPALNVTMPNNEKFDKLYIWGVHHPSTDSDQISLYAQASGRVTVSTKRSQQTVIPNIGSRPWVRGVSSRISIYWTIVKPGDILLINCTGNLIAPRGYFKIRSGKSSIMRSDASIGKCNSECITPNGSIPNDKPFQNVNRITYGACPRYVKQNTLKLATGMRNVPEKQTRGIFGAIAGFIENGWEGMVDGWYGFRHQNSEGTGQAADLKSTQAAINQINGKLNRLIEKTNEKFHQIEKEFSEVEGRIQDLEKYVEDTKIDLWSYNAELLVALENQHTIDLTDSEMNKLFERTKKQLRENAEDMGNGCFKIYHKCDNACIGSIRNGTYDHDVYRDEALNNRFQIKGVELKSGYKDWILWISFAISCFLLCVVLLGFIMWACQKGNIRCNICI

SEQ ID NO: 248 - protein, 566 aa, Artificial Sequence; identical to SEQ ID NO: 47
  derived and/or modified protein sequence (wt) from hemagglutinin__InfluenzaA__AAZ74352

SEQ ID NO: 249 - protein, 566 aa, Artificial Sequence; identical to SEQ ID NO: 203
  derived and/or modified protein sequence (wt) from hemagglutinin__InfluenzaA__AAZ74363

SEQ ID NO: 250 - protein, 565 aa, Artificial Sequence
  derived and/or modified protein sequence (wt) from hemagglutinin__InfluenzaA__AAZ74374
MKVKLLILLCTFTATYADTICIGYHANNSTDTVDTVLEKNVTVTHSVNLLEDSHNGKLCLLKGIAPLQLGNCSVAGWILGNPECELLISKESWSYIVETPNPENGACYPGYFADYEELREQLSSVSSFERFEIFPKESSWPNHTVTGVSASCSHNGKSSFYRNLLWLTGKNGLYPNLSKSYANNKEKEVLILWGVHHPPNIGDQRTLYHTENAYVSVVSSHYGRRFTPEITKRPKVRDQEGRINYYWTLLEPGDTIIFEANGNLIAPWYAFALSRGFGSGIITSNAPMDECDAKCQTPQGAINSSLPFQNVHPVTIGECPKYVRSAKLRMVTGLRNIPSIQSRGLFGAIAGFIEGGWTGMVDGWYGYHHQNEQGSGYAADQKSTQNAINGITNKVNSVIEKMNTQFTAVGKEFNKLERRMENLNKKVDDGFLDVWTYNAELLVLLENERTLDFHDSNVKNLYEKVKSQLKNNAKEIGNGCFEFYHKCNNECMESVKNGTYDYPKYSEESKLNREKIDGVKLDSMGVYQILAIYSTVASSLVLLVSLGAISFWMCSNGSLQCRICI

SEQ ID NO: 251 - protein, 566 aa, Artificial Sequence
  derived and/or modified protein sequence (wt) from hemagglutinin__InfluenzaA__AAZ74397
MNTIIALSYILCLVFAQKLPGNDNSTATLCLGHHAVPNGTLVKTITSDQIEVTNATELVQSSSTGRICDSPHRILDGENCTLIDALLGDPLCDGFQNKEWDLFVERSKAYSNCYPYDVPDYASLRSLVASSGTLEFNNESFNWTGVAQNGTSFACKRRSIKSFFSRLNWLHQLKYKYPALNVTMPNNDKFDKLYIWGVHHPGTDSDQTSLYAQASGRVTVSTKRSQQTVIPNIGSRPWVRGVSSRISIYWTIVKPGDILLINSTGNLIAPRGYFKIRSGKSSIMRSDAPIGKCNSECITPNGSIPNGKPFQNVNRITYGACPRYVKQNTLKLATGMRNVPEKQTRGIFGAIAGFIENGWEGMVDGWYGFRHQNSEGTGQAADLKSTQAAINQINGKLNRLIEKTNEKFHQIEKEFTEVEGRIQDLEKYVEDTKIDLWSYNAELLVALENQHTIDLTDSEMNKLFERTRKQLRENAEDMGNGCFKIYHKCDNACIGSIRNGTYDHDVYRDEALNNRFQIKGVELKSGYKDWILWISFATSCFLLCVVLLGFIMWACQKGNIRCNICI

SEQ ID NO: 252 - protein, 566 aa, Artificial Sequence
  derived and/or modified protein sequence (wt) from hemagglutinin__InfluenzaA__AAZ74408
MKTIIALSYILCLVFAQKLPGNDNSTATLCLGHHAVPNGTLVKTITNDQIEVTNATELVQSSSTGRICDSPHQILDGENCTLIDALLGDPHCDGFQNKEWDLFVERSKAYSNCYPYDVPDYASLRSLVASSGTLEFNNESFNWTGVAQNGTSSACKRRSNKSFFSRLNWLHQLKYKYPALNVTMPNNEKFDKLYIWGVHHPSTDSDQISLYAQASGRVTVSTKRSQQTVIPNIGSRPWVRGVSSRISIYWTIVKPGDILLINSTGNLIAPRGYFKIRSGKSSIMRSDAPIGKCNSECITPNGSIPNDKPFQNVNRITYGACPRYVKQNTLKLATGMRNVPEKQTRGIFGAIAGFIENGWEGMVDGWYGFRHQNSEGTGQAADLKSTQAAINQINGKLNRLIEKTNEKFHQIEKEFSEVEGRIQDLEKYVEDTKIDLWSYNAELLVALENQHTIDLTDSEMNKLFERTKKQLRENAEDMGNGCFKIYHKCDNACIGSIRNGTYNHDVYRDEALNNRFQIKGVELKSGYKDWILWISFAISCFLLCVVLLGFIMWACQKGNIRCNICI

SEQ ID NO: 253 - protein, 566 aa, Artificial Sequence; identical to SEQ ID NO: 186
  derived and/or modified protein sequence (wt) from hemagglutinin__InfluenzaA__AAZ74430

SEQ ID NO: 254 - protein, 566 aa, Artificial Sequence; identical to SEQ ID NO: 243
  derived and/or modified protein sequence (wt) from hemagglutinin__InfluenzaA__AAZ74441

SEQ ID NO: 255 - protein, 566 aa, Artificial Sequence
  derived and/or modified protein sequence (wt) from hemagglutinin__InfluenzaA__AAZ74452
MKTIIALSYILCLVFAQKLPGNDNSTATLCLGHHAVPNGTIVKTITNDQIEVTNATELVQSSSTGGICDSPHQILDGENCTLIDALLGDPQCDGFQNKKWDLFIERSKAYSNCYPYDVPDYASLRSLVASSGTLEFNNESFNWTGVTQNGTSSACKRRSNNSFFSRLNWLTHLKFKYPALNVTMPNNEKFDKLYIWGVHHPGTDNDQISLYAQASGRITVSTKRSQQTVIPNIGSRPRVRDIPSRISIYWTIVKPGDILLINSTGNLIAPRGYFKIRSGKSSIMRSDAPIGKCNSECITPNGSIPNDKPFQNVNRITYGACPRYVKQNTLKLATGMRNVPEKQTRGIFGAIAGFIENGWEGMVDGWYGFRHQNSEGIGQAADLKSTQAAINQINGKLNRLIGKTNEKFHQIEKEFSEVEGRIQDLEKYVEDTKIDLWSYNAELLVALENQHTIDLTDSEMNKLFERTKKQLRENAEDMGNGCFKIYHKCDNACIGSIRNGTYDHDVYRDEALNNRFQIKGVELKSGYKDWILWISFAISCFLLCVALLGFIMWACQKGNIRCNICI

SEQ ID NO: 256 - protein, 566 aa, Artificial Sequence
  derived and/or modified protein sequence (wt) from hemagglutinin__InfluenzaA__AAZ74463
MKTIIALSYILCLVFAQKLPGNDNSTATLCLGHHAVPNGTIVKTITNDQIEVTNATELVQSSSTGGICDSPHQILDGENCTLIDALLGDPQCDGFQNKKWDLFVERSKAYSNCYPYDVPDYASLRSLVASSGTLEFNNESFNWTGVTQNGTSSACKRRSNNSFFSRLNWLTHLKFKYPALNVTMPNNEKFDKLYIWGVHHPGTDNDQISLYAQASGRITVSTKRSQQTVIPNIGSRPRVRDIPSRISIYWTIVKPGDILLINSTGNLIAPRGYFKIRSGKSSIMRSDAPIGKCNSECITPNGSIPNDKPFQNVNRITYGACPRYVKQNTLKLATGMRNVPEKQTRGIFGAIAGFIENGWEGMVDGWYGFRHQNSEGIGQAADLKSTQAAINQINGKLNRLIGKTNEKFHQIEKEFSEVEGRIQDLEKYVEDTKIDLWSYNAELLVALENQHTIDLTDSEMNKLFERTKKQLRENAEDMGNGCFKIYHKCDNACIGSIRNGTYDHDVYRDEALNNRFQIKGVELKSGYKDWILWISFAISCFLLCVVLLGFIMWACQKGNIRCNICI

SEQ ID NO: 257 - protein, 566 aa, Artificial Sequence
  derived and/or modified protein sequence (wt) from hemagglutinin__InfluenzaA__AAZ74474
MKTIIALSYILCLVFAQKLPGNDNSTATLCLGHHAVPNGTIVKTITNDQIEVTNATELVQSSSTGGICDSPHQILDGENCTLIDALLGDPQCDGFQNKKWDLFVERSKAYSNCYPYDVPDYASLRSLVASSGTLEFNNESFNWTGVTQNGTSSACKKRSNNSFFSRLNWLTHLKFKYPALNVTMPNNEKFDKLYIWGVHHPGTDNDQISLYAQASGRITVSTKRSQQTVIPNIGSRPRVRDIPSRISIYWTIVKPGDILLINSTGNLIAPRGYFKIRSGKSSIMRSDAPIGKCNSECITPNGSIPNDKPFQNVNRITYGACPRYVKQNTLKLATGMRNVPEKQTRGIFGAIAGFIENGWEGMVDGWYGFRHQNSEGIGQAADLKSTQAAINQINGKLNRLIGKTNEKFHQIEKEFSEVEGRIQDLEKYVEDTKIDLWSYNAELLVALENQHTIDLTDSEMNKLFERTKKQLRENAEDMGNGCFKIYHKCDNACIGSIRNGTYDHDVYRDEALNNRFQIKGVELKSGYKDWILWISFAISCFLLCVALLGFIMWACQKGNIRCNICI

SEQ ID NO: 258 - protein, 566 aa, Artificial Sequence; identical to SEQ ID NO: 255
  derived and/or modified protein sequence (wt) from hemagglutinin__InfluenzaA__AAZ74485

SEQ ID NO: 259 - protein, 566 aa, Artificial Sequence; identical to SEQ ID NO: 256
  derived and/or modified protein sequence (wt) from hemagglutinin__InfluenzaA__AAZ74496

SEQ ID NO: 260 - protein, 566 aa, Artificial Sequence; identical to SEQ ID NO: 255
  derived and/or modified protein sequence (wt) from hemagglutinin__InfluenzaA__AAZ74507

SEQ ID NO: 261 - protein, 566 aa, Artificial Sequence; identical to SEQ ID NO: 256
  derived and/or modified protein sequence (wt) from hemagglutinin__InfluenzaA__AAZ74518

SEQ ID NO: 262 - protein, 566 aa, Artificial Sequence; identical to SEQ ID NO: 255
  derived and/or modified protein sequence (wt) from hemagglutinin__InfluenzaA__AAZ74529

SEQ ID NO: 263 - protein, 566 aa, Artificial Sequence
  derived and/or modified protein sequence (wt) from hemagglutinin__InfluenzaA__AAZ74551
MKTIIALSYILCLVFAQKLPGNDNSTATLCLGHHAVPNGTIVKTITNDQIEVTNATELVQSSSTGGICDSPHQILDGENCTLIDALLGDPQCDGFQNKKWDLFVERSKAYSNCYPYDVPDYASLRSLVASSGTLEFNNESFNWTGVTQNGTSSACKRRSNNSFFSRLNWLTHLKFKYPALNVTMPNNEKFDKLYIWGVHHPGTDNDQISLYAQASGRITVSTKRSQQTVIPNIGSRPRVRDIPSRISIYWTIVKPGDILLINSTGNLIAPRGYFKIRSGKSSIMRSDAPIGKCNSECITPNGSIPNDKPFQNVNRITYGACPRYVKQNTLKLATGMRNVPEKQTRGIFGAIAGFIENGWEGMVDGWYGFRHQNSEGIGQAADLKSTQAAINQINGKLNRLIGKTNEKFHQIEKEFSEVEGRIQDLEKYVEDTKIDLWSYNAELLVALENQHTLDLTDSEMNKLFERTKKQLRENAEDMGNGCFKIYHKCDNACIGSIRNGTYDHDVYRDEALNNRFQIKGVELKSGYKDWILWISFAISCFLLCVALLGFIMWACQKGNIRCNICI

SEQ ID NO: 264 - protein, 566 aa, Artificial Sequence; identical to SEQ ID NO: 186
  derived and/or modified protein sequence (wt) from hemagglutinin__InfluenzaA__AAZ74562

SEQ ID NO: 265 - protein, 566 aa, Artificial Sequence
  derived and/or modified protein sequence (wt) from hemagglutinin__InfluenzaA__AAZ74573
MKTIIALSYILCLVFAQKLPGNDNSTATLCLGHHAVPNGTIVKTITNDQIEVTNATELVQSSSTGGICDSPHQILDGENCTLIDALLGDPQCDGFQNKKWDLFIERSKAYSNCYPYDVPDYASLRSLVASSGTLEFNNESFNWTGVTQNGTSSACKRRSNNSFFSRLNWLTHLKFKYPALNVTMPNNEKFDKLYIWGVHHPGTGNDQISLYAQASGRITVSTKRSQQTVIPNIGSRPRVRDIPSRISIYWTIVKPGDILLINSTGNLIAPRGYFKIRSGKSSIMRSDAPIGKCNSECITPNGSIPNDKPFQNVNRITYGACPRYVKQNTLKLATGMRNVPEKQTRGIFGAIAGFIENGWEGMVDGWYGFRHQNSEGIGQAADLKSTQAAINQINGKLNRLIGKTNEKFHQIEKEFSEVEGRIQDLEKYVEDTKIDLWSYNAELLVALENQHTIDLTDSEMNKLFERTKKQLRENAEDMGNGCFKIYHKCDNACIGSIRNGTYDHDVYRDEALNNRFQIKGVELKSGYKDWILWISFAISCFLLCVALLGFIMWACQKGNIRCNICI

SEQ ID NO: 266 - protein, 566 aa, Artificial Sequence
  derived and/or modified protein sequence (wt) from hemagglutinin__InfluenzaA__AAZ74584
MKTIIALSYILCLVFAQKLPGNDNSTATLCLGHHAVPNGTLVKTIANDQIEVTNATELVQSSSTGRICDSPHQILDGENCTLIDALLGDPHCDGFQNKEWDLFVERSKAYSNCYPYDVPDYASLRSLVASSGTLEFNNESFNWTGVAQNGTSSACKRRSNKSFFSRLNWLHQLKYKYPAQNVTMPNNEKFDKLYIWGVHHPSTDSDQISLYAQASGRVTVSTKRSQQTVIPNIGSRPWVRGVSSRISIYWTIVKPGDILLINSTGNLIAPRGYFKIRSGKSSIMRSDAPIGKCNSECITPNGSIPNDKPFQNVNRITYGACPRYVKQNTLKLATGMRNVPEKQTRGIFGAIAGFIENGWEGMVDGWYGFRHQNSEGTGQAADLKSTQAAINQINGKLNRLIEKTNEKFHQIEKEFSEVEGRIQDLEKYVEDTKIDLWSYNAELLVALENQHTIDLTDSEMNKLFERTKKQLRENAEDMGNGCFKIYHKCDNACIGSIRNGTYDHDVYRDEALNNRFQIKGVELKSGYKDWILWISFAISCFLLCVALLGFIMWACQKGNIRCNICI

SEQ ID NO: 267 - protein, 566 aa, Artificial Sequence; identical to SEQ ID NO: 243
  derived and/or modified protein sequence (wt) from hemagglutinin__InfluenzaA__AAZ74595

SEQ ID NO: 268 - protein, 566 aa, Artificial Sequence
  derived and/or modified protein sequence (wt) from hemagglutinin__InfluenzaA__AAZ74617
MKTIIALSYILCLVFAQKLPVNDNSTATLCLGHHAVPNGTLVKTITNDHIEVTNATELVQSSSTGRICDSPHQILDGENCTLIDALLGDPHCDGFQNKEWDLFVERSTAYSNCYPYDVPDYASLRSLVASSGTLEFNNESFNWTGVAQNGTSSACKRRSIKSFFSRLNWLHQLKYKYPALNVTMPNNEKFDKLYIWGVHHPSTDSDQISLYAQASGRVTVSTKRSQQTVIPNIGSRPWVRGVSSKISIYWTIVKPGDILLINSTGNLIAPRGYFKIRSGKSSIMRSNAPIGKCNSECITPNGSIPNDKPFQNVNRITYGACPRYVKQNTLKLATGMRNVPEKQTRGIFGAIAGFIENGWEGMVDGWYGFRHQNSEGTGQAADLKSTQAAINQINGKLNRLIEKTNEKFHQIEKEFSEVEGRIQDLEKYVEDTKIDLWSYNAELLVALENQHTIDLTDSEMNKLFERTRKQLRENAEDMGNGCFKIYHKCDNACIGSIRNGTYDHDVYRDEALNNRFQIKGVELKSGYKDWILWISFAISCFLLCVVLLGFIMWACQKGNIRCNICI

SEQ ID NO: 269 - protein, 566 aa, Artificial Sequence; identical to SEQ ID NO: 47
  derived and/or modified protein sequence (wt) from hemagglutinin__InfluenzaA__AAZ79505

SEQ ID NO: 270 - protein, 566 aa, Artificial Sequence
  derived and/or modified protein sequence (wt) from hemagglutinin__InfluenzaA__AAZ79516
MKTIIALSYILCLVFAQKLPGNDNSTATLCLGHHAVPNGTLVKTITNDQIEVTNATELVQSSSTGRICDSPHQILDGENCTLIDALLGDPHCDGFQNKEWDLFVERSKAYSNCYPYDVPDYASLRSLVASSGTLEFNNESFNWTGVAQNGTSSACKRRSNKSFFSRLNWLHQLKYKYPALNVTMPNNEKFDKLYIWGVHHPSTDSDQISLYAQASGRVTVSTKRSQQTVIPNIGSRPWVRGVSSRISIYWTIVKPGDILLINSTGNLIAPRGYFKIRSGKSSIMRSDAPIGKCNSECITPNGSIPNDKPFQNVNRITYGACPRYVKQNTLKLATGMRNVPEKQTRGIFGAIAGFIENGWEGMVDGWYGFRHQNSEGTGQAADLKSTQAAINQINGKLNRLIEKTNEKFHQIEKEFSEVEGRIQDLEKYVEDTKIDLWSYNAELLVALENQHTIDLTDSEMNKLFERTKKQLRENAEDMGNGCLKIYHKCDNACIGSIRNGTYDHDVYRDEALNNRFQIKGVELKSGYKDWILWISFAISCFLLCVVLLGFIMWACQKGNIRCNICI

SEQ ID NO: 271 - protein, 566 aa, Artificial Sequence
  derived and/or modified protein sequence (wt) from hemagglutinin__InfluenzaA__AAZ79527
MKTIIALSYILCLVFAQKLPGNDNSTATLCLGHHAVPNGTIVKTITNDQIEVTNATELVQSSSTGGICDSPHQILDGENCTLIDALLGDPQCDGFQNKKWDLFVERSKAYSNCYPYDVPDYASLRSLVASSGTLEFNNESFDWTGVTQNGTSSACKRRSNKSFFSRLNWLTHLKYKYPALNVTMPNNEKFDKLYIWGVHHPGTDSDQISLYAQASGRITVSTKRSQQTVIPNIGSRPRVRDVSSRISIYWTIVKPGDILLINSTGNLIAPRGYFKIRSGKSSIMRSDAPIGKCNSECITPNGSIPNDKPFQNVNRITYGACPRYVKQNTLKLATGMRNVPERQTRGIFGAIAGFIENGWEGMVDGWYGFRHQNSEGTGQAADLKSTQAAINQINGKLNRLIGKTNEKFHQIEKEFSEVEGRIQDLERYVEDTKIDLWSYNAELLVALENQHTIDLTDSEMNKLFERTKKQLRENAEDMGNGCFKIYHKCDNACIGSIRNGTYDHDVYRDEALNNRFQIKGVELKSGYKDWILWISFAISCFLLCVALLGFIMWACQKGNIRCNICI

SEQ ID NO: 272 - protein, 565 aa, Artificial Sequence
  derived and/or modified protein sequence (wt) from hemagglutinin__InfluenzaA__AAZ79549
MKVKLLILLCTFTATYADTICIGYHANNSTDTVDTVLEKNVTVTHSVNLLEDSHNGKLCLLKGIAPLQLGNCSVAGWILGNPECELLISKESWSYIVETPNPENGACYPGYFADYEELREQLSSVSSFERFEIFPKESSWPNHTVTGVSASCSHNGKSSFYRNLLWLTGKNGLYPNLSKSYANNKEKEVLILWGVHHPPNIGNQRTLYHTENAYVSVVSSHYSRRFTPEITKRPKVRDQEGRINYYWTLLEPGDTIIFEANGNLIAPWYAFALSRGFGSGIITSNAPMDECDAKCQTPQGAINSSLPFQNVHPVTIGECPKYVRSAKLRMVTGLRNIPSIQSRGLFGAIAGFIEGGWTGMVDGWYGYHHQNEQGSGYAADQKSTQNAINGITNKVNSVIEKMNTQFTAVGKEFNKLERRMENLNKKVDDGFLDIWTYNAELLVLLENERTLDFHDSNVKNLYEKVKSQLKNNAKEIGNGCFEFYHKCNNECMESVKNGTYDYPKYSEESKLNREKIDGVKLDSMGVYQILAIYSTVASSLVLLVSLGAISFWMCSNGSLQCRICI

SEQ ID NO: 273 - protein, 566 aa, Artificial Sequence
  derived and/or modified protein sequence (wt) from hemagglutinin__InfluenzaA__AAZ79560
MKTIIALSYILCLVFAQKLPGNDNSTATLCLGHHAVPNGTLVKTITNDQIEVTNATELVQSSSTGRICDSPHQILDGENCTLIDALLGDPHCDGFQNKEWDLFVERSKAYSNCYPYDVPDYASLKSLVASSGTLEFNNESFNWTGVAQNGTSSACKRRSNKSFFSRLNWLHQLKYKYPALNVTMPNNEKFDKLYIWGVHHPSTDSDQISLYAQASGRVTVSTKRSQQTVIPNIGSRPWVRGVSSRISIYWTIVKPGDILLINSTGNLIAPRGYFKIRSGKSSIMRSNAPIGKCNSECITPNGSIPNDKPFQNVNRITYGACPRYVKQNTLKLATGMRNVPEKQTRGIFGAIAGFIENGWEGMVDGWYGFRHQNSEGTGQAADLKSTQAAINQINGKLNRLIEKTNEKFHQIEKEFSEVEGRIQDLEKYVEDTKIDLWSYNAELLVALENQHTIDLTDSEMNKLFERTKKQLRENAEDMGNGCFKIYHKCDNACIGSIRNGTYDHDVYRDEALNNRFQIKGVELKSGYKDWILWISFAISCFLLCVVLLGFIMWACQKGNIRCNICI

SEQ ID NO: 274 - protein, 566 aa, Artificial Sequence
  derived and/or modified protein sequence (wt) from hemagglutinin__InfluenzaA__AAZ79571
MKTIIALSYILCLVFAQKLPGNDNSTATLCLGHHAVPNGTLVKTITNDQIEVTNATELVQSSSTGRICDSPHQILDGENCTLIDALLGDPRCDGFQNKEWDLFVERSKAYSNCYPYDVPDYASLRSLVASSGTLEFNNESFNWTGVAQNGTSSACKRRSNKSFFSRLNWLHQLKYKYPALNVTMPNNEKFDKLYIWGVHHPSTDSDQISLYAQASGRVTVSTKRSQQTVIPNIGSRPWVRGVSSRISIYWTIVKPGDILLINSTGNLIAPRGYFKIRSGKSSIMRSDAPIGKCNSECITPNGSIPNDKPFQNVNRITYGACPRYVKQNTLKLATGMRNVPEKQTRGIFGAIAGFIENGWEGMVDGWYGFRHQNSEGTGQAADLKSTQAAINQINGKLNRLIEKTNEKFHQIEKEFSEVEGRIQDLEKYVEDTKIDLWSYNAELLVALENQHTIDLTDSEMNKLFERTKKQLRENAEDMGNGCFKIYHKCDNACIGSIRNGTYDHDVYRDEALNNRFQIKGVELKSGYKDWILWISFAISCFLLCVVLLGFIMWACQKGNIRCNICI

SEQ ID NO: 275 - protein, 566 aa, Artificial Sequence
  derived and/or modified protein sequence (wt) from hemagglutinin__InfluenzaA__AAZ79582
MKTIIALSYILCLVFAQKLPGNDNSTATLCLGHHAVPNGTLVKTITNDQIEVTNATELVQSSSTGRICDSPHQILDGENCTLIDALLGDPHCDGFQNKEWDLFVERSKAYSNCYPYDVPDYASLRSLVASSGTLEFNNESFNWTGVAQNGTSSACKRRSNKSFFSRLNWLHQLKYKYPALNVTMPNNEKFDKLYIWGVHHPSTDSDQISLYAQASGRVTVSTKRSQQTVIPNIGSGPWVRGVSSRISIYWTIVKPGDILLINSTGNLIAPRGYFKIRSGKSSIMRSDAPIGKCNSECITPNGSIPNDKPFQNVNRITYGACPRYVKQNTLKLATGMRNVPEKQTRGIFGAIAGFIENGWEGMVDGWYGFRHQNSEGTGQAADLKSTQAAINQINGKLNRLIEKTNEKFHQIEKEFSEVEGRIQDLEKYVEDTKIDLWSYNAELLVALENQHTIDLTDSEMNKLFERTKKQLRENAEDMGNGCFKIYHKCDNACIGSIRNGTYDHDVYRDEALNNRFQIKGVELKSGYKDWILWISFAISCFLLCVVLLGFIMWACQKGNIRCNICI

SEQ ID NO: 276 - protein, 565 aa, Artificial Sequence
  derived and/or modified protein sequence (wt) from hemagglutinin__InfluenzaA__AAZ79604
MKAKLLVLLCTFTATYADTICIGYHANNSTDTVDTVLEKNVTVTHSVNLLEDSHNGKLCLLKGIAPLQLGNCSVAGWILGNPECELLISKESWSYIVETPNPENGTCYPGYFADYEELREQLSSVSSFERFEIFPKGSSWPNHTVTGVSASCSHNGKSSFYRNLLWLTGKNGLYPNLSMSYVNNKEKEVLVLWGVHHPPNIGDQRALYHTENAYVSVVSSHYSRRFTPEIAKRPKVRDQEGRINYYWTLLEPGDTIIFEANGNLIAPWYAFALSRGFGSGIITSNAPMDECDAKCQTPQGAINSSLPFQNVHPVTIGECPKYVRSAKLRMVTGLRNIPSIQSRGLFGAIAGFIEGGWTGMVDGWYGYHHQNEQGSGYAADQKSTQNAINRITNKVNSVIEKMNTQFTAVGKEFNKLERRMENLNKKVDDGFLDIWTYNAELLVLLENERTLDFHDSNVKNLYEKVKSQLKNNAKEIGNGCFEFYHKCNNECMESVKNGTYDYPKYSEESKLNREKIDGVKLESMGVYQILAIYSTVASSLVLLVSLGAISFWMCSNGSLQCRICI

SEQ ID NO: 277 - protein, 566 aa, Artificial Sequence
  derived and/or modified protein sequence (wt) from hemagglutinin__InfluenzaA__AAZ79615
MKTIIALSYILCLVFAQKIPGNDNSTATLCVGHHAVPNGTIVKTITNDQIEVTNATELVQSSSTGGICDSPHQILDGENCTLIDALLGDPQCDGFQNKKWDLFVERSKAYSNCYPYDVPDYASLRSLVASSGTLEFNNESFNWTGVTQNGTSSACKRRSNNSFFSRLNWLTHLKFKYPALNVTMPNNEKFDKLYIWGVHHPGTDNDQISLYAQASGRITVSTKRSQQTVIPNIGSRPRVRDIPSRISIYWTIVKPGDILLINSTGNLIAPRGYFKIRSGKSSIMRSDAPIGKCNSECITPNGSIPNDKPFQNVNRITYGACPRYVKQNTLKLATGMRNVPEKQTRGIFGAIAGFIENGWEGMVDGWYGFRHQNSEGIGQAADLKSTQAAINQINGKLNRLIGKTNEKFHQIEKEFSEVEGRIQDLEKYVEDTKIDLWSYNAELLVALENQHTIDLTDSEMNKLFERTKKQLRENAEDMGNGCFKIYHKCDNACIGSIRNGTYDHDVYRDEALNNRFQIKGVELKSGYKDWILWISFAISCFLLCVVLLGFIMWACQKGNIRCNICI

SEQ ID NO: 278 - protein, 566 aa, Artificial Sequence
  derived and/or modified protein sequence (wt) from hemagglutinin__InfluenzaA__AAZ79627
MKTIIALSYILCLVFAQKLPGNDNSTATLCLGHHAVPNGTIVKTITNDQIEVTNATELVQSSSTGGICDSPHQILDGENCTLIDALLGDPQCDGFQNKKWDLFVERSKAYSNCYPYDVPDYASLRSLVASSGTLEFNNESFNWTGVTQNGTSSACKRRSNSSFFSRLNWLTHLKFKYPALKVTMPNNEKFDKLYIWGVHHPGTDNDQISLYAQASGRITVSTKRSQQTVIPNIGSRPRVRDIPSRISIYWTIVKPGDILLINSTGNLIAPRGYFKIRSGKSSIMRSDAPIGKCNSECITPNGSIPNDKPFQNVNRITYGACPRYVKQNTLKLATGMRNVPEKQTRGIFGAIAGFIENGWEGMVDGWYGFRHQNSEGIGQAADLKSTQAAINQINGKLNRLIGKTNEKFHQIEKEFSEVEGRIQDLEKYVEDTKIDLWSYNAELLVALENQHTIDLTDSEMNKLFERTKKQLRENAEDMGNGCFKIYHKCDNACIGSIRNGTYDHDVYRDEALNNRFQIKGVELKSGYKDWILWISFAISCFLLCVALLGFIMWACQKGNIRCNICI

SEQ ID NO: 279 - protein, 566 aa, Artificial Sequence; identical to SEQ ID NO: 256
  derived and/or modified protein sequence (wt) from hemagglutinin__InfluenzaA__AAZ79941

SEQ ID NO: 280 - protein, 566 aa, Artificial Sequence; identical to SEQ ID NO: 255
  derived and/or modified protein sequence (wt) from hemagglutinin__InfluenzaA__AAZ79944

SEQ ID NO: 281 - protein, 566 aa, Artificial Sequence
  derived and/or modified protein sequence (wt) from hemagglutinin__InfluenzaA__AAZ79963
MKTIIALSYILCLVFAQKLPGNDNSTATLCLGHHAVPNGTIVKTITNDQIEVTNATELVQSSSTGGICDSPHQILDGENCTLIDALLGDPQCDGFQNKKWDLFVERSKAYSNCYPYDVPDYASLRSLVASSGTLEFNNESFNWTGVTQNGTSSACKRRSNNSFFSRLNWLTHLKFKYPALNVTMPNNEKFDKLYIWGVHHPGTDNDQISLYAQASGRITVSTKRSQQTVIPSIGSRPRIRDVPSRISIYWTIVKPGDILLINSTGNLIAPRGYFKIRSGKSSIMRSDAPIGKCNSECITPNGSIPNDKPFQNVNRITYGACPRYVKQNTLKLATGMRNVPEKQTRGIFGAIAGFIENGWEGMVDGWYGFRHQNSEGTGQAADLKSTQAAINQINGKLNRLIGKTNEKFHQIEKEFSEVEGRIQDLEKYVEDTKIDLWSYNAELLVALENQHTIDLTDSEMNKLFERTKKQLRENAEDMGNGCFKIYHKCDNACIGSIRNGTYDHDVYRDEALNNRFQIKGVELKSGYKDWILWISFAISCFLLCVALLGFIMWACQKGNIRCNICI

SEQ ID NO: 282 - protein, 566 aa, Artificial Sequence
  derived and/or modified protein sequence (wt) from hemagglutinin__InfluenzaA__AAZ79974
MKTIIALSYILCLVFAQKLPGNDNSTATLCLGHHAVPNGTIVKTITNDQIEVTNATELVQSSSTGGICDSPHQILDGENCTLIDALLGDPQCDGFQNKKWDLFVERSKAYSNCYPYDVPDYASLRSLVASSGTLEFNNESFNWTGVTQNGTSSACKRRSNNSFFSRLNWLTHLKFKYPALNVTMPNNEKFDKLYIWGVHHPGTNNDQISLYAQASGRITVSTKRSQQTVIPNIGSRPRVRDIPSRISIYWTIVKPGDILLINSTGNLIAPRGYFKIRSGKSSIMRSDAPIGKCNSECITPNGSIPNDKPFQNVNRITYGACPRYVKQNTLKLATGMRNVPEKQTRGIFGAIAGFIENGWEGMVDGWYGFRHQNSEGIGQAADLKSTQAAINQINGKLNRLIGKTNEKFHQIEKEFSEVEGRIQDLEKYVEDTKIDLWSYNAELLVALENQHTIDLTDSEMNKLFERTKKQLRENAEDMGNGCFKIYHKCDNACIGSIRNGTYDHDVYRDEALNNRFQIKGVELKSGYKDWILWISFAISCFLLCVALLGFIMWACQKGNIRCNICI

SEQ ID NO: 283 - protein, 566 aa, Artificial Sequence; identical to SEQ ID NO: 255
  derived and/or modified protein sequence (wt) from hemagglutinin__InfluenzaA__AAZ79996

SEQ ID NO: 284 - protein, 566 aa, Artificial Sequence
  derived and/or modified protein sequence (wt) from hemagglutinin__InfluenzaA__AAZ80007
MKTIIALSHIFCLVLGQYLPGNDNSTATLCLGHHAVPNGTLVKTITNDQIEVTNATELVQSSSTGKICNNPHRILDGIDCTLIDALLGDPHCDGFQNETWDLFVERSKAFSNCYPYDVPDYASLRSLVASSGTLEFITEGFTWTGVTQNGGSNACKRGPGSGFFSRLNWLTKSESTYPVLNVTMPNNDNFDKLYIWGVHHPSTNQEQTSLYVQASGRVTVSTRRSQQTIIPNIGSRPWVRGLSSRISIYWTIVKPGDVLVINSNGNLIAPRGYFKMRTGKSSIMRSDAPIDTCISECITPNGSIPNDKPFQNVNKITYGACPKYVKQNTLKLATGMRNVPEKQTRGLFGAIAGFIENGWEGMIDGWYGFRHQNSEGTGQAADLKSTQAAIDQINGKLNRVIEKTNEKFHQIEKEFSEVEGRIQDLEKYVEDTKIDLWSYNAELLVALENQHTIDLTDSEMNKLFEKTRRQLRENAEDMGNGCFKIYHKCDNACIESIRNGTYDHDVYRDEALNNRFQIKGVELKSGYKDWILWISFAISCFLLCVVLLGFIMWACQRGNIRCNICI

SEQ ID NO: 285 - protein, 566 aa, Artificial Sequence; identical to SEQ ID NO: 256
  derived and/or modified protein sequence (wt) from hemagglutinin__InfluenzaA__AAZ80017

SEQ ID NO: 286 - protein, 566 aa, Artificial Sequence
  derived and/or modified protein sequence (wt) from hemagglutinin__InfluenzaA__AAZ80030
MKTIIALSYILCLVFAQELPGNDNSTATLCLGHHAVPNGTIVKTITNDQIEVTNATELVQSSSTGGICDSPHQILDGENCTLIDALLGDPQCDGFQNKKWDLFVERSKAYSNCYPYDVPDYASLRSLVASSGTLEFNNESFNWTGVTQNGTSSACKRRSNNSFFSRLNWLTHLKFKYPALNVTMPNNEKFDKLYIWGVHHPGTDNDQTSLYAQASGRITVSTKRSQQTVIPNIGSRPRVRDIPSRISIYWTIVKPGDILLINSTGNLIAPRGYFKIRSGKSSIMRSDAPIGKCNSECITPNGSIPNDKPFQNVNRITYGACPRYVKQNTLKLATGMRNVPEKQTRGIFGAIAGFIENGWEGMVDGWYGFRHQNSEGIGQAADLKSTQAAINQINGKLNRLIGKTNEKFHQIEKEFSEVEGRIQDLEKYVEDTKIDLWSYNAELLVALENQHTIDLTDSEMNKLFERTKKQLRENAEDMGNGCFKIYHKCDNACIGSIRNGTYDHDVYRDEALNNRFQIKGVELKSGYKDWILWISFAISCFLLCVALLGFIMWACQKGNIRCNICI

SEQ ID NO: 287 - protein, 566 aa, Artificial Sequence
  derived and/or modified protein sequence (wt) from hemagglutinin__InfluenzaA__AAZ83242
MKTIIALSYILCLVFAQKLPGNDNSTATLCLGHHAVPNGTIVKTITNDQIEVTNATELVQSSSTGEICDSPHQILDGENCTLIDALLGDPQCDGFQNKKWDLFVERNKAYSNCYPYDVPDYASLRSLVASSGTLEFNNESFNWTGVTQNGTSSACKRRSNKSFFSRLNWLTHLKYKYPALNVTMPNNEKFDKLYIWGVHHPGTDSDQINLYAQASGRITVSTKRSQQTVIPNIGYRPRVRDVPSRISIYWTIVKPGDILLINSTGNLIAPRGYFKIRSGKSSIMRSDAPIGKCNSECITPNGSIPNDKPFQNVNRITYGACPRYVKQNTLKLATGMRNVPEKQTRGIFGAIAGFIENGWEGMVDGWYGFRHQNSEGTGQAADLKSTQAAINQINGKLNRLIGKTNEKFHQIEKEFSEVEGRIQDLEKYVEDTKIDLWSYNAELLVALENQHTIDLTDSEMNKLFERTKKQLRENAEDMGNGCFKIYHKCDNACIGSIRNGTYDHDVYRDEALNNRFQIKGVELKSGYKDWILWISFAISCFLLCVALLGFIMWACQKGNIRCNICI

SEQ ID NO: 288 - protein, 566 aa, Artificial Sequence
  derived and/or modified protein sequence (wt) from hemagglutinin__InfluenzaA__AAZ83266
MKTIIALSYILCLVFAQKLPGNDNSTATLCLGHHAVPNGTLVKTITNDQIEVTNANELVQSSSTGRICDSPHQILDGENCTLIDALLGDPRCDGFQNKEWDLFVERSKAYSNCYPYDVPDYASLRSLVASSGTLEFNNESFNWTGVAQNGTSSACKRRSNKSFFSRLNWLHQLKYKYPALNVTMPNNEKFDKLYIWGVHHPSTDSDQISLYAQASGRVTVSTKRSQQTVIPNIGSRPWVRGVSSRISIYWTIVKPGDILLINSTGNLIAPRGYFKIRSGKSSIMRSDAPIGKCNSECITPNGSIPNDKPFQNVNRITYGACPRYVKQNTLKLATGMRNVPEKQTRGIFGAIAGFIENGWEGMVDGWYGFRHQNSEGTGQAADLKSTQAAINQINGKLNRLIEKTNEKFHQIEKEFSEVEGRIQDLEKYVEDTKIDLWSYNAELLVALENQHTIDLTDSEMNKLFERTKKQLRENAEDMGNGCFKIYHKCDNACIGSIRNGTYDHDVYRDEALNNRFQIKGVELKSGYKDWILWISFAISCFLLCVVLLGFIMWACQKGNIRCNICI

SEQ ID NO: 289 - protein, 566 aa, Artificial Sequence; identical to SEQ ID NO: 186
  derived and/or modified protein sequence (wt) from hemagglutinin__InfluenzaA__AAZ83277

SEQ ID NO: 290 - protein, 566 aa, Artificial Sequence; identical to SEQ ID NO: 72
  derived and/or modified protein sequence (wt) from hemagglutinin__InfluenzaA__AAZ83288

SEQ ID NO: 291 - protein, 566 aa, Artificial Sequence
  derived and/or modified protein sequence (wt) from hemagglutinin__InfluenzaA__AAZ83312
MKTIIALSYILCLVFAQKLPGNDNSTATLCLGHHAVPNGTLVKTITNDQIEVTNATELVQSSSTGRICDSPHQILDGENCTLIDALLGDPHCDGFQNKEWDLFVERSKAYSNCYPYDVPDYASLRSLVASSGTLEFNNESFNWTGVAQNGTSSACKRRSIKSFFSRLNWLHQLKYKYPALNVTMPNNDKFDKLYIWGVHHPSTDSDQTSLYAQASGRVTVSTKRSQQTVIPNIGSRPWVRGVSSRISIYWTIVKPGDILLINSTGNLIAPRGYFKIRSGKSSIIRSDAPIGKCNSECITPNGSIPNDKPFQNVNRITYGACPRYVKQNTLKLATGMRNVPEKQTRGIFGAIAGFIENGWEGMVDGWYGFRHQNSEGTGQAADLKSTQAAINQINGKLNRLIEKTNEKFHQIEKEFSEVEGRIQDLEKYVEDTKIDLWSYNAELLVALENQHTIDLTDSEMNKLFERTRKQLRENAEDMGNGCFKIYHKCDNACIGSIRNGTYDHDVYRDEALNNRFQIKGVELKSGYKDWILWISFAISCFLLCVVLLGFIMWACQKGNIRCNICI

SEQ ID NO: 292 - protein, 566 aa, Artificial Sequence
  derived and/or modified protein sequence (wt) from hemagglutinin__InfluenzaA__AAZ83323
MKTIIALSYILCLVFAQKLPGNDNSTATLCLGHHAVPNGTLVKTITNDQIEVTNATELVQSSSTGRICDSPHRILDGENCTLIDALLGDPHCDGFQNKEWDLFVERSKAYSNCYPYDVQDYASLRSLVASSGTLEFNNESFNWTGVAQNGTSYACKRRSIKSFFSRLNWLHQLKYKYPALNVTMPNNDKFDKLYIWGVHHPSTDSDQTSLYAQASGRVTVSTKRSQQTVISNIGSRPWVRGVSSRISIYWTIVKPGDILLITSTGNLIAPRGYFKIRSGKSSIMRSDAPIGKCNSECITPNGSIPNDKPFQNVNRITYGACPRYVKQNTLKLATGMRNVPEKQTRGIFGAIAGFIENGWEGMVDGWYGFRHQNSEGTGQAADLKSTQAAINQINGKLNRLIEKTNEKFHQIEKEFSEVEGRIQDLEKYVEDTKIDLWSYNAELLVALENQHTIDLTDSEMNKLFERTRKQLRENAEDMGNGCFKIYHKCDNACIGSIRNGTYDHDVYRDEALNNRFQIKGVELKSGYKDWILWISFAISCFLLCVVLLGFIMWACQKGNIRCNICI

SEQ ID NO: 293 - protein, 566 aa, Artificial Sequence; identical to SEQ ID NO: 282
  derived and/or modified protein sequence (wt) from hemagglutinin__InfluenzaA__AAZ83371

SEQ ID NO: 294 - protein, 566 aa, Artificial Sequence; identical to SEQ ID NO: 255
  derived and/or modified protein sequence (wt) from hemagglutinin__InfluenzaA__AAZ83688

SEQ ID NO: 295 - protein, 565 aa, Artificial Sequence
  derived and/or modified protein sequence (wt) from hemagglutinin__InfluenzaA__ABA06510
MKVKLLILLCTFTATYADTICIGYHANNSTDTVDTVLEKNVTVTHSVNLLEDSHNGKLCLLKGIAPLQLGNCSVAGWILGNPECELLIAKESWSYIVETPNPENGACYPGYFADYEELREQLSSVSSFERFEIFPKESSWPNHTVTGVSASCSHNGKSSFYRNLLWLTGKNGLYPNLSKSYANNKEKEVLILWGVHHPPNIGDQRTLYHTENAYVSVVSSHYSRRFTPEITKRPKVRDQEGRINYYWTLLEPGDTIIFEANGNLIAPWYAFALSRGFGSGIITSNAPMDECDAKCQTPQGAINSSLPFQNVHPVTIGECPKYVRSAKLRMVTGLRNIPSIQSRGLFGAIAGFIEGGWTGMVDGWYGYHHQNEQGSGYAADQKSTQNAINGITNKVNSVIEKMNTQFTAVGKEFNKLERRMENLNKKVDDGFLDIWTYNAELLVLLENERTLDFHDSNVKNLYEKVKSQLKNNAKEIGNGCFEFYHKCNNECMESVKNGTYDYPKYSEESKLNREKIDGVKLDSMGVYQILAIYSTVASSLVLLVSLGAISFWMCSNGSLQCRICI

SEQ ID NO: 296 - protein, 565 aa, Artificial Sequence
  derived and/or modified protein sequence (wt) from hemagglutinin__InfluenzaA__ABA08464
MKAKLLVLLCTFTATYADTICIGYHANNSTDTVDTVLEKNVTVTHSVNLLEDSHNGKLCLLKGIAPLQLGNCSVAGWILGNPECELLISKESWSYIVETPNPENGTCYPGYFADYEELREQLSSVSSFERFEIFPKGSSWPNHTVTGVSASCSHNGKSSFYRNLLWLTGKNGLYPNLSMSYVNNKEKEVLVLWGVHHPPNIGDQRALYHTENAYVSVVSSHYSRRFTPEIAKRPKVRDQEGRINYYWTLLEPGDTIIFEANGNLIAPWYAFALSRGFGSGIITSNAPMDECDAKCQTPQGAINSSLPFQNVHPVTIGECPKYVRSAKLRMVTGLRNIPSIQSRGLFGAIAGFIEGGWTGMVDGWYGYHHQNEQGSGYAADQKSTQNAINGITNKVNSVIEKMNTQFTAVGKEFNKLERRMENLNKKVDDGFLDIWTYNAELLVLLENERTLDFHDSNVKNLYEKVKSQLKNNAKEIGNGCFEFYHKCNNECMESVKNGTYDYPKYSEESKLNREKIDGVKLESMGVYQILAIYSTVASSLVLLVSLGAISFWMCSNGSLQCRICI

SEQ ID NO: 297 - protein, 565 aa, Artificial Sequence; identical to SEQ ID NO: 296
  derived and/or modified protein sequence (wt) from hemagglutinin__InfluenzaA__ABA08486

SEQ ID NO: 298 - protein, 565 aa, Artificial Sequence
  derived and/or modified protein sequence (wt) from hemagglutinin__InfluenzaA__ABA08508
MKVKLLILLCTFTATYADTICIGYHANNSTDTVDTVLEKNVTVTHSVNLLEDSHNGKLCLLKGIAPLQLGNCSVAGWILGNPECELLISKESWSYIVETPNPENGACYPGYFADYEELREQLSSVSSFERFEIFPKESSWPNHTVTGVSASCSHNGKSSFYRNLLWLTGKNGLYPNLSKSYANNKKKEVLILWGVHHPPNIGVQRTLYYTENAYVSVVSSHYSRRFTPEITKRPKVRDQEGRINYYWTLLEPGDTIIFEANGNLIAPWYAFALSRGFGSGIITSNAPMDECDAKCQTPQGAINSSLPFQNVHPVTIGECPKYVRSAKLRMVTGLRNIPSIQSRGLFGAIAGFIEGGWTGMVDGWYGYHHQNEQGSGYAADQKSTQNAINGITNKVNSVIEKMNTQFTAVGKEFNKLERRMENLNKKVDDGFLDIWTYNAELLVLLENERTLDFHDSNVKNLYEKVKSQLKNNAKEIGNGCFEFYHKCNNECMESVKNGTYDYPKYSEESKLNREKIDGVKLDSMGVYQILAIYSTVASSLVLLVSLGAISFWMCSNGSLQCRICI

SEQ ID NO: 299 - protein, 565 aa, Artificial Sequence
  derived and/or modified protein sequence (wt) from hemagglutinin__InfluenzaA__ABA12707
MKVKLLVLLCTFTATYADTICIGYHANNSTDTVDTVLEKNVTVTHSVNLLEDSHNGKLCLLKGIAPLQLGNCSVAGWILGNPECELLISKESWSYIVETPNPENGTCYPGYFADYEELREQLSSVSSFERFEIFPKESSWPNHTVTGVSASCSHNGKSSFYRNLLWLTGKNGLYPNLSKSYANNKEKEVLVLWGVHHPPNIGDQRALYHTENAYVSVVSSHYSRRFTPEIAKRPKVRDQEGRINYYWTLLEPGDTIIFEANGNLIAPRYAFALSRGFGSGIITSNAPMDECDAKCQTPQGAINSSLPFQNVHPVTIGECPKYVRSAKLRMVTGLRNIPSIQSRGLFGAIAGFIEGGWTGMVDGWYGYHHQNEQGSGYAADQKSTQNAINGITNKVNSVIEKMNTQFTAVGKEFNKLERRMENLNKKVDDGFLDIWTYNAELLVLLENERTLDFHDSNVKNLYEKVKSQLKNNAKEIGNGCFEFYHKCNDECMESVKNGTYDYPKYSEESKLNREKIDGVKLESMGVYQILAIYSTVASSLVLLVSLGAISFWMCSNGSLQCRICI

SEQ ID NO: 300 - protein, 565 aa, Artificial Sequence
  derived and/or modified protein sequence (wt) from hemagglutinin__InfluenzaA__ABA12715
MKAKLLVLLCTFTATYADTICIGYHANNSTDTVDTVLEKNVTVTHSVNLLEDSHNGKLCLLKGIAPLQLGNCSVAGWILGNPECELLISKESWSYIVETPNPENGTCYPGYFADYEELREQLSSVSSFERFEIFPKGSSWPNHTVTGVSASCSHNGKSSFYRNLLWLTGKNGLYPNLSMSYVNNKEKEVLVLWGVHHPPNIGDQRALYHTENAYVSVVSSHYSRRFTPEIAKRPKVRDQEGRINYYWTLLEPGDTIIFEANGNLIAPWYAFALSRGFGSGIITSNAPMDECDAKCQTPQGAINSSLPFQNVHPVTIGECPKYVRSTKLRMVTGLRNIPSIQSRGLFGAIAGFIEGGWTGMVDGWYGYHHQNEQGSGYAADQKSTQNAINGITNKVNSVIEKMNTQFTAVGKEFNKLERRMENLNKKVDDGFLDIWTYNAELLVLLENERTLDFHDSNVKNLYEKVKSQLKNNAKEIGNGCFEFYHKCDNECMESVKNGTYDYPKYSEESKLNREKIDGVKLESMGVYQILAIYSTVASSLVFLVSLGAISFWMCSNGSLQCRICI

SEQ ID NO: 301 - protein, 565 aa, Artificial Sequence
  derived and/or modified protein sequence (wt) from hemagglutinin__InfluenzaA__ABA12729
MKVKLLVLLCTFTATYADTICIGYHANNSTDTVDTVLEKNVTVTHSVNLLEDSHNGKLCLLKGIAPLQLGNCSVAGWILGNPECELLISKESWSYIVETPNPENGTCYPGYFADYEELREQLSSVSSFERFEIFPKESSWPNHTVTGVSASCSHNGKSSFYRNLLWLTGKNGLYPNLSKSYANNKEKEVLVLWGVHHPPNIGDQRALYHTENAYISVVSSHYSRRFTPEIAKRPKVRDQEGRINYYWTLLEPGDTIIFEANGNLIAPRYAFALSRGFGSGIITSNAPMDECDAKCQTPQGAINSSLPFQNVHPVTIGECPKYVRSAKLRMVTGLRNIPSIQSRGLFGAIAGFIEGGWTGMVDGWYGYHHQNEQGSGYAADQKSTQNAINGITNKVNSVIEKMNTQFTAVGKEFNKLERRMENLNKKVDDGFLDIWTYNAELLVLLENERTLDFHDSNVKNLYEKVKSQLKNNAKEIGNGCFEFYHKCNDECMESVKNGTYDYPRYSEESKLNREKIDGVKLESMGVYQILAIYSTVASSLVLLVSLGAISFWMCSNGSLQCRICI

SEQ ID NO: 302 - protein, 566 aa, Artificial Sequence; identical to SEQ ID NO: 286
  derived and/or modified protein sequence (wt) from hemagglutinin__InfluenzaA__ABA12740

SEQ ID NO: 303 - protein, 566 aa, Artificial Sequence; identical to SEQ ID NO: 255
  derived and/or modified protein sequence (wt) from hemagglutinin__InfluenzaA__ABA12751

SEQ ID NO: 304 - protein, 566 aa, Artificial Sequence
  derived and/or modified protein sequence (wt) from hemagglutinin__InfluenzaA__ABA12762
MKTIIALSYILCLVFAQKFPGNDNSTATLCLGHHAVPNGTIVKTITNDQIEVTNATELVQSSSTGGICDSPHQILDGENCTLIDALLGDPQCDGFQNKKWDLFVERSKAYSNCYPYDVPDYASLRSLVASSGTLEFNNESFNWTGVTQNGTSSACKRRSNNSFFSRLNWLTHLKFKYPALNVTMPNNEKFDKLYIWGVHHPGTDNDQISLYAQASGRITVSTKRSQQTVIPNIGSRPRVRDIPSRISIYWTIVKPGDILLINSTGNLIAPRGYFKIRSGKSSIMRSDAPIGKCNSECITPNGSIPNDKPFQNVNRITYGACPRYVKQNTLKLATGMRNVPEKQTRGIFGAIAGFIENGWEGMVDGWYGFRHQNSEGIGQAADLKSTQAAINQINGKLNRLIGKTNEKFHQIEKEFSEVEGRIQDLEKYVEDTKIDLWSYNAELLVALENQHTIDLTDSEMNKLFERTKKQLRENAEDMGNGCFKIYHKCDNACIGSIRNGTYDHDVYRDEALNNRFQIKGVELKSGYKDWILWISFAISCFLLCVVLLGFIMWACQKGNIRCNICI

SEQ ID NO: 305 - protein, 566 aa, Artificial Sequence
  derived and/or modified protein sequence (wt) from hemagglutinin__InfluenzaA__ABA12773
MKTIIALSYIFCLVLGQDFPGNDNSTATLCLGHHAVPNGTLVKTITNDQIEVTNATELVQSSSTGKICNNPHRILDGIDCTLIDALLGDPHCDGFQNETWDLFVERSKAFSNCYPYDVPDYASLRSLVASSGTLEFINEGFTWTGVTQNGGSNACKRGPDSGFFSRLNWLYKSGSTYPVLNVTMPNNDNFDKLYIWGVHHPSTDQEQTSLYVQASGRVTVSTKRSQQTIIPNIGSRPWVRGLSSRISIYWTIVKPGDILVINSNGNLIAPRGYFKMRTGKSSIMRSDAPIGTCISECITPNGSIPNDKPFQNVNKITYGACPKYVKQNTLKLATGMRNVPEKQTRGLFGAIAGFIENGWEGMIDGWYGFRHQNSEGTGQAADLKSTQAAIDQINGKLNRVIEKTNEKFHQIEKEFSEVEGRIQDLEKYVEDTKIDLWSYNAELLVALENQHTIDLTDSEMNKLFEKTRRQLRENAEDMGNGCFKIYHKCDNACIGSIRNGTYDHDVYRDEALNNRFQIKGVELKSGYKDWILWISFAISCFLLCVVLLGFIMWACQKGNIRCNICI

SEQ ID NO: 306 - protein, 566 aa, Artificial Sequence
  derived and/or modified protein sequence (wt) from hemagglutinin__InfluenzaA__ABA12780
MKTIIALSYILCLVFAQKLPGNDNSTATLCLGHHAVPNGTIVKTITNDQIEVTNATELVQSSSTGGICDSPHQILDGENCTLIDALLGDPQCDGFQNKKWDLFVERSKAYSNCYPYDVPDYASLRSLVASSGTLEFNNESFNWTGVTQNGTSSACKRRSNNSFFSRLNWLTHLKFKYPALNVTMPNNEKFDKLYIWGVHHPGTNNDQISLYAQASGRITVSTKRSQQTVIPNIESRPRVRDIPSRISIYWTIVKPGDILLINSTGNLIAPRGYFKIRSGKSSIMRSDAPIGKCNSECITPNGSIPNDKPFQNVNRITYGACPRYVKQNTLKLATGMRNVPEKQTRGIFGAIAGFIENGWEGMVDGWYGFRHQNSEGIGQAADLKSTQAAINQINGKLNRLIGKTNEKFHQIEKEFSEVEGRIQDLEKYVEDTKIDLWSYNAELLVALENQHTIDLTDSEMNKLFERTKKQLRENAEDMGNGCFKIYHKCDNACIGSIRNGTYDHDVYRDEALNNRFQIKGVELKSGYKDWILWISFAISCFLLCVALLGFIMWACQKGNIRCNICI

SEQ ID NO: 307 - protein, 566 aa, Artificial Sequence
  derived and/or modified protein sequence (wt) from hemagglutinin__InfluenzaA__ABA16214
MKTIIALSYISCLVFAQKLPGNDNSTATLCLGHHAVPNGTLVKTITNDQIEVTNATELVQSSSTGRICDSPHRILDGKNCTLIDALLGDPHCDGFQNEKWDLFVERSKAFSNCYPYDVPDYASLRSLVASSGTLEFINEGFNWTGVTQSGGSYACKRGSVKSFFSRLNWLYESESKYPALNVTMPNNGKFDKLYIWGVHHPSTDKEQTNLYVRASGRVTVSTKRSQQTVIPNIGPRPWVRGLSSRISIYWTIVKPGDILLINSTGNLIAPRGYFKIRTGKSSIMRSDAPIGTCSSGCITPNGSIPNDKPFQNVNKITYGACPRYVKQNTLKLATGMRNVPEKQTRGIFGAIAGFIENGWEGMVDGWYGFRHQNSEGTGQAADLKSTQAAIDQINGKLNRLIEKTNEKFHQIEKEFSEVEGRIQDLEKYVEDTKIDLWSYNAELLVALENQHTIDMTDSEMNKLFEKTRKQLRENAEDMGNGCFKIYHKCDNACIGSIRNGTYDHDVYRDEALNNRFQIKGVELKSGYKDWILWISFAISCFLLCVVLLGFIMWACQKGNIRCNICI

SEQ ID NO: 308 - protein, 566 aa, Artificial Sequence; identical to SEQ ID NO: 256
  derived and/or modified protein sequence (wt) from hemagglutinin__InfluenzaA__ABA18026

SEQ ID NO: 309 - protein, 565 aa, Artificial Sequence
  derived and/or modified protein sequence (wt) from hemagglutinin__InfluenzaA__ABA18037
MKAKLLVLLCTFTATYADTICIGYHANNSTDTVDTVLEKNVTVTHSVNLLEDSHNGKLCLLKGIAPLQLGNCSVAGWILGNPECELLISKESWSYIVETPNPENGTCYPGYFADYEELKEQLSSVSSFERFEIFPKGSSWPNHTVTGVSASCSHNGKSSFYRNLLWLTGKNGLYPNLSMSYVNNKEKEVLVLWGVHHPPNIGDQRALYHTENAYVSVVSSHYSRRFTPEIAKRPKVRDQEGRINYYWTLLEPGDTIIFEANGNLIAPWYAFALSRGFGSGIITSNAPMDECDAKCQTPQGAINSSLPFQNVHPVTIGECPKYVRSAKLRMVTGLRNIPSIQSRGLFGAIAGFIEGGWTGMVDGWYGYHHQNEQGSGYAADQKSTQNAINGITNKVNSVIEKMNTQFTAVGKEFNKLERRMENLNKKVDDGFLDIWTYNAELLVLLENERTLDFHDSNVKNLYEKVKSQLKNNAKEIGNGCFEFYHKCNNECMESVKNGTYDYPKYSEESKLNREKIDGVKLESMGVYQILAIYSTVASSLVLLVSLGAISFWMCSNGSLQCRICI

SEQ ID NO: 310 - protein, 566 aa, Artificial Sequence; identical to SEQ ID NO: 255
  derived and/or modified protein sequence (wt) from hemagglutinin__InfluenzaA__ABA18048

SEQ ID NO: 311 - protein, 566 aa, Artificial Sequence
  derived and/or modified protein sequence (wt) from hemagglutinin__InfluenzaA__ABA18123
MKTIIALSYILCLVFAQKLPGNDNSTATLCLGHHAVPNGTLVKTITNDQIEVTNATELVQSSSTGRICDSPHQILDGENCTLIDALLGDPHCDGFQNKEWDLFVERSKAYSNCYPYDVPDYVSLRSLVASSGTLEFNNESFNWTGVAQNGTSSACKRRSNKSFFSRLNWLHQLKYKYPALNVTMPNNEKFDKLYIWGVHHPGTDSDQISLYAQASGRVTVSTKRSQQTVIPNIGSGPWVRGVSSRISIYWTIVKPGDILLINSTGNLIAPRGYFKIRSGKSSIMRSDAPIGKCNSECITPNGSIPNDKPFQNVNRITYGACPRYVKQNTLKLATGMRNVPEKQTRGIFGAIAGFIENGWEGMMDGWYGFRHQNSEGTGQAADLKSTQAAINQINGKLNRLIEKTNEKFHQIEKEFSEVEGRIQDLEKYVEDTKIDLWSYNAELLVALENQHTIDLTDSEMNKLFERTKKQLRENAEDMGNGCFKIYHKCDNACIGSIRNGTYDHDVYRDEALNNRFQIKGVELKSGYKDWILWISFAISCFLLCIVLLGFIMWACQKGNIRCNICI

SEQ ID NO: 312 - protein, 566 aa, Artificial Sequence; identical to SEQ ID NO: 255
  derived and/or modified protein sequence (wt) from hemagglutinin__InfluenzaA__ABA18134

SEQ ID NO: 313 - protein, 565 aa, Artificial Sequence; identical to SEQ ID NO: 299
  derived and/or modified protein sequence (wt) from hemagglutinin__InfluenzaA__ABA18145

SEQ ID NO: 314 - protein, 566 aa, Artificial Sequence; identical to SEQ ID NO: 256
  derived and/or modified protein sequence (wt) from hemagglutinin__InfluenzaA__ABA18156

SEQ ID NO: 315 - protein, 566 aa, Artificial Sequence
  derived and/or modified protein sequence (wt) from hemagglutinin__InfluenzaA__ABA26700
MKTIIALSYILCLVFAQKLPGNDNSTATLCLGHHAVPNGTIVKTITNDQIEVTNATELVQSSSTGGICNSPHQILDGENCTLIDALLGDPQCDGFQNKKWDLFVERSKAYSNCYPYDVPDYASLRSLVASSGTLEFNNESFNWTGVTQNGTSSACKRRSNNSFFSRLNWLTHLKFKYPALNVTMPNNEKFDKLYIWGVHHPGTDNDQISLYAQAPGRITVSTKRSQQTVIPNIGSRPRVRDIPSRISIYWTIVKPGDILLINSTGNLIAPRGYFKIRSGKSSIMRSDAPIGKCNSECITPNGSIPNDKPFQNVNRITYGACPRYVKQNTLKLATGMRNVPEKQTRGIFGAIAGFIENGWEGMVDGWYGFRHQNSEGIGQAADLKSTQAAINQINGKLNRLIGKTNEKFHQIEKEFSEVEGRIQDLEKYVEDTKIDLWSYNAELLVALENQHTIDLTDSEMNKLFERTKKQLRENAEDMGNGCFKIYHKCDNACIGSIRNGTYDHDVYRDEALNNRFQIKGVELKSGYKDWILWISFAISCFLLCVALLGFIMWACQKGNIRCNICI

SEQ ID NO: 316 - protein, 566 aa, Artificial Sequence
  derived and/or modified protein sequence (wt) from hemagglutinin__InfluenzaA__ABA26711
MKTIIALSYILCLVFAQKLPGNDNSTATLCLGHHAVPNGTIVKTITNDQIEVTNATELVQSSSTGGICDSPHQILDGENCTLIDALLGDPQCDGFQNKKWDLFVERSKAYSNCYPYDVPDYASLRSLVASSGTLEFNNESFNWTGVTQNGTSSACKRRSNNSFFSRLNWLTHLKFKYPALNVTMPNNEKFDKLYIWGVHHPGTDNDQISLYAQASGRITVSTKRSQQTVIPNIGSRPRVRDIPSRISIYWTIVKPGDILLINSTGNLIAPRGYFKIRSGKSSIMRSDAPIGKCKSECITPNGSIPNDKPFQNVNRITYGACPRYVKQNTLKLATGMRNVPEKQTRGIFGAIAGFIENGWEGMVDGWYGFRHQNSEGIGQAADLKSTQAAINQINGKLNRLIGKTNEKFHQIEKEFSEVEGRIQDLEKYVEDTKIDLWSYNAELLVALENQHTIDLTDSEMNKLFERTKKQLRENAEDMGNGCFKIYHKCDNACIGSIRNGTYDHDVYRDEALNNRFQIKGVELKSGYKDWILWISFAISCFLLCVALLGFIMWACQKGNIRCNICI

SEQ ID NO: 317 - protein, 566 aa, Artificial Sequence
  derived and/or modified protein sequence (wt) from hemagglutinin__InfluenzaA__ABA26722
MKTIIALSYILCLVFAQKLPGNDNSTATLCLGHHAVPNGTIVKTITNDQIEVTNATELVQSSPTGGICDSPHQILDGENCTLIDALLGDPQCDGFQNKKWDLFVERSKAHSNCYPYDVPDYASLRSLVASSGTLEFNNESFNWTGVTQNGTSSACKRRSNKSFFSRLNWLTHLKFKYPALNVTMPNNEKFDKLYIWGVHHPGTDNDQISLYAQASGRITVSTKRSQQTVIPNIGSRPRVRDVPSRISIYWTIVKPGDILLINSTGNLIAPRGYFKIRSGKSSIMRSDAPIGKCNSGCITPNGSIPNDKPFQNVNRITYGACPRYVKQNTLKLATGMRNVPEKQTRGIFGAIAGFIENGWEGMVDGWYGFRHQNSEGTGQAADLKSTQAAINQINGKLNRLIGKTNEKFHQIEKEFSEVEGRIQDLEKYVEDTKIDLWSYNAELLVALENQHTIDLTDSEMNKLFERTKKQLRENAEDMGNGCFKIYHKCDNACIGSIRNGTYDHDVYRDEALNNRFQIKGVELKSGYKDWILWISFAISCFLLCVALLGFIMWACQKGNIRCNICI

SEQ ID NO: 318 - protein, 566 aa, Artificial Sequence; identical to SEQ ID NO: 243
  derived and/or modified protein sequence (wt) from hemagglutinin__InfluenzaA__ABA26733

SEQ ID NO: 319 - protein, 566 aa, Artificial Sequence; identical to SEQ ID NO: 243
  derived and/or modified protein sequence (wt) from hemagglutinin__InfluenzaA__ABA26755

SEQ ID NO: 320 - protein, 566 aa, Artificial Sequence; identical to SEQ ID NO: 282
  derived and/or modified protein sequence (wt) from hemagglutinin__InfluenzaA__ABA26766

SEQ ID NO: 321 - protein, 566 aa, Artificial Sequence; identical to SEQ ID NO: 282
  derived and/or modified protein sequence (wt) from hemagglutinin__InfluenzaA__ABA26788

SEQ ID NO: 322 - protein, 566 aa, Artificial Sequence; identical to SEQ ID NO: 282
  derived and/or modified protein sequence (wt) from hemagglutinin__InfluenzaA__ABA26799

SEQ ID NO: 323 - protein, 565 aa, Artificial Sequence
  derived and/or modified protein sequence (wt) from hemagglutinin__InfluenzaA__ABA42247
MKVKLLVLLCTFTATYADTICIGYHANNSTDTVDTVLEKNVTVTHSVNLLEDSHNGKLCLLKGIAPLQLGNCSVAGWILGNPECELLISKESWSYIVETPNPENGTCYPGYFADYEELREQLSSVSSFERFEIFPKESSWPNHTVTGVSASCSHNGKSSFYKNLLWLTGKNGLYPNLSKSYANNKEKEVLVLWGVHHPPNIGDQRALYHTENAYVSVVSSHYSRRFTPEIAKRPKVRDQEGRINYYWTLLEPGDTIIFEANGNLIAPRYAFALSRGFGSGIITSNAPMDECDAKCQTPQGAINSSLPFQNVHPVTIGECPKYVRSAKLRMVTGLRNIPSIQSRGLFGAIAGFIEGGWTGMVDGWYGYHHQNEQGSGYAADQKSTQNAINGITNKVNSVIEKMNTQFTAVGKEFNKLERRMENLNKKVDDGFLDIWTYNAELLVLLENERTLDFHDSNVKNLYEKVKSQLKNNAKEIGNGCFEFYHKCNDECMESVKNGTYDYPKYSEESKLNREKIDGVKLESMGVYQILAIYSTVASSLVLLVSLGAISFWMCSNGSLQCRICI

SEQ ID NO: 324 - protein, 565 aa, Artificial Sequence; identical to SEQ ID NO: 296
  derived and/or modified protein sequence (wt) from hemagglutinin__InfluenzaA__ABA42258

SEQ ID NO: 325 - protein, 566 aa, Artificial Sequence; identical to SEQ ID NO: 255
  derived and/or modified protein sequence (wt) from hemagglutinin__InfluenzaA__ABA42269

SEQ ID NO: 326 - protein, 565 aa, Artificial Sequence
  derived and/or modified protein sequence (wt) from hemagglutinin__InfluenzaA__ABA42280
MKVKLLILLCTFTATYADTICIGYHANNSTDTVDTVLEKNVTVTHSVNLLEDSHNGKLCLLKGIAPLQLGNCSVAGWILGNPECELLISKESWSYIVETPNPENGACYPGYFADYEELREQLSSVSSFERFEIFPKESSWPNHTVTGVSASCSHNGKSSFYRNLLWLTGKNGLYPNLSKSYANNKEKEVLILWGVHHPPNIGDQRTLYHTENAYVSVVSSHYSRRFTPEITKRPKVRDQEGRINYYWTLLEPGDTIIFEANGNLIAPWYAFALSRGFGSGIITSNAPMDECDAKCQTPQGAINSSLPFQNVHPVTIGECPKYVRSAKLRMVTGLRNIPSIQSRGLFGAIAGFIEGGWTGMVDGWYGYHHQNEQGSGYAADQKSTQNAINGITNKVNSVIEKMNTQFTAVGKEFNKLERRMENLNKKVDDGFLDIWTYNAELLVLLENERTLDFHDSNVKNLYEKVKSQLKNNAKEIGNGCFEFYHKCNNECMESVKNGTYDYPKYSEESKLNREKIDGVKLDSMGVYQILAIYSTVASSLVLLVSLGAISFWMCSNGSLQCRICI

SEQ ID NO: 327 - protein, 566 aa, Artificial Sequence
  derived and/or modified protein sequence (wt) from hemagglutinin__InfluenzaA__ABA42291
MKTIIALSYILCLVFAQKLPGNDNSTATLCLGHHAVPNGTIVKTITNDQIEVTNATELVQSSSTGGICDSPHQILDGENCTLIDALLGDPQCDGFQNKKWDLFVERSKAYSNCYPYDVPDYASLRSLVASSGTLEFNNESFNWTGVTQNGTSSACKRRSNNSFFSRLNWLTHLKFKYPALNVTMPNNEKFDKLYIWGVHHPGTDNDQISLYAQASGRITVSTKRSQQTVIPNIGSRPRVRDIPSRISIYWTIVKPGDILLINSTGNLIAPRGYFKIRSGKSSIMRSDAPIGKCKSECITPNGSIPNDKPFQNVNRITYGACPRYVKQNTLKLATGMRNVPEKQTRGIFGAIAGFIENGWEGMVDGWYGFRHQNSEGIGQAADLKSTQAAINQINGKLNRLIGKTNEKFHQIEKEFSEVEGRIQDLEKYVEDTKTDLWSYNAELLVALENQHTIDLTDSEMNKLFERTKKQLRENAEDMGNGCFKIYHKCDNACIGSIRNGTYDHDVYRDEALNNRFQIKGVELKSGYKDWILWISFAISCFLLCVALLGFIMWACQKGNIRCNICI

SEQ ID NO: 328 - protein, 566 aa, Artificial Sequence; identical to SEQ ID NO: 51
  derived and/or modified protein sequence (wt) from hemagglutinin__InfluenzaA__ABA42302

SEQ ID NO: 329 - protein, 566 aa, Artificial Sequence; identical to SEQ ID NO: 105
  derived and/or modified protein sequence (wt) from hemagglutinin__InfluenzaA__ABA42313

SEQ ID NO: 330 - protein, 566 aa, Artificial Sequence; identical to SEQ ID NO: 51
  derived and/or modified protein sequence (wt) from hemagglutinin__InfluenzaA__ABA42346

SEQ ID NO: 331 - protein, 566 aa, Artificial Sequence; identical to SEQ ID NO: 105
  derived and/or modified protein sequence (wt) from hemagglutinin__InfluenzaA__ABA42357

SEQ ID NO: 332 - protein, 566 aa, Artificial Sequence
  derived and/or modified protein sequence (wt) from hemagglutinin__InfluenzaA__ABA42379
MKTIIALSYILCLVFAQKLPGNDNSTATLCLGHHAVPNGTLVKTITNDQIEVTNATELVQSSSTGRICDSPHQILDGENCTLIDALLGDPHCDGFQNKEWDLFVERSKAYSNCYPYDVPDYVSLRSLVASSGTLEFNNESFNWTGVAQNGTSSACKRRSDKSFFSRLNWLHQLKYKYPALNVTMPNNEKFDKLYIWGVHHPGTDSDQISLYAQASGRVTVSTKRSQQTVIPNIGSRPWVRGVSSKISIYWTIVKPGDILLINSTGNLIAPRGYFKIRSGKSSIMRSDAPIGKCNSECITPNGSIPNDKPFQNVNRITYGPCPRYVKQNTLKLATGMRNVPEKQTRGIFGAIAGFIENGWEGMMDGWYGFRHQNSEGTGQAADLKSTQAAINQINGKLNRLIEKTNEKFHQIEKEFSEVEGRIQDLEKYVEDTKIDLWSYNAELLVALENQHTIDLTDSEMNKLFERTKKQLRENAEDMGNGCFKIYHKCDNACIGSIRNGTYDHDVYRDEALNNRFQIKGVELKSGYKDWILWISFAISCFVLCIVLLGFIMWACQKGNIRCNICI

SEQ ID NO: 333 - protein, 566 aa, Artificial Sequence; identical to SEQ ID NO: 80
  derived and/or modified protein sequence (wt) from hemagglutinin__InfluenzaA__ABA42390

SEQ ID NO: 334 - protein, 566 aa, Artificial Sequence
  derived and/or modified protein sequence (wt) from hemagglutinin__InfluenzaA__ABA42401
MKTIIALSYILCLVFAQKLPGNDNSTATLCLGHHAVPNGTLVKTITNDQIEVTNATELVQSSSTSRICDSPHQILDGENCTLIDALLGDPHCDGFQNKEWDLFVERSKAYSNCYPYDVPDYVSLRSLVASSGTLEFNNESFNWTGVAQNGTSSACKRRSDKSFFSRLNWLHQLKYKYPALNVTMPNNEKFDKLYIWGVHHPGTDSDQISLYAQSSGRVTVSTKRSQQTVIPNIGSGPWVRGVSSRISIYWTIVKPGDILLINSTGNLIAPRGYFKIRSGKSSIMRSDAPIGKCNSKCITPNGSIPNDKPFQNVNRITYGACPRYVKQNTLKLATGMRNVPEKQTRGIFGAIAGFIENGWEGMMDGWYGFRHQNSEGTGQAADLKSTQAAINQINGKLNRLIEKTNEKFHQIEKEFSEVEGRIQDLEKYVEDTKIDLWSYNAELLVALENQHTIDLTDSEMNKLFERTKKQLRENAEDMGNGCFKIYHKCDNACIGSIRNGTYDHDVYRDEALNNRFQIKGVELKSGYKDWILWISFAISCFLLCIVLLGFIMWACQKGNIRCNICI

SEQ ID NO: 335 - protein, 566 aa, Artificial Sequence
  derived and/or modified protein sequence (wt) from hemagglutinin__InfluenzaA__ABA42412
MKTIIALSYILCLVFAQKLPGNDNSTATLCLGHHAVPNGTLVKTITNDQIEVTNATELVQSSSTGRICDSPHQILDGENCTLIDALLGDPHCDGFQNKEWDLFVERSKAYSNCYPYDVPDYVSLRSLVASSGTLEFNNESFNWTGVAQNGTSSACKRRSDKSFFSRLNWLHQLKYKYPALNVTMPNNEKFDKLYIWGVHHPGTDSDQISLYAQASGRVTVSTKRSQQTVIPNIGSRPWVRGVSSKISIYWTIVKPGDILLINSTGNLIAPRGYFKIRSGKSSIMRSDAPIGKCNSECITPSGSIPNDKPFQNVNRITYGPCPRYVKQNTLKLATGMRNVPEKQTRGIFGAIAGFIENGWEGMMDGWYGFRHQNSEGTGQAADLKSTQAAINQINGKLNRLIEKTNEKFHQIEKEFSEVEGRIQDLEKYVEDTKIDLWSYNAELLVALENQHTIDLTDSEMNKLFERTKKQLRENAEDMGNGCFKIYHKCDNACIGSIRNGTYDHDVYRDEALNNRFQIKGVELKSGYKDWILWISFAISCFLLCIVLLGFIMWACQKGNIRCNICI

SEQ ID NO: 336 - protein, 566 aa, Artificial Sequence; identical to SEQ ID NO: 47
  derived and/or modified protein sequence (wt) from hemagglutinin__InfluenzaA__ABA42443

SEQ ID NO: 337 - protein, 566 aa, Artificial Sequence; identical to SEQ ID NO: 51
  derived and/or modified protein sequence (wt) from hemagglutinin__InfluenzaA__ABA42454

SEQ ID NO: 338 - protein, 566 aa, Artificial Sequence
  derived and/or modified protein sequence (wt) from hemagglutinin__InfluenzaA__ABA42465
MKTIIALSYILCLVFAQKLPGNDNSTATLCLGHHAVPNGTLVKTITNDQIEVTNATELVQSSSTSRICDSPHQILDGENCTLIDALLGDPHCDGFQNKEWDLFVERSKAYSNCYPYDVPDYVSLRSLVASSGTLEFNNESFNWTGVAQNGTSSACKRRSDKSFFSRLNWLHQLKYKYPALNVTMPNNEKFDKLYIWGVHHPGTDSDQISLYAQASGRVTVSTKRSQQTVIPNIGSRPWGRGVSSRISIYWTIVKPGDILLINSTGNLIAPRGYFKIRSGKSSIMRSDAPIGKCNSECITPNGSIPNDKPFQNVNRITYGACPRYVKQNTLKLATGMRNVPEKQTRGIFGAIAGFIENGWEGMMDGWYGFRHQNSEGTGQAADLKSTQAAINQINGKLNRLIEKTNEKFHQIEKEFSEVEGRIQDLEKYVEDTKIDLWSYNAELLVALENQHTIDLTDSEMNKLFERTKKQLRENAEDMGNGCFKIYHKCDNACIGSIRNGTYDHDVYRDEALNNRFQIKGVELKSGYKDWILWISFAISCFLLCIVLLGFIMWACQKGNIRCNICI

SEQ ID NO: 339 - protein, 566 aa, Artificial Sequence
  derived and/or modified protein sequence (wt) from hemagglutinin__InfluenzaA__ABA42476
MKTIIALSYILCLVFAQKLPGNDNSTATLCLGHHAVPNGTLVKTITNDQIEVTNATELVQSSSTGRICDSPHQILDGENCTLIDALLGDPHCDGFQNKEWDLFVERSKAYSNCYPYDVPDYVSLRSLVASSGTLEFNNESFNWTGVAQNGTSSACKRRSDKSFFSRLNWLHQLKYKYPALNVTMPNNEKFDKLYIWGVHHPGTDSDQISLYAQASGRVTVSTKRSQQTVIPNIGSRPWVRGVSSRISIYWTIVKPGDILLINSTGNLIAPRGYFKIRSGKSSIMRSDAPIGKCNSECITPNGSIPNDKPFQNVNRITYGPCPRYVKQNTLKLATGMRNVPEKQTRGIFGAIAGFIENGWEGMMDGWYGFRHQNSEGTGQAADLKSTQAAINQINGKLNRLIEKTNEKFHQIEKEFSEVEGRIQDLEKYVEDTKIDLWSYNAELLVALENQHTIDLTDSEMNKLFERTKKQLRENAEDMGNGCFKIYHKCDNACIGSIRNGTYDHDVYRNEALNNRFQIKGVELKSGYKDWILWISFAISCFLLCIVLLGFIMWACQKGNIRCNICI

SEQ ID NO: 340 - protein, 566 aa, Artificial Sequence
  derived and/or modified protein sequence (wt) from hemagglutinin__InfluenzaA__ABA42498
MKTIIALSYILCLVFAQKLPGNDNSTATLCLGHHAVPNGTLVKTITNDQIEVTNATELVQSSSTSRICDSPHQILDGENCTLIDALLGDPHCDGFQNKEWDLFVERSKAYSNCYPYDVPDYVSLRSLVASSGTLEFNNESFNWTGVAQNGTSSACKRRSDKSFFSRLNWLHQLKYKYPALNVTMPNNEKFDKLYIWGVHHPGTDSDQISLYAQASGRVTVSTKRSQQTVIPNIGSRPWVRGVSSIISIYWTIVKPGDILLINSTGNLIAPRGYFKIRSGKSSIMRSDAPIGKCNSECITPNGSIPNDKPFQNVNRITYGACPRYVKQNTLKLATGMRNVPEKQTRGIFGAIAGFIENGWEGMMDGWYGFRHQNSEGTGQAADLKSTQAAINQINGKLNRLIEKTNEKFHQIEKEFSEVEGRIQDLEKYVEDTKIDLWSYNAELLVALENQHTIDLTDSEMNKLFERTKKQLRENAEDMGNGCFKIYHKCDNACIGSIRNGTYDHDVYRDEALNNRFQIKGVELKSGYKDWILWISFAISCFLLCIVLLGFIMWACQKGNIRCNICI

SEQ ID NO: 341 - protein, 566 aa, Artificial Sequence; identical to SEQ ID NO: 72
  derived and/or modified protein sequence (wt) from hemagglutinin__InfluenzaA__ABA42509

SEQ ID NO: 342 - protein, 566 aa, Artificial Sequence
  derived and/or modified protein sequence (wt) from hemagglutinin__InfluenzaA__ABA42520
MKTIIALSYILCLVFAQKLPVNDNSTATLCLGHHAVPNGTLVKTITNDYIEVTNATELVQSSSTGRICDSPHQILDGENCTLIDALLGDPHCDGFQNKEWDLFVERSTAYSNCYPYDVPDYASLRSLVASSGTLEFNNESFNWTGVAQNGTSSACKRRSIKSFFSRLNWLHQLKYKYPALNVTMPNNEKFDKLYIWGVHHPSTDSDQISLYAQASGRVTVSTKRSQQTVIPNIGSRPWVRGVSSIISIYWTIVKPGDILLINSTGNLIAPRGYFKIRSGKSSIMRSNAPIGKCNSECITPNGSIPNDKPFQNVNRITYGACPRYVKQNTLKLATGMRNVPEKQTRGIFGAIAGFIENGWEGMVDGWYGFRHQNSEGTGQAADLKSTQAAINQINGKLNRLIEKTNEKFHQIEKEFSEVEGRIQDLEKYVEDTKIDLWSYNAELLVALENQHTIDLTDSEMNKLFERTRKQLRENAEDMGNGCFKIYHKCDNACIGSIRNGTYDHDVYRDEALNNRFQIKGVELKSGYKDWILWISFAISCFLLCVVLLGFIMWACQKGNIRCNICI

SEQ ID NO: 343 - protein, 566 aa, Artificial Sequence
  derived and/or modified protein sequence (wt) from hemagglutinin__InfluenzaA__ABA42531
MKTIIALSYILCLVFAQKLPVNDNSTATLCLGHHAVPNGTLVKTITNDHIEVTNATELVQSSSTGRICDSPHQILDGENCTLIDALLGDPHCDGFQNKEWDLFVERSTAYSNCYLYDVPDYASLRSLVASSGTLEFNNESFNWTGVAQNGTSSACKRRSIKSFFSRLNWLHQLKYKYPALNVTMPNNEKFDKLYIWGVHHPSTDSDQISLYAQASGRVTVSTKRSQQTVIPNIGSRPWVRGVSSRISIYWTIVKPGDILLINSTGNLIAPRGYFKIRSGKSSIMRSNAPIGKCNSECITPNGSIPNDKPFQNVNRITYGACPRYVKQNTLKLATGMRNVPEKQTRGIFGAIAGFIENGWEGMVDGWYGFRHQNSEGTGQAADLKSTQAAINQINGKLNRLIEKTNEKFHQIEKEFSEVEGRIQDLEKYVEDTKIDLWSYNAELLVALENQHTIDLTDSEMNKLFERTRKQLRENAEDMGNGCFKIYHKCDNACIGSIRNGTYDHDVYRDEALNNRFQIKGVELKSGYKDWILWISFAISCFLLCVVLLGFIMWACQKGNIRCNICI

SEQ ID NO: 344 - protein, 566 aa, Artificial Sequence; identical to SEQ ID NO: 72
  derived and/or modified protein sequence (wt) from hemagglutinin__InfluenzaA__ABA42542

SEQ ID NO: 345 - protein, 566 aa, Artificial Sequence
  derived and/or modified protein sequence (wt) from hemagglutinin__InfluenzaA__ABA42553
MKTIIALSYILCLVFAQKLPVNDNSTATLCLGHHAVPNGTLVKTITNDHIEVTNATELVQSSSTGRICDSPHQILDGENCTLIDALLGDPHCDGFQNKEWDLFVERSTAHSNCYPYDVPDYASLRSLVASSGTLEFNNESFNWTGVAQNGTSSACKRRSIKSFFSRLNWLHQLKYKYPALNVTMPNNEKFDKLYIWGVHHPSTDSDQISLYAQASGRVTVSTKRSQQTVIPNIGSRPWVRGVSSRISIYWTIVKPGDILLINSTGNLIAPRGYFKIRSGKSSIMRSNAPIGKCNSECITPNGSIPNDKPFQNVNRITYGACPRYVKQNTLKLATGMRNVPEKQTRGIFGAIAGFIENGWEGMVDGWYGFRHQNSEGTGQAADLKSTQAAINQINGKLNRLIEKTNEKFHQIEKEFSEVEGRIQDLEKYVEDTKIDLWSYNAELLVALENQHTIDLTDSEMNKLFERTRKQLRENAEDMGNGCFKIYHKCDNACIGSIRNGTYDHDVYRDEALNNRFQIKGVELKSGYKDWILWISFAISCFLLCVVLLGFIMWACQKGNIRCNICI

SEQ ID NO: 346 - protein, 566 aa, Artificial Sequence; identical to SEQ ID NO: 72
  derived and/or modified protein sequence (wt) from hemagglutinin__InfluenzaA__ABA42564

SEQ ID NO: 347 - protein, 566 aa, Artificial Sequence
  derived and/or modified protein sequence (wt) from hemagglutinin__InfluenzaA__ABA42928
MKTIIALSYILCLVFAQKLPVNDNSTATLCLGHHAVPNGTLVKTITNDHIEVTNATELVQSSSTGRICDSPHQILDGENCTLIDALLGDPHCDGFQNKEWDLFVERSTAYSNCYPYDVPDYASLRSLVASSGTLEFNNESFNWTGVAQNGTSSACKRRSIKSFFSRLNWLHQLKYKYPALNVTMPNNEKFDKLYIWGVHHPSTDSDQISLYAQASGRVTVSTKRSQQTVIPNIGSRPWVRGVSSKISIYWTIVKPGDILLINSTGNLIAPRGYFKIRSGKSSIMRSNAPIGKCNSECITPNGSIPNDKPFQNVNRITYGACPRYVKQNTLKLATGMRNVPEKQTRGIFGAIAGFIENGWEGMVNGWYGFRHQNSEGTGQAADLKSTQAAINQINGKLNRLIEKTNEKFHQIEKEFSEVEGRIQDLEKYVEDTKIDLWSYNAELLVALENQHTIDLTDSEMNKLFERTRKQLRENAEDMGNGCFKIYHKCDNACIGSIRNGTYDHDVYRDEALNNRFQIKGVELKSGYKDWILWISFAISCFLLCVVLLGFIMWACQKGNIRCNICI

SEQ ID NO: 348 - protein, 566 aa, Artificial Sequence; identical to SEQ ID NO: 72
  derived and/or modified protein sequence (wt) from hemagglutinin__InfluenzaA__ABA42939

SEQ ID NO: 349 - protein, 566 aa, Artificial Sequence
  derived and/or modified protein sequence (wt) from hemagglutinin__InfluenzaA__ABA42978
MKTIIALSYILCLVFAQKLPVNDNSTATLCLGHHAVPNGTLVKTITNDHIEVTNATELVQSSSTGRICDSPHQILDGENCTLIDALLGDPHCDGFQNKEWDLFVERSTAYSNCYPYDVPDYASLRSLVASSGTLEFNNESFNWTGVAQNGTSSACKRRSIKSFFSRLNWLHQLKYKYPALNVTIPNNEKFDKLYIWGVHHPSTDSDQISLYAQASGRVTVSTKRSQQTVIPNIGSRPWVRGVSSRISIYWTIVKPGDILLINSTGNLIAPRGYFKIRSGKSSIMRSNAPIGKCNSECITPNGSIPNDKPFQNVNRITYGACPRYVKQNTLKLATGMRNVPEKQTRGIFGAIAGFIENGWEGMVDGWYGFRHQNSEGTGQAADLKSTQAAINQINGKLNRLIEKTNEKFHQIEKEFSEVEGRIQDLEKYVEDTKIDLWSYNAELLVALENQHTIDLTDSEMNKLFERTRKQLRENAEDMGNGCFKIYHKCDNACIGSIRNGTYDHDVYRDEALNNRFQIKGVELKSGYKDWILWISFAISCFLLCVVLLGFIMWACQKGNIRCNICI

SEQ ID NO: 350 - protein, 566 aa, Artificial Sequence; identical to SEQ ID NO: 243
  derived and/or modified protein sequence (wt) from hemagglutinin__InfluenzaA__ABA43167

SEQ ID NO: 351 - protein, 566 aa, Artificial Sequence
  derived and/or modified protein sequence (wt) from hemagglutinin__InfluenzaA__ABA43178
MKTIIALSYILCLVFAQKLPGNDNSTATLCLGHHAVPNGTIVKTITNDQIEVTNATELVQSSSTGGICDSPHQILDGENCTLIDALLGDPQCDGFQNKKWDLFVERSKAYSNCYPYDVPDYASLRSLVASSGTLEFNNESFNWTGVTQNGTSSACKRRSNNSFFSRLNWLTHLKFKYPALNVTMPNNEKFDKLYIWGVHHPGTDNDQISLYAQASGRITVSTKRSQQTVIPNIGSRPRVRDIPSRISIYWTIVKPGDILLINSTGNLIAPRGYFKIRSGKSSIMRSDAPIGKCNSECITPNGSIPNDKPFQNVNRITYGACPRYVKQNTLKLATGMRNVPEKQTRGIFGAIAGFIENGWEGMVDGWYGFRHQNSEGIGQAADLKSTQAAINQINGKLNRLIGKTNEKFHQIEKEFSEVEGRIQDLEKYVEDTKIDLWSYNAELLVALENQHTIDLTDSEMNKLFERTKKQLRENAEDMGNGCFKIYHKCDNACIGSIRNGTYDHDVYRDEALNNRFQIKGVELKSGYKDWILWISFAISCFLLCIALLGFIMWACQKGNIRCNICI

SEQ ID NO: 352 - protein, 565 aa, Artificial Sequence
  derived and/or modified protein sequence (wt) from hemagglutinin__InfluenzaA__ABA43189
MKAKLLVLLCTFTATYADTICVGYHANNSTDTVDTVLEKNVTVTHSVNLLEDSHNGKLCLLKGIAPLQLGNCSVAGWILGNPECELLISKESWSYIVETPNPENGTCYPGYFADYEELREQLSSVSSFERFEIFPKGSSWPNHTVTGVSASCSHNGKSSFYRNLLWLTGKNGLYPNLSMSYVNNKEKEVLVLWGVHHPPNIGDQRALYHTENAYVSVVSSHYSRRFTPEIAKRPKVRDQEGRINYYWTLLEPGDTIIFEANGNLIAPWYAFALSRGFGSGIITSNAPMDECDAKCQTPQGAINSSLPFQNVHPVTIGECPKYVRSAKLRMVTGLRNIPSIQSRGLFGAIAGFIEGGWTGMVDGWYGYHHQNEQGSGYAADQKSTQNAINGITNKVNSVIEKMNTQFTAVGKEFNKLERRMENLNKKVDDGFLDIWTYNAELLVLLENERTLDFHDSNVKNLYEKVKSQLKNNAKEIGNGCFEFYHKCNNECMESVKNGTYDYPKYSEESKLNREKIDGVKLESMGVYQILAIYSTVASSLVLLVSLGAISFWMCSNGSLQCRICI

SEQ ID NO: 353 - protein, 566 aa, Artificial Sequence
  derived and/or modified protein sequence (wt) from hemagglutinin__InfluenzaA__ABA43200
MKTIIALSYILCLVFAQKLPGNDNSTATLCLGHHAVPNGTIVKTITNDQIEVTNATELVQSSSTGGICDSPHQILDGENCTLIDALLGDPQCDGFQNKKWDLFVERSKAYSNCYPYDVPDYASLRSLVASSGTLEFNNESFNWTGVTQNGTSSACKRRSNNSFFSRLNWLTHLKFKYPALNVTMPNNEKFDKLYIWGVHHPGTDNDQISLYAQASGRITVSTKRSQQTVIPNIGSRPRVRDIPSRISIYWTIVKPGDILLINSTGNLIAPRGYFKIRSGKSSIMRSDAPIGKCNSECITPNGSIPNDKPFQNVNRITYGACPRYVKQNTLKLATGMRNVPEKQTRGIFGAIAGFIENGWEGMVDGWYGFRHQNSEGIGQAADLKSTQAAINQINGKLNRLIGKTNEKFHQIEKEFSEVEGRIQDLEKYVEDTKIDLWSYNAELLVVLENQHTIDLTDSEMNKLFERTKKQLRENAEDMGNGCFKIYHKCDNACIGSIRNGTYDHDVYRDEALNNRFQIKGVELKSGYKDWILWISFAISCFLLCVVLLGFIMWACQKGNIRCNICI

SEQ ID NO: 354 - protein, 566 aa, Artificial Sequence
  derived and/or modified protein sequence (wt) from hemagglutinin__InfluenzaA__ABA43336
MKTIIALSYIFCLVFAQKLPGNDNSTATLCLGHHAVPNGTLVKTITNDQIEVTNATELVQNSSTGRICDSPHRILDGKNCTLIDALLGDPHCDGFQNKEWDLFVERSKAYSNCYPYDVPDYASLRSLVASSGTLEFINEDFNWTGVAQSGGSYACKRGSVNSFFSRLNWLHESEYKYPALNVTMPNNGKFDKLYVWGVHHPITDREQTKLYVRASGRVTVSTKRSQQTVIPNIGSRPWVRGLSSRISIYWTIVKPGDILLINSTGNLIAPRGYFKIRTGKSSIMRSDAPIGTCSSECITPNGSIPNDKPFQNVNRITYGACPRYVKQNTLKLATGMRNVPEKQTRGIFGAIAGFIENGWEGMVDGWYGFRHQNSEGTGQAADLKSTQAAIDQINGKLNRLIEKTNEKFHQIEKEFSEVEGRIQDLEKYVEDTKIDLWSYNAELLVALENQHTIDLTDSEMNKLFEKTRKQLRENAEDMGNGCFKIYHKCDNACIGSIRNGTYDHDVYRDEALNNRFQIKGVELKSGYKDWILWISFAISCFLLCVVLLGFIMWACQKGNIRCNICI

SEQ ID NO: 355 - protein, 568 aa, Artificial Sequence
  derived and/or modified protein sequence (wt) from hemagglutinin__InfluenzaA__ABA54915
MEKVVLLLATASLVKSDQICIGYHANNSTEQVDTIMEKNVTVTHAQDILEKTHNGKLCDLDGVKPLILRDCSVAGWLLGNPMCDEFINVPEWSYIVEKASPANDLCYPGDFNDYEELKHLLSRINHFEKIQIIPKSSWSNHEASSGVSAACPYHGKPSFFRNVVWLIKKNSAYPTIKRSYNNTNQEDLLVLWGIHHPNDAAEQTKLYQNPTTYISVGTSTLNQRLVPKIATRSKVNGQSGRMEFFWTILKPNDAINFESNGNFIAPEYAYKIVKKGDSAIMKSELEYGNCNTKCQTPMGAINSSMPFHNIHPLTIGECPKYVKSNRLVLATGLRNTPQRERRRKKRGLFGAIAGFIEGGWQGMVDGWYGYHHSNEQGSGYAADKESTQKAIDGVTNKVNSIIDKMNTQFEAVGREFNNLERRIENLNKKMEDGFLDVWTYNAELLVLMENERTLDFHDSNVKNLYNKVRLQLRDNAKELGNGCFEFYHKCDNECMESVKNGTYDYPQYSEEARLNREEISGVKLESMGTYQILSIYSTVASSLALAIMVAGLSLWMCSNGSLQCRICI

SEQ ID NO: 356 - protein, 565 aa, Artificial Sequence
  derived and/or modified protein sequence (wt) from hemagglutinin__InfluenzaA__ABA87080
MKVKLLVLLCTFTATYADTICIGYHANNSTDTVDTVLEKNVTVTHSVNLLEDSHNGKLCLLKGIAPLQLGNCSVAGWILGNPECELLISKESWSYIIETPNPENGTCYPGYFADYEELREQLSSVSSFERFEIFPKESSWPNHTVTGVSASCSHNGKSSFYRNLLWLTGKNGLYPNLSKSYANNKEKEVLVLWGVHHPPNMGDQRALYHTENAYVSVVSSHYSRRFTPEIAKRPKVRDQEGRINYYWTLLEPGDTIIFEANGNLIAPRYAFALSRGFGSGIITSNAPMDECDAKCQTPQGAINSSLPFQNVHPVTIGECPKYVRSAKLRMVTGLRNIPSIQSRGLFGAIAGFIEGGWTGMVDGWYGYHHQNEQGSGYAADQKSTQNAINGITNKVNSVIEKMNTQFTAVGKEFNKLERRMENLNKKVDDGFLDIWTYNAELLVLLENERTLDFHDSNVKNLYEKVKSQLKNNAKEIGNGCFEFYHKCNDECMESVKNGTYDYPKYSEESKLNREKIDGVKLESMGVYQILAIYSTVASSLVLLVSLGAISFWMCSNGSLQCRICI

SEQ ID NO: 357 - protein, 565 aa, Artificial Sequence; identical to SEQ ID NO: 296
  derived and/or modified protein sequence (wt) from hemagglutinin__InfluenzaA__ABA87091

SEQ ID NO: 358 - protein, 565 aa, Artificial Sequence; identical to SEQ ID NO: 296
  derived and/or modified protein sequence (wt) from hemagglutinin__InfluenzaA__ABA87231

SEQ ID NO: 359 - protein, 566 aa, Artificial Sequence; identical to SEQ ID NO: 255
  derived and/or modified protein sequence (wt) from hemagglutinin__InfluenzaA__ABA87242

SEQ ID NO: 360 - protein, 566 aa, Artificial Sequence; identical to SEQ ID NO: 256
  derived and/or modified protein sequence (wt) from hemagglutinin__InfluenzaA__ABA87253

SEQ ID NO: 361 - protein, 565 aa, Artificial Sequence
  derived and/or modified protein sequence (wt) from hemagglutinin__InfluenzaA__ABB02781
MKVKLLILLCTFTATYADTICIGYHANNSTDTVDTVLEKNVTVTHSVNLLEDSHNGKLCLLKGIAPLQLGNCSVAGWILGNPECELLISKESWSYIVETPNPENGACYPGYFADYEELREQLSSVSSFERFEIFPKESSWPNHTVTGVSASCSHNGKSSFYRNLLWLTGKNGLYPNLSKSYANNKEKEVLILWGVHHPPNIGDQRTLYHTENAYVSVVSSHYSRRFTPEITKRPKVRDQEGRINYYWTLLEPGDTIIFEANGNLIAPWYAFALSRGFGSGIITSNAPMDECDAKCQTPQGAINSSLPFQNVHPVTIGECPKYVRSAKLRMVTGLRNIPSIQSRGLFGAIAGFIEGGWTGMVDGWYGYHHQNEQGSGYAADQKSTQNAINGITNKVNSVIEKMNTQFTAVGKEFNKLERRMENLNKKVDDGFLDIWTYNAELLVLLENERTLDFHDSNVKNLYEKVKSQLKNNAKEIGNGCFEFYHKCNNECMESVKNGTYDYPKYSEESKLNREKIDGVKLDSMGVYQILAIYSTVASSLVLLVSLGAISFWMCSNGSLQCRVCI

SEQ ID NO: 362 - protein, 565 aa, Artificial Sequence; identical to SEQ ID NO: 301
  derived and/or modified protein sequence (wt) from hemagglutinin__InfluenzaA__ABB02792

SEQ ID NO: 363 - protein, 565 aa, Artificial Sequence; identical to SEQ ID NO: 299
  derived and/or modified protein sequence (wt) from hemagglutinin__InfluenzaA__ABB02803

SEQ ID NO: 364 - protein, 565 aa, Artificial Sequence
  derived and/or modified protein sequence (wt) from hemagglutinin__InfluenzaA__ABB02814
MKAKLLVLLCTFTATYADTICIGYHANNSTDTVDTVLEKNVTVTHSVNLLEDSHNGKLCLLKGIAPLQLGNCSVAGWILGNPECELLISKESWSYIVETPNPENGTCYPGYFADYEELREQLSSVSSFERFEIFPKGSSWPNHTVTGVSASCSHNGKSSFYRNLLWLTGKNGLYPNLSMSYVNNKEKEVLVLWGVHHPPNIGDQRALYHTENAYVSVVSSHYSRRFTPEIAKRPKVRDQEGRINYYWTLLEPGDTIIFEANGNLIAPWYAFALSRGFGSGIITSNAPMDECDAKCQTPQGAINSSLPFQNVHPVTIGECPKYVRSAKLRMVTGLRNIPSIQSRGLFGAIAGFIEGGWTGMVDGWYGYHHQNEQGSGYAADQKSTQNAINGITNKVNSVIEKMNTQFTAVGKEFNKLERRMENLNKKVDDGFLDIWTYNAELLVLLENERTLDFHDSNVKNLYEKVKSQLKNNAKEIGNGCFEFYHKCDNECMESVKNGTYDYPKYSEESKLNREKIDGVKLESMGVYQILAIYSTVASSLVLLVSLGAISFWMCSNGSLQCRICI

SEQ ID NO: 365 - protein, 565 aa, Artificial Sequence
  derived and/or modified protein sequence (wt) from hemagglutinin__InfluenzaA__ABB02825
MKAKLLVLLCTFTATYADTICIGYHANNSTDTVDTVLEKNVTVTHSVNLLEDSHNGKLCLLKGIAPLQLGNCSVAGWILGNPECELLISKESWSYIVETPNPENGTCYPGYFADYEELREQLSSVSSFERFEIFPKGSSWPNHTVTGVSASCSHNGKSSFYRNLLWLTGKNGLYPNLSMSYVNNKEKEVLVLWGVHHPPNIGDQRALYHTENAYVSVVSSHYSRRFTPEIAKRPKVRDQEGRINYYWTLLEPGDTIIFEANGNLIAPWYAFALSRGFGSGIITSNAPMDECDAKCQTPQGAINSSLPFQNVHPVTIGECPKYVRSAKLRMVTGLRNIPSIQSRGLFGAIAGFIEGGWTGMVDGWYGYHHQNEQGSGYAADQKSTQNAINGITNKVNSVIEKMNTQFTAVGKEFNKLERRMENLNKKVDDGFLDIWTYNAELLVLLENERTLDFHDSNVKNLYEKVKSQLKNNAKEIGNGCFEFYHKCDNECMESVKNGTYDYPKYSEESKLNRERIDGVKLESMGVYQILAIYSTVASSLVLLVSLGAISFWMCSNGSLQCRICI

SEQ ID NO: 366 - protein, 566 aa, Artificial Sequence
  derived and/or modified protein sequence (wt) from hemagglutinin__InfluenzaA__ABB02836
MKTIIALSYILCLVFAQKLPGNDNSTATLCLGHHAVPNGTIVKTITNDQIEVTNATELVQSSSTGGICDSPHQILDGENCTLIDALLGDPQCDGFQNKKWDLFVERSKAYSNCYPYDVPDYASLRSLVASSGTLEFNNESFNWTGVTQNGTSSACKRRSNNSFFSRLNWLTHLKFKYPALNVTMPNNEKFDKLYIWGVHHPGTDNDQISLYAQASGRITVSTKRNQQTVIPNIGSRPRVRDIPSRISIYWTIVKPGDILLINSTGNLIAPRGYFKIRSGKSSIMRSDAPIGKCKSECITPNGSIPNDKPFQNVNRITYGACPRYVKQNTLKLATGMRNVPEKQTRGIFGAIAGFIENGWEGMVDGWYGFRHQNSEGIGQAADLKSTQAAINQINGKLNRLIGKTNEKFHQIEKEFSEVEGRIQDLEKYVEDTKIDLWSYNAELLVALENQHTIDLTDSEMNKLFERTKKQLRENAEDMGNGCFKIYHKCDNACIGSIRNGTYDHDVYRDEALNNRFQIKGVELKSGYKDWILWISFAISCFLLCVALLGFIMWACQKGNIRCNICI

SEQ ID NO: 367 - protein, 566 aa, Artificial Sequence
  derived and/or modified protein sequence (wt) from hemagglutinin__InfluenzaA__ABB02847
MKTIIALSYILCLVFAQKLPGNDNSTATLCLGHHAVPNGTIVKTITNDQIEVTNATELVQSSSTGGICDSPHQILDGENCTLIDALLGDPQCDGFQNKKWDLFVERSKAYSNCYPYDVPDYASLRSLVASSGTLEFNNESFNWIGVTQNGTSSACKRRSNNSFFSRLNWLTHLKFKYPALNVTMPNNEKFDKLYIWGVHHPGTDNDQISLYAQASGRITVSTKRSQQTVIPNIGSRPRVRDIPSRISIYWTIVKPGDILLINSTGNLIAPRGYFKIRSGKSSIMRSDAPIGKCNSECITPNGSIPNDKPFQNVNRITYGACPRYVKQNTLKLATGMRNVPEKQTRGIFGAIAGFIENGWEGMVDGWYGFRHQNSEGIGQAADLKSTQAAINQINGKLNRLIGKTNEKFHQIEKEFSEVEGRIQDLEKYVEDTKIDLWSYNAELLVALENQHTIDLTDSEMNKLFERTKKQLRENAEDMGNGCFKIYHKCDNACIGSIRNGTYDHDVYRDEALNNRFQIKGVELKSGYKDWILWISFAISCFLLCVVLLGFIMWACQKGNIRCNICI

SEQ ID NO: 368 - protein, 566 aa, Artificial Sequence; identical to SEQ ID NO: 47
  derived and/or modified protein sequence (wt) from hemagglutinin__InfluenzaA__ABB02858

SEQ ID NO: 369 - protein, 566 aa, Artificial Sequence
  derived and/or modified protein sequence (wt) from hemagglutinin__InfluenzaA__ABB02869
MKTIIALSYILCLVFAQKLPVNDNSTATLCLGHHAVPNGTLVKTITNDHIEVTNATELVQSSSTGRICDSPHQILDGENCTLIDALLGDPHCDGFQNKEWDLFVERSTAYSNCYPYDVPDYASLRSLVASSGTLEFNNESFNWTGVAQNGTSSACKRRSIKSFFSRLNWLHQLKYKYPALNVTMPNNEKFDKLYIWGVHHPSTDSDQISLYAQASGRVTVSTKRSQQTVIPNIGSRPWVRGVSSRISIYWTIVKPGDILLINSTGNLIAPRGYFKIRSGKSSIMRSNAPIGKCNSECITPNGSIPNDKPFQNVNRITYGACPRYVKQNTLKLATGMRNVPEKQTRGIFGAIAGFVENGWEGMVDGWYGFRHQNSEGTGQAADLKSTQAAINQINGKLNRLIEKTNEKFHQIEKEFSEVEGRIQDLEKYVEDTKIDLWSYNAELLVALENQHTIDLTDSEMNKLFERTRKQLRENAEDMGNGCFKIYHKCDNACIGSIRNGTYDHDVYRDEALNNRFQIKGVELKSGYKDWILWISFAISCFLLCVVLLGFIMWACQKGNIRCNICI

SEQ ID NO: 370 - protein, 566 aa, Artificial Sequence
  derived and/or modified protein sequence (wt) from hemagglutinin__InfluenzaA__ABB02880
MKTIIALSYILCLVFAQKLPVNDNSTATLCLGHHAVPNGTLVKTITNDHIEVTNATELVQSSSTGRICDSPHQILDGENCTLIDALLGDPHCDGFQNKEWDLFVERSTAYSNCYPYDVPDYASLRSLVASSGTLEFNNESFNWTGVAQNGTSSACKRRSIKSFFSRLNWLHQLKYKYPALNVTMPNNEKFDKLYIWGVHHPSTDSDQISLYAQASGRVTVSTKRSQQTVIPNIGSRPWVRGVSSRISIYWTIVKPGDILLINSTGNLIAPRGYFKIRSGKSSIMRSNAPIGKCNSECITPNGSIPNDKPFQNVNRITYGACPRYVKQNTLKLATGMRNVPEKQTRGIFGAIAGFIENGWEGMVDGWYGFRHQNSEGTGQAADLKSTQAAINQINRKLNRLIEKTNEKFHQIEKEFSEVEGRIQDLEKYVEDTKIDLWSYNAELLVALENQHTIDLTDSEMNKLFERTRKQLRENAEDMGNGCFKIYHKCDNACIGSIRNGTYDHDVYRDEALNNRFQIKGVELKSGYKDWILWISFAISCFLLCVVLLGFIMWACQKGNIRCNICI

SEQ ID NO: 371 - protein, 566 aa, Artificial Sequence
  derived and/or modified protein sequence (wt) from hemagglutinin__InfluenzaA__ABB02891
MKTIIALSYILCLVFAQKLPVNDNSTATLCLGHHAVPNGTLVKTITNDHIEVTNATELVQSSSTGRICDSPHQILDGENCTLIDALLGDPHCDGFQNKEWDLFVERSTAYSNCYPYDVPDYASLRSLVASSGTLEFNNESFNWTGVAQNGTSSACKRRSIKSFFSRLNWLHQLKYKYPALNVTMPNNEKFDKLYIWGVHHPSTDSDQISLYAQASGRVTVSTKRSQQTVIPNIGSRPWVRGVSSIISIYWTIVKPGDILLINSTGNLIAPRGYFKIRSGKSSIMRSNAPIGECNSECITPNGSIPNDKPFQNVNRITYGACPRYVKQNTLKLATGMRNVPEKQTRGIFGAIAGFIENGWEGMVDGWYGFRHQNSEGTGQAADLKSTQAAINQINGKLNRLIEKTNEKFHQIEKEFSEVEGRIQDLEKYVEDTKIDLWSYNAELLVALENQHTIDLTDSEMNKLFERTRKQLRENAEDMGNGCFKIYHKCDNACIGSIRNGTYDHDVYRDEALNNRFQIKGVELKSGYKDWILWISFAISCFLLCVVLLGFIMWACQKGNIRCNICI

SEQ ID NO: 372 - protein, 566 aa, Artificial Sequence
  derived and/or modified protein sequence (wt) from hemagglutinin__InfluenzaA__ABB02902
MKTIIALSYILCLVFAQKLPVNDNSTATLCLGHHAVPNGTLVKTITNDHIEVTNATELVQSSSTGRICDSPHQILDGENCTLIDALLGDPHCDGFQNKEWDLFVERSTAYSNCYPYDVPDYASLRSLVASSGTLEFNNESFNWTGVAQNGTSSACKRRSIKSFFSRLNWLHQLKYKYPALNVTMPNNEKFDKLYIWGVHHPSTDSDQISLYAQASGRVTVSTKRSQQTVIPNIGSRPWVRGVSSRISIYWTIVKPGDILLINSTGNLIAPRGYFKIRSGKSSIMRSNAPIGKCNSECITPNGSIPNDKPFQNVNRITYGACPRYVKQNTLKLATGMRNVPEKQTRGIFGAIAGFIENGWEGMMDGWYGFRHQNSEGTGQAADLKSTQAAINQINGKLNRLIEKTNEKFHQIEKEFSEVEGRIQDLEKYVEDTKIDLWSYNAELLVALENQHTIDLTDSEMNKLFERTRKQLRENAEDMGNGCFKIYHKCDNACIGSIRNGTYDHDVYRDEALNNRFQIKGVELKSGYKDWILWISFAISCFLLCVVLLGFIMWACQKGNIRCNICI

SEQ ID NO: 373 - protein, 565 aa, Artificial Sequence
  derived and/or modified protein sequence (wt) from hemagglutinin__InfluenzaA__ABB02913
MKAKLLVLLCTFTATYADTICIGYHANNSTDTVDTVLEKNVTVTHSVNLLEDSHNGKLCLLKGIAPLQLGNCSVAGWILGNPECELLISKESWSYIVETPNPENGTCYPGYFADYEELREQLSSVSSFERFEIFPKGSSWPNHTVTGVSASCSHNGKSSFYRNLLWLTGKNGLYPNLSMSYVNNKEKEVLVLWGVHRPPNIGDQRALYHTENAYVSVVSSHYSRRFTPEIAKRPKVRDQEGRINYYWTLLEPGDTIIFEANGNLIAPWYAFALSRGFGSGIITSNAPMDECDAKCQTPQGAINSSLPFQNVHPVTIGECPKYVRSAKLRMVTGLRNIPSIQSRGLFGAIAGFIEGGWTGMVDGWYGYHHQNEQGSGYAADQKSTQNAINRITNKVNSVIEKMNTQFTAVGKEFNKLERRMENLNKKVDDGFLDIWTYNAELLVLLENERTLDFHDSNVKNLYEKVKSQLKNNAKEIGNGCFEFYHKCNNECMESVKNGTYDYPKYSEESKLNREKIDGVKLESMGVYQILAIYSTVASSLVLLVSLGAISFWMCSNGSLQCRICI

SEQ ID NO: 374 - protein, 565 aa, Artificial Sequence
  derived and/or modified protein sequence (wt) from hemagglutinin__InfluenzaA__ABB02924
MKVKLLVLLCTFTATYADTICIGYHANNSTDTVDTVLEKNVTVTHSVNLLEDSHNGKLCLLKGIAPLQLGNCSVAGWILGNPECELLISKESWSYIVETPNPENGTCYPGYFADYEELREQLSSVSSFERFEIFPKESSWPNHTVTGVSASCSHNGKSSFYRNLLWLTGKNGLYPNLSKSYANNKEKEVLVLWGVHHPPNIGDQRALYHTENAYVSVVSSHYSRRFTPEIAKRPKVRDQEGRINYYWTLLEPGDTIIFEANGNLIAPRYAFALSRGFGSGIITSNAPMDECDAKCQTPQGAINSSLPFQNVHPVTIGECPKYVRSAKLRMVTGLRNIPSIQSRGLFGAIAGFIEGGWTGMVDGWYGYHHQNEQGSGYAADQKSTQNAINGITNKVNAVIEKMNTQFTAVGKEFNKLERRMENLNKKVDDGFLDIWTYNAELLVLLENERTLDFHDSNVKNLYEKVKSQLKNNAKEIGNGCFEFYHKCNDECMESVKNGTYDYPKYSEESKLNREKIDGVKLESMGVYQILAIYSTVASSLVLLVSLGAISFWMCSNGSLQCRICI

SEQ ID NO: 375 - protein, 565 aa, Artificial Sequence
  derived and/or modified protein sequence (wt) from hemagglutinin__InfluenzaA__ABB02936
MKAKLLVLLCTFTATYADTICIGYHANNSTDTVDTVLEKNVTVTHSVNLLEDSHNGKLCLLKGIAPLQLGNCSVAGWILGNPECELLISKESWSYIVETPNPENGTCYPGHFADYEELREQLSSVSSFERFEIFPKGSSWPNHTVTGVSASCSHNGKSSFYRNLLWLTGKNGLYPNLSMSYVNNKEKEVLVLWGVHHPPNIGDQRALYHTENAYVSVVSSHYSRRFTPEIAKRPKVRDQEGRINYYWTLLEPGDTIIFEANGNLIAPWYAFALSRGFGSGIITSNAPMDECDAKCQTPQGAINSSLPFQNVHPVTIGECPKYVRSAKLRMVTGLRNIPSIQSRGLFGAIAGFIEGGWTGMVDGWYGYHHQNEQGSGYAADQKSTQNAINGITNKVNSVIEKMNTQFTAVGKEFNKLERRMENLNKKVDDGFLDIWTYNAELLVLLENERTLDFHDSNVKNLYEKVKSQLKNNAKEIGNGCFEFYHKCNNECMESVKNGTYDYPKYSEESKLNREKIDGVKLESMGVYQILAIYSTVASSLVLLVSLGAISFWMCSNGSLQCRICI

SEQ ID NO: 376 - protein, 566 aa, Artificial Sequence
  derived and/or modified protein sequence (wt) from hemagglutinin__InfluenzaA__ABB02947
MKTIIALSYILCLVFAQKIPGNDNSTATLCLGHHAVPNGTLVKTITNDQIEVTNATELVQSSSTGRICDSPHRILDGENCTLIDALLGDPHCDGFQNKEWDLFVERSKAYSNCYPYDVQDYASLRSLVASSGTLEFNNESFNWTGVAQNGTSYACKRRSIKSFFSRLNWLHQLKYKYPALNVTMPNNDKFDKLYIWGVHHPSTDSDQTSLYAQASGRVTVSTKRSQQTVIPNIGSRPWVRGVSSRISIYWTIVKPGDILLINSTGNLIAPRGYFKIRSGKSSIMRSDAPIGKCNSECITPNGSIPNDKPFQNVNRITYGACPRYVKQNTLKLATGMRNVPEKQTRGIFGAIAGFIENGWEGMVDGWYGFRHQNSEGTGQAADLKSTQAAINQINGKLNRLIEKTNEKFHQIEKEFSEVEGRIQDLEKYVEDTKIDLWSYNAELLVALENQHTIDLTDSEMNKLFERTRKQLRENAEDMGNGCFKIYHKCDNACIGSIRNGTYDHDVYRDEALNNRFQIKGVELKSGYKDWILWISFAISCFLLCVVLLGFIMWACQKGNIRCNICI

SEQ ID NO: 377 - protein, 566 aa, Artificial Sequence; identical to SEQ ID NO: 186
  derived and/or modified protein sequence (wt) from hemagglutinin__InfluenzaA__ABB02958

SEQ ID NO: 378 - protein, 566 aa, Artificial Sequence; identical to SEQ ID NO: 186
  derived and/or modified protein sequence (wt) from hemagglutinin__InfluenzaA__ABB02969

SEQ ID NO: 379 - protein, 566 aa, Artificial Sequence
  derived and/or modified protein sequence (wt) from hemagglutinin__InfluenzaA__ABB02980
MKTIIALSYILCLVFAQKLPGNDNSTATLCLGHHAVPNGTLVKTITNDQIEVTNATELVQSSSTGRICDSPHQILDGENCTLIDALLGDPHCDGFQNKEWDLFVERSKAYSNCYPYDVPDYASLRSLVASSGTLEFNNESFNWTGVAQNGTSSACKRRSNKSFFSRLNWLHQLKYKYPALNVTMPNNEKFDKLYIWGVHHPSTDSDQISLYAQASGRVTVSTKRSQQTVIPNIGSRPWVRGVSSIISIYWTIVKPGDILLINSTGNLIAPRGYFKIRSGKSSIMRSDAPIGKCNSECITPNGSIPNDKPFQNVNRITYGACPRYVKQNTLKLATGMRNVPEKQTRGIFGAIAGFIENGWEGMVDGWYGFRHQNSEGTGQAADLKSTQAAINQINGKLNRLIEKTNEKFHQIEKEFSEVEGRIQDLEKYVEDTKIDLWSYNAELLVALENQHTIDLTDSEMNKLFERTKKQLRENAEDMGNGCFKIYHKCDNACIGSIRNGTYDHDVYRDEALNNRFQIKGVELKSGYKDWILWISFAISCFLLCVVLLGFIMWACQKGNIRCNICI

SEQ ID NO: 380 - protein, 566 aa, Artificial Sequence
  derived and/or modified protein sequence (wt) from hemagglutinin__InfluenzaA__ABB02991
MKTIIALSYILCLVFAQKLPGNDNSTATLCLGHHAVPNGTLVKTITNDQIEVTNATELVQSSSTGRICDNPHQILDGENCTLIDALLGDPHCDGFQNKEWDLFVERSKAYSNCYPYDVPDYASLRSLVASSGTLEFNNESFNWTGVAQNGTSSACKRRSNKSFFSRLNWLHQLKYKYPALNVTMPNNEKFDKLYIWGVHHPSTDSDQISLYAQASGRVTVSTKRSQQTVIPNIGSRPWVRGVSSIISIYWTIVKPGDILLINSTGNLIAPRGYFKIRSGKSSIMRSDAPIGKCNSECITPNGSIPNDKPFQNVNRITYGACPRYVKQNTLKLATGMRNVPEKQTRGIFGAIAGFIENGWEGMVDGWYGFRHQNSEGTGQAADLKSTQAAINQINGKLNRLIEKTNEKFHQIEKEFSEVEGRIQDLEKYVEDTKIDLWSYNAELLVALENQHTIDLTDSEMNKLFERTKKQLRENAEDMGNGCFKIYHKCDNACIGSIRNGTYDHDVYRDEALNNRFQIKGVELKSGYKDWILWISFAISCFLLCVVLLGFIMWACQKGNIRCNICI

SEQ ID NO: 381 - protein, 566 aa, Artificial Sequence
  derived and/or modified protein sequence (wt) from hemagglutinin__InfluenzaA__ABB03002
MKTIIALSYILCLVFAQKLPGNDNSTATLCLGHHAVPNGTLVKTITNDQIEVTNATELVQSSSTGRICNSPHQILDGENCTLIDALLGDPHCDGFQNKEWDLFVERSKAYSNCYPYDVPDYASLRSLVASSGTLEFNNESFNWTGVAQNGTSSACKRRSNKSFFSRLNWLHQLKYKYPALNVTMPNNEKFDKLYIWGVHHPSTDSDQISLYAQASGRVTVSTKRSQQTVIPNIGSGPWVRGVSSRISIYWTIVKPGDILLINSTGNLIAPRGYFKIRSGKSSIMRSDAPIGKCNSECITPNGSIPNDKPFQNVNRITYGACPRYVKQNTLKLATGMRNVPEKQTRGIFGAIAGFIENGWEGMVDGWYGFRHQNSEGTGQAADLKSTQAAINQINGKLNRLIEKTNEKFHQIEKEFSEVEGRIQDLEKYVEDTKIDLWSYNAELLVALENQHTIDLTDSEMNKLFERTKKQLRENAEDMGNGCFKIYHKCDNACIGSIRNGTYDHDVYRDEALNNRFQIKGVELKSGYKDWILWISFAISCFLLCVVLLGFIMWACQKGNIRCNICI

SEQ ID NO: 382 - protein, 566 aa, Artificial Sequence
  derived and/or modified protein sequence (wt) from hemagglutinin__InfluenzaA__ABB03013
MKTIIALSYILCLVFAQKLPGNDNSTATLCLGHHAVPNGTLVKTITSDQIEVTNATELVQSSSTGRICDSPHRILDGENCTLIDALLGDPHCDGFQNKEWDLFVERSKAYSNCYPYDVPDYASLRSLVASSGTLEFNNESFNWTGVAQNGTSFACKRRSIKSFFSRLNWLHQLKYKYPALNVTMPNNDKFDKLYIWGVHHPGTDSDQTSLYAQASGRVTVSTKRSQQTVIPNIGSGPWVRGVSSRISIYWTIVKPGDILLINSTGNLIAPRGYFKIRSGKSSIMRSDAPIGKCNSECITPNGSIPNDKPFQNVNRITYGACPRYVKQNTLKLATGMRNVPEKQTRGIFGAIAGFIENGWEGMVDGWYGFRHQNSEGTGQAADLKSTQAAINQINGKLNRLIEKTNEKFHQIEKEFTEVEGRIQDLEKYVEDTKIDLWSYNAELLVALENQHTIDLTDSEMNKLFERTRKQLRENAEDMGNGCFKIYHKCDNACIGSIRNGTYDHDVYRDEALNNRFQIKGVELKSGYKDWILWISFATSCFLLCVVLLGFIMWACQKGNIRCNICI

SEQ ID NO: 383 - protein, 566 aa, Artificial Sequence
  derived and/or modified protein sequence (wt) from hemagglutinin__InfluenzaA__ABB03024
MKTIIALSYILCLVFAQKLPGNDNSTATLCLGHHAVPNGTLVKTITNDQIEVTNATELVQSSSTGRICDSPHQILDGENCTLIDALLGDPHCDGFQNKEWDLFVERSKAYSNCYPYDVPDYASLRSLVASSGTLEFNNESFNWTGVAQNGTSSACKRRSNKSFFSRLNWLHQLKYKYPALNVTMPNNEKFDKLYIWGVHHPSTDSDQISLYAQASGRVTVSTKRSQQTVIPNIGSRPWIRGVSSRISIYWTIVKPGDILLINSTGNLIAPRGYFKIRSGKSSIMRSDAPIGKCNSECITPNGSIPNDKPFQNVNRITYGACPRYVKQNTLKLATGMRNVPEKQTRGIFGAIAGFIENGWEGMVDGWYGFRHQNSEGTGQAADLKSTQAAINQINGKLNRLIEKTNEKFHQIEKEFSEVEGRIQDLEKYVEDTKIDLWSYNAELLVALENQHTIDLTDSEMNKLFERTKKQLRENAEDMGNGCFKIYHKCDNACIGSIRNGTYDHDVYRDEALNNRFQIKGVELKSGYKDWILWISFAISCFLLCVVLLGFIMWACQKGNIRCNICI

SEQ ID NO: 384 - protein, 566 aa, Artificial Sequence
  derived and/or modified protein sequence (wt) from hemagglutinin__InfluenzaA__ABB03035
MKTIIALSYILCLVFAQKLPGNDNSTATLCLGHHAVPNGTLVKTITSDQIEVTNATELVQSSSTGRICDSPHRILDGENCTLIDALLGDPHCDGFQNKEWDLFVERSKAYSNCYPYDVPDYASLRSLVASSGTLEFNNESFNWTGVAQNGTSFACKRRSIKSFFSRLNWLHQLKYKYPALNVAMPNNDKFDKLYIWGVHHPGTDSDQTSLYAQASGRVTVSTKRSQQTVIPNIGSRPWVRGVSSRISIYWTIVKPGDILLINSTGNLIAPRGYFKIRSGKSSIMRSDAPIGKCNSECITPNGSIPNDKPFQNVNRITYGACPRYVKQNTLKLATGMRNVPEKQTRGIFGAIAGFIENGWEGMVDGWYGFRHQNSEGTGQAADLKSTQAAINQINGKLNRLIEKTNEKFHQIEKEFTEVEGRIQDLEKYVEDTKIDLWSYNAELLVALENQHTIDLTDSEMNKLFERTRKQLRENAEDMGNGCFKIYHKCDNACIGSIRNGTYDHDVYRDEALNNRFQIKGVELKSGYKDWILWISFATSCFLLCVVLLGFIMWACQKGNIRCNICI

SEQ ID NO: 385 - protein, 566 aa, Artificial Sequence
  derived and/or modified protein sequence (wt) from hemagglutinin__InfluenzaA__ABB03046
MKTIIALSYILCLVFAQKLPGNDNSTATLCLGHHAVPNGTLVKTITNDQIEVTNATELVQSSSTGRICDSPHQILDGENCTLIDALLGDPHCDGFQNKEWDLFVERSKAYSNCYPYDVPDYASLRSLVASSGTLEFNNESFNWTGVAQNGTSSACKRRSNKSFFSRLNWLHQLKYKYPALNVTMPNNEKFDKLYIWGVHHPSTDSDQISLYAQASGRVTVSTKRSQQTVIPNIGSRPWVRGVSSGISIYWTIVKPGDILLINSTGNLIAPRGYFKIRSGKSSIMRSDAPIGKCNSECITPNGSIPNDKPFQNVNRITYGACPRYVKQNTLKLATGMRNVPEKQTRGIFGAIAGFIENGWEGMVDGWYGFRHQNSEGTGQAADLKSTQAAINQINGKLNRLIEKTNEKFHQIEKEFSEVEGRIQDLEKYVEDTKIDLWSYNAELLVALENQHTIDLTDSEMNKLFERTKKQLRENAEDMGNGCFKIYHKCDNACIGSIRNGTYDHDVYRDEALNNRFQIKGVELKSGYKDWILWISFAISCFLLCVALLGFIMWACQKGNIRCNICI

SEQ ID NO: 386 - protein, 566 aa, Artificial Sequence
  derived and/or modified protein sequence (wt) from hemagglutinin__InfluenzaA__ABB03057
MKTIIALSYILCLVFAQELPGNDNSTATLCLGHHAVPNGTIVKTITNDQIEVTNATELVQSSSTGGICDSPHQILDGENCTLIDALLGDPQCDGFQNKKWDLFVERSKAYSNCYPYDVPDYASLRSLVASSGTLEFNNESFNWTGVTQNGTSSACKRRSNNSFFSRLNWLTHLKFKYPALNVTMPNNEKFDKLYIWGVHHPGTDNDQTSLYAQASGRITVSTKRSQQTVIPNIGSRPRVRDIPSRISIYWTIVKPGDILLINSTGNLIAPRGYFKIRSGKSSIMRSDAPIGKCNSECITPNGSIPNDKPFQNVNRITYGACPRYVKQNTLKLATGMRNVPEKQTRGIFGAIAGFIENGWEGMVDGWYGFRHQNSEGIGQAADLKSTQAAINQINGKLNRLIGKTNEKFHQIEKEFSEVEGRIQDLEKYVEDTKIDLWSYNAELLVALENQHTIDLTDSEMNKLFERTKKQLRENAEDMGNGCFKIYHKCDNACIGSIRNGTYDHDVYRDEALNNRFQIKGVELKLGYKDWILWISFAISCFLLCVALLGFIMWACQKGNIRCNICI

SEQ ID NO: 387 - protein, 566 aa, Artificial Sequence; identical to SEQ ID NO: 286
  derived and/or modified protein sequence (wt) from hemagglutinin__InfluenzaA__ABB03068

SEQ ID NO: 388 - protein, 566 aa, Artificial Sequence; identical to SEQ ID NO: 243
  derived and/or modified protein sequence (wt) from hemagglutinin__InfluenzaA__ABB03079

SEQ ID NO: 389 - protein, 566 aa, Artificial Sequence; identical to SEQ ID NO: 243
  derived and/or modified protein sequence (wt) from hemagglutinin__InfluenzaA__ABB03090

SEQ ID NO: 390 - protein, 565 aa, Artificial Sequence
  derived and/or modified protein sequence (wt) from hemagglutinin__InfluenzaA__ABB03101
MKVKLLILLCTFTATYADTICIGYHANNSTDTVDTVLEKNVTVTHSVNLLEDSHNGKLCLLKGIAPLQLGNCSVAGWILGNPECELLISKESWSYIVETPNPENGACYPGYFADYEELREQLSSVSSFERFEIFPKKSSWPNHTVTGVSASCSHNGKSSFYRNLLWLTGKNGLYPNLSKSYANNKEKEVLILWGVHHPPNIGDQRTLYHTENAYVSVVSSHYSRRFTPEITKRPKVRDQEGRINYYWTLLEPGDTIIFETNGNLIAPWYAFALSRGFGSGIITSNAPMDECDAKCQTPQGAINSSLPFQNVHPVTIGECPKYVRSAKLRMVTGLRNIPSIQSRGLFGAIAGFIEGGWTGMVDGWYGYHHQNEQGSGYAADQKSTQNAINGITNKVNSVIEKMNTQFTAVGKEFNKLERRMENLNKKVDDGFLDIWTYNAELLVLLENERTLDFHDSNVKNLYEKVKSQLKNNAKEIGNGCFEFYHKCNNECMESVKNGTYDYPKYSEESKLNREKIDGVKLDSMGVYQILAIYSTVASSLVLLVSLGAISFWMCSNGSLQCRICI

SEQ ID NO: 391 - protein, 566 aa, Artificial Sequence
  derived and/or modified protein sequence (wt) from hemagglutinin__InfluenzaA__ABB03112
MKTIIALSYILCLVFAQKLPGNDNSTATLCLGHHAVPNGTIVKTITNDQIEVTNATELVQSSSTGGICDSPHQILDGENCTLIDALLGDPQCDGFQNKKWDLFVERSKAYSNCYPYDVPDYASLRSLVASSGTLEFNNESFNWTGVTQNGTSSACKRRSNKSFFSRLNWLTHLKYKYPALNVTMPNNEKFDKLYIWGVHHPGTDSDQISLYAQASGRITVSTKRSQQTVIPNIGSRPRVRDVSSRISIYWTIVKPGDILLINSTGNLIAPRGYFKIRSGKSSIMRSDAPIGKCNSECITPNGSIPNDKPFQNVNKITYGACPRYVKQNTLKLATGMRNVPEKQTRGIFGAIAGFIENGWEGMVDGWYGFRHQNSEGTGQAADLKSTQAAINQINGKLNRLIGKTNEKFHQIEKEFSEVEGRIQDLEKYVEDTKIDLWSYNAELLVALENQHTIDLTDSEMNKLFERTKKQLRENAEDMGNGCFKIYHKCDNTCIESIRNGTYDHDVYRDEALNNRFQIKGVELKSGYKDWILWISFAISCFLLCVALLGFIMWACQKGNIRCNICI

SEQ ID NO: 392 - protein, 565 aa, Artificial Sequence
  derived and/or modified protein sequence (wt) from hemagglutinin__InfluenzaA__ABB03123
MKVKLLVLLCTFTATYADTICIGYHANNSTDTVDTVLEKNVTVTHFVNLLEDSHNGKLCLLKGIAPLQLGNCSVAGWILGNPECELLISKESWSYIVETPNPENGTCYPGYFADYEELREQLSSVSSFERFEIFPKESSWPNHTVTGVSASCSHNGKSSFYRNLLWLTGKNGLYPNLSKSYANNKEKEVLVLWGVHHPPNIGDQRALYHTENAYVSVVSSHYSRRFTPEIAKRPKVRDQEGRINYYWTLLEPGDTIIFEANGNLIAPRYAFALSRGFGSGIITSNAPMDECDAKCQTPQGAINSSLPFQNVHPVTIGECPKYVRSAKLRMVTGLRNIPSIQSRGLFGAIAGFIEGGWTGMVDGWYGYHHQNEQGSGYAADQKSTQNAINGITNKVNSVIEKMNTQFTAVGKEFNKLERRMENLNKKVDDGFLDIWTYNAELLVLLENERTLDFHDSNVKNLYEKVKSQLKNNAKEIGNGCFEFYHKCNDECMESVKNGTYDYPKYSEESKLNREKIDGVKLESMGVYQILAIYSTVASSLVLLVSLGAISFWMCSNGSLQCRICI

SEQ ID NO: 393 - protein, 565 aa, Artificial Sequence
  derived and/or modified protein sequence (wt) from hemagglutinin__InfluenzaA__ABB03134
MKVKLLILLCTFTATYADTICIGYHANNSTDTVDTVLEKNVTVTHSVNLLEDSHNGKLCLLKGIAPLQLGNCSVAGWILGNPECELLISKESWSYIVETPNPENGTCYPGYFADYEELREQLSSVSSFERFEIFPKESSWPNHTVTGVSASCSHNGKSSFYRNLLWLTEKNGLYPTLSKSYANNKEKEVLILWGVHHPPNIGDQRTLYHTENAYVSVVSSHYSRRFTPEITKRPKVRDQEGRINYYWTLLEPGDTIIFEANGNLIAPWYAFALSRGFGSGIITSNAPMDECDAKCQTPQGAINSSLPFQNVHPVTIGECPKYVRSAKLRMVTGLRNIPSIQSRGLFGAIAGFIEGGWTGMVDGWYGYHHQNEQGSGYAADQKSTQNAINGITNKVNSVIEKMNTQFTAVGKEFNKLERRMENLNKKVDDGFLDIWTYNAELLVLLENERTLDFHDSNVKNLYEKVKSQLKNNAKEIGNGCFEFYHKCNNECMESVKNGTYDYPKYSEESKLNREKIDGVKLESMGVYQILAIYSTVASSLVLLVSLGAISFWMCSNGSLQCRICI

SEQ ID NO: 394 - protein, 565 aa, Artificial Sequence; identical to SEQ ID NO: 299
  derived and/or modified protein sequence (wt) from hemagglutinin__InfluenzaA__ABB03145

SEQ ID NO: 395 - protein, 566 aa, Artificial Sequence
  derived and/or modified protein sequence (wt) from hemagglutinin__InfluenzaA__ABB04283
MKTIIALSYIFCLVFAQNLPGNDNSTATLCLGHHAVPNGTLVKTITNDQIEVTNATELVQSSSTGRICDSPHRILDGKNCTLIDALLGDPHCDGFQNEKWDLFVERSKAFSNCYPYDVPDYASLRSLVASSGTLEFINEGFNWTGVTQSGGSYACKRGSDKSFFSRLNWLYESESKYPALNVTMPNNGNFDKLYIWGVHHPSTDKEQTNLYVRASGRVTVSTKRSQQTIIPNIGPRPWVRGLSSRISIYWTIVKPGDILLINSSGNLIAPRGYFKIRTGKSSIMRSDAPIGTCSSECITPNGSIPNDKPFQNVNKITYGACPKYVKQNTLKLATGMRNIPEKQTRGIFGAIAGFIENGWEGMVDGWYGFRHQNSEGTGQAADLKSTQAAIDQINGKLNRVIEKTNEKFHQIEKEFSEVEGRIQDLEKYVEDTKIDLWSYNAELLVALENQHTIDLTDSEMNKLFEKTRRQLRENAEDMGNGCFKIYHKCDNACIGSIRNGTYDHDVYRDEALNNRFQIKGVELKSGYKDWILWISFAISCFLLCVVLLGFIMWACQKGNIRCNICI

SEQ ID NO: 396 - protein, 566 aa, Artificial Sequence
  derived and/or modified protein sequence (wt) from hemagglutinin__InfluenzaA__ABB04294
MKTIIALSYIFCLVLGQDLPGNDNSTATLCLGHHAVPNGTLVKTITNDQIEVTNATELVQSSSTGKICNNPHRILDGINCTLIDALLGDPHCDGFQNEKWDLFVERSKAFSNCYPYDVPDYASLRSLVASSGTLEFINEGFNWTGVTQNGGSNACKRGPDSGFFSRLNWLYKSGSTYPVLNVTMPNNDNFDKLYIWGVHHPSTDQEQTNLYVQASGRVTVSTKRSQQTIIPNIGSRPWVRGLSSRISIYWTIVKPGDILVINSNGNLIAPRGYFKMRTGKSSIMRSDAPIGTCISECITPNGSIPNDKPFQNVNKITYGACPKYVKQNTLKLATGMRNVPEKQTRGIFGAIAGFIENGWEGMIDGWYGFRHQNSEGTGQAADLKSTQAAIDQINGKLNRVIEKTNEKFHQIEKEFSEVEGRIQDLEKYVEDTKIDLWSYNAELLVALENQHTIDLTDSEMNKLFEKTRRQLRENAEDMGNGCFKIYHKCDNACIGSIRNGTYDHDVYRDEALNNRFQIKGVELKSGYKDWILWISFAISCFLLCVVLLGFIMWACQKGNIRCNICI

SEQ ID NO: 397 - protein, 566 aa, Artificial Sequence
  derived and/or modified protein sequence (wt) from hemagglutinin__InfluenzaA__ABB04305
MKTIIALSYIFCLVFAQKLPENDNSTATLCLGHHAVPNGTLVKTITNDQIEVTNATELVQSSSTGRICDSPHRILDGKNCTLIDALLGDPHCDGFQNEKWDLFVERSKAFSNCYPYDVPDYASLRSLVASSGTLEFINEGFNWTGVTQSGGSYACKRGSVNSFFSRLNWLYKSESKYPVLNVTMPNNGKFDKLYIWGVHHPSTDKEQTNLYVRASGKVTVSTKRSQQTVIPNIGSRPWVRGLSSRISIYWTIVKPGDILLINSTGNLIAPRGYFKIRTGKSSIMRSDAPIGTCSSECITPNGSIPNDKPFQNVNKITYGACPRYVKQNTLKLATGMRNVPEKQTRGIFGAIAGFIENGWEGMVDGWYGFRHQNSEGTGQAADLKSTQAAIDQINGKLNRLIEKTNEKFHQIEKEFSEVEGRIQDLEKYVEDTKIDLWSYNAELLVALENQHTIDLTDSEMNKLFEKTRKQLRENAEDMGNGCFKIYHKCDNACIGSIRNGTYDHDVYRDEALNNRFQIKGVELKSGYKDWILWISFAISCFLLCVVLLGFIMWACQKGNIRCNICI

SEQ ID NO: 398 - protein, 566 aa, Artificial Sequence
  derived and/or modified protein sequence (wt) from hemagglutinin__InfluenzaA__ABB04316
MKTIIALSYIFCLVFAQKLPGNDNSTATLCLGHHAVPNGTLVKTITNDQIEVTNATELVQSSSTGRICDSPHRILDGKNCTLIDALLGDPHCDGFQNEKWDLFVERSKAYSNCYPYDVPDYASLRSLVASSGTLEFINEDFNWTGVTQSGGSYACKRGSVKSFFSRLNWLHESEYKYPALNVTMPNNGKFDKLYIWGVHHPSTDREQTNLYVRASGRVTVSTKRSQQTVIPNIGSRPWVRGLSSRISIYWTIVKPGDILLINSTGNLIAPRGYFKIRTGKSSIMRSDAPIGTCSSECITPNGSIPNDKPFQNVNKITYGACPRYVKQNTLKLATGMRNVPEKQTRGIFGAIAGFIENGWEGMVDGWYGFRHQNSEGTGQAADLKSTQAAIDQINGKLNRLIEKTNEKFHQIEKEFSEVEGRIQDLEKYVEDTKIDLWSYNAELLVALENQHTIDLTDSEMNKLFEKTRKQLRENAEDMGNGCFKIYHKCDNACIGSIRNGTYDHDVYRDEALNNRFQIKGVELKSGYKNWILWISFAISCFLLCVVLLGFIMWACQKGNIRCNICI

SEQ ID NO: 399 - protein, 566 aa, Artificial Sequence
  derived and/or modified protein sequence (wt) from hemagglutinin__InfluenzaA__ABB04327
MKTIIALSYIFCLVFAQKLPGNDNSTATLCLGHHAVPNGTLVKTITNDQIEVTNATELVQSSSTGRICDSPHRILDGKNCTLIDALLGDPHCDGFQNEKWDLFVERSKAFSNCYPYDVPDYASLRSLVASSGTLEFINEGFNWTGVTQSGGSYACKRGSVNSFFSRLNWLYKSEYKYPALNVTMPNNGKFDKLYIWGVHHPSTEKEQTNLYVRASGRVTVSTKRSQQTVIPNIGSIPWVRGLSSRISIYWTIVKPGDILLINSTGNLIAPRGYFKIRTGKSSIMRSDAPIGTCSSECITPNGSIPNDKPFQNVNKITYGACPRYVKQNTLKLATGMRNVPEKQTRGIFGAIAGFIENGWEGMVDGWYGFRHQNSEGTGQAADLKSTQAAIDQINGKLNRLIEKTNEKFHQIEKEFSEVEGRIQDLEKYVEDTKIDLWSYNAELLVALENQHTIDLTDSEMNKLFEKTRKQLRENAEDMGNGCFKIYHKCDNACIGSIRNGTYDHDVYRDEALNNRFQIKGVELKSGYKDWILWISFAISCFLLCVVLLGFIMWACQKGNIRCNICI

SEQ ID NO: 400 - protein, 566 aa, Artificial Sequence
  derived and/or modified protein sequence (wt) from hemagglutinin__InfluenzaA__ABB04338
MKTIIALSYIFCLVLGQDFPGNDNSTATLCLGHHAVPNGTLVKTITNDQIEVTNATELVQSSSTGKICNNPHRILDGIDCTLIDALLGDPHCDGFQNETWDLFVERSKAFSNCYPYDVPDYASLRSLVASSGTLEFINEGFTWTGVTQNGGSNACKRGPDSGFFSRLNWLYKSGSTYPVLNVTMPNNDNFDKLYIWGVHHPSTDQEQTSLYVQASGRVTVSTKRSQQTIIPNIGSRPWVRGLSSRISIYWTIVKPGDILVLNSNGNLIAPRGYFKMRTGKSSIMRSDAPIGTCISECITPNGSIPNDKPFQNVNKITYGACPKYVKQNTLKLATGMRNVPEKQTRGLFGAIAGFIENGWEGMIDGWYGFRHQNSEGTGQAADLKSTQAAIDQINGKLNRVIEKTNEKFHQIEKEFSEVEGRIQDLEKYVEDTKIDLWSYNAELLVALENQHTIDLTDSEMNKLFEKTRRQLRENAEDMGNGCFKIYHKCDNACIGSIRNGTYDHDVYRDEALNNRFQIKGVELKSGYKDWILWISFAISCFLLCVVLLGFIMWACQKGNIRCNICI

SEQ ID NO: 401 - protein, 566 aa, Artificial Sequence
  derived and/or modified protein sequence (wt) from hemagglutinin__InfluenzaA__ABB04349
MKTIIALSYIFCLVFAQKLPGNDNSTATLCLGHHAVPNGTLVKTITNDQIEVTNATELVQSSSTGRICDSPHRILDGKNCTLIDALLGDPHCDGFQNEKWDLFVERSKAFSNCYPYDVPDYASLRSLVASSGTLEFINEGFNWTGVTQSGGSYACKRGSVNSFFSRLNWLYKSESKYPVLNVTMPNNGKFDKLYIWGVHHPSTDKEQTNLYVRASGKVTVSTKRSQQTVIPNIGSRPWVRGLSSRISIYWTIVKPGDILLINSTGNLIAPRGYFKIRTGKSSIMRSDAPIGTCNSECITPNGSIPNDKPFQNVNKITYGACPRYVKQNTLKLATGMRNVPEKQTRGIFGAIAGFIENGWEGMVDGWYGFRHQNSEGTGQAADLKSTQAAIDQINGKLNRLIEKTNEKFHQIEKEFSEVEGRIQDLEKYVEDTKIDLWSYNAELLVALENQHTIDLTDSEMNKLFEKTRKQLRENAEDMGNGCFKIYHKCDNACIGSIRNGTYDHDVYRDEALNNRFQIKGVELKSGYKDWILWISFAISCFLLCVVLLGFIMWACQKGNIRCNICI

SEQ ID NO: 402 - protein, 566 aa, Artificial Sequence
  derived and/or modified protein sequence (wt) from hemagglutinin__InfluenzaA__ABB04360
MKTIIALSYIFCLVFAQKLPGNDNSTATLCLGHHAVPNGTLVKTITNDQIEVTNATELVQSSSTGRICDSPHRILDGKNCTLIDALLGDPHCDGFQNEKWDLFVERSKAYSNCYPYDVPDYASLRSLVASSGTLEFINEDFNWTGVTQSGGSYACKRGSVNSFFSRLNWLHKSEYKYPALNVTMPNNGKFDKLYIWGVHHPSTDREQTNLYVRASGRVTVSTKRSQQTVIPNIGSRPWVRGLSSRISIYWTIVKPGDILLINSTGNLIAPRGYFKIRTGKSSIMRSDAPIGTCSSECITPNGSIPNDKPFQNVNKITYGACPRYVKQNTLKLATGMRNVPEKQTRGIFGAIAGFIENGWEGMVDGWYGFRHQNSEGTGQAADLKSTQAAIDQINGKLNRLIEKTNEKFHQIEKEFSEVEGRIQDLEKYVEDTKIDLWSYNAELLVALENQHTIDLTDSEMNKLFEKTRKQLRENAEDMGNGCFKIYHKCDNACIGSIRNGTYDHDVYRDEALNNRFQIKGVELKSGYKDWILWISFAISCFLLCVVLLGFIMWACQKGNIRCNICI

SEQ ID NO: 403 - protein, 566 aa, Artificial Sequence
  derived and/or modified protein sequence (wt) from hemagglutinin__InfluenzaA__ABB04371
MKTIIALSYIFYLALGQDLPGNDNSKATLCLGHHAVPNGTLVKTITDDQTEVTNATELVQSSSTGKICNNPHRILDGMDCTLIDALLGDPHCDVFQNETWDLFVERSKAFSNCYPYDVPDYASLRSLVASSGTMEFITEGFTWTEVTQNGGSNACKRGPDSGFFSRLNWLTKSGRTYPVLNVTMPNNDNFDKLYIWGVHHPSTDQEQTNLYVQTSGRVTVSTRRSQQTIIPNIGSRPWVRGLSSRISIYWTIVKPGDVLVINSNGNLIAPRGYFKMRTGKSSIMRSDAPIDTCISECITPNGSIPNDKPFQNVNKITYGACPKYVKQNTLKLATGMRNVPEKQTRGLFGAIAGFIENGWEGMIDGWYGFRHQNSEGTGQAADLKSTQAAIDQINGKLNRIIEKTNEKFHQIEKEFSEVEGRIQDLEKYVEDTKIDLWSYNAELLVALENQHTIDLTDSEMNKLFEKTRRQLRENAEDMGNGCFKIYHKCDNACIESIRNGTYDHDVYRDEALNNRFQIKGVELKSGYKDWILWISFAISCFLLCVVLLGFIMWACQRGNIRCNICI

SEQ ID NO: 404 - protein, 566 aa, Artificial Sequence
  derived and/or modified protein sequence (wt) from hemagglutinin__InfluenzaA__ABB04906
MKTIIALSYILCLVFAQKLPGNDNSTATLCLGHHAVPNGTLVKTITNDQIEVTNATELVQSSSTGRICDSPHRILDGKNCTLIDALLGDPHCDGFQNKEWDLFVERSKAYSNCYPYDVPDYASLRSLVASSGTLEFINEDFNWTGVAQNGDSYACKRGSVKSFFSRLNWLHKSEYKYPALNVTMPNNDKFDKLYIWGVHHPSTDREQTSLYIRASGKVTVSTKRSQQTVIPNIGSRPWVRGLSSRISIYWTIVKPGDILLINSTGNLIAPRGYFKIRTGKSSIMRSDAPIGTCSSECITPNGSIPNDKPFQNVNRITYGACPRYVKQNTLKLATGMRNVPEKQTRGIFGAIAGFIENGWEGMVDGWYGFRHQNSEGTGQAADLKSTQAAIDQINGKLNRLIEKTNEKFHQIEKEFSEVEGRIQDLEKYVEDTKIDLWSYNAELLVALENQHTIDLTDSEMNKLFEKTRKQLRENAEDMGNGCFKIYHKCDNACIGSIRNGTYDHDVYRDEALNNRFQIKGVELKSGYKDWILWISFAISCFLLCVVLLGFIMWACQKGNIRCNICI

SEQ ID NO: 405 - protein, 566 aa, Artificial Sequence
  derived and/or modified protein sequence (wt) from hemagglutinin__InfluenzaA__ABB04917
MKTIIALSYIFCLVFAQKLPGNDNSTATLCLGHHAVPNGTLVKTITNDQIEVTNATELVQISSTGRICDSPHRILDGKNCTLIDALLGDPHCDGFQNEKWDLFVERSKAFSNCYPYDVPDYASLRSLVASSGTLEFINEGFNWTGVTQSGGSYTCKRGSVNSFFSRLNWLYESESKYPVLNVTMPNNGKFDKLYIWGVHHPSTDKEQTNLYVRASGRVTVSTKRSQQTVIPNIGSRPWVRGLSSRISIYWTIVKPGDILLINSTGNLIAPRGYFKIRTGKSSIMRSDAPIGTCSSECITPNGSIPNDKPFQNVNKITYGACPRYVKQNTLKLATGMRNVPEKQTRGIFGAIAGFIENGWEGMVDGWYGFRHQNSEGTGQAADLKSTQAAIDQINGKLNRLIEKTNEKFHQIEKEFSEVEGRIQDLEKYVEDTKIDLWSYNAELLVALENQHTIDLTDSEMNKLFEKTRKQLRENAEDMGNGCFKIYHKCDNACIGSIRNGTYDHDVYRDEALNNRFQIKGVELKSGYKDWILWISFAISCFLLCVVLLGFIMWACQKGNIRCNICI

SEQ ID NO: 406 - protein, 566 aa, Artificial Sequence
  derived and/or modified protein sequence (wt) from hemagglutinin__InfluenzaA__ABB04928
MKTIIALSYIFCLVFAQDLPGNDNSTATLCLGHHAVPNGTLVKTITNDQIEVTNATELVQSSSTGKICNNPHRILDGINCTLIDALLGDPHCDGFQNEKWDLFVERSKAFSNCYPYDVPDYASLRSLVASSGTLEFINEGFNWIGVTQNGGSNACKRGTDSGFFSRLNWLYKSGSTYPVQNVTMPNNDNSDKLYIWGVHHPSTDKEQTDLYVQASGKVTVSTKRSQQTIIPNVGSRPWVRGLSSRISIYWTIVKPGDILVINSNGNLIAPRGYFKMRTGKSSIMRSDAPIGTCSSECITPNGSIPNDKPFQNVNKITYGACPKYVKQNTLKLATGMRNVPEKQTRGIFGAIAGFIENGWEGMIDGWYGFRHQNSEGTGQAADLKSTQAAIDQINGKLNRVIEKTNEKFHQIEKEFSEVEGRIQDLEKYVEDTKIDLWSYNAELLVALENQHTIDLTDSEMNKLFEKTRRQLRENAEDMGNGCFKIYHKCDNACIGSIRNGTYDHDVYRDEALNNRFQIKGVELKSGYKDWILWISFAISCFLLCVVLLGFIMWACQKGNIRCNICI

SEQ ID NO: 407 - protein, 566 aa, Artificial Sequence
  derived and/or modified protein sequence (wt) from hemagglutinin__InfluenzaA__ABB04939
MKTIIALSYIFCLVFAQKLPGNDNSTATLCLGHHAVPNGTLVKTITNDQIEVTNATELVQSSSTGRICDSPHRILDGKNCTLIDALLGDPHCDGFQNEKWDLFVERSKAFSNCYPYDVPDYASLRSLVASSGTLEFINEGFNWTGVTQSGGSYTCKRGSVNSFFSRLNWLYESESKYPVLNVTMPNNGKFDKLYIWGVHHPSTDKEQTNLYVRASGRVTVSTKRSQQTVIPNIGSRPWVRGLSSRISIYWTIVKPGDILLINSIGNLIAPRGYFKIRTGKSSIMRSDAPIGICSSECITPNGSIPNDKPFQNVNKITYGACPRYVKQNTLKLATGMRNVPEKQTRGIFGAIAGFIENGWEGMVDGWYGFRHQNSEGTGQAADLKSTQAAVDQINGKLNRLIEKTNEKFHQIEKEFSEVEGRIQDLEKYVEDTKIDLWSYNAELLVALENQHTIDLTDSEMNKLFEKTRKQLRENAEDMGNGCFKIYHKCDNACIGSIRNGTYDHDVYRDEALNNRFQIKGVELKSGYKDWILWISFAISCFLLCVVLLGFIMWACQKGNIRCNICI

SEQ ID NO: 408 - protein, 566 aa, Artificial Sequence
  derived and/or modified protein sequence (wt) from hemagglutinin__InfluenzaA__ABB04950
MKTIIALSYIFCLVFAQKLPGNDNSTATLCLGHHAVPNGTLVKTITNDQIEVTNATELVQSSSTGRICDSPHRILDGKNCTLIDALLGDPHCDGFQNEKWDLFVERSKAFSNCYPYDVPDYASLRSLVASSGTLEFINEGFNWTGVTQSGGSYTCKRGSVNSFFSRLNWLYESESKYPVLNVTMPNNGKFDKLYIWGVHHPSTDKEQTNLYVRASGKVTVSTKRSQQTVIPNIGSRPWVRGLSSRISIYWTIVKPGDILLINSTGNLIAPRGYFKIRTGKSSIMRSDAPIGTCSSECITPNGSIPNDKPFQNVNKITYGACPRYVKQNTLKLATGMRNVPEKQTRGIFGAIAGFIENGWEGMVDGWYGFRHQNSEGTGQAADLKSTQAAIDQINGKLNRLIEKTNEKFHQIEKEFSEVEGRIQDLEKYVEDTKIDLWSYNAELLVALENQHTIDLTDSEMNKLFEKTRKQLRENAEDMGNGCFKIYHKCDNACIGSIRNGTYDHDVYRDEALNNRFQIKGVELKSGYKDWILWISFAISCFLLCVVLLGFIMWACQKGNIRCNICI

SEQ ID NO: 409 - protein, 566 aa, Artificial Sequence
  derived and/or modified protein sequence (wt) from hemagglutinin__InfluenzaA__ABB04983
MKTIIALSYILCLVFAQKLPGNDNSTATLCLGHHAVPNGTLVKTITNDQIEVTNATELVQSSSTDRICDSPHQILDGENCTLIDALLGDPHCDGFQNKEWDLFVERSKAYSNCYPYDVPDYVSLRSLVASSGTLEFNNESFNWTGVAQNGTSSACKRRSDKSFFSRLNWLHQLKYKYPALNVTMPNNEKFDKLYIWGVHHPGTDSDQISLYAQASGRVTVSTKRSQQTVIPNIGSRPWVRGVSSRISIYWTIVKPGDILLINSTGNLIAPRGYFKIRSGKSSIMRSDAPIGKCNSECITPNGSIPNDKPFQNVNRITYGPCPRYVKQNTLKLATGMRNVPEKQTRGIFGAIAGFIENGWEGMMDGWYGFRHQNSEGTGQAADLKSTQAAINQINGKLNRLIEKTNEKFHQIEKEFSEVEGRIQDLEKYVEDTKIDLWSYNAELLVALENQHTIDLTDSEMNKLFERTKKQLRENAEDMGNGCFKIYHKCDNACIGSIRNGTYDHDVYRDEALNNRFQIKGVELKSGYKDWILWISFAISCFLLCIVLLGFIMWACQKGNIRCNICI

SEQ ID NO: 410 - protein, 566 aa, Artificial Sequence; identical to SEQ ID NO: 172
  derived and/or modified protein sequence (wt) from hemagglutinin__InfluenzaA__ABB04994

SEQ ID NO: 411 - protein, 566 aa, Artificial Sequence
  derived and/or modified protein sequence (wt) from hemagglutinin__InfluenzaA__ABB05005
MKTIIALSHILCLVFAQKLPVNDNSTATLCLGHHAVPNGTLVKTITNDHIEVTNATELVQSSSTGRICDSPHQILDGENCTLIDALLGDPHCDGFQNKEWDLFVERSTAYSNCYPYDVPDYASLRSLVASSGTLEFNNESFNWTGVAQNGTSSACKRRSIKSFFSRLNWLHQLKYKYPALNVTMPNNEKFDKLYIWGVHHPSTDSDQISLYAQASGRVTVSTKRSQQTVIPDIGSRPWVRGVSSRISIYWTIVKPGDILLINSTGNLIAPRGYFKIRSGKSSIMRSNAPIGKCNSECITPNGSVPNDKPFQNVNRITYGACPRYVKQNTLKLATGMRNVPEKQTRGIFGAIAGFIENGWEGMVDGWYGFRHQNSEGTGQAADLKSTQAAINQINGKLNRLIEKTNEKFHQIEKEFSEVEGRIQDLEKYVEDTKIDLWSYNAELLVALENQHTIDLTDSEMNKLFERTRKQLRENAEDMGNGCFKIYHKCDNACIGSIRNGTYDHDVYRDEALNNRFQIKGVELKSGYKDWILWISFAISCFLLCVVLLGFIMWACQKGNIRCNICI

SEQ ID NO: 412 - protein, 566 aa, Artificial Sequence
  derived and/or modified protein sequence (wt) from hemagglutinin__InfluenzaA__ABB05183
MKTIIALSYILCLVFAQKLPVNDNSTATLCLGHHAVPNGTLVKTITNEHIEVTNATELVQSSSTGRICDSPHQILDGENCTLIDALLGDPHCDGFQNKEWDLFVERSTAYSNCYPYDVPDYASLRSLVASSGTLEFNNESFNWTGVAQNGTSSACKRRSIKSFFSRLNWLHQLKYKYPALNVTMPNNEKFDKLYIWGVHHPSTDSDQISLYAQASGRVTVSTKRSQQTVIPNIGSRPWVRGVSSRISIYWTIVKPGDILLINSTGNLIAPRGYFKIRSGKSSIMRSNAPIGKCNSECITPNGSIPNDKPFQNVNRITYGACPRYVKQNTLKLATGMRNVPEKQTRGIFGAIAGFIENGWEGMVDGWYGFRHQNSEGTGQAADLKSTQAAINQINGKLNRLIEKTNEKFHQIEKEFSEVEGRIQDLEKYVEDTKIDLWSYNAELLVALENQHTIDLTDSEMNKLFERTRKQLRENAEDMGNGCFKVYHKCDNACIGSIRNGTYDHDVYRDEALNNRFQIKGVELKSGYKDWILWISFAISCFLLCVVLLGFIMWACQKGNIRCNICI

SEQ ID NO: 413 - protein, 566 aa, Artificial Sequence
  derived and/or modified protein sequence (wt) from hemagglutinin__InfluenzaA__ABB05194
MKTIIALSYILCLVFAQKLPGNDNSTATLCLGHHAVPNGTLVKTITNDQIEVTNATELVQSSSTGRICDSPHQILDGENCTLIDALLGDPHCDGFQNKEWDLFVERSKAYSNCYPYDVPDYASLRSLVASSGTLEFNNESFNWTGVAQNGTSSACKRRSNKSFFSRLNWLHQLKYKYPALNVIMPNNEKFDKLYIWGVHHPSTDSDQISLYAQASGRVTVSTKRSQQTVIPNIGSRPWVRGVSSRISIYWTIVKPGDILLINSTGNLIAPRGYFKIRSGKSSVMRSDASIGKCNSECITPNGSIPNDKPFQNVNRITYGACPRYVKQNTLKLATGMRNVPEKQTRGIFGAIAGFIENGWEGMVDGWYGFRHQNSEGTGQAADLKSTQAAINQINGKLNRLIEKTNEKFHQIEKEFSEVEGRIQNLEKYVEDTKIDLWSYNAELLVALENQHTIDLTDSEMNKLFERTKKQLRENAEDMGNGCFKIYHKCDNACIGSIRNGTYDHDVYRDEALNNRFQIKGVELKSGYKDWILWISFAISCFLLCVVLLGFIMWACQKGNIRCNICI

SEQ ID NO: 414 - protein, 566 aa, Artificial Sequence
  derived and/or modified protein sequence (wt) from hemagglutinin__InfluenzaA__ABB05205
MKTIIALSYILCLVFAQKLPGNDNSTATLCLGHHAVPNGTLVKTITNDQIEVTNATELVQSSSTGRICDSPHQILDGENCTLIDALLGDPHCDGFQNKEWDLFVERSNAYSNCYPYDVPDYASLRSLVASSGTLEFNSESFNWTGVAQNGTSSACKRRSNKSFFSRLNWLHQLKYKYPALNVTMPNNEKFDKLYIWGVHHPGTDSDQISLYAQASGRVTVSTKRSQQTVIPNIGSRPWVRGVSSRISIYWTIVKPGDILLINSTGNLIAPRGYFKIRSGKSSIMRSDAPIGKCNSECITPNGSIPNNKPFQNVNRITYGACPRYVKQNTLKLATGMRNVPEKQTRGIFGAIAGFIENGWEGMVDGWYGFRHQNSEGTGQAADLKSTQAAINQINGKLNRLIEKTNEKFHQIEKEFSEVEGRIQDLEKYVEDTKIDLWSYNAELLVALENQHTIDLTDSEMNKLFERTKKQLRENAEDMGNGCFKIYHKCDNACIGSIRNGTYDHDVYRDEALNNRFQIKGVELKSGYKDWILWISFAISCFLLCVVLLGFIMWACQKGNIRCNICI

SEQ ID NO: 415 - protein, 566 aa, Artificial Sequence; identical to SEQ ID NO: 72
  derived and/or modified protein sequence (wt) from hemagglutinin__InfluenzaA__ABB05216

SEQ ID NO: 416 - protein, 566 aa, Artificial Sequence
  derived and/or modified protein sequence (wt) from hemagglutinin__InfluenzaA__ABB46392
MKTIIALSYIFCLAFAQDLPGNDNSTATLCLGHHAVPNGTLVKTITNDQIEVTNATELVQSSSTGKICDNPHRILDGINCTLIDALLGDPHCDGFQNEKWDLFVERSKAFSNCYPYDVPDYASLRSLVASSGTLEFINEGFNWTGVTQNGGSSACKRGPDNGFFSRLNWLYKSGSTYPVQNVTMPNNDNSDKLYIWGVHHPNTDKEQTDLYVQASGKVTVSTKRSQQTIIPNVGSRPWVRGLSSRVSIYWTIVKPGDILVINSNGNLIAPRGYFKMRTGKSSIMRSDAPIGTCSSECITPNGSIPNDKPFQNVNKITYGACPKYVKQNTLKLATGMRNVPEKQTRGIFGAIAGFIENGWEGMIDGWYGFRHQNSEGTGQAADLKSTQTAIDQINGKLNRVIEKTNEKFHQIEKEFSEVEGRIQDLEKYVEDTKIDLWSYNAELLVALENQHTIDLTDSEMNKLFEKTRRQLRENAEDMGNGCFKIYHKCDNACIGSIRNGTYDHDVYRDEALNNRFQIKGVELKSGYKDWILWISFAISCFLLCVVLLGFIMWACQKGNIRCNICI

SEQ ID NO: 417 - protein, 566 aa, Artificial Sequence
  derived and/or modified protein sequence (wt) from hemagglutinin__InfluenzaA__ABB46414
MKTIIALSYILCLVFAQKLPGNDNSTATLCLGHHAVPNGTLVKTITNDQIEVTNATELVQSSSTGRICDSPHRILDGENCTLIDALLGDPHCDGFQNKEWDLFVERSKAYSNCYPYDVPDYASLRSLVASSGTLEFNNESFNWTGVAQNGTSSACKRRSIKSFFSRLNWLHQLKYKYPALNVTMPNNDKFDKLYIWGVHHPSTDSDQTSLYAQASGRVTVSTKRSQQTVIPNIGSRPWVRGVSSRISIYWTIVKPGDILLINSTGNLIAPRGYFKIRSGKSSIMRSDAPIGKCNSECITPNGSIPNDKPFQNVNRITYGACPRYVKQNTLKLATGMRNVPEKQTRGIFGAIAGFIENGWEGMVDGWYGFRHQNSEGTGQAADLKSTQAAINQINGKLNRLIEKTNEKFHQIEKEFSEVEGRIQDLEKYVEDTKIDLWSYNAELLVALENQHTIDLTDSEMNKLFERTRKQLRENAEDMGNGCFKIYHKCDNACIGSIRNGTYDHDVYRDEALNNRFQIKGVELKSGYKDWILWISFAISCFLFCVVLLGFIMWACQKGNIRCNICI

SEQ ID NO: 418 - protein, 566 aa, Artificial Sequence
  derived and/or modified protein sequence (wt) from hemagglutinin__InfluenzaA__ABB46425
MKTIIALSYILCLVFAQKLPGNDNSTATLCLGHHAVPNGTLVKTITSDQIEVTNATELVQSSSTGKICDSPHRILDGENCTLIDALLGDPHCDGFQNKEWDLFVERSKAYSNCYPYDVPDYASLRSLVASSGTLEFNNESFNWTGVAQNGTSFACKRRSIKSFFSRLNWLHQLKYKYPALNVTMPNNDKFDKLYIWGVHHPSTDSDQTSLYAQASGRVTVSTKRSQQTVIPNIGSRPWVRGVSSRISIYWTIVKPGDILLINSTGNLIAPRGYFKIRSGKSSIMRSDAPIGKCNSECITPNGSIPNDKPFQNVNRITYGACPRYVKQNTLKLATGMRNVPEKQTRGIFGAIAGFIENGWEGMVDGWYGFRHQNSEGTGQAADLKSTQAAINQINGKLNRLIEKTNEKFHQIEKEFSEVEGRIQDLEKYVEDTKIDLWSYNAELLVALENQHTIDLTDSEMNKLFERTRKQLRENAEDMGNGCFKIYHKCDNACIGSIRNGTYDHDVYRDEALNNRFQIKGVELKSGYKDWILWISFAISCFLLCVVLLGFIMWACQKGNIRCNICI

SEQ ID NO: 419 - protein, 566 aa, Artificial Sequence
  derived and/or modified protein sequence (wt) from hemagglutinin__InfluenzaA__ABB46436
MKTIIALSYILCLVFAQKLPGNDNSTATLCLGHHAVPNGTIVKTITNDQIEVTNATELVQSSSTGGICDSPHQILDGENCTLIDALLGDPQCDGFQNKKWDLFVERSKAYSNCYPYDVPDYASLRSLVASSGTLEFNNESFNWTGVTQNGTSSACKRRSNNSFFSRLNWLTHLKFKYPALNVTMPNNEKYDKLYIWGVHHPGTDNDQISLYAQASGRITVSTKRSQQTVIPNIGSRPRVRDIPSRISIYWTIVKPGDILLINSTGNLIAPRGYFKIRSGKSSIMRSDAPIGKCNSECITPNGSIPNDKPFQNVNRITYGACPRYVKQNTLKLATGMRNVPEKQTRGIFGAIAGFIENGWEGMVDGWYGFRHQNSEGIGQAADLKSTQAAINQINGKLNRLIGKTNEKFHQIEKEFSEVEGRIQDLEKYVEDTKIDLWSYNAELLVALENQHTIDLTDSEMNKLFERTKKQLRENAEDMGNGCFKIYHKCDNACIGSIRNGTYDHDVYRDEALNNRFQIKGVELKSGYKDWILWISFAISCFLLCVALLGFIMWACQKGNIRCNICI

SEQ ID NO: 420 - protein, 566 aa, Artificial Sequence; identical to SEQ ID NO: 353
  derived and/or modified protein sequence (wt) from hemagglutinin__InfluenzaA__ABB46447

SEQ ID NO: 421 - protein, 566 aa, Artificial Sequence
  derived and/or modified protein sequence (wt) from hemagglutinin__InfluenzaA__ABB46458
MKTIIALSYILCLVFAQKLPGNDNSTATLCLGHHAVPNGTIVKTITNDQIEVTNATELVQSSSTGGICDSPHQILDGENCTLIDALLGDPQCDGFQNKKWDLFVERSKAYSNCYPYDVPDYASLRSLVASSGTLEFNNESFNWTGVTQNGTSSACKRRSNNSFFSRLNWLTHLKFKYPALNVTMPNNEKFDKLYIWGVHHPGTDNDQISLYAQASGRITVSTKRNQQTVIPNIGSRPRVRDIPSRISIYWTIVKPGDILLINSTGNLIAPRGYFKIRSGKSSIMRSDAPIGKCKSECITPNGSIPNDKPFQNVNRITYGACPRYVKQNTLKLATGMRNVPEKQTRGIFGAIAGFIENGWEGMVDGWYGFRHQNSEGIGQAADLKSTQAAINQINGKLNRLIGKTNEKFHQIEKEFSEVEGRIQDLEKYVEDTKIDLWSYNAELLVALENQHTIDLTDSEMNKLFERTKKQLRENAEDMGNGCFKIYHKCDNACIGSIRNGTYDHDVYRDEALNNRFQIKGVELKSGYKDWILWISFAISCFLLCVALLGFIMWGCQKGNIRCNICI

SEQ ID NO: 422 - protein, 566 aa, Artificial Sequence
  derived and/or modified protein sequence (wt) from hemagglutinin__InfluenzaA__ABB51961
MKTIIALSYILCLVFAQKLPGNDNSTATLCLGHHAVPNGTIVKTITNDQIEVTNATELVQSFSTGGICDSPHQILDGENCTLIDALLGDPQCDGFQNKKWDLFVERSKAYSNCYPYDVPDYACVRSLVASSGTLEFNNESFNWAGVTQNGTSSACKRRSNKSFFSRLNWLTHLKYKYPALNVTMPNNEKFDKLYIWGVHHPGTDSDQISLYAQASGRITVSTQRCKQLVIPNIGSRPRVRDVSSRISIYWTIVNPGDILLINSTGNLIAPRGYFKIRSGKSSIMRSDAPIGKCNSECITPNGSIPNDKPFQNVNRITYGACPRYVKQNTLKLATGMRNVPEKQTRGIFGAIAGFIENGWEGMVDGWYGFRHQNSEGTGQAADLKSTQAAINQINGKLNRLIGKTNEKFHQIEKEFSEVEGRIQDLEKYVEDTKIDLWSYNAELLVALENQHTIDLTDSEMNKLFERTKKQLRENAEDMGNGCFKIYHKCDNACIESIRNGTYDHDVYRDEALNNRFQIKGVELKSGYKDWILWISFAISCFLLCVALLGFIMWACQKGNIRCNICI

SEQ ID NO: 423 - protein, 565 aa, Artificial Sequence
  derived and/or modified protein sequence (wt) from hemagglutinin__InfluenzaA__ABB51962
MKAKLLVLLCTFTATYADTICIGYHANNSTDTVDTVLEKNVTVTHSVNLLEDSHNGKLCLLKGIAPLQLGNCSVAGWILGNPECELLISKESWSYIVETPNPENGTCYPGYFADYEELREQLSSVSSFERFEIFPKGSSWPNHTVTGVSASCSHNGKSSFYRNLLWLTGKNGLYPNLSMSYVNNKEKEVLVLWGVHHPPNIGNQRALYHTENAYVSVVSSHYSRRFTPEIAKRPKVRDQEGRINYYWTLLEPGDTIIFEANGNLIAPWYAFAMSRGFGSGISTSNAPMGECDAKFQTPQGGINISLPFQNVHPVTIGECPNYVRSAKLRMVTGLRNIPSIQSRGLFGAIAGFIEGGWTGMVDGWYGYHHQNEQGSGYAADQKSTQNAINGITNKVNSVIEKMNTQFTAVGKEFNKLERRMENLNKKVDDGFLDIWTYNAELLVLLENERTLDFHDSNVKNLYEKVKSQLKNNAKEIGNGCSEFYHKCNNECMESVKNGTYDYPKYSEESKLNREKIDGVKLESMGVYQILAIYSTVASSLVLLVSLGAISFWMCSNGSLQCRICI

SEQ ID NO: 424 - protein, 566 aa, Artificial Sequence
  derived and/or modified protein sequence (wt) from hemagglutinin__InfluenzaA__ABB51963
MKTIIALSYILCLVFAQKLPGNDNSTATLCLGHHAVPNGTIVKTITNDRIEVTNATELVQSSSTGGICDSPHQILDGENCTLIDALLGDPQCDGFQNKKWDLFVERSKAYSNCYPYDVPDYASLRSLVASSGTLEFNNESFNWTGVTQNGTSSACKRRSNNSFFSRLNWLTHLKFKYPALNVTMPNNEKFDKLYIWGVHHPGTDNDQISLYAQASGRITVSTKRSQQTVIPNIGSRPRVRHIPSRISIYWTIVNPGDILLINSTGNLIAPRGYFKIRSGKSSIMRSDAPIGKCNSECITPNGSIPNDKPFQNVNRITYGACPRYVKQNTLKLATGMRNVPEKQNRGIFGAIAGFIENGWEGMVDGWYGFRHQNSEGIGQAADLKSTQAAINQINEKLNRLIGKTNEKFHQIEKEFSEVEGRIQDLEKYVEDTKIDLWSYNAELLVALENQHTIDLTDSEMNKLFERTKKQLRENAEDMGNGCFKVYHKCDNACIGSIRNGTYDHNVYRDEALNNRFQIKGVELKSGYKDWILWISFAISCFLLCVALLGFIMWACQKGNIRCNICI

SEQ ID NO: 425 - protein, 566 aa, Artificial Sequence; identical to SEQ ID NO: 282
  derived and/or modified protein sequence (wt) from hemagglutinin__InfluenzaA__ABB51964

SEQ ID NO: 426 - protein, 565 aa, Artificial Sequence
  derived and/or modified protein sequence (wt) from hemagglutinin__InfluenzaA__ABB53603
MKVKLLILLCTFTATYADTICIGYHANNSTDTVDTVLEKNVTVTHSVNLLEDSHNGKLCLLKGIAPLQLGNCSVAGWILGNPECELLISKESWSYIVETPNPENGACYPGYFADYEELREQLSSVSSFERFEIFPKESSWPNHTVTGVSASCSHNGKSSFYRNLLWLTGKNGLYPNLSKSYANNKKKEVLILWGVHHPPNIGNQRTLYYTENAYVSVVSSHYSRRFTPEITKRPKVRDQEGRINYYWTLLEPGDTIIFEANGNLIAPWYAFALSRGFGSGIITSNAPMDECDAKCQTPQGAINSSLPFQNVHPVTIGECPKYVRSAKLRMVTGLRNIPSIQSRGLFGAIAGFIEGGWTGMVDGWYGYHHQNEQGSGYAADQKSTQNAINGITNKVNSVIEKMNTQFTAVGKEFNKLERRMENLNKKVDDGFLDIWTYNAELLVLLENERTLDFHDSNVKNLYEKVKSQLKNNAKEIGNGCFEFYHKCNNECMESVKNGTYDYPKYSEESKLNREKIDGVKLDSMGVYQILAIYSTVASSLVLLVSLGAISFWMCSNGSLQCRICI

SEQ ID NO: 427 - protein, 566 aa, Artificial Sequence; identical to SEQ ID NO: 255
  derived and/or modified protein sequence (wt) from hemagglutinin__InfluenzaA__ABB53614

SEQ ID NO: 428 - protein, 566 aa, Artificial Sequence; identical to SEQ ID NO: 255
  derived and/or modified protein sequence (wt) from hemagglutinin__InfluenzaA__ABB53625

SEQ ID NO: 429 - protein, 566 aa, Artificial Sequence; identical to SEQ ID NO: 282
  derived and/or modified protein sequence (wt) from hemagglutinin__InfluenzaA__ABB53652

SEQ ID NO: 430 - protein, 566 aa, Artificial Sequence
  derived and/or modified protein sequence (wt) from hemagglutinin__InfluenzaA__ABB53663
MKTIFALSYILCLVFAQKLPGNDNSTATLCLGHHAVPNGTIVKTITNDQIEVTNATELVQSSSTGGICDSPHQILDGENCTLIDALLGDPQCDGFQNKKWDLFVERSKAHSNCYPYDVPDYASLRSLVASSGTLEFNNESFNWTGVTQNGTSSACKRRSNNSFFSRLNWLTHLKFKYPALNVTMPNNENFDKLYIWGVHHPGTDNDQISLYAQASGRITVSTKRSQQTVIPNIGSRPRVRDIPSRISIYWTIVKPGDILLINSTGNLIAPRGYFKIRSGKSSIMRSDAPIGKCNSECITPNGSIPNDKPFQNVNRITYGACPRYVKQNTLKLATGMRNVPEKQTRGIFGAIAGFIENGWEGMVDGWYGFRHQNSEGIGQAADLKSTQAAINQINGKLNRLIGKTNEKFHQIEKEFSEVEGRIQDLEKYVEDTKIDLWSYNAELLVALENQHTIDLTDSEMNKLFERTKKQLRENAEDMGNGCFKIYHKCDNACIGSIRNGTYDHDVYRDEALNNRFQIKGVELKSGYKDWILWISFAISCFLLCVALLGFIMWACQKGNIRCNICI

SEQ ID NO: 431 - protein, 566 aa, Artificial Sequence; identical to SEQ ID NO: 255
  derived and/or modified protein sequence (wt) from hemagglutinin__InfluenzaA__ABB53685

SEQ ID NO: 432 - protein, 566 aa, Artificial Sequence
  derived and/or modified protein sequence (wt) from hemagglutinin__InfluenzaA__ABB53696
MKTIIALSYILCLVFAQKLPGNDNSTATLCLGHHAVPNGTLVKTITNDQIEVTNATELVQSSSTGRICDSPHQILDGENCTLIDALLGDPHCDGFQNKEWDLFVERSKAYSNCYPYDVPDYASLRSLVASSGTLEFNNESFNWTGVAQNGTSSACKRRSNKSFFSRLNWLHQLKYKYPALNVTMPNNEKFDKLYIWGVHHPSTDSDQISLYAQASGRVTVSTKRSQQTVIPNIGSRPWVRGVSSRISIYWTIVKPGDILLINSTGNLIAPRGYFKIRSGKSSIMRSDAPIGKCNSECITPNGSIPNDKPFQNVNRITYGACPRYVKQNTLKLATGMRNVPEKQTRGIFGAIAGFIENGWEGMVDGWYGFRHQNSEGTGQAADLKSTQAAINQINGKLNRLIEKTNEKFHQIEKEFSEVEGRIQDLEKYVEDTKIDLWSYNAELLVALENQHTIDLTDSEMNKLFERTKKQLRENAEDMGNGCFKIYHKCDNACIGSIRNGTYDHDVYRDEALNNRFQIKGVELKSGYKDWILWISFAISCFLLCIALLGFIMWACQKGNIRCNVCI

SEQ ID NO: 433 - protein, 565 aa, Artificial Sequence; identical to SEQ ID NO: 296
  derived and/or modified protein sequence (wt) from hemagglutinin__InfluenzaA__ABB53707

SEQ ID NO: 434 - protein, 566 aa, Artificial Sequence; identical to SEQ ID NO: 243
  derived and/or modified protein sequence (wt) from hemagglutinin__InfluenzaA__ABB53718

SEQ ID NO: 435 - protein, 565 aa, Artificial Sequence
  derived and/or modified protein sequence (wt) from hemagglutinin__InfluenzaA__ABB53740
MKVKLLVLLCTFTATYADTICIGYHANNSTDTVDTVLEKNVTVTHSVNLLEDSHNGKLCLLKGIAPLQLGNCSVAGWILGNPECELLISKESWSYIVETPNPENGTCYPGYFADYEELREQLSSVSSFERFEIFPKESSWPNHTVTGVSASCSHNGKSSFYRNLLWLTGKNGLYPNLSKSYANNKEKEVLVLWGVHHPPNMGDQRALYHTENAYVSVVSSHYSRRFTPEIAKRPKVRDQEGRINYYWTLLEPGETIIFEANGNLIAPRYAFALSRGFGSGIITSNAPMDECDAKCQTPQGAINSSLPFQNVHPVTIGECPKYVRSTKLRMVTGLRNIPSIQSRGLFGAIAGFIEGGWTGMVDGWYGYHHQNEQGSGYAADQKSTQNAINGITNKVNSVIEKMNTQFTAVGKEFNKLERRMENLNKKVDDGFLDIWTYNAELLVLLENERTLDFHDSNVKNLYEKVKSQLKNNAKEIGNGCFEFYHKCNDECMESVKNGTYDYPKYSEESKLNREKIDGVKLESMGVYQILAIYSTVASSLVLLVSLGAISFWMCSNGSLQCRICI

SEQ ID NO: 436 - protein, 566 aa, Artificial Sequence
  derived and/or modified protein sequence (wt) from hemagglutinin__InfluenzaA__ABB53751
MKTIIALSYISCLVFAQNLPGNDNSTATLCLGHHAVPNGTLVKTITNDQIEVTNATELVQSSSTGRICDSPHRILDGKNCTLIDALLGDPHCDGFQNEKWDLFVERSKAFSNCYPYDVPDYASLRSLVASSGTLEFINEGFNWTGVTQSGGSYACKRGSDNSFFSRLNWLYKSESKYPVLNVTMPNNGNFDKLYIWGVHHPSTDKEQTNLYVRASGRVTVSTKRSQQTIIPNIGSRPWVRGLSSGISIYWTIVKPGDILLINSNGNLIAPRGYFKIRTGKSSILRSDAPIGTCSSECITPNGSIPNDKPFQNVNKITYGACPKYVKQNTLKLATGMRNVPEKQTRGIFGAIAGFIENGWEGMVDGWYGFRHQNSEGTGQAADLKSTQAAIDQINGKLNRVIEKTNEKFHQIEKEFSEVEGRIQDLEKYVEDTKIDLWSYNAELLVALENQHTIDLTDSEMNKLFEKTRRQLRENAEDMGNGCFKIYHKCDNACIGSIRNGTYDHDVYRDEALNNRFQIKGVELKSGYKDWILWISFAISCFLLCVVLLGFIMWACQKGNIRCNICI

SEQ ID NO: 437 - protein, 566 aa, Artificial Sequence
  derived and/or modified protein sequence (wt) from hemagglutinin__InfluenzaA__ABB60007
MKTIIALSYILCLVFAQKLPGNDNSTATLCLGHHAVPNGTLVKTITNDQIEVTNATELVQSSSTDRICDSPHRILDGENCTLIDALLGDPHCDGFQNKEWDLFVERSKAYSNCYPYDVPDYASLRSLVASSGTLEFNNESFNWTGVAQNGTSYACKRRSIKSFFSRLNWLHQLKYKYPALNVTMPNNDKFDKLYIWGVHHPSTDSDQTSLYAQASGRVTVSTKRSQQTVIPNIGSRPWVRGVSSRISIYWTIVKPGDILLINSTGNLIAPRGYFKIRSGKSSIMRSDAPIGKCNSECITPNGSIPNDKPFQNVNRITYGACPRYVKQNTLKLATGMRNVPEKQTRGIFGAIAGFIENGWEGMVDGWYGFRHQNSEGTGQAADLKSTQAAINQINGKLNRLIEKTNEKFHQIEKEFSEVEGRIQDLEKYVEDTKIDLWSYNAELLVALENQHTIDLTDSEMNKLFERTRKQLRENAEDMGNGCFKIYHKCDNACIGSIRNGTYDHDVYRDEALNNRFQIKGVELKSGYKDWILWISFAISCFLLCVVLLGFIMWACQKGNIRCNICI

SEQ ID NO: 438 - protein, 566 aa, Artificial Sequence
  derived and/or modified protein sequence (wt) from hemagglutinin__InfluenzaA__ABB77853
MKTIIALSYISCLVFAQKLPGNDNSTATLCLGHHAVPNGTLVKTITNDQIEVTNATELVQSSSTGRICDSPHRILDGENCTLIDALLGDPHCDGFQNKEWDLFVERSKAYSNCYPYDVPDYASLRSLVASSGTLEFNNESFNWTGVAQNGTSYACKRRSIKSFFSRLNWLHQLKYKYPALNVTMPNNDKFDKLYIWGVHHPSTDSDQTSLYAQASGRVTVSTKRSQQTVIPNIGSRPWVRGVSSRISIYWTIVKPGDILLINSTGNLIAPRGYFKIRSGKSSIMRSDAPIGKCNSECITPDGSIPNDKPFQNVNRITYGACPRYVKQNTLKLATGMRNVPEKQTRGIFGAIAGFIENGWEGMVDGWYGFRHQNSEGTGQAADLKSTQAAINQINGKLNRLIEKTNEKFHQIEKEFSEVEGRIQDLEKYVEDTKIDLWSYNAELLVALENQHTIDLTDSEMNKLFERTRKQLRENAEDMGNGCFKIYHKCDNACIGSIRNGTYDHDVYRDEALNNRFQIKGVELKSGYKDWILWISFAISCFLLCVVLLGFIMWACQKGNIRCNICI

SEQ ID NO: 439 - protein, 566 aa, Artificial Sequence
  derived and/or modified protein sequence (wt) from hemagglutinin__InfluenzaA__ABB79731
MKTIIALSYILCLVFAQELPGNDNSTATLCLGHHAVPNGTIVKTITNDQIEVTNATELVQNSSTGGICDSPHQILDGENCTLIDALLGDPQCDGFQNKKWDLFVERSKAYSNCYPYDVPDYASLRSLVASSGTLEFNNESFNWTGVTQNGTSSACKRRSNNSFFSRLNWLTHLKFKYPALNVTMPNNEKFDKLYIWGVHHPGTDNDQTSLYAQASGRITVSTKRSQQTVIPNIGSRPRVRDIPSRISIYWTIVKPGDILLINSTGNLIAPRGYFKIRSGKSSIMRSDAPIGKCNSECITPNGSIPNDKPFQNVNRITYGACPRYVKQNTLKLATGMRNVPEKQTRGIFGAIAGFIENGWEGMVDGWYGFRHQNSEGIGQAADLKSTQAAINQINGKLNRLIGKTNEKFHQIEKEFSEVEGRIQDLEKYVEDTKIDLWSYNAELLVALENQHTIDLTDSEMNKLFERTKKQLRENAEDMGNGCFKIYHKCDNACIGSIRNGTYDHDVYRDEALNNRFQIKGVELKSGYKDWILWISFAISCFLLCVALLGFIMWACQKGNIRCNICI

SEQ ID NO: 440 - protein, 566 aa, Artificial Sequence
  derived and/or modified protein sequence (wt) from hemagglutinin__InfluenzaA__ABB79788
MKTIIALSYIFCLVFAQKLPGNDNSTATLCLGHHAVPNGTLVKTITNDQIEVTNATELVQSSSTGRICDSPHRILDGKNCTLIDALLGDPHCDGFQNEKWDLFVERSKAFSNCYPYDVPDYASLRSLVASSGTLEFINEGFNWTGVTQSGGSYACKRGSVNSFFSRLNWLYESESKYPVLNVTMPNNGKFDKLYIWGVHHPITDKEQTNLYVRASGRVTVSTKRSQQTVIPNIGSRPWVRGLSSRISIYWTIVKPGDILLINSTGNLIAPRGYFKIRTGKSSIMRSDAPIGTCSSECITPNGSIPNDKPFQNVNKITYGACPRYVKQNTLKLATGMRNVPEKQTRGIFGAIAGFIENGWEGMVDGWYGFRHQNSEGTGQAADLKSTQAAIDQINGKLNRLIEKTNEKFHQIEKEFSEVEGRIQDLEKYVEDTKIDLWSYNAELLVALENQHTIDLTDSEMNKLFEKTRKQLRENAEDMGNGCFKIYHKCDNACIGSIRNGTYDHDVYRDEALNNRFQIKGVELKSGYKDWILWISFAISCFLLCVVLLGFIMWACQKGNIRCNICI

SEQ ID NO: 441 - protein, 566 aa, Artificial Sequence
  derived and/or modified protein sequence (wt) from hemagglutinin__InfluenzaA__ABB79799
MKTIIALSYIFCLVFAQKLPGNDNSTATLCLGHHAVPNGTLVKTITNDQIEVTNATELVQSSSTGRICDSPHRILDGKNCTLIDALLGDPHCDGFQNEKWDLFVERSKAFSNCYPYDVPDYASLRSLVASSGTLEFINEGFNWTGVTQSGGSYACKRGSVNSFFSRLNWLYESESKYPVLNVTMPNNGKFDKLYIWGVHHPSTDKEQTNLYVRASGKVTVSTKRSQQTVIPNIGSRPWVRGLSSRISIYWTIVKPGDILLINSTGNLIAPRGYFKIRTGKSSIMRSDAPIGTCSSECITPNGSIPNDKPFQNVNKITYGACPRYVKQNTLKLATGMRNVPEKQTRGIFGAIAGFIENGWEGMVDGWYGFRHQNSEGTGQAADLKSTQAAIDQINGKLNRLIEKTNEKFHQIEKEFSEVEGRIQDLEKYVEDTKIDLWSYNAELLVALENQHTIDLTDSEMNKLFEKTRKQLRENAEDMGNGCFKIYHKCDNACIGSIRNGTYDHDVYRDEALNNRFQIKGVELKSGYKDWILWISFAISCFLLCVVLLGFIMWACQKGNIRCNICI

SEQ ID NO: 442 - protein, 566 aa, Artificial Sequence
  derived and/or modified protein sequence (wt) from hemagglutinin__InfluenzaA__ABB79810
MKTIIALSYILCLVFAQKLPGNDNSTATLCLGHHAVPNGTLVKTITNDQIEVTNATELVQSSSTGRLCDSPHRILDGKNCTLIDALLGDPHCDGFQNKEWDLFVERSKAYSNCYPYDVPDYASLRSLVASSGTLEFINEDFNWTGVAQDGGSYACRRGSVNSFFSRLNWLHKLEYKYPALNVTMPNNGKFDKLYIWGVHHPSTDSDQTSLYVRASGRVTVSTKRSQQTVIPNIGSRPWVRGQSSRISIYWTIVKPGDILLIDSTGNLIAPRGYFKIRNGKSSIMRSDAPIGNCSSECITPNGSIPNDKPFQNVNRITYGACPRYVKQHTLKLATGMRNVPEKQTRGIFGAIAGFIENGWEGMVDGWYGFRHQNSEGTGQAADLKSTQAAIDQINGKLNRLIEKTNEKFHQIEKEFSEVEGRIQDLEKYVEDTKIDLWSYNAELLVALENQHTIDLTDSEMNKLFERTRKQLRENAEDMGNGCFKIYHKCDNACIGSIRNGTYDHDVYRDEALNNRFQIKGVELKSGYKDWILWISFAISCFLLCVVLLGFIMWACQKGNIRCNICI

SEQ ID NO: 443 - protein, 566 aa, Artificial Sequence
  derived and/or modified protein sequence (wt) from hemagglutinin__InfluenzaA__ABB79957
MKTIIALSYILCLVFAQKLPGNDNSTATLCLGHHAVPNGTLVKTITNDQIEVTNATELVQSSSTGRLCDSPHRILDGKNCTLIDALLGDPHCDGFQNKEWDLFVERSKAYSNCYPYDVPDYASLRSLVASSGTLEFINEDFNWTGVAQDGGSYACRRGSVNSFFSRLNWLHKLEYKYPALNVTMPNNGKFDKLYIWGVHHPSTDSDQTSLYVRASGRVTVSTKRSQQTVIPNIGSRPWVRGQSSRIGIYWTIVKPGDILLINSTGNLIAPRGYFKIRNGKSSIMRSDAPIGNCSSECITPNGSIPNDKPFQNVNRITYGACPRYVKQHTLKLATGMRNVPEKQTRGIFGAIAGFIENGWEGMVDGWYGFRHQNSEGTGQAADLKSTQAAIDQINGKLNRLIEKTNEKFHQIEKEFSEVEGRIQDLEKYVEDTKIDLWSYNAELLVALENQHTIDLTDSEMNKLFERTRKQLRENAEDMGNGCFKIYHKCDNACIGSIRNGTYDHDVYRDEALNNRFQIKGVELKSGYKDWILWISFAISCFLLCVVLLGFIMWACQKGNIRCNICI

SEQ ID NO: 444 - protein, 566 aa, Artificial Sequence
  derived and/or modified protein sequence (wt) from hemagglutinin__InfluenzaA__ABB79968
MKTIIALSYILCLVFAQKLPGNDNSTATLCLGHHAVPNGTLVKTITNDQIEVTNATELVQSSSTGRLCDSPHRILDGKNCTLIDALLGDPHCDGFQNKEWDLFVERSKAYSNCYPYDVPDYASLRSLVASSGTLEFINEDFNWTGVAQDGGSYACRRGSVNSFFSRLNWLHKLEYKYPALNVTMPNNGKFDKLYIWGVHHPSTDSDQTSLYVRASGRVTVSTKRSQQTVIPNIGSRPWVRGQSSRISIYWTIVKPGDILLINSTGNLIAPRGYFKIRNGKSSIMRSDAPIGNCSSECITPNGSIPNDKPFQNVNRITYGACPRYVKQHTLKLATGMRNVPEKQTRGIFGAIAGFIENGWEGMVDGWYGFRHQNSEGTGQAADLKSTQAAIDQINGKLNRLIEKTNEKFHQIEKEFSEVEGRIQDLEKYVEDTKIDLWSYNAELLVALENQHTIDLTDSEMNKLFERTRKQLRENAEDMGNGCFKIYHKCDNACIGSIRNGTYDHDVYRDEALNNRFQIKGVELKSGYKDWILWISFAISCFLLCVVLLGFIMWACQKGNIRCNICI

SEQ ID NO: 445 - protein, 565 aa, Artificial Sequence
  derived and/or modified protein sequence (wt) from hemagglutinin__InfluenzaA__ABB79979
MKAKLLVLLCTFTATYADTICIGYHANNSTDTVDTVLEKNVTVTHSVNLLEDSHNGKLCLLKGIAPLQLGNCSVAGWILGNPECELLISKESWSYIVETPNPENGTCYPGYFADYEELREQLSSVSSFERFEIFPKGSSWPNHTVTGVSASCSHNGKSSFYRNLLWLTGKNGLYPNLSMSYVNNKEKEVLVLWGVHHPPNIGDQRALYHTENAYVSVVSSHYSRRFTPEIAKRPKVRDQEGRINYHWTLLEPGDTIIFEANGNLIAPWYAFALSRGFGSGIITSNAPMDECDAKCQTPQGAINSSLPFQNVHPVTIGECPKYVRSAKLRMVTGLRNIPSIQSRGLFGAIAGFIEGGWTGMVDGWYGYHHQNEQGSGYAADQKSTQNAINGITNKVNSVIEKMNTQFTAVGKEFNKLERRMENLNKKVDDGFLDIWTYNAELLVLLENERTLDFHDSNVKNLYEKVKSQLKNNAKEIGNGCFEFYHKCNNECMESVKNGTYDYPKYSEESKLNREKIDGVKLESMGVYQILAIYSTVASSLVLLVSLGAISFWMCSNGSLQCRICI

SEQ ID NO: 446 - protein, 565 aa, Artificial Sequence
  derived and/or modified protein sequence (wt) from hemagglutinin__InfluenzaA__ABB79990
MKAKLLVLLCTFTATYADTICIGYHANNSTDTVDTVLEKNVTVTHSVNLLEDSHNGKLCLLKGIAPLQLGNCSVAGWILGNPECELLISKESWSYIVETPNPENGTCYPGYFADYEELREQLSSVSSFERFEIFPKGSSWPNHTVTGVSASCSHNGKSSFYRNLLWLTGKNGLYPNLSMSYVNNKEKEVLVLWGVHHPPNIGDQKALYHTENAYVSVVSSHYSRRFTPEIAKRPKVRDQEGRINYYWTLLEPGDTIIFEANGNLIAPWYAFALSRGFGSGIITSNAPMDECDAKCQTPQGAINSSLPFQNVHPVTIGECPKYVRSAKLRMVTGLRNIPSIQSRGLFGAIAGFIEGGWTGMVDGWYGYHHQNEQGSGYAADQKSTQNAINGITNKVNSVIEKMNTQFTAVGKEFNKLERRMENLNKKVDDGFLDIWTYNAELLVLLENERTLDFHDSNVKNLYEKVKSQLKNNAKEIGNGCFEFYHKCNNECMESVKNGTYDYPKYSEESKLNREKIDGVKLESMGVYQILAIYSTVASSLVLLVSLGAISFWMCSNGSLQCRICI

SEQ ID NO: 447 - protein, 566 aa, Artificial Sequence
  derived and/or modified protein sequence (wt) from hemagglutinin__InfluenzaA__ABB80001
MKTIIALSYTLCLVFAQKLPGNDNSTATLCLGHHAVPNGTIVKTITNDQIEVTNATELVQSSSTGGICDSPHQILDGENCTLIDALLGDPQCDGFQNKKWDLFVERSKAYSNCYPYDVPDYASLRSLVASSGTLEFNNESFNWTGVTQNGTSSACKRRSNNSFFSRLNWLTHLKFKYPALNVTMPNNEKFDKLYIWGVHHPGTDNDQISLYAQASGRITVSTKRSQQTVIPNIGSRPRVRDIPSRISIYWTIVKPGDILLINSTGNLIAPRGYFKIRSGKSSIMRSDAPIGKCNSECITPNGSIPNDKPFQNVNRITYGACPRYVKQSTLKLATGMRNVPEKQTRGIFGAIAGFIENGWEGMVDGWYGFRHQNSEGIGQAADLKSTQAAINQINGKLNRLIGKTNEKFHQIEKEFSEVEGRIQDLEKYVEDTKIDLWSYNAELLVALENQHTIDLTDSEMNKLFERTKKQLRENAEDMGNGCFKIYHKCDNACIGSIRNGTYDHDVYRDEALNNRFQIKGVELKSGYKDWILWISFAISCFLLCVALLGFIMWACQKGNIRCNICI

SEQ ID NO: 448 - protein, 566 aa, Artificial Sequence; identical to SEQ ID NO: 243
  derived and/or modified protein sequence (wt) from hemagglutinin__InfluenzaA__ABB80012

SEQ ID NO: 449 - protein, 566 aa, Artificial Sequence
  derived and/or modified protein sequence (wt) from hemagglutinin__InfluenzaA__ABB80023
MKTIIALSYIFYLALGQDLPGNDNSKATLCLGHHAVPNGTLVKTITNDQTEVTNATELVQSSSTGKICNNPHRILDGMDCTLIDALLGDPHCDVFQNETWDLFVERSKAFSNCYPYDVPDYASLRSLVASSGTLEFITEGFTWTEVTQNGGSNACKRGPDSGFFSRLNWLTKSGRTYPVLNVTMPNNDNFDKLYIWGVHHPSTDQEQTNLYVQTSGRVTVSTRRSQQTIIPNIGSRPWVRGLSSRISIYWTIVKPGDVLVINSNGNLIAPRGYFKMRTGKSSIMRSDAPIDTCISECITPNGSIPNDKPFQNVNKITYGACPKYVKQDTLKLATGMRNVPEKQTRGLFGAIAGFIENGWEGMIDGWYGFRHQNSEGTGQAADLKSTQAAIDQINGKLNRIIEKTNEKFHQIEKEFSEVEGRIQDLEKYVEDTKIDLWSYNAELLVALENQHTIDLTDSEMNKLFEKTRRQLRENAEDMGNGCFKIYHKCDNACIESIRNGTYDHDVYRDEALNNRFQIKGVELKSGYKDWILWISFAISCFLLCVVLLGFIMWACQRGNIRCNICI

SEQ ID NO: 450 - protein, 566 aa, Artificial Sequence
  derived and/or modified protein sequence (wt) from hemagglutinin__InfluenzaA__ABB80034
MKTIIALSYIFCLVLGQDLPGNDNSTATLCLGHHAVPNGTLVKTITDDQIEVTNATELVQSSSTGKICNNPHRILDGLDCTLIDALLGDPHCDVFQNETWDLFVERSKAFSNCYPYDVPDYASLRSLVASSGTLEFITEGFTWTGVTQNGGSNACKRGPGSGFFSRLNWLTKSGSTYPVLNVTMPNNDNFDKLYIWGVHHPSTNQEQTSLYVQASGRVTVSTRRSQQTIIPNIGSRPWVRGLSSRISIYWTIVKPGDVLVINSNGNLIAPRGYFKMRTGKSSIMRSDATIDTCISECITPNGSIPNDKPFQNVNKITYGACPKYVKQNTLKLATGMRNVPEKQTRGLFGAIAGFIENGWEGMIDGWYGFRHQNSEGTGQAADLKSTQAAIDQINGKLNRVIEKTNEKFHQIEKEFSEVEGRIQDLEKYVEDTKIDLWSYNAELLVALENQHTIDLTDSEMNKLFEKTRRQLRENAEDMGNGCFKIYHKCDNACIESIRNGTYDHDVYRDEALNNRFQIKGVELKSGYKDWILWISFAISCFLLCVVLLGFIMWACQRGNIRCNICI

SEQ ID NO: 451 - protein, 565 aa, Artificial Sequence; identical to SEQ ID NO: 364
  derived and/or modified protein sequence (wt) from hemagglutinin__InfluenzaA__ABB80045

SEQ ID NO: 452 - protein, 566 aa, Artificial Sequence
  derived and/or modified protein sequence (wt) from hemagglutinin__InfluenzaA__ABB80081
MKTIIALSYISCLVFAQKLPGNDNSTATLCLGHHAVPNGTLVKTITNDQIEVTNATELVQSSSTGRICDSPHRILDGENCTLIDALLGDPHCDGFQNKEWDLFVERSKAYSNCYPYDVPDYASLRSLVASSGTLEFNNESFNWTGVAQNGTSYACKRRSIKSFFSRLNWLHQLKYKYPALNVTMPNNDKFDKLYIWGVHHPSTDSDQTSLYAQASGRVTVSTKRSQQTVIPNIGSRPWVRGVSSRISIYWTIVKPGDILLINSTGNLIAPRGYFKIRSGKSSIMRSDAPIGKCNSECITPNGSIPNDKPFQNVNRITYGACPRYVKQNTLKLATGMRNVPEKQTRGIFGAIAGFIENGWEGMVDGWYGFRHQNSEGTGQAADLKSTQAAINQINGKLNRLIEKTNEKFHQIEKEFSEVEGRIQDLEKYVEDTKIDLWSYNAELLVALENQHTIDLTDSEMNKLFERTRKQLRENAEDMGNGCFKIYHKCDNACIGSIRNGTYDHDVYRDEALNNRFQIKGVELKSGYKDWILWISFAISCFLLCVVLLGFIMWACQKGNIRCNICI

SEQ ID NO: 453 - protein, 566 aa, Artificial Sequence
  derived and/or modified protein sequence (wt) from hemagglutinin__InfluenzaA__ABB80092
MKTIIALSYISCLVFAQKLPGNDNSTATLCLGHHAVPNGTLVKTITNDQIEVTNATELVQSSSTGRICDSPHRILDGENCTLIDALLGDPHCDGFQNKEWDLFVERSKAYSNCYPYDVPDYASLRSLVASSGTLEFNNESFNWTGVAQNGTSYACKRRSIKSFFSRLNWLHQLKYKYPALNVTMPNNDKFDKLYIWGVHHPSTDSDQTSLYAQASGRVTVSTKRSQQTVIPNIGSRPWVRGVSSRISIYWTLVKPGDILLINSTGNLIAPRGYFKIRSGKSSIMRSDAPIGKCNSECITPNGSIPNDKPFQNVNRITYGACPRYVKQNTLKLATGMRNVPEKQTRGIFGAIAGFIENGWEGMVDGWYGFRHQNSEGTGQAADLKSTQAAINQINGKLNRLIEKTNEKFHQIEKEFSEVEGRIQDLEKYVEDTKIDLWSYNAELLVALENQHTIDLTDSEMNKLFERTRKQLRENAEDMGNGCFKIYHKCDNACIGSIRNGTYDHDVYRDEALNNRFQIKGVELKSGYKDWILWISFAISCFLLCVVLLGFIMWACQKGNIRCNICI

SEQ ID NO: 454 - protein, 566 aa, Artificial Sequence; identical to SEQ ID NO: 255
  derived and/or modified protein sequence (wt) from hemagglutinin__InfluenzaA__ABB80137

SEQ ID NO: 455 - protein, 566 aa, Artificial Sequence; identical to SEQ ID NO: 452
  derived and/or modified protein sequence (wt) from hemagglutinin__InfluenzaA__ABB80159

SEQ ID NO: 456 - protein, 566 aa, Artificial Sequence; identical to SEQ ID NO: 23
  derived and/or modified protein sequence (wt) from hemagglutinin__InfluenzaA__ABB80185

SEQ ID NO: 457 - protein, 566 aa, Artificial Sequence
  derived and/or modified protein sequence (wt) from hemagglutinin__InfluenzaA__ABB80207
MKTIIALSYILCLVFAQKLPGNDNSTATLCLGHHAVPNGTLVKTITNDQIEVTNATELVQSSSTGRICDSPHRILDGENCTLIDALLGDPHCDDFQNKEWDLFVERSKAYSNCYPYDVPDYASLRSLVASSGTLEFNNESFNWTGVAQNGTSYACKRRSIKSFFSRLNWLHQLKYKYPALNVTMPNNDKFDKLYIWGVHHPSTDSDQTSLYAQASGRVTVSTKRSQQTVIPNIGSRPWVRGVSSRISIYWTIVKPGDILLINSTGNLIAPRGYFKIRSGKSSIMRSDAPIGKCNSECITPNGSIPNDKPFQNVNRITYGACPRYVKQNTLKLATGMRNVPEKQTRGIFGAIAGFIENGWEGMVDGWYGFRHQNSEGTGQAADLKSTQAAINQINGKLNRLIEKTNEKFHQIEKEFSEVEGRIQDLEKYVEDTKIDLWSYNAELLVALENQHTIDLTDSEMNKLFERTRKQLRENAEDMGNGCFKIYHKCDNACIGSIRNGTYDHDVYRDEALNNRFQIKGVELKSGYKDWILWISFAMSCFLLCVVLLGFIMWACQKGNIRCNICI

SEQ ID NO: 458 - protein, 566 aa, Artificial Sequence
  derived and/or modified protein sequence (wt) from hemagglutinin__InfluenzaA__ABB80229
MKTIIALSYILCLVFAQKLPGNDNSTATLCLGHHAVPNGTLVKTITNDQIEVTNATELVQSSSTGRICDSPHRILDGENCTLIDALLGDPHCDGFQNKEWDLFVERSKAYSNCYPYDVPDYASLRSLVASSGTLEFNNESFNWTGVAQNGTSYACKRRSIKSFFSRLNWLHQLKYKYPALNVTMPNNDKFDKLYIWGVHHPSTDSDQTSLYAQASGRVTVSTKRSQQTVIPNIGSRPWVRGVSSRISIYWTIVKPGDILLINSTGNLIAPRGYFKIRSGKSSIMRSDAPIGKCNSECITPNGSIPNDKPFQNVNRITYGACPRYVKQNTLKLATGMRNVPEKQTRGIFGAIAGFIENGWEGMVDGWYGFRHQNSEGTGQAADLKSTQAAINQINGKLNRLIEKTNEKFHQIEKEFSEVEGRIQDLEKYVEDTKIDLWSYNAELLVALENQHTIDLTDSEMNKLFERTRKQLRENAEDMGNGCFKIYHKCDNACIGSIRNGTYDHDVYRDEALNNRFQIKGVELKSGYKDWILWISFAMSCFLLCVVLLGFIMWACQKGNIRCNICI

SEQ ID NO: 459 - protein, 566 aa, Artificial Sequence; identical to SEQ ID NO: 452
  derived and/or modified protein sequence (wt) from hemagglutinin__InfluenzaA__ABB80240

SEQ ID NO: 460 - protein, 566 aa, Artificial Sequence
  derived and/or modified protein sequence (wt) from hemagglutinin__InfluenzaA__ABB80251
MKTIIALSYILCLVFAQKLPGNDNSTATLCLGHHAVPNGTLVKTITNDQIEVTNATELVQSSSTGRICDSPHRILDGENCTLIDALLGDPHCDGFQNKEWDLFVERSKAYSNCYPYDVPDYASLRSLVASSGTLEFNNESFNWTGVAQNGTSSACKRRSIKSFFSRLNWLHQLKYKYPALNVTMPNNDKFDKLYIWGVHHPSTDSDQTSLYAQASGRVTVSTKRSQQTVIPNIGSRPWVRGVSSRISIYWTIVKPGDILLINSTGNLIAPRGYFKIRSGKSSIMRSDAPIGKCNSECITPNGSIPNDKPFQNVNRITYGACPRYVKQNTLKLATGMRNVPEKQTRGIFGAIAGFIENGWEGMVDGWYGFRHQNSEGTGQAADLKSTQAAINQINGKLNRLIEKTNEKFHQIEKEFSEVEGRIQDLEKYVEDTKIDLWSYNAELLVALENQHTIDLTDSEMNKLFERTRKQLRENAEDMGNGCFKIYHKCDNACIGSIRNGTYDHDVYRDEALNNRFQIKGVELKSGYKDWILWISFAISCFLLCVVLLGLIMWACQKGNIRCNICI

SEQ ID NO: 461 - protein, 566 aa, Artificial Sequence
  derived and/or modified protein sequence (wt) from hemagglutinin__InfluenzaA__ABB80492
MKTIIALSYILCLVFAQKLPGNDNSTATLCLGHHAVPNGTLVKTITNDQIEVTNATELVQNSSTGRICDSPHRILDGENCTLIDALLGDPHCDGFQNKEWDLFVERSKAYSNCYPYDVPDYASLRSLVASSGTLEFNNESFNWTGVAQNGTSYACKRRSIKSFFSRLNWLHQLKYKYPALNVTMPNNDKFDKLYIWGVHHPSTDSDQTSLYAQASGRVTVSTKRSQQTVIPNIGSRPWVRGVSSRISIYWTIVKPGDILLINSTGNLIAPRGYFKIRSGKSSIMRSDAPIGKCNSECITPNGSIPNDKPFQNVNRITYGACPRYVKQNTLKLATGMRNVPEKQTRGIFGAIAGFIENGWEGMVDGWYGFRHQNSEGTGQAADLKSTQAAINQINGKLNRLIEKTNEKFHQIEKEFSEVEGRIQDLEKYVEDTKIDLWSYNAELLVALENQHTIDLTDSEMNKLFERTRKQLRENAEDMGNGCFKIYHKCDNACIGSIRNGTYDHDVYRDEALNNRFQIKGVELKSGYKDWILWISFAMSCFLLCVVLLGFIMWACQKGNIRCNICI

SEQ ID NO: 462 - protein, 566 aa, Artificial Sequence
  derived and/or modified protein sequence (wt) from hemagglutinin__InfluenzaA__ABB80503
MKTIIALSYISCLVFAQKLPGNDNNTATLCLGHHAVPNGTLVKTITNDQIEVTNATELVQSSSTGRICDSPHRILDGENCTLIDALLGDPHCDGFQNKEWDLFVERSKAYSNCYPYDVPDYASLRSLVASSGTLEFNNESFNWTGVAQNGTSYACKRRSIKSFFSRLNWLHQLKYKYPALNVTMPNNDKFDKLYIWGVHHPSTDSDQTSLYAQASGRVTVSTKRSQQTVIPNIGSRPWVRGVSSRISIYWTIVKPGDILLINSTGNLIAPRGYFKIRSGKSSIMRSDAPIGKCNSECITPNGSIPNDKPFQNVNRITYGACPRYVKQNTLKLATGMRNVPEKQTRGIFGAIAGFIENGWEGMVDGWYGFRHQNSEGTGQAADLKSTQAAINQINGKLNRLIEKTNEKFHQIEKEFSEVEGRIQDLEKYVEDTKIDLWSYNAELLVALENQHTIDLTDSEMNKLFERTRKQLRENAEDMGNGCFKIYHKCDNACIGSIRNGTYDHDVYRDEALNNRFQIKGVELRSGYKDWILWISFAISCFLLCVVLLGFIMWACQKGNIRCNICI

SEQ ID NO: 463 - protein, 566 aa, Artificial Sequence; identical to SEQ ID NO: 452
  derived and/or modified protein sequence (wt) from hemagglutinin__InfluenzaA__ABB80514

SEQ ID NO: 464 - protein, 566 aa, Artificial Sequence
  derived and/or modified protein sequence (wt) from hemagglutinin__InfluenzaA__ABB80529
MKTIIALSYISCLVFAQKLPGNDNSTATLCLGHHAVPNGTLVKTITNDQIEVTNATELVQSSSTGRICDSPHRILDGENCTLIDALLGDPHCDGFQNKEWDLFVERSKAYSNCYPYDVPDYASLRSLVASSGTLEFNNESFNWTGVAQNGTSYACKRRSIKSFFSRLNWLHQLKYKYPALNVTMPNNDKFDKLYIWGVHHPSTDSDQTSLYAQASGRVTVSTKRSQQTVIPNIGSRPWVRGVSSRISIYWTIVKPGDILLINSTGNLIAPRGYFKIRSGKSSIMRSDAPIGKCNSECITPNGSIPNDKPFQNVNRITYGACPRYVKQNTLKLATGMRNVPDKQTRGIFGAIAGFIENGWEGMVDGWYGFRHQNSEGTGQAADLKSTQAAINQINGKLNRLIEKTNEKFHQIEKEFSEVEGRIQDLEKYVEDTKIDLWSYNAELLVALENQHTIDLTDSEMNKLFERTRKQLRENAEDMGNGCFKIYHKCDNACIGSIRNGTYDHDVYRDEALNNRFQIKGVELKSGYKDWILWISFAISCFLLCVVLLGFIMWACQKGNIRCNICI

SEQ ID NO: 465 - protein, 566 aa, Artificial Sequence
  derived and/or modified protein sequence (wt) from hemagglutinin__InfluenzaA__ABB80641
MKTIIALSYILCLVFAQKIPGNDNSTATLCLGHHAVPNGTLVKTITNDQIEVTNATELVQSSSTGRICDSPHRILDGENCTLIDALLGDPHCDGFQNKEWDLFVERSKAYSNCYPYDVSDYASLRSLVASSGTLEFNNESFNWTGVAQNGTSYACKRRSIKSFFSRLNWLHQLKYKYPALNVTMPNNDKFDKLYIWGVHHPSTDSDQTSLYAQASGRVTVSTKRSQQTVIPNIGSRPWVRGVSSRISIYWTIVKPGDILLINSTGNLIAPRGYFKIRSGKSSIMRSDAPIGKCNSECITPNGSIPNDKPFQNVNRITYGACPRYVKQNTLKLATGMRNVPEKQTRGIFGAIAGFIENGWEGMVDGWYGFRHQNSEGTGQAADLKSTQAAINQINGKLNRLIEKTNEKFHQIEKEFSEVEGRIQDLEKYVEDTKIDLWSYNAELLVALENQHTIDLTDSEMNKLFERTRKQLRENAEDMGNGCFKIYHKCDNACIGSIRNGTYDHDVYRDEALNNRFQIKGVELKSGYKDWILWISFAISCFLLCVVLLGFIMWACQKGNIRCNICI

SEQ ID NO: 466 - protein, 566 aa, Artificial Sequence
  derived and/or modified protein sequence (wt) from hemagglutinin__InfluenzaA__ABB80661
MKTIIALSYILCLVFAQKIPGNDNSTATLCLGHHAVPNGTLVKTITNDQIEVTNATELVQSSSTGRICDSPHRILDGENCTLIDALLGDPHCDGFQNKEWDLFVERSKAYSNCYPYDVPDYASLRSLVASSGTLEFNNESFNWTGVAQNGTSYACKRRSIKSFFSRLNWLHQLKYKYPALNVTMPNNDKFDKLYIWGVHHPSTDSDQASLYAQASGRVTVSTKRSQQTVIPNIGSRPWVRGVSSRISIYWTIVKPGDILLINSTGNLIAPRGYFKIRSGKSSIMRSDAPIGKCNSECITPNGSIPNDKPFQNVNRITYGACPRYVKQNTLKLATGMRNVPEKQTRGIFGAIAGFIENGWEGMVDGWYGFRHQNSEGTGQAADLKSTQAAINQINGKLNRLIEKTNEKFHQIEKEFSEVEGRIQDLEKYVEDTKIDLWSYNAELLVALENQHTIDLTDSEMNKLFERTRKQLRENAEDMGNGCFKIYHKCDNACIGSIRNGTYDHDVYRDEALNNRFQIKGVELKSGYKDWILWISFAISCFLLCVVLLGFIMWACQKGNIRCNICI

SEQ ID NO: 467 - protein, 566 aa, Artificial Sequence
  derived and/or modified protein sequence (wt) from hemagglutinin__InfluenzaA__ABB80672
MKTIIALSYILCLVFAQKLPGNDNSTATLCLGHHAVPNGTLVKTITNDQIEVTNATELVQGSSTGRICDSPHQILDGKNCTLIDALLGDPHCDGFQNKEWDLFVERSTAYSNCYPYDVPDYASLRSLVASSGTLEFTKEGFNWTGVAQDGTSYACKRGSVKSFFSRLNWLHKLEYKYPALNVTMPNNDKFDKLYIWGVHHPSTDSDQTSLYVQASGRVTVSTKRSQQTVIPNIGSRPWVRGVSSRISIYWTIVKPGDILLINSTGNLIAPRGYFKIRSGKSSIMRSDAPIDNCNSECITPNGSIPNDKPFQNVNRITYGACPRYVKQNTLKLATGMRNVPEKQTRGIFGAIAGFIENGWEGMVDGWYGFRHQNSEGTGQAADLKSTQAAINQINGKLNRLIEKTNEKFHQIEKEFSEVEGRIQDLEKYVEDTKIDLWSYNAELLVALENQHTIDLTDSEMNKLFERTRKQLRENAEDMGNGCFKIYHKCDNACIGSIRNGTYDHDVYRDEALNNRFQIKGVELKSGYKDWILWISFAISCFLLCVVLLGFIMWACQKGNIRCNICI

SEQ ID NO: 468 - protein, 566 aa, Artificial Sequence
  derived and/or modified protein sequence (wt) from hemagglutinin__InfluenzaA__ABB80682
MKTIIALSYISCLVFAQKLPGNDNSTATLCLGHHAVPNGTLVKTITNDQIEVTNATELVQSSSTGRICDSPHRILDGENCTLIDALLGDPHCDGFQNKEWDLFVERSKAYSNCYPYDVPDYASLRSLVASSGTLEFNNESFNWTGVAQNGTSYACKRRSIKSFFSRLNWLHQLKYKYPALNVTMPNNDKFDKLYIWGVHHPSTDSDQTSLYAQASGRVTVSTKRSQQTVIPNIGSRPWVRGVSSRISIYWTIVKPGDILLINSTGNLIAPRGYFKIRSGKSSIMRSDAPIGKCNSECITPNGSIPNDKPFQNVNRITYGACPRYVKQNTLKLATGMRNVPEKQTRGIFGAIAGFIENGWEGMVDGWYGFRHQNSEGTGQAADLKSTQAAINQINGKLNRLIEKTNEKFHQIEKEFSEVEGRIQDLEKYVEDTKIDLWSYNAELLVALENQHTIDLTDSEMNKLLERTRKQLRENAEDMGNGCFKIYHKCDNACIGSIRNGTYDHDVYRDEALNNRFQIKGVELKSGYKDWILWISFAISCFLLCVVLLGFIMWACQKGNIRCNICI

SEQ ID NO: 469 - protein, 566 aa, Artificial Sequence
  derived and/or modified protein sequence (wt) from hemagglutinin__InfluenzaA__ABB80693
MKTIIALSYISCLVFAQKLPGNDNSTATLCLGHHAVPNGTLVKTITNDQIEVTNATELVQSSSTGRMCDSPHRILDGENCTLIDALLGDPHCDGFQNKEWDLFVERSKAYSNCYPYDVPDYASLRSLVASSGTLEFNNESFNWTGVAQNGTSYACKRRSIKSFFSRLNWLHQLKYKYPALNVTMPNNDKFDKLYIWGVHHPSTDSDQTSLYAQASGRVTVSTKRSQQTVIPNIGSRPWVRGVSSRISIYWTIVKPGDILLINSTGNLIAPRGYFKIRSGKSSIMRSDAPIGKCNSECITPNGSIPNDKPFQNVNRITYGACPRYVKQNTLKLATGMRNVPEKQTRGIFGAIAGFIENGWEGMVDGWYGFRHQNSEGTGQAADLKSTQAAINQINGKLNRLIEKTNEKFHQIEKEFSEVEGRIQDLEKYVEDTKIDLWSYNAELLVALENQHTIDLTDSEMNKLFERTRKQLRENAEDMGNGCFKIYHKCDNACIGSIRNGTYDHDVYRDEALNNRFQIKGVELKSGYKDWILWISFAISCFLLCVVLLGFIMWACQKGNIRCNICI

SEQ ID NO: 470 - protein, 566 aa, Artificial Sequence
  derived and/or modified protein sequence (wt) from hemagglutinin__InfluenzaA__ABB80704
MKTIIALSYILCLVFAQKIPGNDNSTATLCLGHHAVPNGTLVKTITNDQIEVTNATELVQSSSTGRICDSPHRILDGENCTLIDALLGDPHCDGFQNKEWDLFVERSKAYSNCYPYDVPDYASLRSLVASSGTLEFNNESFNWTGVAQNGTSYACKRRSIKSFFSRLNWLHQLKYKYPALNVTMPNNDKFDKLYIWGVHHPSTDSDQTSLYAQASGRVTVSTKRSQQTVIPNIGSRPWVRGVSSRISIYWTIVKPGDILLINSTGNLIAPRGYFKIRSGKSSIMRSDAPIGKCNSECITPNGSIPNDKPFQNVNRITYGACPRYVKQNTLKLATGMRNVPEKQTRGIFGAIAGFIENGWEGMVDGWYGFRHQNSEGTGQAADLKSTQAAINQINGKLNRLIEKTNEKFHQIEKEFSEVEGRIQDLEKYVEDTKIDLWSYNAELLVALENQHTIDLTDSEMNKLFERTRKQLRENAEDMGNGCFKIYHKCDNACIGSIRNGTYDHDVYRDEALNNRFQIKGVELKSGYKDWILWISFAISCFLLCVVLLGFIMWACQKGNIRCNICI

SEQ ID NO: 471 - protein, 566 aa, Artificial Sequence; identical to SEQ ID NO: 452
  derived and/or modified protein sequence (wt) from hemagglutinin__InfluenzaA__ABB80715

SEQ ID NO: 472 - protein, 566 aa, Artificial Sequence
  derived and/or modified protein sequence (wt) from hemagglutinin__InfluenzaA__ABB80724
MKTIIALSYILCLVFAQKLPGNDNSTATLCLGHHAVPNGTLVKTITNDQIEVTNATELVQSSSTGRICDSPHRILDGENCTLIDALLGDPHCDGFQNKEWDLFVERSKAYSNCYPYDVPDYASLRSLVASSGTLEFNNESFNWTGVAQNGTSYACKRRSIKSFFSRLNWLHQLKYKYPALNVTMPNNDKFDKLYIWGVHHPSTDSDQASLYAQASGRVTVSTKRSQQTVIPNIGSRPWVRGVSSRISIYWTIVKPGDILLINSTGNLIAPRGYFKIRSGKSSIMRSDAPIGKCNSECITPNGSIPNDKPFQNVNRITYGACPRYVKQNTLKLATGMRNVPEKQTRGIFGAIAGFIENGWEGMVDGWYGFRHQNSEGTGQAADLKSTQAAINQINGKLNRLIEKTNEKFHQIEKEFSEVEGRIQDLEKYVEDTKIDLWSYNAELLVALENQHTIDLTDSEMNKLFERTRKQLRENAEDMGNGCFKIYHKCDNACIGSIRNGTYDHDVYRDEALNNRFQIKGVELKSGYKDWILWISFAMSCFLLCVVLLGFIMWACQKGNIRCNICI

SEQ ID NO: 473 - protein, 566 aa, Artificial Sequence; identical to SEQ ID NO: 458
  derived and/or modified protein sequence (wt) from hemagglutinin__InfluenzaA__ABB80737

SEQ ID NO: 474 - protein, 566 aa, Artificial Sequence
  derived and/or modified protein sequence (wt) from hemagglutinin__InfluenzaA__ABB80748
MKTIIALSYISCLVFAQKLPGNDNSTATLCLGHHAVPNGTLVKTITNDQIEVTNATELVQSSSTGRICDSPHRILDGENCTLIDALLGDPHCDGFQNKEWDLFVERSKAYSNCYPYDVPDYASLRSLVASSGTLEFNNESFNWTGVAQNGTSYACKRRSIKSFFSRLNWLHQLKYKYPALNVTMPNNDKFDKLYIWGVHHPSTDSDQTSLYAQASGRVTVSTQRSQQTVIPNIGSRPWVRGVSSRISIYWTIVKPGDILLINSTGNLIAPRGYFKIRSGKSSIMRSDAPIGKCNSECITPNGSIPNDKPFQNVNRITYGACPRYVKQNTLKLATGMRNVPEKQTRGIFGAIAGFIENGWEGMVDGWYGFRHQNSEGTGQAADLKSTQAAINQINGKLNRLIEKTNEKFHQIEKEFSEVEGRIQDLEEYVEDTKIDLWSYNAELLVALENQHTIDLTDSEMNKLFERTRKQLRENAEDMGNGCFKIYHKCDNACIGSIRNGTYDHDVYRDEALNNRFQIKGVELKSGYKDWILWISFAISCFLLCVVLLGFIMWACQKGNIRCNICI

SEQ ID NO: 475 - protein, 566 aa, Artificial Sequence
  derived and/or modified protein sequence (wt) from hemagglutinin__InfluenzaA__ABB82183
MKTIIALSYILCLVFAQKLPGNDNSTATLCLGHHAVPNGTLVKTITNDQIEVTNATELVQSSSTGRICDSPHQILDGENCTLIDALLGDPHCDGFQNKEWDLFVERSKAYSNCYPYDVPDYASLRSLVASSGTLEFNNESFNWTGVAQNGTSSACKRRSNKSFFSRLNWLHQLKYKYPALNVTMPNNEKFDKLYIWGVHHPSTDSDQISLYAQASGRVTVSTKRSQQTVIPNIGSRPWVRGVSSRISIYWTIVKPGDILLINSTGNLIAPRGYFKIRSGKSSVMRSDASIGRCNSECITPNGSIPNDKPFQNVNRITYGACPRYVKQNTLKLATGMRNVPEKQTRGIFGAIAGFIENGWEGMVDGWYGFRHQNSEGTGQAADLKSTQAAINQINGKLNRLIEKTNEKFHQIEKEFSEVEGRIQDLEKYVEDTKIDLWSYNAELLVALENQHTIDLTDSEMNKLFERTKKQLRENAEDMGNGCFKIYHKCDNACIGSIRNGTYDHDVYRDEALNNRFQIKGVELKSGYKDWILWISFAISCFLLCVVLLGFIMWACQKGNIRCNICI

SEQ ID NO: 476 - protein, 565 aa, Artificial Sequence; identical to SEQ ID NO: 296
  derived and/or modified protein sequence (wt) from hemagglutinin__InfluenzaA__ABB82194

SEQ ID NO: 477 - protein, 565 aa, Artificial Sequence
  derived and/or modified protein sequence (wt) from hemagglutinin__InfluenzaA__ABB82205
MKVKLLVLLCTFTATYADTICIGYHANNSTDTVDTVLEKNVTVTHSVNLLEDSHNGKLCLLKGIAPLQLGNCSVAGWILGNPECELLISKESWSYIVETPNPENGTCYPGYFADYEELREQLSSVSSFERFEIFPKESSWPNHTVTGVSASCSHNGKSSFYKNLLWLTGKNGLYPNLSKSYANSKEKEVLVLWGVHHPPNIGDQRALYHTENAYVSVVSSHYSRRFTPEIAKRPKVRDQEGRINYYWTLLEPGDTIIFEANGNLIAPRYAFALSRGFGSGIITSNAPMDECDAKCQTPQGAINSSLPFQNVHPVTIGECPKYVRSAKLRMVTGLRNIPSIQSRGLFGAIAGFIEGGWTGMVDGWYGYHHQNEQGSGYAADQKSTQNAINGITNKVNSVIEKMNTQFTAVGKEFNKLERRMENLNKKVDDGFLDIWTYNAELLVLLENERTLDFHDSNVKNLYEKVKSQLKNNAKEIGNGCFEFYHKCNDECMESVKNGTYDYPKYSEESKLNREKIDGVKLESMGVYQILAIYSTVASSLVLLVSLGAISFWMCSNGSLQCRICI

SEQ ID NO: 478 - protein, 565 aa, Artificial Sequence
  derived and/or modified protein sequence (wt) from hemagglutinin__InfluenzaA__ABB82216
MKVKLLVLLCTFTATYADTICIGYHANNSTDTVDTVLEKNVTVTHSVNLLEDSHNGKLCLLKGIAPLQLGNCSVAGWILGNPECELLISKESWSYIVETPNPENGTCYPGYFADYEELREQLSSVSSFERFEIFPKESSWPNHTVTGVSSSCSHNGKSSFYRNLLWLTGKNGLYPNLSKSYVNNKEKEVLVLWGVHHPPNIGDQRALYHTENAYVSVVSSHYSRRFTPEIAKRPKVRDQEGRINYYWTLLEPGDTIIFEANGNLIAPRYAFALSRGFGSGIITSNAPMDECDAKCQTPQGAINSSLPFQNVHPVTIGECPKYVRSAKLRMVTGLRNIPSIQSRGLFGAIAGFIEGGWTGMVDGWYGYHHQNEQGSGYAADQKSTQNAINGITNKVNSVIEKMNTQFTAVGKEFNKLERRMENLNKKVDDGFLDIWTYNAELLVLLENERTLDFHDSNVKNLYEKVKSQLKNNAKEIGNGCFEFYHKCNDECMESVKNGTYDYPKYSEESKLNREKIDGVKLESMGVYQILAIYSTVASSLVLLVSLGAISFWMCSNGSLQCRICI

SEQ ID NO: 479 - protein, 566 aa, Artificial Sequence
  derived and/or modified protein sequence (wt) from hemagglutinin__InfluenzaA__ABB82227
MKTIIALSYIFCLTLGQDLPGNDNSKATLCLGHHAVPNGTLVKTITDDQTEVTNATELVQSSSTGKICNNPHRILDGMDCTLIDALLGDPHCDVFQNETWDLFVERSKAFSNCYPYDVPDYASLRSLAASSGTLEFITEGFTWTGVTQNGGSNACKRGPGSGFFSRLNWLTKSGNTYPVLNVTMPNNDNFDKLYIWGVHHPSTDQEQTSLYVQASGRVTVSTRRSQQTIIPNIGSRPWVRGLSSRISIYWTIVKPGDVLVINSNGNLIAPRGYFKMRTGKSSIMRSDAPIDTCISECITPNGSIPNDKPFQNINKITYGACPKYVKQNTLKLATGMRNVPEKQTRGLFGAIAGFIENGWEGMIDGWYGFRHQNSEGTGQAADLKSTQAAIDQINGKLNRIIEKTNEKFHQIEKEFSEVEGRIQDLEKYVEDTKIDLWSYNAELLVAMENQHTIDLTDSEMNKLFEKTRRQLRENAEDMGNGCFKIYHKCDNACIESIRNGTYDHDVYRDEALNNRFQIKGVELKSGYKDWILWISFAISCFLLCVVLLGFIMWACQRGNIRCNICI

SEQ ID NO: 480 - protein, 565 aa, Artificial Sequence
  derived and/or modified protein sequence (wt) from hemagglutinin__InfluenzaA__ABB83026
MKVKLLILLCTFTATYADTICIGYHANNSTDTVDTVLEKNVTVTHSVNLLEDSHNGKLCLLKGIAPLQLGNCSVAGWILGNPECELLISKESWSYIVETPNPENGTCYPGYFADYEELREQLSSVSSFERFEIFPKESSWPNHTVTGVSASCSHNGKSSFYRNLLWLTEKNGLYPNLSKSYANNKEKEVLILWGVHHPPNIGDQRTLYHTENAYVSVVSSHYSRRFTPEITKRPKVRDQEGRINYYWTLLEPGDTIIFEANGNLIAPWYAFALSRGFGSGIITSNAPMDECDAKCQTPQGAINSSLPFQNVHPVTIGECPKYVRSAKLRMVTGLRNIPSIQSRGLFGAIAGFIEGGWTGMVDGWYGYHHQNEQGSGYAADQKSTQNAINGITNKVNSVIEKMNTQFTAVGKEFNKLERRMENLNKKVDDGFLDIWTYNAELLVLLENERTLDFHDSNVKNLYEKVKSQLKNNAKEIGNGCFEFYHKCNNECMESVKNGTYDYPKYSEESKLNREKIDGVKLESMGVYQILAIYSTVASSLVLLVSLGAISFWMCSNGSLQCRICI

SEQ ID NO: 481 - protein, 565 aa, Artificial Sequence
  derived and/or modified protein sequence (wt) from hemagglutinin__InfluenzaA__ABB83127
MKVKLLILLCTFTATYADTICIGYHANNSTDTVDTVLEKNVTVTHSVNLLEDSHNGKLCLLKGIAPLQLGNCSVAGWILGNPECELLISKESWSYIVETPNPENGACYPGYFADYEELREQLSSVSSFERFEIFPKESSWPNHTVTGVSASCSHNGKSSFYRNLLWLTGKNGLYPNLSKSYANNKEKEVLILWGVHHPPNIGDQRTLYHTENAYVSVVSSHYSRRFTPEITKRPKVRDQEGRINYYWTLLEPGDTIIFEANGNLIAPWYAFALSRGFGSGIIISNAPMDECDAKCQTPQGAINSSLPFQNVHPVTIGECPKYVRSAKLRMVTGLRNIPSIQSRGLFGAIAGFIEGGWTGMVDGWYGYHHQNEQGSGYAADQKSTQNAINGITNKVNSVIEKMNTQFTAVGKEFNKLERRMENLNKKVDDGFLDIWTYNAELLVLLENERTLDFHDSNVKNLYEKVKSQLKNNAKEIGNGCFEFYHKCNNECMESVKNGTYDYPKYSEESKLNREKIDGVKLDSMGVYQILAIYSTVASSLVLLVSLGAISFWMCSNGSLQCRICI

SEQ ID NO: 482 - protein, 565 aa, Artificial Sequence
  derived and/or modified protein sequence (wt) from hemagglutinin__InfluenzaA__ABB83138
MKVKLLILLCTFTATYADTICIGYHANNSTDTVDTVLEKNVTVTHSVNLLEDSHNGKLCLLKGIAPLQLGNCSVAGWILGNPECELLISKESWSYIVETPNPENGACYPGYFADYEELREQLSSISSFERFEIFPKESSWPNHTVTGVSASCSHNGKSSFYRNLLWLTGKNGLYPNLSKSYANNKEKEVLILWGVHHPPNIGDQRTLYHTENAYVSVVSSHYSRRFTPEITKRPKVRDQEGRINYYWTLLEPGDTIIFEANGNLIAPWYAFALSRGFGSGIITSNAPMDECDAKCQTPQGAINSSLPFQNVHPVTIGECPKYVRSAKLRMVTGLRNIPSIQSRGLFGAIAGFIEGGWTGMVDGWYGYHHQNEQGSGYAADQKSTQNAINGITNKVNSVIEKMNTQFTAVGKEFNKLERRMENLNKKVDDGFLDIWTYNAELLVLLENERTLDFHDSNVKNLYEKVKSQLKNNAKEIGNGCFEFYHKCNNECMESVKNGTYDYPKYSEESKLNREKIDGVKLDSMGVYQILAIYSTVASSLVLLVSLGAISFWMCSNGSLQCRICI

SEQ ID NO: 483 - protein, 566 aa, Artificial Sequence
  derived and/or modified protein sequence (wt) from hemagglutinin__InfluenzaA__ABB86877
MKAILLILLYTFTATNADTLCIGYHANNSTDTVDTVLEKNVTVTHSVNLLEDRHNGKLCNLGGIAPLYLGNCNIAGWLLGNPECELLFTVSSWSYIVETSNSDNGTCYPGDFINYEELREQLSSMSSYERFEIFPKESSWPNHETNRGVTAACPYAGANSFYRNLIWLVKKGNSYPKINKSYVNNKEKEVLVLWGIHHPPTSADQQSLYQNADAYVSVESSKYNKKFKPEIATRPKVRGQAGRMNYYWTLVEPGDTITFEATGNLVVPRYAFAMNRGSGSGIIISDTPVHDCNTTCQTPKGAINTSLPFQNVHPVTIGECPKYVKSTKLRMATGLRNIPSIQSRGLFEAIAGFIEGGWTGMIDGWYGYHHQNEQGSGYAADRKSTQNAIDGITNKVNSVIEKMNTQFTAVGKEFNHLEKRIENLNKKVDDGFLDVWTYNAELLVLLENERTLDFHDSNVKNLYEKVRSQLRNNAKEIGNGCFEFYHKCDDTCMESVRNGTYDYLKYSEESKLNREKIEGVKLDSARIYQILAIYSTVASSLVLLVSLGAISFWMCSNGSLQCRICI

SEQ ID NO: 484 - protein, 566 aa, Artificial Sequence
  derived and/or modified protein sequence (wt) from hemagglutinin__InfluenzaA__ABB86887
MKAILLILLYTFTATNADTLCIGYHANNSTDTVDTVLEKNVTVTHSVNLLEDRHNGKLCNLGGIAPLYLGNCNIAGWLLGNPECELLFTVSSWSYIVETSNSDNGTCYPGDFINYEELREQLSSMSSYERFEIFPKESSWPNHETNRGVTAACPYAGANSFYRNLIWLVKKGNSYPKINKSYVNNKEKEVLVLWGIHHPPTSADQQSLYQNADAYVSVESSKYNKKFKPEIATRPKVRGQAGRMNYYWTLVEPGDTITFEATGNLVVPRYAFAMKRGSGSGIIISDTPVHDCNTTCQTPKGAINTSLPFQNIHPVTIGECPKYVKSTKLRMATGLRNIPSIQSRGLFGAIAGFIEGGWTGMIDGWYGYHHQNEQGSGYAADRKSTQNAIDGITNKVNSVIEKMNTQFTAVGKEFNHLEKRIENLNKKVDDGFLDVWTYNAELLVLLENERTLDFHDSNVKNLYEKVRSQLRNNAKEIGNGCFEFYHKCDDTCMESVRNGTYDYLKYSEESKLNREKIEGVKLDSARIYQILAIYSTVASSLVLLVSLGAISFWMCSNGSLQCRICI

SEQ ID NO: 485 - protein, 565 aa, Artificial Sequence
  derived and/or modified protein sequence (wt) from hemagglutinin__InfluenzaA__ABB86899
MKVKLLILLCTFTATYADTICIGYHANNSTDTVDTVLEKNVTVTHSVNLLEDSHNGKLCLLKGIAPLQLGNCSVAGWILGNPECELLISKESWSYIVETPNPENGACYPGHFADYEELREQLSSVSSFERFEIFPKESSWPNHTITGVSASCSHNGKRSFYRNLLWLTGKNGLYPNLSKSYANNKEKEVLILWGVHHPPNIGDQRTLYHTENAYVSVVSSHYSRRFTPEITKRPKVRDQEGRINYYWTLLEPGDTIIFEANGNLIAPWYAFALSRGFGSGIITSNAPMDECDAKCQTPQGAINSSLPFQNVHPVTIGECPKYVRSAKLRMVTGLRNIPSIQSRGLFGAIAGFIEGGWTGMVDGWYGYHHQNEQGSGYAADQKSTQNAINGITNKVNSVIEKMNTQFTAVGKEFSKLERRMENLNKKVDDGFLDIWTYNAELLVLLENERTLDFHDSNVKNLYEKVKGQLKNNAKEIGNGCFEFYHKCNNECMESVKNGTYDYPKYSEESKLNREKIDGVKLDSMGVYQILAIYSTVASSLILLVSLGAISFWMCSNGSLQCRICI

SEQ ID NO: 486 - protein, 566 aa, Artificial Sequence
  derived and/or modified protein sequence (wt) from hemagglutinin__InfluenzaA__ABB86907
MKAILLVLLYTFTSTNADTLCIGYHANNSTDTVDTVLEKNVTVTHSVNLLEDKHNGKLCRLGGIAPLHLGKCNIAGWLLGNPECDLLLTVSSWSYIVETSNSYNGTCYPGDFTNYEELREQLSSVSSFERFEIFPKASSWPNHETNRGVTAACPHAGTNSFYRNLIWLVKKGNTYPKLSKSYVNNKGKEVLVLWGIHHPSTSTDQQSLYQNADTYVFVGTSKYNKKFKPEIAVRPKVKDQAGRMNYYWTLVEPGDTITFEATGNLVVPRYAFAMNRGHGSGIIISDTPVHDCNTTCQTPKGAINTSLPFQNVHPVTIGKCPKYVKSTRLRMATGLRNIPSIQSRGLFGAIAGFIEGGWTGMIDGWYGYHHQNGQGSGYAADQKSTQNAIDGITNKVNSVIEKMNTQFTAVGKEFNHLEKRIENLNKKVDDGFLDVWTYNAELLVLLENERTLDFHDSNVKNLYEKVRRQLKNNAKEIGNGCFEFYHNCDDACMESVKNGTYDYPKYSEESRLNREEINGIKLDSTRIYQILAIYSTVASSSVLLVSLGAISFWMCSNGSLQCRICI

SEQ ID NO: 487 - protein, 565 aa, Artificial Sequence
  derived and/or modified protein sequence (wt) from hemagglutinin__InfluenzaA__ABB86917
MKVKLLILLCTFTATYADPICIGYHANNSTDTVDTVLEKNVAVTHSVNLLEDSHNGKLCLLKGIAPLQLGNCSVAGWILGNPECELLISKESWSYIVETPNPENGACYPGYFADYEELREQLSSVSSFERFEIFPKESSWPNHTVTGVSASCSHNGKSSFYRNLLWLTGKNGLYPNLSKSYANNKEKEVLILWGVHHPPNIGDQRTLYHTENAYVSVVSSHYSRRFTPEITKRPKVRDQEGRINYYWTLLEPGDTIIFEANGNLIAPWYAFALSRGFGSGIITSNAPMDECDAKCQTPQGAINSSLPFQNVHPVTIGECPKYVRSAKLRMVTGLRNIPSIQSRGLFGAIAGFIEGGWTGMVDGWYGYHHQNEQGSGYAADQKSTQNAINGITNKVNSVIEKMNTQFTAVGKEFNKLERRMENLNKKVDDGFLDIWTYNAELLVLLENERTLDFHDSNVKNLYEKVKSQLKNNAKEIGNGCFEFYHKCNNECMESVKNGTYDYPKYSEESKLNREKIDGVKLDSMGVYQILAIYSTVASSLVLLVSLGAISFWMCSNGSLQCRICI

SEQ ID NO: 488 - protein, 565 aa, Artificial Sequence
  derived and/or modified protein sequence (wt) from hemagglutinin__InfluenzaA__ABB86929
MKVKLLILLYTFTATYADTICIGYHANNSTDTVDTVLEKNVTVTHSVNLLEDSHNGKLCLLKGIAPLQLGNCSVAGWILGNPECELLISKESWSYIVETPNPENGACYPGHFADYEELREQLSSVSSFERFEIFPKESSWPNHTITGVSASCSHNGKRSFYRNLLWLTGKNGLYPNLSKSYANNKEKEVLILWGVHHPPNIGDQRTLYHTENAYVSVVSSHYSRRFTPEITKRPKVRDQEGRINYYWTLLEPGDTIIFEANGNLIAPWYAFALSRGFGSGIITSNAPMDECDAKCQTPQGAINSSLPFQNVHPVTIGECPKYVRSAKLRMVTGLRNIPSIQSRGLFGAIAGFIEGGWTGMVDGWYGYHHQNEQGSGYAADQKSTQNAINGITNKVNSVIEKMNTQFTAVGKEFSKLERRMENLNKKVDDGFLDIWTYNAELLVLLENERTLDFHDSNVKNLYEKVKGQLKNNAKEIGNGCFEFYHKCNNECMESVKNGTYDYPKYSEESKLNREKIDGVKLDSMGVYQILAIYSTVASSLILLVSLGAISFWMCSNGSLQCRICI

SEQ ID NO: 489 - protein, 566 aa, Artificial Sequence
  derived and/or modified protein sequence (wt) from hemagglutinin__InfluenzaA__ABB86937
MKAILLVLLYTFTSTNADTLCIGYHANNSTDTVDTVLEKNVTVTHSVNLLEDKHNGRLCKLGGIAPLHLGKCNIAGWLLGNPECELLFTVSSWSYIVETSNSYNGTCYPGDFINYEELREQLSSVSSFERFEIFPKASSWPNHETNRGVTAACPHAGTNSFYRNLIWLVKKGNTYPKISKSYVNNKGKEVLVLWGIHHPSTSNDQQSLYQNADTYVFVGPSKYNKKFKPEIATRPKVRDQAGRMNYYWTLVEPGDTITFEATGNLVVPRYAFAMNRGSESGIIISDTPVHDCNTTCQTPKGAINTSLPFQNVHPVTIGECPKYVKSTRLRMATGLRNIPSIQSRGLFGAIAGFIEEGWTGMIDGWYGYHHQNGQGSGYAADQKSTQNAIDGITNKVNSVIEKMNTQFTAVGKEFNHLEKRIENLNKKVDDGFLDVWTYNAELLVLLENERTLDFHDSNVKNLYEKVRRQLKNNAKEIGNGCFEFYHKCDDACMESVKNGTYDYPKYSEESRLNREEINGIKLDSTRIYQILAIYSTVASSSVLLVSLGAISFWMCSNGSLQCRICI

SEQ ID NO: 490 - protein, 566 aa, Artificial Sequence
  derived and/or modified protein sequence (wt) from hemagglutinin__InfluenzaA__ABB86946
MKAILLVLLYTFTAANADTLCIGYHANNSTDTVDTVLEKNVTVTHSVNLLEDRHNGKLCKLRGIAPLHLGKCNIAGWLLGNPECESLSTVSSWSYIVETSNSDNGTCYPGDFINYEELREQLSSVSSFERFEIFPKASSWPNHETNRGTTAACPYAGANSFYRNLIWLVKKGNSYPKLNKSYVNNKGKEVLVLWGIHHPSTSNEQQSLYQNADTYVFVGSSKYNKKFKPEIATRPKVRDQAGRMNYYWTLIEPGDTITFEATGNLVVPRYAFAMNRGSGSGIIISDTPVHDCNTTCQTPKGAINTSLPFQNVHPVTIGECPKYVKSTKLRMATGLRNIPSIQSRGLFGAIAGFIEGGWTGMIDGWYGYHHQNEQGSGYAADQKSTQNAIDGITNKVNSVIEKMNTQFTAVGKEFNHLEKRIENLNKKVDDGFLDVWTYNAELLVLLENERTLDFHDSNVKNLYEKVRSQLKNNAKEIGNGCFEFYHKCDDACMESVKNGTYDYPKYSEESRLNREEIDGIKLDSTRIYQILAIYSTVASSSVLLVSLGAISFWMCSNGSLQCRICI

SEQ ID NO: 491 - protein, 566 aa, Artificial Sequence
  derived and/or modified protein sequence (wt) from hemagglutinin__InfluenzaA__ABB96319
MKTIIALSYIFCQVFAQNLPGNDNSTATLCLGHHAVPNGTLVKTITNDQIEVTNATELVQSSSTGRICDNPHRILDGKNCTLIDALLGDPHCDGFQNEKWDLFVERSKAFSNCYPYDVPDYASLRSLVASSGTLEFFNEGFNWTGVTQNGGSYACKRGPDNSFFSRLNWLYKSESTYPVLNVTMPNNDNFDKLYIWGVHHPSTDKEQTNLYVQASGRVTVSTKRSQQTIIPNVGPRPWVRGLSSRISIYWTIVKPGDVLLINSNGNLIAPRGYFKIRTGKSSIMRSDAPIGTCSSECITPNGSIPNDKPFQNVNKITYGACPKYVKQNTLKLATGMRNVPEKQTRGIFGAIAGFIENGWEGMIDGWYGFRHQNSEGTGQAADLKSTQAAIDQINGKLNRVIEKTNEKFHQIEKEFSEVEGRIQDLEKYVEDTKIDLWSYNAELLVALENQHTIDLTDSEMNKLFEKTRRQLRENAEDMGNGCFKIYHKCDNACIGSIRNGTYDHDVYRDEALNNRFQIKGVELKSGYKDWILWISFAISCFLLCVVLLGFIMWACQKGNIRCNICI

SEQ ID NO: 492 - protein, 566 aa, Artificial Sequence
  derived and/or modified protein sequence (wt) from hemagglutinin__InfluenzaA__ABB96330
MKTIIALSYIFCQVFAQNLPGNDNSTATLCLGHHAVPNGTLVKTITNDQIEVTNATELVQSSSTGRICDNPHRILDGKNCTLIDALLGDPHCDGFQNEKWDLFVERSKAFSNCYPYDVPDYASLRSLVASSGTLEFFNEGFNWTGVTQNGGSYACKRGPDNSFFSRLNWLYKSESTYPVLNVTMPNNDNFDKLYIWGVHHPSTDKEQTNLYVQASGRVTVSTKRSQQTIIPNVGSRPWVRGLSSRISIYWTIVKPGDVLLINSNGNLIAPRGYFKIRTGKSSIMRSDAPIGTCSSECITPNGSIPNDRPFQNVNKITYGACPKYVKQNTLKLATGMRNVPEKQTRGIFGAIAGFIENGWEGMVDGWYGFRHQNSEGTGQAADLKSTQAAIDQINGKLNRVIEKTNEKFHQIEKEFSEVEGRIQNLEKYVEDTKIDLWSYNAELLVALENQHTIDLTDSEMNKLFEKTRRQLRENAEDMGNGCFKIYHKCDNACIGSIRNGTYDHDVYRDEALNNRFQIKGVELKSGYKDWILWISFAISCFLLCVVLLGFIMWACQKGNIRCNICI

SEQ ID NO: 493 - protein, 566 aa, Artificial Sequence
  derived and/or modified protein sequence (wt) from hemagglutinin__InfluenzaA__ABB96341
MKTIIALSYIFCQVFAQNLPGNDNSTATLCLGHHAVPNGTLVKTITNDQIEVTNATELVQSSSTGRICDNPHRILDGKNCTLIDALLGDPHCDGFQNEKWDLFVERSKAFSNCYPYDVPDYASLRSLVASSGTLEFFNEGFNWTGVTQNGGSYACKKGPDNSFFSRLNWLYKSESTYPVLNVTMPNNDNFDKLYIWGVHHPSTDKEQTNLYVQASGRVTVSTKRSQQTIIPNVGSRPWVRGLSSRISIYWTIVKPGDVLLINSNGNLIAPRGYFKIRTGKSSIMRSDAPIGTCSSECITPNGSIPNDKPFQNVNKITYGACPKYVKQNTLKLATGMRNVPEKQTRGIFGAIAGFIENGWEGMIDGWYGFRHQNSEGTGQAADLKSTQAAIDQINGKLNRVIEKTNEKFHQIEKEFSEVEGRIQDLEKYVEDTKIDLWSYNAELLVALENQHTIDLTDSEMNKLFEKTRRQLRENAEDMGNGCFKIYHKCDNACIGSIRNGTYDHDVYRDEALNNRFQIKGVELKSGYKDWILWISFAISCFLLCVVLLGFIMWACQKGNIRCNICI

SEQ ID NO: 494 - protein, 566 aa, Artificial Sequence
  derived and/or modified protein sequence (wt) from hemagglutinin__InfluenzaA__ABB96395
MKTIIALSYIFCQVFAQNLPGNDNSTATLCLGHHAVPNGTLVKTITNDQIEVTNATELVQSSSTGRICDSPHRILDGKNCTLMDALLGDPHCDGFQNEKWDLFVERSKAFSNCYPYDVPDYASLRSLVASSGTLEFINEGFNWTGVTQNGGSYACKRGPDNSFFSRLNWLYKSESTYPVLNVTMPNNDNFDKLYIWGVHHPSTDKEQTNLYVQASGRVTVSTKRSQQTIIPNVGSRPWVRGLSSRISIYWTIVKPGDILLINSNGNLIAPRGYFKIRTGKSSIMRSDAPIGTCSSECITPNGSIPNDKPFQNVNKITYGACPKYVKQNTLKLATGMRNVPEKQTRGIFGAIAGFIENGWEGMIDGWYGFRHQNSEGTGQAADLKSTQAAIDQINGKLNRVIERTNEKFHQIEKEFSEVEGRIQDLEKYVEDTKIDLWSYNAELLVALENQHTIDLTDSEMNKLFEKTRRQLRENAEDMGNGCFKIYHKCDNACIGSIRNGTYDHDVYRDEALNNRFQIKGVELKSGYKDWILWISFAISCFLLCVVLLGFIMWACQKGNIRCNICI

SEQ ID NO: 495 - protein, 565 aa, Artificial Sequence
  derived and/or modified protein sequence (wt) from hemagglutinin__InfluenzaA__ABB96487
MKVKLLILLCTFTATYADTICIGYHANNSTDTVDTVLEKNVTVTHSVNLLEDSHNGKLCLLKGIAPLQLGNCSVAGWILGNPECELLISKESWSYIVETPNPENGACYPGYFADYEELREQLSSVSSFERFEIFPKKSSWPNHTVTGVSASCSHDGKSSFYRNLLWLTGKNGLYPNLSKSYANNKEKEVLILWGVHHPPNIGDQRTLYHTENAYVSVVSSHYSRRFTPEITKRPKVRDQEGRINYYWTLLEPGDTIIFEANGNLIAPWYAFALSRGFGSGIITSNAPMDECDAKCQTPQGAINSSLPFQNVHPVTIGECPKYVRSAKLRMVTGLRNIPSIQSRGLFGAIAGFIEGGWTGMVDGWYGYHHQNEQGSGYAADQKSTQNAINGITNKVNSVIEKMNTQFTAVGKEFNKLERRMENLNKKVDDGFLDIWTYNAELLVLLENERTLDFHDSNVKNLYEKVKSQLKNNAKEIGNGCFEFYHKCNNECMESVKNGTYDYPKYSEESKLNREKIDGVKLDSMGVYQILAIYSTVASSLVLLVSLGAISFWMCSNGSLQCRICI

SEQ ID NO: 496 - protein, 566 aa, Artificial Sequence
  derived and/or modified protein sequence (wt) from hemagglutinin__InfluenzaA__ABB96520
MKTIIALSYIFCLALGQDLPGNGNSTATLCLGHHAVPNGTLVKTITDDQIEVTNATELVQSSSTGKICNNPHRILDGIDCTLIDALLGDPHCDVFQNETWDLFVERSKAFSNCYPYDVPDYASLRSLVASSGTLEFITEGFTWTGVTQNGGSNACKRGPGSGFFSRLNWLTKSGSTYPVLNVTMPNNDNFDKLYIWGVHHPSTDQEQTSLYVQASGRVTVSTRRSQQTIIPNIGSRPWVRGLSSRISIYWTIVKPGDVLVINSNGNLIAPRGYFKMRTGKSSIMRSDAPIDTCISECITPNGSIPNDKPFQNVNKITYGACPKYVKQKTLKLATGMRNIPEKKTRGIFGAIAGFIENGWEGMIDGWYGFRHQNSEGTGQAADLKSTQAAIDQINGKLNRVIEKTNEKFHQIEKEFSEVEGRIQDLEKYVEDTKIDLWSYNAELLVALENQHTIDLTDSEMNKLFEKTRRQLRENAEDMGNGCFKIYHKCDNACIESIRNGTYDHDVYRDEALNNRFQIKGVELKSGYKDWILWISFAISCFLLCVVLLGFIMWACQRGNIRCNICI

SEQ ID NO: 497 - protein, 566 aa, Artificial Sequence
  derived and/or modified protein sequence (wt) from hemagglutinin__InfluenzaA__ABB96531
MKTIIALSYILCLVSAQKIPGNDSSTATLCLGHHAVPNGTLVKTITNDQIEVTNATELVQSSSTGRICDSPHRILDGENCTLIDALLGDPHCDGFQNKEWDLFVERSKAYSNCYPYDVPDYASLRSLVASSGTLEFNNESFNWTGVAQNGTSYACKRRSIKSFFSRLNWLHQLKYKYPALNVTMPNNDKFDKLYIWGVHHPSTDSDQTSLYAQASGRVTVSTKRSQQTVIPNIGSRPWVRGVSSRISIYWTIVKPGDILLINSTGNLIAPRGYFKIRSGKSSIMRSDAPIGKCNSECITPNGSIPNDKPFQNVNRITYGACPRYVKQNTLKLATGMRNVPEKQTRGIFGAIAGFIENGWEGMVDGWYGFRHQNSEGTGQAADLKSTQAAINQINGKLNRLIEKTNEKFHQIEKEFSEVEGRIQDLEKYVEDTKIDLWSYNAELLVALENQHTIDLTDSEMNKLFERTRKQLRENAEDMGNGCFKIYHKCDNACIGSIRNGTYDHDVYRDEALNNRFQIKGVELKSGYKDWILWISFAISCFLLCVVLLGFIMWACQKGNIRCNICI

SEQ ID NO: 498 - protein, 566 aa, Artificial Sequence
  derived and/or modified protein sequence (wt) from hemagglutinin__InfluenzaA__ABC02234
MKTIIALSYILCLVFAQKLPGNDNSTATLCLGHHAVPNGTLVKTITNDQIEVTNATELVQSSSTGRICDSPHRILDGENCTLIDALLGDPHCDGFQNKEWDLFVERSKAYSNCYPYDVPDYASLRSLVASSGTLEFNNESFNWTGVAQNGTSYACKRRSIKSFFSRLNWLHQLKYKYPALNVTMPNNDKFDKLYIWGVHHPSTDSDQTSLYAQASGRVTVSTKISQQTVIPNIGSRPWVRGVSSRISIYWTIVKPGDILLINSTGNLIAPRGYFKIRSGKSSIMRSDAPIGKCNSECITPNGSIPNDKPFQNVNRITYGACPRYVKQNTLKLATGMRNVPEKQTRGIFGAIAGFIENGWEGMVDGWYGFRHQNSEGTGQAADLKSTQAAINQINGKLNRLIEKTNEKFHQIEKEFSEVEGRIQDLEKYVEDTKIDLWSYNAELLVALENQHTIDLTDSEMNKLFERTRKQLRENAEDMGNGCFKIYHKCDNACIGSIRNGTYDHDVYRDEALNNRFQIKGVELKSGYKDWILWISFAMSCFLFCVVLLGFIMWACQKGNIRCNICI

SEQ ID NO: 499 - protein, 566 aa, Artificial Sequence
  derived and/or modified protein sequence (wt) from hemagglutinin__InfluenzaA__ABC02255
MKTIIALSYIFCLVLAQDLPGNDNSTATLCLGHHAVPNGTLVKTITNDQIEVTNATELVQSSSTGKICNNPHRILDGINCTLIDALLGDPHCDGFQNEKWDLFVERSKAFSNCYPYDVPDYASLRSLVASSGTLEFINEGFNWTGVTQNGGSNACKRGPDSGFFSRLNWLYKSGSTYPVLNVTMPNNDNFDKLYIWGVHHPSTDQEQTNLYVQASGRVTVSTKRSQQTIIPNVGSRPWVRGLSSRISIYWTIVKPGDILVINSNGNLIAPRGHFKMRTGKSSIMRSDAPIGTCSSECITPNGSIPNDKPFQNVNKITYGACPKYVKQNTLKLATGMRNVPEKQTRGIFGAIAGFIENGWEGMIDGWYGFRHQNSEGTGQAADLKSTQAAIDQINGKLNRVIEKTNEKFHQIEKEFSEVEGRIQDLEKYVEDTKIDLWSYNAELLVALENQHTIDLTDSEMNKLFEKTRRQLRENAEDMGNGCFKIYHKCDNACIGSIRNGTYDHDVYRDEALNNRFQIKGVELKSGYKDWILWISFAISCFLLCVVLLGFIMWACQKGNIRCNICI

SEQ ID NO: 500 - protein, 566 aa, Artificial Sequence
  derived and/or modified protein sequence (wt) from hemagglutinin__InfluenzaA__ABC02266
MKTIIALSYIFCLVFAQDLPGNDNSTATLCLGHHAVPNGTLVKTITNDQIEVTNATELVQSSSTGKICDNPHRILDGINCTLIDALLGDPHCDGFQNEKWDLFVERSKAFSNCYPYDVPDYASLRSLVASSGTLEFINEGFNWTGVTQNGGSRACKRGPDNGFFSRLNWLYKSGSTYPVQNVTMPNNDNSDKLYIWGVHHPSTDKEQTDLYVQASGKVTVSTKRSQQTVIPNVGSRPWVRGLSSRVSIYWTIVKPGDILVINSNGNLIAPRGYFKMRTGKSSIMRSDAPIGTCSSECITPNGSIPNDKPFQNVNKITYGACPKYVKQNTLKLATGMRNVPEKQTRGIFGAIAGFIENGWEGMIDGWYGFRHQNSEGTGQAADLKSTQAAIDQINGKLNRVIEKTNEKFHQIEKEFSEVEGRIQDLEKYVEDTKIDLWSYNAELLVALENQHTIDLTDSEMNKLFEKTRRQLRENAEDMGNGCFKIYHKCDNACIGSIRNGTYDHDVYRDEALNNRFQIKGVELKSGYKDWILWISFAISCFLLCVVLLGFIMWACQKGNIRCNICI

SEQ ID NO: 501 - protein, 566 aa, Artificial Sequence
  derived and/or modified protein sequence (wt) from hemagglutinin__InfluenzaA__ABC02288
MKTIIALSYILCLVFAQKIPGNDNSTATLCLGHHAVPNGTLVKTITNDQIEVTNATELVQSSSTGRICDSPHRILDGENCTLIDALLGDPHCDGFQNKEWDLFVERSKAYSNCYPYDVPDYASLRSLVASSGTLEFNNESFNWTGVAQNGTSYACKRRSIKSFFSRLNWLHQLKYKYPALNVTMPNNDKFDKLYIWGVHHPSTDSDQTSLYAQASGRVTVSTKRSQQTVIPNIGSRPWVRGVSSRISIYWTIVKPGDILLINSTGNLIAPRGYFKIRSGKSSIMRSDAPIGKCNSECITPNGSIPNDKPFQNVNRITYGACPRYVKQNTLKLATGMRNVPEKQTRGIFGAIAGFIENGWEGMVDGWYGFRHQNSEGTGQAADLKSTQAAINQINGKLNRLIEKTNEKFHQIEKEFSEVEGRIQDLEKYVEDTKIDLWSYNAELLVALENQHTIDLTDSEMNKLFERTRKQLRENAEDMGNGCFKIYHKCDNACIGSIRNGTYDHDVYRDEALNNRFQIKGVELKSGHKDWILWISFAISCFLLCVVLLGFIMWACQKGNIRCNICI

SEQ ID NO: 502 - protein, 566 aa, Artificial Sequence; identical to SEQ ID NO: 470
  derived and/or modified protein sequence (wt) from hemagglutinin__InfluenzaA__ABC02299

SEQ ID NO: 503 - protein, 566 aa, Artificial Sequence; identical to SEQ ID NO: 494
  derived and/or modified protein sequence (wt) from hemagglutinin__InfluenzaA__ABC02310

SEQ ID NO: 504 - protein, 566 aa, Artificial Sequence; identical to SEQ ID NO: 499
  derived and/or modified protein sequence (wt) from hemagglutinin__InfluenzaA__ABC02321

SEQ ID NO: 505 - protein, 566 aa, Artificial Sequence; identical to SEQ ID NO: 305
  derived and/or modified protein sequence (wt) from hemagglutinin__InfluenzaA__ABC02332

SEQ ID NO: 506 - protein, 566 aa, Artificial Sequence
  derived and/or modified protein sequence (wt) from hemagglutinin__InfluenzaA__ABC39805
MKTIIALSYILCLVFAQNLPGNDNSTATLCLGHHAVPNGTLVKTITNDQIEVTNATELVQSSSAGRICDSPHRILDGKNCTLIDALLGDPHCDGFQNEKWDLFVERSKAFSNCYPYDVQDYASLRSLVASSGTLEFINEGFNWTGVTQSGGSYACKRGSGNSFFSRLNWLYKSESKYPALNVTMPNNGNFDKLYIWGVHHPSTDKEQTNLYVRASGRVTVSTKRSQQTVIPNIGPRPWVRGLSSRISIYWTIVKPGDILLINSSGNLIAPRGYFKIRTGKSSIMRSDAPIGTCSSECITPNGSIPNDKPFQNVNKITYGACPKYVKQNTLKLATGMRNIPEKQTRGIFGAIAGFIENGWEGMVDGWYGFRHQNSEGTGQAADLKSTQAAIDQINGKLNRVIEKTNEKFHQIEKEFSEVEGRIQDLEKYVEDTKIDLWSYNAELLVALENQHTIDLTDSEMNKLFEKTRRQLRENAEDMGNGCFKIYHKCDNACIGSIRNGTYDHDVYRDEALNNRFQIKGVELKSGYKDWILWISFAISCFLLCVVLLGFIMWACQKGNIRCNICI

SEQ ID NO: 507 - protein, 565 aa, Artificial Sequence
  derived and/or modified protein sequence (wt) from hemagglutinin__InfluenzaA__ABC40522
MKVKLLILLCTFTATYADTICIGYHANNSTDTVDTVLEKNVTVTHSVNLLEDSHNGKLCLLKGIAPLQLGNCSVAGWILGNPECELLISKESWSYIVETPNPENGACYPGYFADYEELREQLSSVSSFERFEIFPKESSWPNHTVTGVSASCSHNGKSSFYKNLLWLTGKNGLYPNLSKSYANNKEKEVLILWGVHHPPNIGDQRTLYHTENAYVSVVSSHYSRRFTPEITKRPKVRDQEGRINYYWTLLEPGDTIIFEANGNLIAPWYAFALSRGFGSGIITSNAPMDECDAKCQTPQGAINSSLPFQNVHPVTIGECPKYVRSAKLRMVTGLRNIPSIQSRGLFGAIAGFIEGGWTGMVDGWYGYHHQNEQGSGYAADQKSTQNAINGITNKVNSVIEKMNTQFTAVGKEFNKLERRMENLNKKVDDGFLDIWTYNAELLVLLENERTLDFHDSNVKNLYEKVKSQLKNNAKEIGNGCFEFYHKCNNECMESVKNGTYDYPKYSEESKLNREKIDGVKLDSMGVYQILAIYSTVASSLVLLVSLGAISFWMCSNGSLQCRICI

SEQ ID NO: 508 - protein, 565 aa, Artificial Sequence; identical to SEQ ID NO: 296
  derived and/or modified protein sequence (wt) from hemagglutinin__InfluenzaA__ABC40533

SEQ ID NO: 509 - protein, 566 aa, Artificial Sequence [sequence omitted]

SEQ ID NO: 510 - protein, 566 aa, Artificial Sequence
  derived and/or modified protein sequence (wt) from hemagglutinin__InfluenzaA__ABC40608
MKTIIALSYILCLVFAQKLPGNDNSTATLCLGHHAVPNGTLVKTITNDQIEVTNATELVQSSSTGRICDSPHRILDGENCTLIDALLGDPHCDGFQNKEWDLFVERSKAYSNCYPYDVPDYASLRSLVASSGTLEFNNESFNWTGVAQNGTSSACKRRSIKSFFSRLNWLHQLKYKYPALNVTMPNNDKFDKLYIWGVHHPSTDSDQTSLYAQASGRVTVSTRRSQQTVIPNIGSRPWVRGVSSRISIYWTIVKPGDILLINSTGNLIAPRGYFKIRSGKSSIMRSDAPIGKCNSECITPNGSIPNDKPFQSVNRITYGACPRYVKQNTLKLATGMRNVPEKQTRGIFGAIAGFIENGWEGMVDGWYGFRHQNSEGTGQAADLKSTQAAINQINGKLNRLIEKTNEKFHQIEKEFSEVEGRIQDLEKYVEDTKIDLWSYNAELLVALENQHTIDLTDSEMNKLFERTRKQLRENAEDMGNGCFKIYHKCDNACIGSIRNGTYDHDVYRDEALNNRFQIKGVELKSGYKDWILWISFAISCFLLCVVLLGFIMWACQKGNIRCNICI

SEQ ID NO: 511 - protein, 566 aa, Artificial Sequence
  derived and/or modified protein sequence (wt) from hemagglutinin__InfluenzaA__ABC40619
MKTIIALSYIFCLVLGQDFSGNDNSTATLCLGHHAVPNGTLVKTITNDQIEVTNATELVQSSSTGKICNNPHRILDGIDCTLIDALLGDPHCDGFQNETWDLFVERSKAFSNCYPYDVPDYASLRSLVASSGTLEFINEGFNWTGVTQNGGSNACKRGPDSGFFSRLNWLYKSGSTYPVLNVSMPNNDNFDKLYIWGVHHPSTDQEQTNLYVQASGRVTVSTKRSQQTIIPNIGSRPWVRGLSSRISIYWTIVKPGDILVINSNGNLIAPRGYFKMRTGKSSIMRSDAPIGTCISECITPNGSIPNDKPFQNVNKITYGACPKYVKQNTLKLATGMRNVPEKQTRGIFGAIAGFIENGWEGMIDGWYGFRHQNSEGTGQAADLKSTQAAIDQINGKLNRIIEKTNEKFHQIEKEFSEVEGRIQDLEKYVEDTKIDLWSYNAELLVALENQHTIDLTDSEMNKLFEKTRRQLRENAEDMGNGCFKIYHKCDNACIGSIRNGTYDHDVYRDEALNNRFQIKGVELKSGYKDWILWISFAISCFLLCVVLLGFIMWACQKGNIRCNICI

SEQ ID NO: 512 - protein, 565 aa, Artificial Sequence
  derived and/or modified protein sequence (wt) from hemagglutinin__InfluenzaA__ABC40631
MKVKLLILLCTFTATYADTICIGYHANNSTDTVDTVLEKNVTVTHSVNLLEDSHNGKLCLLKGIAPLQLGNCSVAGWILGNPECELLISKESWSYIVETPNPENGTCYPGYFADYEELREQLSSVSSFERFEIFPKESSWPNHTVTGVSASCSHNGKSSFYRNLLWLTGKNGLYPNLSKSYANNKEKEVLILWGVHHPPNIGDQRTLYHTENAYVSVVSSHYSRRFTPEITKRPKVRDQEGRINYYWTLLEPGDTIIFEANGNLIAPWYAFALSRGFGSGIITSNAPMDECDAKCQTPQGAINSSLPFQNVHPVTIGECPKYVRSAKLRMVTGLRNIPSIQSRGLFGAIAGFIEGGWTGMVDGWYGYHHQNEQGSGYAADQKSTQNAINGITNKVNSVIEKMNTQFTAVGKEFNKLERRMENLNKKVDDGFLDIWTYNAELLVLLENERTLDFHDSNVKNLYEKVKSQLKNNAKEIGNGCFEFYHKCNNECMESVKNGTYDYPKYSEESKLNREKIDGVKLESMGVYQILAIYSTVASSLVLLVSLGAISFWMCSNGSLQCRICI

SEQ ID NO: 513 - protein, 566 aa, Artificial Sequence
  derived and/or modified protein sequence (wt) from hemagglutinin__InfluenzaA__ABC41692
MKTIIALSYILCLVFAQKPPGNDNSTATLCLGHHAVPNGTIVKTITNDQIEVTNATELVQSSSTGGICDSPHQILDGENCTLIDALLGDPQCDGFQNKKWDLFVERSKAYSNCYPYDVPDHASLRSLVASSGTLEFNNESFDWTGVTQNGTSSACKRRSNKSFFSRLNWLTHLKYKYPALNVTMPNNEKFDKLYIWGVHHPGTDSDQISLYAQASGRITVSTKRSQQTVIPNIGSRPRVRDVSSRISIYWTIVKPGDILLINSTGNLIAPRGYFKIRSGKSSIMRSDAPIGKCNSECITPNGSIPNDKPFQNVNRITYGACPRYVKQNTLKLATGMRNVPEKQTRGIFGAIAGFIENGWEGMVDGWYGFRHQNSEGTGQAADLKSTQAAINQINGKLNRLIGKTNEKFHQIEKEFSEVEGRIQDLEKYVEDTKIDLWSYNAELLVALENQHTIDLTDSEMNKLFERTKKQLRENAEDMGNGCFKIYHKCDNACIGSIRNGTYDHDVYRDEALNNRFQIKGVELKSGYKDWILWISFAISCFLLCVALLGFIMWACQKGNIRCNICI

SEQ ID NO: 514 - protein, 565 aa, Artificial Sequence; identical to SEQ ID NO: 299
  derived and/or modified protein sequence (wt) from hemagglutinin__InfluenzaA__ABC41714

SEQ ID NO: 515 - protein, 566 aa, Artificial Sequence
  derived and/or modified protein sequence (wt) from hemagglutinin__InfluenzaA__ABC41725
MKTTIALSYILCLVFAQKLPGNDNSTATLCLGHHAVPNGTIVKTITNDQIEVTNATELVQSSSTGGICDSPHQILDGENCTLIDALLGDPQCDGFQNKKWDLFVERSKAYSNCYPYDVPDHASLRSLVASSGTLEFNNESFDWTGVTQNGTSSACKRRSNKSFFSRLNWLTHLKYKYPALNVTMPNNEKFDKLYIWGVHHPGTDSDQISLYAQASGRITVSTKRSQQTVIPNIGSRPRVRDVSSRISIYWTIVKPGDILLINSTGNLIAPRGYFKIRSGKSSIMRSDAPIGKCNSECITPNGSIPNDKPFQNVNRITYGACPRYVKQNTLKLATGMRNVPEKQTRGIFGAIAGFIENGWEGMVDGWYGFRHQNSEGTGQAADLKSTQAAINQINGKLNRLIGKTNEKFHQIEKEFSEVEGRIQDLEKYVEDTKIDLWSYNAELLVALENQHTIDLTDSEMNKLFERTKKQLRENAEDMGNGCFKIYHKCDNACIGSIRNGTYDHDVYRDEALNNRFQIKGVELKSGYKDWILWISFAISCFLLCVALLGFIMWACQKGNIRCNICI

SEQ ID NO: 516 - protein, 566 aa, Artificial Sequence
  derived and/or modified protein sequence (wt) from hemagglutinin__InfluenzaA__ABC41736
MKTIIALSYILCLVFAQKLPGNDNSTATLCLGHHAVPNGTIVKTITNDQIEVTNATELVQSSSTGGICDSPHQILDGENCTLIDALLGDPQCDGFQNKKWDLFVERSKAYSNCYPYDVPDHASLRSLVASSGTLEFNNESFDWTGVTQNGTSSACKRRSNKSFFSRLNWLTHLKYKYPALNVTMPNNEKFDKLYIWGVHHPGTDSDQISLYAQASGRITVSTKRSQQTVIPNIGSRPRVRDVSSRISIYWTIVKPGDILLINSTGNLIAPRGYFKIRSGKSSIMRSDAPIGKCNSECITPNGSIPNDKPFQNVNRITYGACPRYVKQNTLKLATGMRNVPEKQTRGIFGAIAGFIENGWEGMVDGWYGFRHQNSEGTGQAADLKSTQAAINQINGKLNRLIGKTNEKFHQIEKEFSEVEGRIQDLEKYVEDTKIDLWSYNAELLVALENQHTIDLTDSEMNKLFERTKKQLRENAEDMGNGCFKIYHKCDNACIGSIRNGTYDHDVYRDEALNNRFQIKGVELKSGYKDWILWISFAISCFLLCVALLGFIMWACQKGNIRCNICI

SEQ ID NO: 517 - protein, 566 aa, Artificial Sequence; identical to SEQ ID NO: 516
  derived and/or modified protein sequence (wt) from hemagglutinin__InfluenzaA__ABC41952

SEQ ID NO: 518 - protein, 566 aa, Artificial Sequence; identical to SEQ ID NO: 516
  derived and/or modified protein sequence (wt) from hemagglutinin__InfluenzaA__ABC41953

SEQ ID NO: 519 - protein, 566 aa, Artificial Sequence; identical to SEQ ID NO: 516
  derived and/or modified protein sequence (wt) from hemagglutinin__InfluenzaA__ABC41964

SEQ ID NO: 520 - protein, 566 aa, Artificial Sequence; identical to SEQ ID NO: 516
  derived and/or modified protein sequence (wt) from hemagglutinin__InfluenzaA__ABC42014

SEQ ID NO: 521 - protein, 566 aa, Artificial Sequence; identical to SEQ ID NO: 516
  derived and/or modified protein sequence (wt) from hemagglutinin__InfluenzaA__ABC42114

SEQ ID NO: 522 - protein, 566 aa, Artificial Sequence; identical to SEQ ID NO: 516
  derived and/or modified protein sequence (wt) from hemagglutinin__InfluenzaA__ABC42125

SEQ ID NO: 523 - protein, 566 aa, Artificial Sequence; identical to SEQ ID NO: 516
  derived and/or modified protein sequence (wt) from hemagglutinin__InfluenzaA__ABC42136

SEQ ID NO: 524 - protein, 566 aa, Artificial Sequence
  derived and/or modified protein sequence (wt) from hemagglutinin__InfluenzaA__ABC42147
MKTIIALSYILCLVFAQKLPGNDNSTATLCLGHHAVPNGTIVKTITNDQIEVTNATELVQSSSTGGICDSPHQILDGENCTLIDALLGDPQCDGFQNKKWDLFVERSKAYSNCYPYDVPDHASLRSLVASSGTLEFNNESFDWTGVTQNGTSSACKRRSNKSFFSRLNWLTHLKYKYPALNVTMPNNEKFDKLYIWGVHHPGTDSDQISLYAQASGRITVSTKRSQQTVIPNIGSRPRVRDVSSRISIYWTIVKPGDILLINSTGNLIAPRGYFKIRSGKSSIMRSDVPIGKCNSECITPNGSIPNDKPFQNVNRITYGACPRYVKQNTLKLATGMRNVPEKQTRGIFGAIAGFIENGWEGMVDGWYGFRHQNSEGTGQAADLKSTQAAINQINGKLNRLIGKTNEKFHQIEKEFSEVEGRIQDLEKYVEDTKIDLWSYNAELLVALENQHTIDLTDSEMNKLFERTKKQLRENAEDMGNGCFKIYHKCDNACIGSIRNGTYDHDVYRDEALNNRFQIKGVELKSGYKDWILWISFAISCFLLCVALLGFIMWACQKGNIRCNICI

SEQ ID NO: 525 - protein, 566 aa, Artificial Sequence; identical to SEQ ID NO: 516
  derived and/or modified protein sequence (wt) from hemagglutinin__InfluenzaA__ABC42158

SEQ ID NO: 526 - protein, 566 aa, Artificial Sequence; identical to SEQ ID NO: 516
  derived and/or modified protein sequence (wt) from hemagglutinin__InfluenzaA__ABC42169

SEQ ID NO: 527 - protein, 566 aa, Artificial Sequence; identical to SEQ ID NO: 516
  derived and/or modified protein sequence (wt) from hemagglutinin__InfluenzaA__ABC42180

SEQ ID NO: 528 - protein, 566 aa, Artificial Sequence; identical to SEQ ID NO: 516
  derived and/or modified protein sequence (wt) from hemagglutinin__InfluenzaA__ABC42192

SEQ ID NO: 529 - protein, 566 aa, Artificial Sequence; identical to SEQ ID NO: 516
  derived and/or modified protein sequence (wt) from hemagglutinin__InfluenzaA__ABC42307

SEQ ID NO: 530 - protein, 566 aa, Artificial Sequence
  derived and/or modified protein sequence (wt) from hemagglutinin__InfluenzaA__ABC42318
MKTIIALSYILCLVFAQKLPGNDNSTATLCLGHHAVPNGTIVKTITNDQIEVTNATELVQSSSTGGICDSPHQILDGENCTLIDALLGDPQCDGFQNKKWDLFVERSKAYSNCYPYDVPDHASLRSLVASSGTLEFNNESFDWTGVTQNGTSSACKRRSNKSFFSRLNWLTHLKYKYPALNVTMPNNEKFDKLYIWGVHHPGTDSDQISLYAQASGRITVSTKRSQQTVIPNIGSRPRVRDVSSRISIYWTIVKPGDILLINSTGNLIAPRGYFKIRSGKSSIMRSDAPIGKCNSECITPNGSIPNDKPFQNVNRITYGACPRYVKQNTLKLATGMRNVPEKQTRGIFGAIAGFIENGWEGMVDGWYGFRHQNSEGTGQAADLKSTQAAINQINGKLNRLIGKTNEKFHQIEKEFSEVEGRIQDLEKYVEDTKIDLWSYNAEFLVALENQHTIDLTDSEMNKLFERTKKQLRENAEDMGNGCFKIYHKCDNACIGSIRNGTYDHDVYRDEALNNRFQIKGVELKSGYKDWILWISFAISCFLLCVALLGFIMWACQKGNIRCNICI

SEQ ID NO: 531 - protein, 566 aa, Artificial Sequence; identical to SEQ ID NO: 516
  derived and/or modified protein sequence (wt) from hemagglutinin__InfluenzaA__ABC42346

SEQ ID NO: 532 - protein, 566 aa, Artificial Sequence; identical to SEQ ID NO: 516
  derived and/or modified protein sequence (wt) from hemagglutinin__InfluenzaA__ABC42461

SEQ ID NO: 533 - protein, 566 aa, Artificial Sequence; identical to SEQ ID NO: 516
  derived and/or modified protein sequence (wt) from hemagglutinin__InfluenzaA__ABC42494

SEQ ID NO: 534 - protein, 566 aa, Artificial Sequence; identical to SEQ ID NO: 516
  derived and/or modified protein sequence (wt) from hemagglutinin__InfluenzaA__ABC42505

SEQ ID NO: 535 - protein, 566 aa, Artificial Sequence
  derived and/or modified protein sequence (wt) from hemagglutinin__InfluenzaA__ABC42516
MKTIIALSYILCLVFAQKLPGNDNSTATLCLGHHAVPNGTIVKTITNDQIEVTNATELVQSSSTGGICDSPHQILDGENCTLIDALLGDPQCDGFQNKKWDLFVERSKAYSNCYPYDVPDHASLRSLVASSGTLEFNNESFDWTGVTQNGTSSACKRRSNKSFFSRLNWLTHLKYKYPALNVTMPNNEKFDKLYIWGVHHPGTDSDQISLYAQASGRITVSTKRSQQTVIPNIGSRPRVRDVSSRISIYWTIVKPGDILLINSTGNLIAPRGYFKIRSGKSSIMRSDAPIGKCNSECITPNGSIPNDKPFQNVNRITYGACPRYVKQNTLKLATGMRNVPEKQTRGIFGAIAGFIENGWEGMVDGWYGFRHQNSEGTGQAADLKSTQAAINQINGKLNKLIGKTNEKFHQIEKEFSEVEGRIQDLEKYVEDTKIDLWSYNAELLVALENQHTIDLTDSEMNKLFERTKKQLRENAEDMGNGCFKIYHKCDNACIGSIRNGTYDHDVYRDEALNNRFQIKGVELKSGYKDWILWISFAISCFLLCVALLGFIMWACQKGNIRCNICI

SEQ ID NO: 536 - protein, 566 aa, Artificial Sequence; identical to SEQ ID NO: 516
  derived and/or modified protein sequence (wt) from hemagglutinin__InfluenzaA__ABC42527

SEQ ID NO: 537 - protein, 566 aa, Artificial Sequence; identical to SEQ ID NO: 516
  derived and/or modified protein sequence (wt) from hemagglutinin__InfluenzaA__ABC42574

SEQ ID NO: 538 - protein, 566 aa, Artificial Sequence; identical to SEQ ID NO: 516
  derived and/or modified protein sequence (wt) from hemagglutinin__InfluenzaA__ABC42585

SEQ ID NO: 539 - protein, 566 aa, Artificial Sequence; identical to SEQ ID NO: 243
  derived and/or modified protein sequence (wt) from hemagglutinin__InfluenzaA__ABC42596

SEQ ID NO: 540 - protein, 566 aa, Artificial Sequence; identical to SEQ ID NO: 282
  derived and/or modified protein sequence (wt) from hemagglutinin__InfluenzaA__ABC42607

SEQ ID NO: 541 - protein, 566 aa, Artificial Sequence; identical to SEQ ID NO: 282
  derived and/or modified protein sequence (wt) from hemagglutinin__InfluenzaA__ABC42618

SEQ ID NO: 542 - protein, 566 aa, Artificial Sequence
  derived and/or modified protein sequence (wt) from hemagglutinin__InfluenzaA__ABC42629
MKTIIALSYILCLVFAQKLPGNDNSTATLCLGHHAVPNGTIVKTITNDQIEVTNATELVQSSSTGGICDSPHQILDGENCTLIDALLGDPQCDGFQNKKWDLFVERSKAYSNCYPYDVPDHASLRSLVASSGTLEFNNESFNWTGVTQNGTSSACKRRSNNSFFSRLNWLTHLKFKYPALNVTMPNNEKFDKLYIWGVHHPGTDNDQISLYAQASGRITVSTKRSQQTVIPNIGSRPRVRDIPSRISIYWTIVKPGDILLINSTGNLIAPRGYFKIRSGKSSIMRSDAPIGKCNSECITPNGSIPNDKPFQNVNRITYGACPRYVKQNTLKLATGMRNVPEKQTRGIFGAIAGFIENGWEGMVDGWYGFRHQNSEGTGQAADLKSTQAAINQINGKLNRLIGKTNEKFHQIEKEFSEVEGRIQDLEKYVEDTKIDLWSYNAELLVALENQHTIDLTDSEMNKLFERTKKQLRENAEDMGNGCFKIYHKCDNACIGSIRNGTYDHDVYRDEALNNRFQIKGVELKSGYKDWILWISFAISCFLLCVALLGFIMWACQKGNIRCNICI

SEQ ID NO: 543 - protein, 566 aa, Artificial Sequence
  derived and/or modified protein sequence (wt) from hemagglutinin__InfluenzaA__ABC42640
MKTIIALSYILCLVFAQKIPGNDNSTATLCLGHHAVPNGTIVKTITNDQIEVTNATELVQSSSTGGICDSPHQILDGENCTLIDALLGDPQCDGFQNKKWDLFVERSKAYSNCYPYDVPDYASLRSLVASSGTLEFNNESFNWTGVTQNGTSSACKRRSNNSFFSRLNWLTHLKFKYPALNVTMPNNEKFDKLYIWGVHHPGTDNDQISLYAQASGRITVSTKRSQQTVIPNIGSRPRVRDIPSRISIYWTIVKPGDILLINSTGNLIAPRGYFKIRSGKSSIMRSDAPIGKCNSECITPNGSIPNDKPFQNVNRITYGACPRYVKQNTLKLATGMRNVPEKQTRGIFGAIAGFIENGWEGMVDGWYGFRHQNSEGIGQAADLKSTQAAINQINGKLNRLIGKTNEKFHQIEKEFSEVEGRIQDLEKYVEDTKIDLWSYNAELLVALENQHTIDLTDSEMNKLFERTKKQLRENAEDMGNGCFKIYHKCDNACIGSIRNGTYDHDVYRDEALNNRFQIKGVELKSGYKDWILWISFAISCFLLCVALLGFIMWACQKGNIRCNICI

SEQ ID NO: 544 - protein, 566 aa, Artificial Sequence; identical to SEQ ID NO: 243
  derived and/or modified protein sequence (wt) from hemagglutinin__InfluenzaA__ABC42651

SEQ ID NO: 545 - protein, 566 aa, Artificial Sequence
  derived and/or modified protein sequence (wt) from hemagglutinin__InfluenzaA__ABC42662
MKTIIALSYILCLVFAQKLPGNDNSTATLCLGHHAVPNGTIVKTITNDQIEVTNATELVQSSSTGGICDSPHQILDGENCTLIDALLGDPQCDGFQNKKWDLFVERSKAYSNCYPYDVPDYASLRSLVASSGTLEFNNESFNWTGVTQNGTSSACKRRSNNSFFSRLNWLTHLKFKYPALNVTMPNNEKFDKLYIWGVHHPGTDNDQISLYAQASGRITVSTKRSQQTVIPNIGSRPRVRDIPSRISIYWTIVKPGDILLINSTGNLIAPRGYFKIRSGKSSIMRSDAPIGKCNSECITPNGSIPNDKPFQNVNRITYGACPRYVKQNTLKLATGMRNVPEKQTRGIFGAIAGFIENGWEGMVDGWYGFRHQNSEGIGQAADLKSTQAAINQINGKLNRLIGKTNEKFHQIEKEFSEVEGRIQDLEKYVEDTKIDLWSYNAEFLVALENQHTIDLTDSEMNKLFERTKKQLRENAEDMGNGCFKIYHKCDNACIGSIRNGTYDHDVYRDEALNNRFQIKGVELKSGYKDWILWISFAISCFLLCVALLGFIMWACQKGNIRCNICI

SEQ ID NO: 546 - protein, 566 aa, Artificial Sequence
  derived and/or modified protein sequence (wt) from hemagglutinin__InfluenzaA__ABC42673
MKTIIALSYILCLIFAQKLPGNDNSTATLCLGHHAVPNGTIVKTITNDQIEVTNATELVQSSSTGGICDSPHQILDGENCTLIDALLGDPQCDGFQNKKWDLFVERSKAYSNCYPYDVPDYASLRSLVASSGTLEFNNESFNWTGVTQNGTSSACKRRSNNSFFSRLNWLTHLKFKYPALNVTMPNNEKFDKLYIWGVHHPGTDNDQISLYAQASGRITVSTKRSQQTVIPNIGSRPRVRDIPSRISIYWTIVKPGDILLINSTGNLIAPRGYFKIRSGKSSIMRSDAPIGKCNSECITPNGSIPNDKPFQNVNRITYGACPRYVKQNTLKLATGMRNVPEKQTRGIFGAIAGFIENGWEGMVDGWYGFRHQNSEGIGQAADLKSTQAAINQINGKLNRLIGKTNEKFHQIEKEFSEVEGRIQDLEKYVEDTKIDLWSYNAELLVALENQHTIDLTDSEMNKLFERTKKQLRENAEDMGNGCFKIYHKCDNACIGSIRNGTYDHDVYRDEALNNRFQIKGVELKSGYKDWILWISFAISCFLLCVALLGFIMWACQKGNIRCNICI

SEQ ID NO: 547 - protein, 566 aa, Artificial Sequence; identical to SEQ ID NO: 243
  derived and/or modified protein sequence (wt) from hemagglutinin__InfluenzaA__ABC42684

SEQ ID NO: 548 - protein, 566 aa, Artificial Sequence; identical to SEQ ID NO: 243
  derived and/or modified protein sequence (wt) from hemagglutinin__InfluenzaA__ABC42695

SEQ ID NO: 549 - protein, 566 aa, Artificial Sequence
  derived and/or modified protein sequence (wt) from hemagglutinin__InfluenzaA__ABC42706
MKTIIALSYILCLVFAQKLPGNDNSTATLCLGHHAVPNGTTVKTITNDQIEVTNATELVQSSSTGGICDSPHQILDGENCTLIDALLGDPQCDGFQNKKWDLFVERSKAYSNCYPYDVPDYASLRSLVASSGTLEFNNESFNWTGVTQNGTSSACKRRSNNSFFSRLNWLTHLKFKYPALNVTMPNNEKFDKLYIWGVHHPGTDNDQISLYAQASGRITVSTKRSQQTVIPNIGSRPRVRDIPSRISIYWTIVKPGDILLINSTGNLIAPRGYFKIRSGKSSIMRSDAPIGKCNSECITPNGSIPNDKPFQNVNRITYGACPRYVKQNTLKLATGMRNVPEKQTRGIFGAIAGFIENGWEGMVDGWYGFRHQNSEGIGQAADLKSTQAAINQINGKLNRLIGKTNEKFHQIEKEFSEVEGRIQDLEKYVEDTKIDLWSYNAELLVALENQHTIDLTDSEMNKLFERTKKQLRENAEDMGNGCFKIYHKCDNACIGSIRNGTYDHDVYRDEALNNRFQIKGVELKSGYKDWILWISFAISCFLLCVVLLGFIMWACQKGNIRCNICI

SEQ ID NO: 550 - protein, 566 aa, Artificial Sequence; identical to SEQ ID NO: 243
  derived and/or modified protein sequence (wt) from hemagglutinin__InfluenzaA__ABC42717

SEQ ID NO: 551 - protein, 566 aa, Artificial Sequence
  derived and/or modified protein sequence (wt) from hemagglutinin__InfluenzaA__ABC42728
MKTIIALSYILCLVFAQKLPGNDNSTATLCLGHHAVPNGTVVKTITNDQIEVTNATELVQSSSTGGICDSPHQILDGENCTLMDALLGDPQCDGFQNKKWDLFVERSRAYSNCYPYDVPDYASLRSLVASSGTLEFNNESFNWTGVTQNGTSSACKRRSNNSFFSRLNWLTHLKFKYPALNVTMPNNEKFDKLYIWGVHHPGTDNDQISLYAQASGRITVSTKRSQQTVIPNIGSRPRVRDIPSRISIYWTIVKPGDILLINSTGNLIAPRGYFKIRSGKSSIMRSDAPIGKCNSECITPNGSIPNDKPFQNVNRITYGACPRYVKQNTLKLATGMRNVPEKQTRGIFGAIAGFIENGWEGMVDGWYGFRHQNSEGTGQAADLKSTQAAINQINGKLNRLIGKTNEKFHQIEKEFSEVEGRIQDLEKYVEDTKIDLWSYNAELLVALENQHTIDLTDSEMNKLFERTKKQLRENAEDMGNGCFKIYHKCDNACIGSIRNGTYDHDVYRDEALNNRFQIKGVELKSGYKDWILWISFAISCFLLCVVLLGFIMWACQKGNIRCNICI

SEQ ID NO: 552 - protein, 566 aa, Artificial Sequence; identical to SEQ ID NO: 243
  derived and/or modified protein sequence (wt) from hemagglutinin__InfluenzaA__ABC42739

SEQ ID NO: 553 - protein, 565 aa, Artificial Sequence
  derived and/or modified protein sequence (wt) from hemagglutinin__InfluenzaA__ABC42750
MKVKLLVLLCTFTATYADTICIGYHANNSTDTVDTVLEKNVTVTHSVNLLEDSHNGKLCLLKGIAPLQLGNCSVAGWILGNPECELLISKESWSYIVEKPNPENGTCYPGHFADYEELREQLSSVSSFERFEIFPKESSWPNHTVTGVSASCSHNGKSSFYKNLLWLTGKNGLYPNLSKSYANNKEKEVLVLWGVHHPPNIGDQKALYHTENAYVSVVSSHYSRKFTPEIAKRPKVRDQEGRINYYWTLLEPGDTIIFEANGNLIAPRYAFALSRGFGSGIINSNAPMDECDAKCQTPQGAINSSLPFQNVHPVTIGECPKYVRSAKLRMVTGLRNIPSIQSRGLFGAIAGFIEGGWTGMVDGWYGYHHQNEQGSGYAADQKSTQNAINGITNKVNSVIEKMNTQFTAVGKEFNKLERRMENLNKKVDDGFIDIWTYNAELLVLLENERTLDFHDSNVKNLYEKVKSQLKNNAKEIGNGCFEFYHKCNDECMESVKNGTYDYPKYSEESKLNREKIDGVKLESMGVYQILAIYSTVASSLVLLVSLGAISFWMCSNGSLQCRICI

SEQ ID NO: 554 - protein, 566 aa, Artificial Sequence; identical to SEQ ID NO: 243
  derived and/or modified protein sequence (wt) from hemagglutinin__InfluenzaA__ABC42761

SEQ ID NO: 555 - protein, 566 aa, Artificial Sequence
  derived and/or modified protein sequence (wt) from hemagglutinin__InfluenzaA__ABC42772
MKTIIALSYILCLVFAQKLPGNDNSTATLCLGHHAVPNGTIVKTITNDQIEVTNATELVQSSSTGGICDSPHQILDGENCTLIDALLGDPQCDGFQNKKWDLFVERSKAYSNCYPYDVPDYASLRSLVASSGTLEFNNESFNWTGVTQNGTSSACKRRSNNSFFSRLNWLTHLKFKYPALNVTMPNNEKFDKLYIWGVHHPGTDNDQISLYAQASGRITVSTKRSQQTVIPNIGSRPRVRDIPSRISIYWTIVKPGDILLINSTGNLIAPRGYFKIRSGKSSIMRSDAPIGKCNSECITPNGSIPNDKPFQNVNRITYGACPRYVKQNTLKLATGMRNVPEKQTRGIFGAIAGFIENGWEGMVDGWYGFRHQNSEGIGQAADLKSTQAAINQINGKLNRLIGKTNEKFHQIEKEFSEVEGRIQDLEKYVEDTKIDLWSYNAELLVALENQHTIDLTDSEMNKLFERTKKQLRENAEDMGNGCFKIYHKCDNACIGSIRNGTYDHDVYRDEALNNRFQIKSVELKSGYKDWILWISFAISCFLLCVALLGFIMWACQKGNIRCNICI

SEQ ID NO: 556 - protein, 566 aa, Artificial Sequence; identical to SEQ ID NO: 243
  derived and/or modified protein sequence (wt) from hemagglutinin__InfluenzaA__ABC42783

SEQ ID NO: 557 - protein, 566 aa, Artificial Sequence; identical to SEQ ID NO: 243
  derived and/or modified protein sequence (wt) from hemagglutinin__InfluenzaA__ABC42794

SEQ ID NO: 558 - protein, 566 aa, Artificial Sequence; identical to SEQ ID NO: 243
  derived and/or modified protein sequence (wt) from hemagglutinin__InfluenzaA__ABC42805

SEQ ID NO: 559 - protein, 566 aa, Artificial Sequence; identical to SEQ ID NO: 282
  derived and/or modified protein sequence (wt) from hemagglutinin__InfluenzaA__ABC42816

SEQ ID NO: 560 - protein, 566 aa, Artificial Sequence
  derived and/or modified protein sequence (wt) from hemagglutinin__InfluenzaA__ABC42827
MKTIIALSYILCLVFAQKLPGNDNSTATLCLGHHAVPNGTIVKTITNDQIEVTNATELVQSSSTGGICDSPHQILDGENCTLIDALLGDPQCDGFQNKKWDLFVERSKAYSNCYPYDVPDYASLRSLVASSGTLEFNNESFNWTGVTQNGTSSACKRRSNNSFFSRLNWLTHLKFKYPALNVTMPNNEKFDKLYIWGVHHPGTDNDQISLYAQASGRITVSTKRSQQTVIPNIGSRPRVRDIPSRMSIYWTIVKPGDILLINSTGNLIAPRGYFKIRSGKSSIMRSDAPIGKCNSECITPNGSIPNDKPFQNVNRITYGACPRYVKQNTLKLATGMRNVPEKQTRGIFGAIAGFIENGWEGMVDGWYGFRHQNSEGIGQAADLKSTQAAINQINGKLNRLIGKTNEKFHQIEKEFSEVEGRIQDLEKYVEDTKIDLWSYNAELLVALENQHTIDLTDSEMNKLFERTKKQLRENAEDMGNGCFKIYHKCDNACIGSIRNGTYDHDVYRDEALNNRFQIKGVELKSGYKDWILWISFAISCFLLCVALLGFIMWACQKGNIRCNICI

SEQ ID NO: 561 - protein, 566 aa, Artificial Sequence; identical to SEQ ID NO: 243
  derived and/or modified protein sequence (wt) from hemagglutinin__InfluenzaA__ABC42849

SEQ ID NO: 562 - protein, 566 aa, Artificial Sequence
  derived and/or modified protein sequence (wt) from hemagglutinin__InfluenzaA__ABC42882
MKTIIALSYILCLVFAQKLPGNDNSTATLCLGHHAVPNGTLVKTITNDQIEVTNATELVQSSSTGRICDSPHQILDGENCTLIDALLGDPHCDGFQNKEWDLFVERSKAYSNCYPYDVPDYVSLRSLVASSGTLEFNNESFNWTGVAQNGTSSACKRRSDKSFFSRLNWLHQLKYKYPALNVTMPNNEKFDKLYIWGVHHPGTDSDQISLYAQASGRVTVSTKRSQQTVIPNIGSRPWVRGVSSRISIYWTIVKPGDILLINSTGNLIAPRGYFKIRSGKSSIMRSDAPIGKCNSECITPNGSIPNDKPFQNVNRITYGACPRYVKQNTLKLATGMRNVPEKQTRGIFGAIAGFIENGWEGMMDGWYGFRHQNSEGTGQAADLKSTQAAINQINGKLNRLIEKTNEKFHQIEKEFSEVEGRIQDLEKYVEDTKIDLWSYNAELLVALENQHTIDLTDSEMNKLFERTKKQLRENAEDMGNGCFKIYHKCDNACIGSIRNGTYDHDVYRDEALNNRFQIKGVELKSGYKDWVLWISFAISCFLLCIVLLGFIMWACQKGNIRCNICI

SEQ ID NO: 563 - protein, 566 aa, Artificial Sequence; identical to SEQ ID NO: 562
  derived and/or modified protein sequence (wt) from hemagglutinin__InfluenzaA__ABC42893

SEQ ID NO: 564 - protein, 566 aa, Artificial Sequence; identical to SEQ ID NO: 516
  derived and/or modified protein sequence (wt) from hemagglutinin__InfluenzaA__ABC42929

SEQ ID NO: 565 - protein, 566 aa, Artificial Sequence; identical to SEQ ID NO: 516
  derived and/or modified protein sequence (wt) from hemagglutinin__InfluenzaA__ABC42940

SEQ ID NO: 566 - protein, 566 aa, Artificial Sequence; identical to SEQ ID NO: 516
  derived and/or modified protein sequence (wt) from hemagglutinin__InfluenzaA__ABC42951

SEQ ID NO: 567 - protein, 566 aa, Artificial Sequence; identical to SEQ ID NO: 516
  derived and/or modified protein sequence (wt) from hemagglutinin__InfluenzaA__ABC42962

SEQ ID NO: 568 - protein, 566 aa, Artificial Sequence; identical to SEQ ID NO: 516
  derived and/or modified protein sequence (wt) from hemagglutinin__InfluenzaA__ABC42973

SEQ ID NO: 569 - protein, 566 aa, Artificial Sequence; identical to SEQ ID NO: 516
  derived and/or modified protein sequence (wt) from hemagglutinin__InfluenzaA__ABC42995

SEQ ID NO: 570 - protein, 566 aa, Artificial Sequence; identical to SEQ ID NO: 516
  derived and/or modified protein sequence (wt) from hemagglutinin__InfluenzaA__ABC43006

SEQ ID NO: 571 - protein, 566 aa, Artificial Sequence; identical to SEQ ID NO: 516
  derived and/or modified protein sequence (wt) from hemagglutinin__InfluenzaA__ABC43028

SEQ ID NO: 572 - protein, 566 aa, Artificial Sequence; identical to SEQ ID NO: 516
  derived and/or modified protein sequence (wt) from hemagglutinin__InfluenzaA__ABC43039

SEQ ID NO: 573 - protein, 566 aa, Artificial Sequence; identical to SEQ ID NO: 516
  derived and/or modified protein sequence (wt) from hemagglutinin__InfluenzaA__ABC43050

SEQ ID NO: 574 - protein, 566 aa, Artificial Sequence; identical to SEQ ID NO: 516
  derived and/or modified protein sequence (wt) from hemagglutinin__InfluenzaA__ABC43061

SEQ ID NO: 575 - protein, 566 aa, Artificial Sequence
  derived and/or modified protein sequence (wt) from hemagglutinin__InfluenzaA__ABC43072
MKTIIALSYILCLVFAQKLPGNDNSTATLCLGHHAVPNGTIVKTITNDQIEVTNATELVQSSSTGGICDSPHQILDGENCTLIDALLGDPQCDGFQNKKWDLFVERSKAYSNCYPYDVPDHASLRSLVASSGTLEFNNESFDWTGVTQNGTSSACKRRSNKSFFSRLNWLTHLKYKYPALNVTMPNNEKFDKLYIWGVHHPGTDSDQISLYAQASGRITVSTKRSQQTVIPNIGSRPRVRDVSSRISIYWTIVKPGDILLINSTGNLIAPRGYFKIRSGKSSIMRSDAPIGKCNSECITPNGSIPNDKPFQNVNRITYGACPRYVKQNTLKLATGMRNVPEKQTRGIFGAIAGFIENGWEGMVDGWYGFRHQNSEGTGQAADLKSTQAAINQINGKLNRLIGKTNEKFHQIEKEFSEVEGRIQDLEKYVEDTKIDLWSYNAELLVALENQHTIDLTDSEMNKLFEKTKKQLRENAEDMGNGCFKIYHKCDNACIGSIRNGTYDHDVYRDEALNNRFQIKGVELKSGYKDWILWISFTISCFLLCVALLGFIMWACQKGNIRCNICI

SEQ ID NO: 576 - protein, 566 aa, Artificial Sequence; identical to SEQ ID NO: 516
  derived and/or modified protein sequence (wt) from hemagglutinin__InfluenzaA__ABC43083

SEQ ID NO: 577 - protein, 566 aa, Artificial Sequence; identical to SEQ ID NO: 516
  derived and/or modified protein sequence (wt) from hemagglutinin__InfluenzaA__ABC43094

SEQ ID NO: 578 - protein, 566 aa, Artificial Sequence; identical to SEQ ID NO: 516
  derived and/or modified protein sequence (wt) from hemagglutinin__InfluenzaA__ABC43116

SEQ ID NO: 579 - protein, 566 aa, Artificial Sequence; identical to SEQ ID NO: 243
  derived and/or modified protein sequence (wt) from hemagglutinin__InfluenzaA__ABC43127

SEQ ID NO: 580 - protein, 566 aa, Artificial Sequence; identical to SEQ ID NO: 282
  derived and/or modified protein sequence (wt) from hemagglutinin__InfluenzaA__ABC43138

SEQ ID NO: 581 - protein, 566 aa, Artificial Sequence; identical to SEQ ID NO: 243
  derived and/or modified protein sequence (wt) from hemagglutinin__InfluenzaA__ABC43149

SEQ ID NO: 582 - protein, 566 aa, Artificial Sequence; identical to SEQ ID NO: 243
  derived and/or modified protein sequence (wt) from hemagglutinin__InfluenzaA__ABC43160

SEQ ID NO: 583 - protein, 566 aa, Artificial Sequence; identical to SEQ ID NO: 243
  derived and/or modified protein sequence (wt) from hemagglutinin__InfluenzaA__ABC43171

SEQ ID NO: 584 - protein, 566 aa, Artificial Sequence; identical to SEQ ID NO: 243
  derived and/or modified protein sequence (wt) from hemagglutinin__InfluenzaA__ABC43182

SEQ ID NO: 585 - protein, 566 aa, Artificial Sequence
  derived and/or modified protein sequence (wt) from hemagglutinin__InfluenzaA__ABC43475
MKTIIALSYILCLVFAQKLPGNDNSTATLCLGHHAVPNGTTVKTITNDQIEVTNATELVQSSSTGGICDSPHQILDGENCTLIDALLGDPQCDGFQNKKWDLFVERSKAYSNCYPYDVPDYASLRSLVASSGTLEFNNESFNWTGVTQNGTSSACKRRSNNSFFSRLNWLTHLKFKYPALNVTMPNNEKFDKLYIWGVHHPGTDNDQISLYAQASGRITVSTKRSQQTVIPNIGSRPRVRDIPSRISIYWTIVKPGDILLINSTGNLIAPRGYFKIRSGKSSIMRSDAPIGKCNSECITPNGSIPNDKPFQNVNRITYGACPRYVKQNTLKLATGMRNVPEKQTRGIFGAIAGFIENGWEGMVDGWYGFRHQNSEGIGQAADLKSTQAAINQINGKLNRLIGKTNEKFHQIEKEFSEVEGRIQDLEKYVEDTKIDLWSYNAELLVALENQHTIDLTDSEMNKLFERTKKQLRENAEDMGNGCFKIYHKCDNACIGSIRNGTYDHDVYRDEALNNRFQIKGVELKSGYKDWILWISFAISCFLLCVALLGFIMWACQKGNIRCNICI

SEQ ID NO: 586 - protein, 566 aa, Artificial Sequence; identical to SEQ ID NO: 243
  derived and/or modified protein sequence (wt) from hemagglutinin__InfluenzaA__ABC43486

SEQ ID NO: 587 - protein, 566 aa, Artificial Sequence; identical to SEQ ID NO: 243
  derived and/or modified protein sequence (wt) from hemagglutinin__InfluenzaA__ABC43497

SEQ ID NO: 588 - protein, 566 aa, Artificial Sequence; identical to SEQ ID NO: 282
  derived and/or modified protein sequence (wt) from hemagglutinin__InfluenzaA__ABC43508

SEQ ID NO: 589 - protein, 566 aa, Artificial Sequence; identical to SEQ ID NO: 282
  derived and/or modified protein sequence (wt) from hemagglutinin__InfluenzaA__ABC43519

SEQ ID NO: 590 - protein, 566 aa, Artificial Sequence; identical to SEQ ID NO: 282
  derived and/or modified protein sequence (wt) from hemagglutinin__InfluenzaA__ABC43530

SEQ ID NO: 591 - protein, 566 aa, Artificial Sequence
  derived and/or modified protein sequence (wt) from hemagglutinin__InfluenzaA__ABC43552
MKTIIALSYILCLVFAQKLPGNDNSTATLCLGHHAVPNGTIVKTITNDQIEVTNATELVQSSSTGGICDSPHQILDGENCTLIDALLGDPQCDGFQNKKWDLFVERSKAYSNCYPYDVPDYASLRSLVASSGTLEFNNESFNWTGVTQNGTSSACKRRSNNSFFSRLNWLTHLKFKYPALNVTMPNNEKFDKLYIWGVHHPGTDNDQISLYAQAPGRITVSTKRSQQTVIPNIGSRPRVRDIPSRISIYWTIVKPGDILLINSTGNLIAPRGYFKIRSGKSSIMRSDAPIGKCNSECITPNGSIPNDKPFQNVNRITYGACPRYVKQNTLKLATGMRNVPEKQTRGIFGAIAGFIENGWEGMVDGWYGFRHQNSEGIGQAADLKSTQAAINQINGKLNRLIGKTNEKFHQIEKEFSEVEGRIQDLEKYVEDTKIDLWSYNAELLVALENQHTIDLTDSEMNKLFERTKKQLRENAEDMGNGCFKIYHKCDNACIGSIRNGTYDHDVYRDEALNNRFQIKGVELKSGYKDWILWISFAISCFLLCVALLGFIMWACQKGNIRCNICI

SEQ ID NO: 592 - protein, 566 aa, Artificial Sequence
  derived and/or modified protein sequence (wt) from hemagglutinin__InfluenzaA__ABC46554
MKTIIALSYIFCQVFAQNLPGNDNSTATLCLGHHAVPNGTLVKTITNDQIEVTNATELVQSSSTGRICDSPHRILDGKNCTLIDALLGDPHCDGFQNEKWDLFVERSKAFSNCYPYDVPDYASLRSLVASSGTLEFINEGFNWTGVTQDGGSYACKRGPDNSFFSRLNWLYKSESTYPVLNVTMPNNDNFDKLYIWGVHHPSTDKEQTNLYVQASGRVTVSTKRSQQTIIPNVGSRPWVRGLSSRISIYWTIVKPGDILLINSNGNLIAPRGYFKIRTGKSSIMRSDAPIGTCSSECITPNGSIPNDKPFQNVNKITYGACPKYVKQNTLKLATGMRNVPEKQTRGIFGAIAGFIENGWEGMIDGWYGFRHQNSEGTGQAADLKSTQAAIDQINGKLNRVIEKTNEKFHQIEKEFSEVEGRIQDLEKYVEDTKIDLWSYNAELLVALENQHTIDLTDSEMNKLFEKTRRQLRENAEDMGNGCFKIYHKCDNACIGSIRNGTYDHDVYRDEALNNRFQIKGVELKSGYKDWILWISFAISCFLLCVVLLGFIMWACQKGNIRCNICI

SEQ ID NO: 593 - protein, 566 aa, Artificial Sequence
  derived and/or modified protein sequence (wt) from hemagglutinin__InfluenzaA__ABC46576
MKTIIALSYIFCLVFAQNLPGNDKSTATLCLGHHAVPNGTLVKTITNDQIEVTNATELVQSSSTGRICDSPHRILDGKNCTLVDALLGDPHCDGFQNEKWDLFVERSKAFSNCYPYDVPDYASLRSLVASSGTLEFINESFNWTGVTQSGGSYACKRGSDNSFFSRLNWLYESESKYPVLNVTMPNNGNFDKLYIWGVHHPSTDKEQTNLYVRASGRVTVSTKRSQQTIIPNIGSRPWVRGLSSRISIYWTIVKPGDILLINSNGNLIAPRGYFKIRTGKSSIMRSDAPIGTCSSECITPNGSIPNDKPFQNVNKITYGACPKYVKQNTLKLATGMRNVPEKQTRGIFGAIAGFIENGWEGMVDGWYGFRHQNSEGTGQAADLKSTQAAIDQINGKLNRVIEKTNEKFHQIEKEFSEVEGRIQDLEKYVEDTKIDLWSYNAELLVALENQHTIDLTDSEMNKLFEKTRRQLRENAEDMGNGCFKIYHKCDNACIGSIRNGTYDHDVYRDEALNNRFQIKGVELKSGYKDWILWISFAISCFLLCVVLLGFIMWACQKGNIRCNICI

SEQ ID NO: 594 - protein, 566 aa, Artificial Sequence; identical to SEQ ID NO: 452
  derived and/or modified protein sequence (wt) from hemagglutinin__InfluenzaA__ABC50167

SEQ ID NO: 595 - protein, 566 aa, Artificial Sequence; identical to SEQ ID NO: 452
  derived and/or modified protein sequence (wt) from hemagglutinin__InfluenzaA__ABC50178

SEQ ID NO: 596 - protein, 566 aa, Artificial Sequence; identical to SEQ ID NO: 452
  derived and/or modified protein sequence (wt) from hemagglutinin__InfluenzaA__ABC50189

SEQ ID NO: 597 - protein, 566 aa, Artificial Sequence; identical to SEQ ID NO: 562
  derived and/or modified protein sequence (wt) from hemagglutinin__InfluenzaA__ABC50200

SEQ ID NO: 598 - protein, 566 aa, Artificial Sequence; identical to SEQ ID NO: 562
  derived and/or modified protein sequence (wt) from hemagglutinin__InfluenzaA__ABC50211

SEQ ID NO: 599 - protein, 566 aa, Artificial Sequence; identical to SEQ ID NO: 562
  derived and/or modified protein sequence (wt) from hemagglutinin__InfluenzaA__ABC50222

SEQ ID NO: 600 - protein, 566 aa, Artificial Sequence; identical to SEQ ID NO: 562
  derived and/or modified protein sequence (wt) from hemagglutinin__InfluenzaA__ABC50233

SEQ ID NO: 601 - protein, 566 aa, Artificial Sequence; identical to SEQ ID NO: 562
  derived and/or modified protein sequence (wt) from hemagglutinin__InfluenzaA__ABC50244

SEQ ID NO: 602 - protein, 566 aa, Artificial Sequence; identical to SEQ ID NO: 562
  derived and/or modified protein sequence (wt) from hemagglutinin__InfluenzaA__ABC50266

SEQ ID NO: 603 - protein, 566 aa, Artificial Sequence; identical to SEQ ID NO: 562
  derived and/or modified protein sequence (wt) from hemagglutinin__InfluenzaA__ABC50277

SEQ ID NO: 604 - protein, 566 aa, Artificial Sequence
  derived and/or modified protein sequence (wt) from hemagglutinin__InfluenzaA__ABC50299
MKTIIALSYILCLVFAQKLPGNDNSTATLCLGHHAVPNGTLVKTITNDQIEVTNATELVQSSSTGRICDSPHQILDGENCTLIDALLGDPHCDGFQNKEWDLFVERSKAYSNCYPYDVPDYVSLRSLVASSGTLEFNNESFNWTGVAQNGTSSACKRRSDKSFFSRLNWLHQLKYKYPALNVTMPNNEKFDKLYIWGVHHPGTDSDQISLYAQASGRVTVSTKRSQQTVIPNIGSRPWVRGVSSRISIYWTIVKPGDILLINSTGNLIAPRGYFKIRSGKSSIMRSDAPIGKCNSECITPNGSIPNDKPFQNVNRITYGACPRYVKQNTLKLATGMRNVPEKQTRGIFGAIAGFIENGWEGMMDGWYGFRHQNSEGTGQAADLKSTQAAINQINGKLNRLIEKTNEKFHQIEKEFSEVEGRIQDLEKYVEDTKIDLWSYNAELLVALENQHTIDLTDSEMNKLFERTKKQLRENAEDMGNGCFKIYHKCDNACIGSIRNGTYDHDVYRDEALNNRFQIKGVELKSGYKDWVLWISFATSCFLLCIVLLGFIMWACQKGNIRCNICI

SEQ ID NO: 605 - protein, 566 aa, Artificial Sequence; identical to SEQ ID NO: 562
  derived and/or modified protein sequence (wt) from hemagglutinin__InfluenzaA__ABC50310

SEQ ID NO: 606 - protein, 566 aa, Artificial Sequence
  derived and/or modified protein sequence (wt) from hemagglutinin__InfluenzaA__ABC50321
MKTIIALSYILCLVFAQKLPGNDNSTATLCLGHHAVPNGTLVKTITNDQIEVTNATELVQSSSTGRICDSPHQILDGENCTLIDALLGDPHCDGFQNKEWDLFVERSKAYSNCYPYDVPDYVSLRSLVASSGTLEFNNESFNWTGVAQNGTSSACKRRSDKSFFSRLNWLHQLKYKYPALNVTMPNNEKFDKLYIWGVHHPGTDSDQISLYAQASGRVTVSTKRSQQTVIPNIGSRPWVRGVSSRISIYWTIVKPGDILLINSTGNLIAPRGYFKIRSGKSSIMRSDAPIGKCNSECITPNGSIPNDKPFQNVNRITYGACPRYVKQNTLKLATGMRNVPGKQTRGIFGAIAGFIENGWEGMMDGWYGFRHQNSEGTGQAADLKSTQAAINQINGKLNRLIEKTNEKFHQIEKEFSEVEGRIQDLEKYVEDTKIDLWSYNAELLVALENQHTIDLTDSEMNKLFERTKKQLRENAEDMGNGCFKIYHKCDNACIGSIRNGTYDHDVYRDEALNNRFQIKGVELKSGYKDWVLWISFAISCFLLCIVLLGFIMWACQKGNIRCNICI

SEQ ID NO: 607 - protein, 566 aa, Artificial Sequence
  derived and/or modified protein sequence (wt) from hemagglutinin__InfluenzaA__ABC50332
MKTIIALSYILCLVFAQKLPGNDNSTATLCLGHHAVPNGTLVKTITNDQIEVTNATELVQSSSTGRICDSPHQILDGENCTLIDALLGDPHCDGFQNKEWDLFVERSKAYSNCYPYDVPDYVSLRSLVASSGTLEFNNESFNWTGVAQNGTSSACKRRSDKSFFSRLNWLHQLKYKYPALNVTMPNNEKFDKLYIWGVHHPGTDSDQISLYAQASGRVTVSTKRSQQTVIPNIGSRPWVRGVSSRISIYWTIVKPGDILLINSTGNLIAPRGYFKIRSGKSSIMRSDAPIGKCNSECITPNGSIPNGKPFQNVNRITYGACPRYVKQNTLKLATGMRNVPEKQTRGIFGAIAGFIENGWEGMMDGWYGFRHQNSEGTGQAADLKSTQAAINQINGKLNRLIEKTNEKFHQIEKEFSEVEGRIQDLEKYVEDTKIDLWSYNAELLVALENQHTIDLTDSEMNKLFERTKKQLRENAEDMGNGCFKIYHKCDNACIGSIRNGTYDHDVYRDEALNNRFQIKGVELKSGYKDWILWISFAISCFLLCIVLLGFIMWACQKGNIRCNICI

SEQ ID NO: 608 - protein, 566 aa, Artificial Sequence; identical to SEQ ID NO: 562
  derived and/or modified protein sequence (wt) from hemagglutinin__InfluenzaA__ABC50343

SEQ ID NO: 609 - protein, 566 aa, Artificial Sequence
  derived and/or modified protein sequence (wt) from hemagglutinin__InfluenzaA__ABC50354
MKTIIALSYILCLVFAQKLPGNDNSTATLCLGHHAVPNGTLVKTITNDQIEVTNATELVQSSSTGRICDSPHQILDGENCTLIDALLGDPHCDGFQNKEWDLFVERSKAYSNCYPYDVPDYVSLRSLVASSGTLEFNNESFNWTGVAQNGTSSSCKRRSDKSFFSRLNWLHQLKYKYPALNVTMPNNEKFDKLYIWGVHHPGTDSDQISLYAQASGRVTVSTKRSQQTVIPNIGSRPWVRGVSSRISIYWTIVKPGDILLINSTGNLIAPRGYFKIRSGKSSIMRSDAPIGKCNSECITPNGSIPNDKPFQNVNRITYGACPRYVKQNTLKLATGMRNVPEKQTRGIFGAIAGFIENGWEGMMDGWYGFRHQNSEGTGQAADLKSTQAAINQINGKLNRLIEKTNEKFHQIEKEFSEVEGRIQDLEKYVEDTKIDLWSYNAELLVALENQHTIDLTDSEMNKLFERTKKQLRENAEDMGNGCFKIYHKCDNACIGSIRNGTYDHDVYRDEALNNRFQIKGVELKSGYKDWVLWISFAISCFLLCIVLLGFIMWACQKGNIRCNICI

SEQ ID NO: 610 - protein, 566 aa, Artificial Sequence
  derived and/or modified protein sequence (wt) from hemagglutinin__InfluenzaA__ABC50376
MKTIIALSYILCLVFAQKLPGNDNSTATLCLGHHAVPNGTLVKTITNDQIEVTNATELVQSSSTGRICDSPHQILDGENCTLIDALLGDPHCDGFQNKEWDLFVERSKAYSNCYPYDVPDYVSLRSLVASSGTLEFNNESFNWTGVAQNGTSSACKRRSDKSFFSRLNWLHQLKYKYPALNVTMPNNEKFDKLYIWGVHHPGTDSDQISLYAQASGRVTVSTKRSQQTVIPNTGSRPWVRGVSSRISIYWTIVKPGDILLINSTGNLIAPRGYFKIRSGKSSIMRSDAPIGKCNSECITPNGSIPNDKPFQNVNRITYGACPRYVKQNTLKLATGMRNVPEKQTRGIFGAIAGFIENGWEGMMDGWYGFRHQNSEGTGQAADLKSTQAAINQINGKLNRLIEKTNEKFHQIEKEFSEVEGRIQDLEKYVEDTKIDLWSYNAELLVALENQHTIDLTDSEMNKLFERTKKQLRENAEDMGNGCFKIYHKCDNACIGSIRNGTYDHDVYRDEALNNRFQIKGVELKSGYKDWVLWISFAISCFLLCIVLLGFIMWACQKGNIRCNICI

SEQ ID NO: 611 - protein, 566 aa, Artificial Sequence
  derived and/or modified protein sequence (wt) from hemagglutinin__InfluenzaA__ABC50387
MKTIIALSYILCLVFAQKLPGNDNSTATLCLGHHAVPNGTLVKTITNDQIEVTNATELVQSSSTGRICDSPHQILDGENCTLIDALLGDPHCDGFQNKEWDLFVERSKAYSNCYPYDVPDYVSLRSLVASSGTLEFNNESFNWTGVAQNGTSSACKRRSDKSFFSRLNWLHQLKYKYPALNVTMPNNEKFDKLYVWGVHHPGTDSDQISLYAQASGRVTVSTKRSQQTVIPNIGSRPWVRGVSSRISIYWTIVKPGDILLINSTGNLIAPRGYFKIRSGKSSIMRSDAPIGKCNSECITPNGSIPNDKPFQNVNRITYGACPRYVKQNTLKLATGMRNVPEKQTRGIFGAIAGFIENGWEGMMDGWYGFRHQNSEGTGQAADLKSTQAAINQINGKLNRLIEKTNEKFHQIEKEFSEVEGRIQDLEKYVEDTKIDLWSYNAELLVALENQHTIDLTDSEMNKLFERTKKQLRENAEDMGNGCFKIYHKCDNACIGSIRNGTYDHDVYRDEALNNRFQIKGVELKSGYKDWVLWISFAISCFLLCIVLLGFIMWACQKGNIRCNICI

SEQ ID NO: 612 - protein, 566 aa, Artificial Sequence
  derived and/or modified protein sequence (wt) from hemagglutinin__InfluenzaA__ABC50409
MKTIIALSYILCLVFAQKLPGNDNSTATLCLGHHAVPNGTIVKTITNDQIEVTNATELVQSSSTGGICDSPHQILDGENCTLIDALLGDPQCDGFQNKKWDLFVERSKAYSNCYPYDVPDYVSLRSLVASSGTLEFNNESFNWTGVTQNGTSSACKRRSNNSFFSRLNWLTHLKFKYPALNVTMPNNEKFDKLYIWGVHHPGTDNDQISLYAQASGRITVSTKRSQQTVIPNIGSRPRVRDIPSRISIYWTIVKPGDILLINSTGNLIAPRGYFKIRSGKSSIMRSDAPIGKCNSECITPNGSIPNDKPFQNVNRITYGACPRYVKQNTLKLATGMRNVPEKQTRGIFGAIAGFIENGWEGMVDGWYGFRHQNSEGIGQAADLKSTQAAINQINGKLNRLIGKTNEKFHQIEKEFSEVEGRIQDLEKYVEDTKIDLWSYNAELLVALENQHTIDLTDSEMNKLFERTKKQLRENAEDMGNGCFKIYHKCDNACIGSIRNGTYDHDVYRDEALNNRFQIKGVELKSGYKDWILWISFAISCFLLCVALLGFIMWACQKGNIRCNICI

SEQ ID NO: 613 - protein, 566 aa, Artificial Sequence; identical to SEQ ID NO: 612
  derived and/or modified protein sequence (wt) from hemagglutinin__InfluenzaA__ABC50420

SEQ ID NO: 614 - protein, 566 aa, Artificial Sequence
  derived and/or modified protein sequence (wt) from hemagglutinin__InfluenzaA__ABC54668
MKTIIALSYILCLVFAQKLPGNDNSTATLCLGHHAVPNGTLVKTITNDQIEVTNATELVQSSSTGRICDSPHQILDGENCTLIDALLGDPHCDGFQNKEWDLFVERSKAYSNCYPYDVPDYASLRSLVASSGTLEFNNESFNWTGVAQNGTSSACKRRSNKSFFSRLNWLHQLKYKYPALNVTMPNNEKFDKLYIWGVHHPSTDSDQISLYAQASGRVTVSTKRSQQTVIPNIGSGPWVRGVSSRISIYWTIVKPGDILLINSTGNLIAPRGYFKIRSGKSSIMRSDAPIGKCNSECITPNGSLPNDKPFQNVNRITYGACPRYVKQNTLKLATGMRNVPEKQTRGIFGAIAGFIENGWEGMVDGWYGFRHQNSEGTGQAADLKSTQAAINQINGKLNRLIEKTNEKFHQIEKEFSEVEGRIQDLEKYVEDTKIDLWSYNAELLVALENQHTIDLTDSEMNKLFERTKKQLRENAEDMGNGCFKIYHKCDNACIGSIRNGTYDHDVYRDEALNNRFQIKGVELKSGYKDWILWISFAISCFLLCVVLLGFIMWACQKGNIRCNICI

SEQ ID NO: 615 - protein, 566 aa, Artificial Sequence
  derived and/or modified protein sequence (wt) from hemagglutinin__InfluenzaA__ABC54679
MKTIIALSYILCLVFAQKLPGNDNSTATLCLGHHAVPNGTIVKTITNDQIEVTNATELVQSSPTGGICDSPHQILDGENCTLIDALLGDPQCDGFQNKKWDLFIERSKAYSNCYPYDVPDYASLRSLVASSGTLEFNNESFNWTGVTQNGTSSACKRRSNNSFFSRLNWLTHLKFKYPALNVTMPNNEKFDKLYIWGVHHPGTDNDQISLYAQASGRITVSTKRSQQTVIPNVGSRPRVRDIPSRISIYWTIVKPGDILLINSTGNLIAPRGYFKIRSGKSSIMRSDAPIGKCNSECITPNGSIPNDKPFQNVNRITYGACPRYVKQNTLKLATGMRNVPEKQTRGIFGAIAGFIENGWEGMVDGWYGFRHQNSEGIGQAADLKSTQAAINQINGKLNRLIGKTNEKFHQIEKEFSEVEGRIQDLEKYVEDTKIDLWSYNAELLVALENQHTIDLTDSEMNKLFERTKKQLRENAEDMGNGCFKIYHKCDNACIGSIRNGTYDHDVYRDEALNNRFQIKGVELKSGYKDWILWISFAISCFLLCVALLGFIMWACQKGNIRCNICI

SEQ ID NO: 616 - protein, 566 aa, Artificial Sequence; identical to SEQ ID NO: 516
  derived and/or modified protein sequence (wt) from hemagglutinin__InfluenzaA__ABC67319

SEQ ID NO: 617 - protein, 566 aa, Artificial Sequence
  derived and/or modified protein sequence (wt) from hemagglutinin__InfluenzaA__ABC67454
MKTIIALSYILCLVFAQELPGNDNSTATLCLGHHAVPNGTLVKTITNDQIEVTNATELVQSSSTGRICDSPHQILDGENCTLIDALLGDPHCDGFQNKEWDLFVERSKAYSNCYPYDVPDYVSLRSLVASSGTLEFNNESFNWTGVAQNGTSSACKRRSDKSFFSRLNWLHQLKYKYPALNVTMPNNEKFDKLYIWGVHHPGTDSDQISLYAQASGRVTVSTKRSQQTVIPNIGSRPWVRGVSSRISIYWTIVKPGDILLINSTGNLIAPRGYFKIRSGKSSIMRSDAPIGKCNSECITPNGSIPNDKPFQNVNRITYGACPRYVKQNTLKLATGMRNVPEKQTRGIFGAIAGFIENGWEGMMDGWYGFRHQNSEGTGQAADLKSTQAAINQINGKLNRLIEKTNEKFHQIEKEFSEVEGRIQDLEKYVEDTKIDLWSYNAELLVALENQHTIDLTDSEMNKLFERTKKQLRENAEDMGNGCFKIYHKCDNACIGSIRNGTYDHDVYRDEALNNRFQIKGVELKSGYKDWVLWISFAISCFLLCIVLLGFIMWACQKGNIRCNICI

SEQ ID NO: 618 - protein, 566 aa, Artificial Sequence; identical to SEQ ID NO: 562
  derived and/or modified protein sequence (wt) from hemagglutinin__InfluenzaA__ABC67471

SEQ ID NO: 619 - protein, 566 aa, Artificial Sequence
  derived and/or modified protein sequence (wt) from hemagglutinin__InfluenzaA__ABC67554
MKTIIALSYILCLVFAQKLPGNDNSTATLCLGHHAVPNGTIVKTITNDQIEVTNATELVQSSSTGGICDSPHQILDGENCTLIDALLGDPQCDGFQNKKWDLFVERSKAYSNCYPYDVPDYASLRSLIASSGTLEFNNESFNWTGVTQNGTSSACKRRSNSSFFSRLNWLTHLKFKYPALNVTMPNNEEFDKLYIWGVHHPGTDNDQISLYAQASGRITVSTKRSQQTVIPNIGSRPRVRDIPSRISIYWTIVKPGDILLINSTGNLIAPRGYFKIRSGKSSIMRSDAPIVKCNSECITPNGSIPNDKPFQNVNRITYGACPRYVKQNTLKLATGMRNVPEKQTRGIFGAIAGFIENGWEGMVDGWYGFRHQNSEGIGQAADLKSTQAAIDQINGKLNRLIGKTNEKFHQIEKEFSEVEGRIQDLEKYVEDTKIDLWSYNAELLVALENQHTIDLTDSEMNKLFERTKKQLRENAEDMGNGCFKIYHKCDNACIGSIRNGTYDHDVYRDEALNNRFQIKGVELKSGYKDWILWISFAISCFLLCVALLGFIMWACQKGNIRCNICI

SEQ ID NO: 620 - protein, 566 aa, Artificial Sequence
  derived and/or modified protein sequence (wt) from hemagglutinin__InfluenzaA__ABC67565
MKTIIALSYIFCLVLGQDFPGNDNSTATLCLGHHAVPNGTLVKTITNDQIEVTNATELVQSSSTGKICNNPHRILDGIDCTLIDALLGDPHCDGFQNETWDLFVERSKAFSNCYPYDVPDYASLRSLVASSGTLEFINEGFTWTGVTQNGGSNACKRGPDIGFFSRLNWLYKSGSTYPVLNVTMPNNDNFDKLYIWGVHHPSTDQEQTSLYVQASGRVTVSTKRSQQTIIPNIGSRPWVRGLSSRISIYWTIVKPGDILVINSNGNLIAPRGYFKMRTGKSSIMRSDAPIGTCISECITPNGSIPNDKPFQNVNKITYGACPKYVKQNTLKLATGMRNVPEKQTRGLFGAIAGFIENGWEGMIDGWYGFRHQNSEGTGQAADLKSTQAAIDQINGKLNRVIEKTNEKFHQIEKEFSEVEGRIQDLEKYVEDTKIDLWSYNAELLVALENQHTIDLTDSEMNKLFEKTRRQLRENAEDMGNGCFKIYHKCDNACIGSIRNGTYDHDVYRDEALNNRFQIKGVELKSGYKDWILWISFAISCFLLCVVLLGFIMWACQKGNIRCNICI

SEQ ID NO: 621 - protein, 566 aa, Artificial Sequence
  derived and/or modified protein sequence (wt) from hemagglutinin__InfluenzaA__ABC67576
MKTIIALSYILCLVFAQKLPGNDNSMATLCLGHHAVPNGTLVKTITNDQIEVTNATELVQSSSTGRICDSPHRILDGENCTLIDALLGDPHCDGFQNKEWDLFVERSKAYSNCYPYDVPDYASLRSLVASSGTLEFNNESFNWTGVAQNGTSYACKRRSIKSFFSRLNWLHQLKYKYPALNVTMPNNDEFDKLYIWGVHHPSTDSDQTSLYAQASGRVTVSTKRSQQTVIPNIGSRPWVRGVSSRISIYWTIVKPGDILLINSTGNLIAPRGYFKIRSGKSSIMRSDAPIGKCNSECITPNGSIPNDKPFQNVNRITYGACPRYVKQNTLKLATGMRNVPEKQTRGIFGAIAGFIENGWEGMVDGWYGFRHQNSEGTGQAADLKSTQAAINQINGKLNRLIEKTNEKFHQIEKEFSEVEGRIQDLEKYVEDTKIDLWSYNAELLVALENQHTIDLTDSEMNKLFERTRKQLRENAEDMGNGCFKIYHKCDNACIGSIRNGTYDHDVYRDEALNNRFQIKGVELKSGYKDWILWISFAISCFLLCVVLLGFIMWACQKGNIRCNICI

SEQ ID NO: 622 - protein, 566 aa, Artificial Sequence
  derived and/or modified protein sequence (wt) from hemagglutinin__InfluenzaA__ABC67587
MKTIIALSYILCLVFAQKLPGNDNSTATLCLGHHAVPNGTIVKTITNDQIEVTNATELVQSSSTGGICDSPHQILDGENCTLIDALLGDPQCDGFQNKKWDLFVERSKAYSNCYPYDVPDYASLRSLVASSGTLEFNNESFNWTGVTQNGTSSACKRRSNNSFFSRLNWLTHLKFKYPALNVTMPNNEKFDKLYIWGVHHPGTDNDQISLYAQASGRITVSTKRSQQTVIPNIGSRPRVRDIPSRISIYWTIVKPGDILLINSTGNLIAPRGYFKIRSGKSSIMRSDAPIGKCNSECITPNGSIPNDKPFQNVNRITYGPCPRYVKQNTLKLATGMRNVPEKQTRGIFGAIAGFIENGWEGMVDGWYGFRHQNSEGIGQAADLKSTQAAINQINGKLNRLIGKTNEKFHQIEKEFSEVEGRIQDLEKYVEDTKIDLWSYNAELLVALENQHTIDLTDSEMNKLFERTKKQLRENAEDMGNGCFKIYHKCDNACIGSIRNGTYDHDVYRDEALNNRFQIKGVELKSGYKDWILWISFAISCFLLCVALLGFIMWACQKGNIRCNICI

SEQ ID NO: 623 - protein, 566 aa, Artificial Sequence; identical to SEQ ID NO: 243
  derived and/or modified protein sequence (wt) from hemagglutinin__InfluenzaA__ABC67598

SEQ ID NO: 624 - protein, 566 aa, Artificial Sequence; identical to SEQ ID NO: 562
  derived and/or modified protein sequence (wt) from hemagglutinin__InfluenzaA__ABC67609

SEQ ID NO: 625 - protein, 566 aa, Artificial Sequence; identical to SEQ ID NO: 562
  derived and/or modified protein sequence (wt) from hemagglutinin__InfluenzaA__ABC67620

SEQ ID NO: 626 - protein, 566 aa, Artificial Sequence; identical to SEQ ID NO: 562
  derived and/or modified protein sequence (wt) from hemagglutinin__InfluenzaA__ABC67631

SEQ ID NO: 627 - protein, 566 aa, Artificial Sequence; identical to SEQ ID NO: 562
  derived and/or modified protein sequence (wt) from hemagglutinin__InfluenzaA__ABC67642

SEQ ID NO: 628 - protein, 566 aa, Artificial Sequence
  derived and/or modified protein sequence (wt) from hemagglutinin__InfluenzaA__ABC67653
MKTIIALSYILCLVFAQKLPGNDNSTATLCLGHHAVPNGTLVKTITNDQIEVTNATELVQSSSTGRICDSPHQILDGENCTLIDALLGDPHCDGFQNKEWDLFVERSKAYSNCYPYDVPDYVSLRSLVASSGTLEFNNESFNWTGVAQNGTSSACKRRSDKSFFSRLNWLHQLKYKYPALNVTMPNNEKFDKLYIWGVHHPGTDSDQISLYAQASGRVTVSTKRSQQTVIPNIGSRPWVRGVSSRISIYWTIVKPGDILLINSTGNLIAPRGYFKIRSGKSSIMRSDAPIGKCNSECITPNGSIPNDKPFQNVNRITYGACPRYVKQNTLKLATGMRNVPEKQTRGIFGAIAGFIENGWEGMMDGWYGFRHQNSEGTGQAADLKSTQAAINQINGKLNRLIEKTNEKFHQIEKEFSEVEGRIQDLEKYVEDTKIDLWSYNAELLVALENQHTIDLTDSEMNKLFERTKKQLRENAEDMGNGCFKIYHKCDNACIGSIRNGTYDHDVYRDEALNNRFQIKGVELKSGYKDWVLWISFAISCFLLCVVLLGFIMWACQKGNIRCNICI

SEQ ID NO: 629 - protein, 566 aa, Artificial Sequence
  derived and/or modified protein sequence (wt) from hemagglutinin__InfluenzaA__ABC67697
MKTIIALSYILCLVFAQKLPGNDNSTATLCLGHHAVPNGTIVKTITNDQIEVTNATELVQSSSTGEICDSPHQILDGENCTLIDALLGDPQCDGFQNKEWDLFVERSKAYSNCYPYDVPDYASLRSLVASSGTLEFNNESFNWTGVTQNGTSSACKRRSNNSFFSRLNWLTHLKFKYPALNVTMPNNEKFDKLYIWGVHHPGTDNDQIFLYAQASGRITVSTKRSQQTVIPNIGSRPRVRNIPSRISIYWTIVKPGDILLINSTGNLIAPRGYFKIRSGKSSIMRSDAPIGKCNSECITPNGSIPNDKPFQNVNRITYGACPRYVKQNTLKLATGMRNVPEKQTRGIFGAIAGFIENGWEGMVDGWYGFRHQNSEGIGQAADLKSTQAAINQINGKLNRLIGKTNEKFHQIEKEFSEVEGRIQDLEKYVEDTKIDLWSYNAELLVALENQHTIDLTDSEMNKLFERTKKQLRENAEDMGNGCFKIYHKCDNACIGSIRNGTYDHDVYRDEALNNRFQIKGVELKSGYKDWILWISFAISCFLLCVALLGFIMWACQKGNIRCNICI

SEQ ID NO: 630 - protein, 566 aa, Artificial Sequence
  derived and/or modified protein sequence (wt) from hemagglutinin__InfluenzaA__ABC67708
MKTIIALSYILCLVFAQKLPGNDNSTATLCLGHHAVPNGTIVKTITNDQIEVTNATELVQSSSTGGICDSPHQILDGENCTLIDALLGDPQCDGFQNKKWDLFVERSKAYSNCYPYDVPDYASLRSLVASSGTLEFNNESFNWTGVTQNGTSSACKRRSNNSFFSRLNWLTHLKFKYPALNVTMPNNEKFDKLYIWGVHHPGTDNDQIFLYAQASGRITVSTKRSQQTVIPNIGSRPRVRNIPSRISIYWTIVKPGDILLINSTGNLIAPRGYFKIRSGKSSIMRSDAPIGKCNSECITPNGSIPNDKPFQNVNRITYGACPRYVKQNTLKLATGMRNVPEKQTRGIFGAIAGFIENGWEGMVDGWYGFRHQNSEGIGQAADLKSTQAAINQINGKLNRLIGKTNEKFHQIEKEFSEVEGRIQDLEKYVEDTKIDLWSYNAELLVALENQHTIDLTDSEMNKLFERTKKQLRENAEDMGNGCFKIYHKCDNACIGSIRNGTYDHDVYRDEALNNRFQIKGVELKSGYKDWILWISFAISCFLLCVALLGFIMWACQKGNIRCNICI

SEQ ID NO: 631 - protein, 566 aa, Artificial Sequence; identical to SEQ ID NO: 630
  derived and/or modified protein sequence (wt) from hemagglutinin__InfluenzaA__ABC67719

SEQ ID NO: 632 - protein, 566 aa, Artificial Sequence; identical to SEQ ID NO: 630
  derived and/or modified protein sequence (wt) from hemagglutinin__InfluenzaA__ABC67733

SEQ ID NO: 633 - protein, 566 aa, Artificial Sequence
  derived and/or modified protein sequence (wt) from hemagglutinin__InfluenzaA__ABC67806
MKTIIALSYILCLVFAQKLPGNDNSTATLCLGHHAVPNGTIVKTITNDQIEVTNATELVQSSSTGGICDSPHQILDGENCTLIDALLGDPQCDGFQNKKWDLFVERSKAYSNCYPYDVPDYASLRSLIASSGTLEFNNESFNWTGVTQNGTSSACKRRSNSSFFSRLNWLTHLKFKYPALNVTMPNNEEFDKLYIWGVHHPGTYNDQISLYAQASGRITVSTKRSQQTVIPNIGSRPRVRDIPSRISIYWTIVKPGDILLINSTGNLIAPRGYFKIRSGKSSIMRSDAPIGKCNSECITPNGSIPNDKPFQNVNRITYGACPRYVKQNTLKLATGMRNVPEKQTRGIFGAIAGFIENGWEGMVDGWYGFRHQNSEGIGQAADLKSTQAAIDQINGKLNRLIGKTNEKFHQIEKEFSEVEGRIQDLEKYVEDTKIDLWSYNAELLVALENQHTIDLTDSEMNKLFERTKKQLRENAEDMGNGCFKIYHKCDNACIGSIRNGTYDHDVYRDEALNNRFQIKGVELKSGYKDWILWISFAISCFLLCVALLGFIMWACQKGNIRCNICI

SEQ ID NO: 634 - protein, 566 aa, Artificial Sequence; identical to SEQ ID NO: 516
  derived and/or modified protein sequence (wt) from hemagglutinin__InfluenzaA__ABC67817

SEQ ID NO: 635 - protein, 566 aa, Artificial Sequence; identical to SEQ ID NO: 630
  derived and/or modified protein sequence (wt) from hemagglutinin__InfluenzaA__ABC67828

SEQ ID NO: 636 - protein, 566 aa, Artificial Sequence; identical to SEQ ID NO: 494
  derived and/or modified protein sequence (wt) from hemagglutinin__InfluenzaA__ABC67839

SEQ ID NO: 637 - protein, 566 aa, Artificial Sequence
  derived and/or modified protein sequence (wt) from hemagglutinin__InfluenzaA__ABC67850
MKTIIALSYILCLVFAQKLPGNDNSTATLCLGHHAVPNGTLVKTITNDQIEVTNATELVQSSSTGRICDSPHQILDGENCTLIDALLGDPHCDGFQNKEWDLFVERSKAYSNCYPYDVPDYVSLRSLVASSGTLEFNNESFNWTGVAQNGTSSACKRRSDKSFFSRLNWLHQLKYKYPALNVTMPNNEKFDKLYIWGVHHPGTDSDQISLYAQASGRVTVSTKRSQQTVIPNIGSRPWARGVSSRISIHWTIVKPGDILLINSTGNLIAPRGYFKIRSGKSSIMRSDAPIGKCNSECITPNGSIPNDKPFQNVNRITYGACPRYVKQNTLKLATGMRNVPEKQTRGIFGAIAGFIENGWEGMMDGWYGFRHQNSEGTGQAADLKSTQAAINQINGKLNRLIEKTNEKFHQIEKEFSEVEGRIQDLEKYVEDTKIDLWSYNAELLVALENQHTIDLTDSEMNKLFERTKKQLRENAEDMGNGCFKIYHKCDNACIGSIRNGTYDHDVYRDEALNNRFQIKGVELKSGYKDWVLWISFAISCFLLCIVLLGFIMWACQKGNIRCNICI

SEQ ID NO: 638 - protein, 566 aa, Artificial Sequence; identical to SEQ ID NO: 494
  derived and/or modified protein sequence (wt) from hemagglutinin__InfluenzaA__ABC67861

SEQ ID NO: 639 - protein, 566 aa, Artificial Sequence; identical to SEQ ID NO: 562
  derived and/or modified protein sequence (wt) from hemagglutinin__InfluenzaA__ABC67883

SEQ ID NO: 640 - protein, 566 aa, Artificial Sequence
  derived and/or modified protein sequence (wt) from hemagglutinin__InfluenzaA__ABC67894
MKTIIALSYILCLVFAQKLPGNDNSTATLCLGHHAVPNGTLVKTITNDQIEVTNATELVQSSSTGRICDSPHQILDGENCTLIDALLGDPHCDGFQNKEWDLFVERSKAYSNCYPYDVPDYVSLRSLVASSGTLEFNNESFNWTGVAQNGTSSACKRRSDKSFFSKLNWLHQLKYKYPALNVTMPNNEKFDKLYIWGVHHPGTDSDQISLYAQASGRVTVSTKRSQQTVIPNIGSRPWVRGVSSRISIYWTIVKPGDILLINSTGNLIAPRGYFKIRSGKSSIMRSDAPIGKCNSECITPNGSIPNDKPFQNVNRITYGACPRYVKQNTLKLATGMRNVPEKQTRGIFGAIAGFIENGWEGMMDGWYGFRHQNSEGTGQAADLKSTQAAINQINGKLNRLIEKTNEKFHQIEKEFSEVEGRIQDLEKYVEDTKIDLWSYNAELLVALENQHTIDLTDSEMNKLFERTKKQLRENAEDMGNGCFKIYHKCDNACIGSIRNGTYDHDVYRDEALNNRFQIKGVELKSGYKDWVLWISFAISCFLLCIVLLGFIMWACQKGNIRCNICI

SEQ ID NO: 641 - protein, 566 aa, Artificial Sequence; identical to SEQ ID NO: 562
  derived and/or modified protein sequence (wt) from hemagglutinin__InfluenzaA__ABC67967

SEQ ID NO: 642 - protein, 566 aa, Artificial Sequence; identical to SEQ ID NO: 562
  derived and/or modified protein sequence (wt) from hemagglutinin__InfluenzaA__ABC67978

SEQ ID NO: 643 - protein, 566 aa, Artificial Sequence
  derived and/or modified protein sequence (wt) from hemagglutinin__InfluenzaA__ABC67989
MKTIIALSYILCLVFAQKLPGNDNSTATLCLGHHAVPNGTLVKTITNDQIEVTNATELVQSSSTGRICDSPHQILDGENCTLIDALLGDPHCDGFQNKEWDLFVERSKAYSNCYPYDVPDYVSLRSLVASSGTLEFNNESFNWTGVAQNGTSSACKRRSDKSFFSRLNWLHQLKYKYPALKVTMPNNEKFDKLYIWGVHHPGTDSDQISLYAQASGRVTVSTKRSQQTVIPNIGSRPWVRGVSSRISIYWTIVKPGDILLINSTGNLIAPRGYFKIRSGKSSIMRSDAPIGKCNSECITPNGSIPNDKPFQNVNRITYGACPRYVKQNTLKLATGMRNVPEKQTRGIFGAIAGFIENGWEGMMDGWYGFRHQNSEGTGQAADLKSTQAAINQINGKLNRLIEKTNEKFHQIEKEFSEVEGRIQDLEKYVEDTKIDLWSYNAELLVALENQHTIDLTDSEMNKLFERTKKQLRENAEDMGNGCFKIYHKCDNVCIGSIRNGTYDHDVYRDEALNNRFQIKGVELKSGYKDWVLWISFAISCFLLCIVLLGFIMWACQKGNIRCNICI

SEQ ID NO: 644 - protein, 566 aa, Artificial Sequence; identical to SEQ ID NO: 617
  derived and/or modified protein sequence (wt) from hemagglutinin__InfluenzaA__ABC68000

SEQ ID NO: 645 - protein, 566 aa, Artificial Sequence
  derived and/or modified protein sequence (wt) from hemagglutinin__InfluenzaA__ABC68049
MKTIIALSYILCLVFAQKLPGNDNSTATLCLGHHAVPNGTLVKTITDDQIEVTNATELVQSSSTGRICDSPHQILDGENCTLIDALLGDPHCDGFQNKEWDLFVERSKAYSNCYPYDVPDYVSLRSLVASSGTLEFNNESFNWTGVAQNGTSSACKRRSDKSFFSRLNWLHQLKYKYPALNVTMPNNEKFDKLYVWGVHHPGTDSDQISLYAQASGRVTVSTKRSQQTVIPNIGSRPWVRGVSSKISIYWTIVKPGDILLINSTGNLIAPRGYFKIRSGKSSIMRSDAPIGKCNSECITPNGSIPNDKPFQNVNRITYGACPRYVKQNTLKLATGMRNVPEKQTRGIFGAIAGFIENGWEGMMDGWYGFRHQNSEGTGQAADLKSTQAAINQINGKLNRLIEKTNEKFHQIEKEFSEVEGRIQDLEKYVEDTKIDLWSYNAELLVALENQHTIDLTDSEMNKLFERTKKQLRENAEDMGNGCFKIYHKCDNACIGSIRNGTYDHDVYRDEALNNRFQIKGVELKSGYKDWVLWISFAISCFLLCIVLLGFIMWACQKGNIRCNICI

SEQ ID NO: 646 - protein, 566 aa, Artificial Sequence; identical to SEQ ID NO: 562
  derived and/or modified protein sequence (wt) from hemagglutinin__InfluenzaA__ABC68060

SEQ ID NO: 647 - protein, 566 aa, Artificial Sequence
  derived and/or modified protein sequence (wt) from hemagglutinin__InfluenzaA__ABC68071
MKTIIALSYILCLVFAQKLPGNDNSTATLCLGHHAVPNGTLVKTITNDQIEVTNATELVQSSSTGRICDSPHQILDGENCTLIDALLGDPHCDGFQNKEWDLFVERSKAYSNCYPYDVPDYVSLRSLVASSGTLEFNNESFNWTGVAQNGTSSACKRRSDKSFFSRLNWLHQLKYKYPALNVTMPNNEKFDKLYIWGVHHPGTDSDQISLYAQASGRVTVSTKRSQQTVIPNIGSRPWVRGVSSRISIYWTIVKPGDILLINSTGNLIAPRGYFKIRSGKSSIMRSDAPIGKCNSECITPNGSIPNDKPFQNVNRITYGACPRYVKQNTLKLATGMRNVPEKQTRGIFGAIAGFIENGWEGMMDGWYGFRHQNSEGTGQAADLKSTQAAINQINGKLNRLIEKTNEKFHQIEKEFSEVEGRIQDLEKYVEDTKIDLWSYNAELLVALENQHTIDLTDSEMNKLFERTKKQLRENAEDMGNGCFKIYHKCDNACIGSIRNGTYDHNVYRDEALNNRFQIKGVELKSGYKDWVLWISFAISCFLLCIVLLGFIMWACQKGNIRCNICI

SEQ ID NO: 648 - protein, 566 aa, Artificial Sequence; identical to SEQ ID NO: 630
  derived and/or modified protein sequence (wt) from hemagglutinin__InfluenzaA__ABC68082

SEQ ID NO: 649 - protein, 566 aa, Artificial Sequence
  derived and/or modified protein sequence (wt) from hemagglutinin__InfluenzaA__ABC68093
MKTIIALSYILCLVFAQKLPGNDNSTATLCLGHHAVPNGTLVKTITNDQIEVTNATELVQSSSTSRICDSPHQILDGENCTLIDALLGDPHCDGFQNKEWDLFVERSKAYSNCYPYDVPDYVSLRSLVASSGTLEFNNESFNWTGVAQNGTSSACKRRSDKSFFSRLNWLHQLKYKYPALNVTMPNNEKFDKLYIWGVHHPGTDSDQISLYAQASGRVTVSTKRSQQTVIPNIGSRPWVRGVSSIISIYWTIVKPGDILLINSTGNLIAPRGYFKIRSGKSSIMRSDAPIGKCNSECITPNGSIPNGKPFQNVNRITYGACPRYVKQNTLKLATGMRNVPEKQTRGIFGAIAGFIENGWEGMMDGWYGFRHQNSEGTGQAADLKSTQAAINQINGKLNRLIEKTNEKFHQIEKEFSEVEGRIQDLEKYVEDTKIDLWSYNAELLVALENQHTIDLTDSEMNKLFERTKKQLRENAEDMGNGCFKIYHKCDNACIGSIRNGTYDHDVYRDEALNNRFQIKGVELKSGYKDWILWISFATSCFLLCIVLLGFIMWACQKGNIRCNICI

SEQ ID NO: 650 - protein, 566 aa, Artificial Sequence
  derived and/or modified protein sequence (wt) from hemagglutinin__InfluenzaA__ABC68222
MKTIIALSYILCLVFAQKLPGNDNSTATLCLGHHAVPNGTLVKTITNDQIEVTNATELVQSSSTGGICDSPHQILDGENCTLIDALLGDPHCDGFQNKEWDLFVERSKAYSNCYPYDVPDYASLRSLVASSGTLEFNNESFNWTGVAQNGTSSACKRRSNKSFFSRLNWLHQLKYKYPALNVTMPNNEKFDKLYIWGVHHPSTDSDQISLYAQAPGRVTVSTKRSQQTVIPNIGSRPWVRGVSSRISIYWTIVKPGDILLINCTGNLIAPRGYFKIRSGKSSIMRSDASIGKCNSECITPNGSIPNDKPFQNVNRITYGACPRYVKQNTLKLATGMRNVPEKQTRGIFGAIAGFIENGWEGMVDGWYGFRHQNSEGTGQAADLKSTQAAINQINGKLNRLIEKTNEKFHQIEKEFSEVEGRIQDLEKYVEDTKIDLWSYNAELLVALENQHTIDLTDSEMNKLFERTKKQLRENAEDMGNGCFKIYHKCDNACIGSIRNGTYDHDVYRDEALNNRFQIKGVELKSGYKDWILWISFAISCFLLCVVLLGFIMWACQKGNIRCNICI

SEQ ID NO: 651 - protein, 566 aa, Artificial Sequence; identical to SEQ ID NO: 442
  derived and/or modified protein sequence (wt) from hemagglutinin__InfluenzaA__ABC68233

SEQ ID NO: 652 - protein, 568 aa, Artificial Sequence
  derived and/or modified protein sequence (wt) from hemagglutinin__InfluenzaA__ABC72655
MEKIVLLFAIVSLVKSDQICIGYHANNSTEQVDTIMEKNVTVTHAQDILEKTHNGKLCDLDGVKPLILRDCSVAGWLLGNPMCDEFINVPEWSYIVEKPNPANDLCYPGDFNDYEELKHLLSRINHFEKIQIIPKSSWSSHEASVGVSSVCPYQGKSSFFRNVVWLIKKNSTYPTIKRSYNNTNQEDLLVLWGIHHPNDAAEQTKLYQNPTTYISVGTSTLNQRLVPRIATRSKVNGQSGRMEFFWTILKPNDAINFESNGNFIAPEYAYKIVKKGDSTIMKSELEYGNCNTKCQTPMGAINSSMPFHNIHPLTIGECPKYVKSNRLVLATGLRNSPQREKRRKKRGLFGAIAGFIEGGWQGMVDGWYGYHHSNEQGSGYAADKESTQKAIDGVTNKVNSIIDKMNTQFEAVGREFNNLERRIENLNKKMEDGFLDVWTYNAELLVLMENERTLDFHDSNVKNLYDKVRLQLRDNAKELGNGCFEFYHKCDNECMESVRNGTYDYPQYSEEARLKREEISGVKLESIGIYQILSIYSTVASSLALAIMVAGLSLWMCSNGSLQCRICI

SEQ ID NO: 653 - protein, 566 aa, Artificial Sequence; identical to SEQ ID NO: 243
  derived and/or modified protein sequence (wt) from hemagglutinin__InfluenzaA__ABC84400

SEQ ID NO: 654 - protein, 566 aa, Artificial Sequence; identical to SEQ ID NO: 452
  derived and/or modified protein sequence (wt) from hemagglutinin__InfluenzaA__ABC84411

SEQ ID NO: 655 - protein, 566 aa, Artificial Sequence
  derived and/or modified protein sequence (wt) from hemagglutinin__InfluenzaA__ABC84433
MKTIIALSYILCLVFAQKLPGNDNRTATLCLGHHAVPNGTIVKTITNDQIEVTNATELVQSSSTGGICDSPHQILDGENCTLIDALLGDPQCDGFQNKKWDLFVERSKAYSNCYPYDVPDYASLRSLVASSGTLEFNNESFNWTGVTQNGTSSACKRRSNNSFFSRLNWLTHLKFKYPALNVTMPNNEKFDKLYIWGVHHPGTNNDQISLYAQASGRITVSTKRSQQTVIPNIGSRPRVRDIPSRISIYWTIVKPGDILLINSTGNLIAPRGYFKIRSGKSSIMRSDAPIGKCNSECITPNGSIPNDKPFQNVNRITYGACPRYVKQNTLKLATGMRNVPEKQTRGIFGAIAGFIENGWEGMVDGWYGFRHQNSEGIGQAADLKSTQAAINQINGKLNRLIGKTNEKFHQIEKEFSEVEGRIQDLEKYVEDTKIDLWSYNAELLVALENQHTIDLTDSEMNKLFERTKKQLRENAEDMGNGCFKIYHKCDNACIGSIRNGTYDHDVYRDEALNNRFQIKGVELKSGYKDWILWISFAISCFLLCVALLGFIMWACQKGNIRCNICI

SEQ ID NO: 656 - protein, 566 aa, Artificial Sequence; identical to SEQ ID NO: 562
  derived and/or modified protein sequence (wt) from hemagglutinin__InfluenzaA__ABC84444

SEQ ID NO: 657 - protein, 566 aa, Artificial Sequence; identical to SEQ ID NO: 633
  derived and/or modified protein sequence (wt) from hemagglutinin__InfluenzaA__ABC84498

SEQ ID NO: 658 - protein, 566 aa, Artificial Sequence; identical to SEQ ID NO: 633
  derived and/or modified protein sequence (wt) from hemagglutinin__InfluenzaA__ABC84509

SEQ ID NO: 659 - protein, 566 aa, Artificial Sequence
  derived and/or modified protein sequence (wt) from hemagglutinin__InfluenzaA__ABC84520
MKTIIALSYILCLVFAQKLPGNDNSTATLCLGHHAVPNGTIVKTITNDQIEVTNATELVQSSSTGGICDSPHQILDGENCTLIDALLGDPQCDGFQNKKWDLFVERSKAYSNCYPYDVPDYASLRSLVASSGTLEFNNESFNWTGVTQNGTSSACKRRSNNSFFSRLNWLTHLKFKYPALNVTMPNNEKFDKLYIWGVHHPGTDNDQIFLYAQASGRITVSTKRSQQTVIPNIGSRPRVRDIPSRISIYWTIVKPGDILLINSTGNLIAPRGYFKIRSGKSSIMRSDAPIGKCNSECITPNGSIPNDKPFQNVNRITYGACPRYVKQNTLKLATGMRNVPEKQTRGIFGAIAGFIENGWEGMVDGWYGFRHQNSEGIGQAADLKSTQAAINQINGKLNRLIGKTNEKFHQIEKEFSEVEGRIQDLEKYVEDTKIDLWSYNAELLVALENQHTIDLTDSEMNKLFERTKKQLRENAEDMGNGCFKIYHKCDNACIGSIRNGTYDHDVYRDEALNNRFQIKGVELKSGYKDWILWISFAISCFLLCVALLGFIMWACQKGNIRCNICI

SEQ ID NO: 660 - protein, 566 aa, Artificial Sequence
  derived and/or modified protein sequence (wt) from hemagglutinin__InfluenzaA__ABC84531
MKTIIALSYIFCLVFAQKLPGNDNSTATLCLGHHAVPNGTLVKTITNDQIEVTNATELVQSSSTGRICDSPHRILDGKNCTLIDALLGDPHCDGFQNEKWDLFVERSKAFSNCYPYDVPDYASLRSLVASSGTLEFINEGFNWTGVTQSGGSYACKRGSVNSFFSRLNWLYESESKYPALNVTMPNNGRFDKLYIWGVHHPSTDKEQTNLYVRAAGRVTVSTKRSQQTVIPNIGSRPWVRGLSSRISIYWTIVKPGDILLINSTGNLIAPRGYFKIRTGKSSIMRSDAPIGTCSSECITPNGSIPNDKPFQNVNKITYGACPRYVKQNTLKLATGMRNVPEKQTRGIFGAIAGFIENGWEGMVDGWYGFRHQNSEGTGQAADLKSTQAAIDQINGKLNRLIEKTNEKFHQIEKEFSEVEGRIQDLEKYVEDTKIDLWSYNAELLVALENQHTIDLTDSEMNKLFEKTRKQLRENAEDMGNGCFKIYHKCDNACIGSIRNGTYDHDVYRDEALNNRFQIKGVELKSGYKDWILWISFAISCFLLCVVLLGFIMWACQKGNIRCNICI

SEQ ID NO: 661 - protein, 566 aa, Artificial Sequence; identical to SEQ ID NO: 650
  derived and/or modified protein sequence (wt) from hemagglutinin__InfluenzaA__ABC84560

SEQ ID NO: 662 - protein, 566 aa, Artificial Sequence
  derived and/or modified protein sequence (wt) from hemagglutinin__InfluenzaA__ABC84571
MKTIIALSYILCLVFAQKLPGNDNSTATLCLGHHAVPNGTLVKTITNDQIEVTNATELVQSSSTGGICDSPHQIIDGENCTLIDALLGDPHCDGFQNKEWDLFVERSKAYSNCYPYDVPDYASLRSLVASSGTLEFNNESFNWTGVAQNGTSSACKRRSNKSFFSRLNWLHQLKYKYPALNVTMPNNEKFDKLYIWGVHHPSTDSDQISLYAQAPGRVTVSTKRSQQTVIPNIGSRPWVRGVSSRISIYWTIVKPGDILLINCTGNLIAPRGYFKIRSGKSSIMRSDASIGKCNSECITPNGSIPNDKPFQNVNRITYGACPRYVKQNTLKLATGMRNVPEKQTRGIFGAIAGFIENGWEGMVDGWYGFRHQNSEGTGQAADLKSTQAAINQINGKLNRLIEKTNEKFHQIEKEFSEVEGRIQDLEKYVEDTKIDLWSYNAELLVALENQHTIDLTDSEMNKLFERTKKQLRENAEDMGNGCFKIYHKCDNACIGSIRNGTYDHDVYRDEALNNRFQIKGVELKSGYKDWILWISFAISCFLLCVVLLGFIMWACQKGNIRCNICI

SEQ ID NO: 663 - protein, 566 aa, Artificial Sequence; identical to SEQ ID NO: 650
  derived and/or modified protein sequence (wt) from hemagglutinin__InfluenzaA__ABC85754

SEQ ID NO: 664 - protein, 566 aa, Artificial Sequence; identical to SEQ ID NO: 630
  derived and/or modified protein sequence (wt) from hemagglutinin__InfluenzaA__ABC85765

SEQ ID NO: 665 - protein, 566 aa, Artificial Sequence
  derived and/or modified protein sequence (wt) from hemagglutinin__InfluenzaA__ABC85776
MKTIIALSYILCLVFAQKLPGNDNSTATLCLGHHAVPNGTLVKTITNDQIEVTNATELVQSSSTGGICDSPHQILDGENCTLIDALLGDPHCDGFQNKEWDLFVERSKAYSNCYPYDVPDYASLRSLVASSGTLEFNNESFNWTGVAQNGTSSACKRRSNKSFFSRLNWLHQLKYKYPALNVTMPNNEKFDKLYIWGVHHPSTDSDQISLYAQAPGRVTVSTKRSQQTVIPNIGSRPWVRGVSSRISIYWTIVKPGDILLINFTGNLIAPRGYFKIRSGKSSIMRSDASIGKCNSECITPNGSIPNDKPFQNVNRITYGACPRYVKQNTLKLATGMRNVPEKQTRGIFGAIAGFIENGWEGMVDGWYGFRHQNSEGTGQAADLKSTQAAINQINGKLNRLIEKTNEKFHQIEKEFSEVEGRIQDLEKYVEDTKIDLWSYNAELLVALENQHTIDLTDSEMNKLFERTKKQLRENAEDMGNGCFKIYHKCDNACIGSIRNGTYDHDVYRDEALNNRFQIKGVELKSGYKDWILWISFAISCFLLCVVLLGFIMWACQKGNIRCNICI

SEQ ID NO: 666 - protein, 566 aa, Artificial Sequence; identical to SEQ ID NO: 650
  derived and/or modified protein sequence (wt) from hemagglutinin__InfluenzaA__ABC85787

SEQ ID NO: 667 - protein, 566 aa, Artificial Sequence; identical to SEQ ID NO: 633
  derived and/or modified protein sequence (wt) from hemagglutinin__InfluenzaA__ABC85798

SEQ ID NO: 668 - protein, 566 aa, Artificial Sequence; identical to SEQ ID NO: 630
  derived and/or modified protein sequence (wt) from hemagglutinin__InfluenzaA__ABC85820

SEQ ID NO: 669 - protein, 566 aa, Artificial Sequence; identical to SEQ ID NO: 630
  derived and/or modified protein sequence (wt) from hemagglutinin__InfluenzaA__ABC85831

SEQ ID NO: 670 - protein, 566 aa, Artificial Sequence; identical to SEQ ID NO: 633
  derived and/or modified protein sequence (wt) from hemagglutinin__InfluenzaA__ABC85842

SEQ ID NO: 671 - protein, 566 aa, Artificial Sequence; identical to SEQ ID NO: 630
  derived and/or modified protein sequence (wt) from hemagglutinin__InfluenzaA__ABC85853

SEQ ID NO: 672 - protein, 566 aa, Artificial Sequence; identical to SEQ ID NO: 630
  derived and/or modified protein sequence (wt) from hemagglutinin__InfluenzaA__ABC85864

SEQ ID NO: 673 - protein, 566 aa, Artificial Sequence; identical to SEQ ID NO: 633
  derived and/or modified protein sequence (wt) from hemagglutinin__InfluenzaA__ABC85886

SEQ ID NO: 674 - protein, 566 aa, Artificial Sequence; identical to SEQ ID NO: 562
  derived and/or modified protein sequence (wt) from hemagglutinin__InfluenzaA__ABC85908

SEQ ID NO: 675 - protein, 566 aa, Artificial Sequence
  derived and/or modified protein sequence (wt) from hemagglutinin__InfluenzaA__ABC85919
MKTIIALSYILCLVFAQKLPGNDNSTATLCLGHHAVPNGTLVKTITNDQIEVTNATELVQSSSTGRICDSPHQILDGENCTLIDALLGDPHCDGFQNKEWDLFVERSKAYSNCYPYDVPDYVSLRSLVASSGTLEFNNESFNWTGVAQNGTSSACKRRSDKSFFSRLNWLHQLKYKYPALNVTMPNNEKFDKLYIWGVHHPGTDSDQISLYAQASGRVTVSTKRSQQTVIPNIGSRPWVRGVSSRISIYWTIVKPGDILLINSTGNLIAPRGYFKIRSGKSSIMRSDAPIGKCNSECITPNGSIPNDKPFQNVNRITYGACPRYVKQNTLKLATGMRNVPEKQTRGIFGAIAGFIENGWEGMMDGWYGFRHQNSEGTGQAADLKSTQAAINQINGKLNRLIEKTNEKFHQIEKEFSEVEGRIQDLEKYVEDTKIDLWSYNAELLVALENQHTIDLTDSEMNKLFERTKKQLRENAEDMGNGCFKIYHKCDNACIGSIRNGTYDHDVYRDEALNNRFQIKGVELKSGYKDWVLWISFAISCFLLCIVLMGFIMWACQKGNIRCNICI

SEQ ID NO: 676 - protein, 566 aa, Artificial Sequence; identical to SEQ ID NO: 562
  derived and/or modified protein sequence (wt) from hemagglutinin__InfluenzaA__ABC85930

SEQ ID NO: 677 - protein, 566 aa, Artificial Sequence; identical to SEQ ID NO: 611
  derived and/or modified protein sequence (wt) from hemagglutinin__InfluenzaA__ABC85941

SEQ ID NO: 678 - protein, 566 aa, Artificial Sequence
  derived and/or modified protein sequence (wt) from hemagglutinin__InfluenzaA__ABC85952
MKTIIALSYILCLVFAQKLPGNDNSTATLCLGHHAVPNGTLVKTITNDQIEVTNATELVQSSSTGRICDSPHQILDGENCTLIDALLGDPHCDGFQNKKWDLFVERSKAYSNCYPYDVPDYVSLRSLVASSGTLEFNNESFNWTGVAQNGTSSACKRRSDKSFFSRLNWLHQLKYKYPALNVTMPNNEKFDKLYIWGVHHPGTDSDQISLYAQASGRVTVSTKRSQQTVIPNIGSRPWVRGVSSRISIYWTIVKPGDILLINSTGNLIAPRGYFKIRSGKSSIMRSDAPIGKCNSECITPNGSIPNDKPFQNVNRITYGACPRYVKQNTLKLATGMRNVPEKQTRGIFGAIAGFIENGWEGMMDGWYGFRHHNSEGTGQAADLKSTQAAINQINGKLNRLIEKTNEKFHQIEKEFSEVEGRIQDLEKYVEDTKIDLWSYNAELLVALENQHTIDLTDSEMNKLFERTKKQLRENAEDMGNGCFKIYHKCDNACIGSIRNGTYDHDVYRDEALNNRFQIKGVELKSGYKDWVLWISFAISCFLLCIVLLGFIMWACQKGNIRCNICI

SEQ ID NO: 679 - protein, 566 aa, Artificial Sequence; identical to SEQ ID NO: 562
  derived and/or modified protein sequence (wt) from hemagglutinin__InfluenzaA__ABC85974

SEQ ID NO: 680 - protein, 566 aa, Artificial Sequence; identical to SEQ ID NO: 562
  derived and/or modified protein sequence (wt) from hemagglutinin__InfluenzaA__ABC85985

SEQ ID NO: 681 - protein, 566 aa, Artificial Sequence
  derived and/or modified protein sequence (wt) from hemagglutinin__InfluenzaA__ABC85996
MKTIIALSYILCLVFAQKLPGNDNSTATLCLGHHAVPNGTIVKTITNDQIEVTNATELVQSSSTGGICDSPHQILDGENCTLIDALLGDPQCDGFQNKKWDLFVERSKAYSNCYPYDVPDYASLRSLVASSGTLEFNNESFNWTGVTQNGTSSACKRRSNNSFFSRLNWLTHLKFKYPALNVTMPNNEKFDKLYIWGVHHPGTDNDQISLYAQASGRITVSTKRSQQTVIPNIGSRPRVRDIPSRISIYWTIVKPGDILLINSTGNLIAPRGYFKIRSGKSSIMRSDAPIGKCNSECITPNGSIPNDKPFQNVNRITYGACPRYVKQNTLKLATGMRNVPEKQTRGIFGAIAGFIENGWEGMMDGWYGFRHQNSEGIGQAADLKSTQAAINQINGKLNRLIGKTNEKFHQIEKEFSEVEGRIQDLEKYVEDTKIDLWSYNAELLVALENQHTIDLTDSEMNKLFERTKKQLRENAEDMGNGCFKIYHKCDNACIGSIRNGTYDHDVYRDEALNNRFQIKGVELKSGYKDWILWISFAISCFLLCVALLGFIMWACQKGNIRCNICI

SEQ ID NO: 682 - protein, 566 aa, Artificial Sequence; identical to SEQ ID NO: 243
  derived and/or modified protein sequence (wt) from hemagglutinin__InfluenzaA__ABC86007

SEQ ID NO: 683 - protein, 566 aa, Artificial Sequence
  derived and/or modified protein sequence (wt) from hemagglutinin__InfluenzaA__ABC86018
MKTIIALSYILCLVFAQKLPGNDNSTATLCLGHHAVPNGTIVKTITNDQIEVTNATELVQSSSTGGICDSPHQILDGENCTIIDALLGDPQCDGFQNKKWDLFVERSKAYSNCYPYDVPDYASLRSLVASSGTLEFNNESFNWTGVTQNGTSSACKRRSNNSFFSRLNWLTHLKFKYPALNVTMPNNEKFDKLYIWGVHHPGTDNDQISLYAQASGRITVSTKRSQQTVIPNIGSRPRVRDIPSRISIYWTIVKPGDILLINSTGNLIAPRGYFKIRSGKSSIMRSDAPIGKCNSECITPNGSIPNDKPFQNVNRITYGACPRYVKQNTLKLATGMRNVPEKQTRGIFGAIAGFIENGWEGMVDGWYGFRHQNSEGIGQAADLKSTQAAINQINGKLNRLIGKTNEKFHQIEKEFSEVEGRIQDLEKYVEDTKIDLWSYNAELLVALENQHTIDLTDSEMNKLFERTKKQLRENAEDMGNGCFKIYHKCDNACIGSIRNGTYDHDVYRDEALNNRFQIKGVELKSGYKDWILWISFAISCFLLCVALLGFIMWACQKGNIRCNICI

SEQ ID NO: 684 - protein, 566 aa, Artificial Sequence; identical to SEQ ID NO: 243
  derived and/or modified protein sequence (wt) from hemagglutinin__InfluenzaA__ABC86029

SEQ ID NO: 685 - protein, 566 aa, Artificial Sequence; identical to SEQ ID NO: 282
  derived and/or modified protein sequence (wt) from hemagglutinin__InfluenzaA__ABC86040

SEQ ID NO: 686 - protein, 566 aa, Artificial Sequence; identical to SEQ ID NO: 516
  derived and/or modified protein sequence (wt) from hemagglutinin__InfluenzaA__ABC86124

SEQ ID NO: 687 - protein, 566 aa, Artificial Sequence; identical to SEQ ID NO: 593
  derived and/or modified protein sequence (wt) from hemagglutinin__InfluenzaA__ABC86137

SEQ ID NO: 688 - protein, 566 aa, Artificial Sequence
  derived and/or modified protein sequence (wt) from hemagglutinin__InfluenzaA__ABC97374
MKTIIALSYIFCLVLGQDFPGNDNSTATLCLGHHAVPNGTLVKTITNDQIEVTNATELVQSSSTGKICNNPHRILDGIDCTLIDALLGDPHCDGFQNETWDLFVERSKAFSNCYPYDVPDYASLRSLVASSGTLEFINEGFTWTGVTQNGGSNACKRGPDSGFFSRLNWLYKSGSTYPVLNVTMPNNDNFDKLYIWGVHHPSTDQEQTSLYVQASGRVTVSTKRSQQTIIPNIGSRPWVRGLSSRISIYWTIVKPGDILVINSNGNLIAPRGYFKMRTGKSSIMRSDAPIGTCISECITPNGSIPNDKPFQNVNKITYGACPKYVKQNTLKLATGMRNVPEKQTRGLFGAIAGFIENGWEGMVDGWYGFRHQNSEGTGQAADLKSTQAAIDQINGKLNRVIEKTNEKFHQIEKEFSEVEGRIQDLEKYVEDTKIDLWSYNAELLVALENQHTIDLTDSEMNKLFEKTRRQLRENAEDMGNGCFRIYHKCDNACIGSIRNGTYDHDVYRDEALNNRFQIKGVELKSGYKDWILWISFAISCFLLCVVLLGFIMWACQKGNIRCNICI

SEQ ID NO: 689 - protein, 566 aa, Artificial Sequence; identical to SEQ ID NO: 32
  derived and/or modified protein sequence (wt) from hemagglutinin__InfluenzaA__ABD15449

SEQ ID NO: 690 - protein, 566 aa, Artificial Sequence
  derived and/or modified protein sequence (wt) from hemagglutinin__InfluenzaA__ABD15460
MKTIIALSYILCLVFAQKLPGNDNSTATLCLGHHAVPNGTIVKTITNDQIEVTNATELVQISSTGGICDSPYQILDGENCTLIDALLGDPQCDGFQNKKWDLFVERSKAYSNCYPYDVPDYASLRSLVASSGTLEFNNESFDWTGVTQNGTSSACKRRSNKSFFSRLNWLTHLKYKYPALNVTMPNNEKFDKLYIWGVHHPGTDSDQISLYAQASGRITVSTKRSQQTVIPNIGSRPRVRDVSSRISIYWTIVKPGDILLINSTGNLIAPRGYFKIRSGKSSIMRSDAPIGKCNSECITPNGSIPNDKPFQNVNRITYGACPRYVKQNTLKLATGMRNVPEKQTRGIFGAIAGFIENGWEGMVDGWYGFRHQNSEGTGQAADLKSTQAAINQINGKLNRLIGKTNEKFHQIEKEFSEVEGRIQDLEKYVEDTKIDLWSYNAELLVALENQHTIDLTDSEMNKLFERTKKQLRENAEDMGNGCFKIYHKCDNACIGSIRNGTYDHDVYRDEALNNRFQIKGVELKSGYKDWILWISFAISCFLLCVALLGFIMWACQKGNIRCNICI

SEQ ID NO: 691 - protein, 566 aa, Artificial Sequence; identical to SEQ ID NO: 32
  derived and/or modified protein sequence (wt) from hemagglutinin__InfluenzaA__ABD15471

SEQ ID NO: 692 - protein, 566 aa, Artificial Sequence; identical to SEQ ID NO: 32
  derived and/or modified protein sequence (wt) from hemagglutinin__InfluenzaA__ABD15482

SEQ ID NO: 693 - protein, 566 aa, Artificial Sequence; identical to SEQ ID NO: 690
  derived and/or modified protein sequence (wt) from hemagglutinin__InfluenzaA__ABD15493

SEQ ID NO: 694 - protein, 566 aa, Artificial Sequence; identical to SEQ ID NO: 243
  derived and/or modified protein sequence (wt) from hemagglutinin__InfluenzaA__ABD15526

SEQ ID NO: 695 - protein, 566 aa, Artificial Sequence; identical to SEQ ID NO: 452
  derived and/or modified protein sequence (wt) from hemagglutinin__InfluenzaA__ABD15537

SEQ ID NO: 696 - protein, 566 aa, Artificial Sequence; identical to SEQ ID NO: 452
  derived and/or modified protein sequence (wt) from hemagglutinin__InfluenzaA__ABD15548

SEQ ID NO: 697 - protein, 566 aa, Artificial Sequence; identical to SEQ ID NO: 470
  derived and/or modified protein sequence (wt) from hemagglutinin__InfluenzaA__ABD15559

SEQ ID NO: 698 - protein, 566 aa, Artificial Sequence; identical to SEQ ID NO: 452
  derived and/or modified protein sequence (wt) from hemagglutinin__InfluenzaA__ABD15570

SEQ ID NO: 699 - protein, 566 aa, Artificial Sequence; identical to SEQ ID NO: 470
  derived and/or modified protein sequence (wt) from hemagglutinin__InfluenzaA__ABD15581

SEQ ID NO: 700 - protein, 566 aa, Artificial Sequence; identical to SEQ ID NO: 452
  derived and/or modified protein sequence (wt) from hemagglutinin__InfluenzaA__ABD15592

SEQ ID NO: 701 - protein, 566 aa, Artificial Sequence; identical to SEQ ID NO: 452
  derived and/or modified protein sequence (wt) from hemagglutinin__InfluenzaA__ABD15603

SEQ ID NO: 702 - protein, 566 aa, Artificial Sequence; identical to SEQ ID NO: 452
  derived and/or modified protein sequence (wt) from hemagglutinin__InfluenzaA__ABD15614

SEQ ID NO: 703 - protein, 566 aa, Artificial Sequence
  derived and/or modified protein sequence (wt) from hemagglutinin__InfluenzaA__ABD15625
MKTIIALSYILCLVFAQKLPGNDNSTATLCLGHHAVPNGTIVKTITNDQIEVTNATELVQSSSTGGICDSPHQILDGENCTLIDALLGDPQCDGFQNKKWDLFVERSKAYSNCYPYDVPDYASLRSLVASSGTLEFNNESFDWTGVTQNGTSSACKRRSNKSFFSRLNWLTHLKYKYPALNVTMPNNEKFDKLYIWGVHHPGTDSDQISLYAQASGRITVSTKRSQQTVIPNIGSRPRVRDVSSQISIYWTIVKPGDILLINSTGNLIAPRGYFKIRSGKSSIMRSDAPIGKCNSECITPNGSIPNDKPFQNVNRITYGACPRYVKQNTLKLATGMRNVPEKQTRGIFGAIAGFIENGWEGMVDGWYGFRHQNSEGTGQAADLKSTQAAINQINGKLNRLIGKTNEKFHQIEKEFSEVEGRIQDLVKYVEDTKIDLWSYNAELLVALENQHTIDLTDSEMNKLFERTKKQLRENAEDMGNGCFKIYHKCDNACIGSIRNGTYDHDVYRDEALNNRFQIKGVELKSGYKDWILWISFAISCFLLCVALLGFIMWACQKGNIRCNICI

SEQ ID NO: 704 - protein, 566 aa, Artificial Sequence; identical to SEQ ID NO: 470
  derived and/or modified protein sequence (wt) from hemagglutinin__InfluenzaA__ABD15636

SEQ ID NO: 705 - protein, 566 aa, Artificial Sequence; identical to SEQ ID NO: 650
  derived and/or modified protein sequence (wt) from hemagglutinin__InfluenzaA__ABD15680

SEQ ID NO: 706 - protein, 566 aa, Artificial Sequence
  derived and/or modified protein sequence (wt) from hemagglutinin__InfluenzaA__ABD15691
MKTIIALSYILCLVFAQKLPVNDKSTATLCLGHHAVPNGTLVKTITNDHIEVTNATELVQSSPTGRICDSPHQILDGENCTLIDALLGDPHCDGFQNKEWDLFVERSTAYSNCYPYDVPDYASLRSLVASSGTLEFNNESFNWTGVAQNGTSSACKRRSIKSFFSRLNWLHQLKYKYPALNVTMPNNEKFDKLYIWGVHHPSTDSDQISLYAQASGRVTVSTKRSQQTVIPNIGSRPWVRGVSSRISIYWTIVKPGDILLINSTGNLIAPRGYFKIRSGKSSIMRSNAPIGKCNSECITPNGSIPNDKPFQNVNRITYGACPRYVKQNTLKLATGMRNVPEKQTRGIFGAIAGFIENGWEGMVDGWYGFRHQNSEGTGQAADLKSTQAAINQINGKLNRLIEKTNEKFHQIEKEFSEVEGRIQDLEKYVEDTKIDLWSYNAELLVALENQHTIDLTDSEMNKLFERTRKQLRENAEDMGNGCFKIYHKCDNACIGSIRNGTYDHDVYRDEALNNRFQIKGVELKSGYKDWILWISFAISCFLLCVVLLGFIMWACQKGNIRCNICI

SEQ ID NO: 707 - protein, 566 aa, Artificial Sequence
  derived and/or modified protein sequence (wt) from hemagglutinin__InfluenzaA__ABD15702
MKTIIALSYILCLVFAQKLPGNDNSTATLCLGHHAVPNGTLVKTITNDQIEVTNATELVQSSSTGGICDSPHQILDGENCTLIDALLGDPHCDGFQNKEWDLFVERSKAYSNCYPYDVPDYASLRSLVASSGTLEFNNESFNWTGVAQNGTSSACKRRSNKSFFSRLNWLHQLKYKYPALNVTMPNNEKFDKLYIWGVHHPSTDSDQTSLYAQAPGRVTVSTKRSQQTVIPNIGSRPWVRGVSSRISIYWTIVKPGDILLINCTGNLIAPRGYFKIRSGKSSIMRSDASIGKCNSECITPNGSIPNDKPFQNVNRITYGACPRYVKQNTLKLATGMRNVPEKQTRGIFGAIAGFIENGWEGMVDGWYGFRHQNSEGTGQAADLKSTQAAINQINGKLNRLIEKTNEKFHQIEKEFSEVEGRIQDLEKYVEDTKIDLWSYNAELLVALENQHTIDLTDSEMNKLFERTKKQLRENAEDMGNGCFKIYHKCDNACIGSIRNGTYDHDVYRDEALNNRFQIKGVELKSGYKDWILWISFAISCFLLCVVLLGFIMWACQKGNIRCNICI

SEQ ID NO: 708 - protein, 566 aa, Artificial Sequence
  derived and/or modified protein sequence (wt) from hemagglutinin__InfluenzaA__ABD15724
MKTIIALSYILCLVFAQKLPGNDNSTATLCLGHHAVPNGTLVKTITNDQIEVTNATELVQSSSTGGICDSPHQILDGENCTLIDALLGDPHCDGFQNKEWDLFVERSKAYSNCYPYDVPDYASLRSLVASSGTLEFNNESFNWTGVAQNGTSSACKRRSNKSFFSRLNWLHQLKYKYPALNVAMPNNEKFDKLYIWGVHHPSTDSDQISLYAQAPGRVTVSTKRSQQTVIPNIGSRPWVRGVSSRISIYWTIVKPGDILLINCTGNLIAPRGYFKIRSGKSSIMRSDASIGKCNSECITPNGSIPNDKPFQNVNRITYGACPRYVKQNTLKLATGMRNVPEKQTRGIFGAIAGFIENGWEGMVDGWYGFRHQNSEGTGQAADLKSTQAAINQINGKLNRLIEKTNEKFHQIEKEFSEVEGRIQDLEKYVEDTKIDLWSYNAELLVALENQHTIDLTDSEMNKLFERTKKQLRENAEDMGNGCFKIYHKCDNACIGSIRNGTYDHDVYRDEALNNRFQIKGVELKSGYKDWILWISFAISCFLLCVVLLGFIMWACQKGNIRCNICI

SEQ ID NO: 709 - protein, 566 aa, Artificial Sequence
  derived and/or modified protein sequence (wt) from hemagglutinin__InfluenzaA__ABD15746
MKTIIALSYILCLVFAQKLPVNDNSTATLCLGHHAVPNGTLVKTITNDHIEVTNATELVQSSSTGRICDSPHQILDGENCTLIDALLGDPHCDGFQNKEWDLFVERSTAYSNCYPYDVPDYASLRSLVASSGTLEFNNESFNWTGVAQNGTSSACKRRSIKSFFSRLNWLHQLKYKYPALNVTMPNNEKFDKLYIWGVHHPSTDSDQISLYAQASGRVTVSTKRSQQTVIPNIGSRPWVRGISSRISIYWTIVKPGDILLINSTGNLIAPRGYFKIRSGKSSIMRSNAPIGKCNSECITPNGSIPNDKPFQNVNRITYGACPRYVKQNTLKLATGMRNVPEKQTRGIFGAIAGFIENGWEGMVDGWYGFRHQNSEGTGQAADLKSTQAAINQINGKLNRLIEKTNEKFHQIEKEFSEVEGRIQDLEKYVEDTKIDLWSYNAELLVALENQHTIDLTDSEMNKLFERTRKQLRENAEEMGNGCFKIYHKCDNACIGSIRNGTYDHDVYRDEALNNRFQIKGVELKSGYKDWILWISFAISCFLLCVVLLGFIMWACQKGNIRCNICI

SEQ ID NO: 710 - protein, 566 aa, Artificial Sequence
  derived and/or modified protein sequence (wt) from hemagglutinin__InfluenzaA__ABD15757
MKTIIALSYILCLVFAQKLPVNDNSTATLCLGHHAVPNGTLVKTITNDHIEVTNATELVQSSSTGRICDSPHQILDGENCTLIDALLGDPHCDGFQNKEWDLFVERSTAYSNCYPYDVPDYASLRSLVASSGTLEFNNESFNWTGVAQNGTSSACKRRSIKSFFSRLNWLHQLKYKYPALNVTMPNNEKFDKLYIWGVHHPSTDSDQISLYAQASGRVTVSTKRSQQTVIPNIGSRPWVRGVSSRISIYWTIVKPGDILLINSTGNLIAPRGYFKIRSGKSSIMRSNAPIGKCNSECITPNGSIPNDKPFQNVNRITYGACPRYVKQNTLKLATGMRNVPEKQTRGIFGAIAGFIENGWEGMVDGWYGFRHQNSEGTGQAADLKSTQAAINQINGKLNRLIEKTNEKFHQIEKEFSEVEGRIQDLEKYVEDTKIDLWSYNAELLVALENQHTIDLTDSEMNKLFERTRKQLRENAEEMGNGCFKIYHKCDNACIGSIRNGTYDHDVYRDEALNNRFQIKGVELKSGYKDWILWISFAISCFLLCVVLLGFIMWACQKGNIRCNICI

SEQ ID NO: 711 - protein, 566 aa, Artificial Sequence; identical to SEQ ID NO: 650
  derived and/or modified protein sequence (wt) from hemagglutinin__InfluenzaA__ABD15779

SEQ ID NO: 712 - protein, 566 aa, Artificial Sequence; identical to SEQ ID NO: 650
  derived and/or modified protein sequence (wt) from hemagglutinin__InfluenzaA__ABD15790

SEQ ID NO: 713 - protein, 566 aa, Artificial Sequence; identical to SEQ ID NO: 650
  derived and/or modified protein sequence (wt) from hemagglutinin__InfluenzaA__ABD16292

SEQ ID NO: 714 - protein, 566 aa, Artificial Sequence; identical to SEQ ID NO: 633
  derived and/or modified protein sequence (wt) from hemagglutinin__InfluenzaA__ABD16303

SEQ ID NO: 715 - protein, 566 aa, Artificial Sequence; identical to SEQ ID NO: 633
  derived and/or modified protein sequence (wt) from hemagglutinin__InfluenzaA__ABD16325

SEQ ID NO: 716 - protein, 566 aa, Artificial Sequence
  derived and/or modified protein sequence (wt) from hemagglutinin__InfluenzaA__ABD16336
MKTIIALSYTLCLVFAQKLPGNDNSTATLCLGHHAVPNGTIVKTITNDQIEVTNATELVQSSSTGGICDSPHQILDGENCTLIDALLGDPQCDGFQNKKWDLFVERSKAYSNCYPYDVPDYASLRSLIASSGTLEFNNESFNWTGVTQNGTSSACKRRSNSSFFSRLNWLTHLKFKYPALNVTMPNNEEFDKLYIWGVHHPGTYNDQISLYAQASGRITVSTKRSQQTVIPNIGSRPRVRDIPSRISIYWTIVKPGDILLINSTGNLIAPRGYFKIRSGKSSIMRSDAPIGKCNSECITPNGSIPNDKPFQNVNRITYGACPRYVKQNTLKLATGMRNVPEKQTRGIFGAIAGFIENGWEGMVDGWYGFRHQNSEGIGQAADLKSTQAAIDQINGKLNRLIGKTNEKFHQIEKEFSEVEGRIQDLEKYVEDTKIDLWSYNAELLVALENQHTIDLTDSEMNKLFERTKKQLRENAEDMGNGCFKIYHKCDNACIGSIRNGTYDHDVYRDEALNNRFQIKGVELKSGYKDWILWISFAISCFLLCVALLGFIMWACQKGNIRCNICI

SEQ ID NO: 717 - protein, 566 aa, Artificial Sequence; identical to SEQ ID NO: 633
  derived and/or modified protein sequence (wt) from hemagglutinin__InfluenzaA__ABD16347

SEQ ID NO: 718 - protein, 566 aa, Artificial Sequence
  derived and/or modified protein sequence (wt) from hemagglutinin__InfluenzaA__ABD16358
MKTIIALSYILCLVFAQKLPGNDNSTATLCLGHHAVPNGTIVKTITNDQIEVTNATELVQSSSTGGICDSPHQILDGENCTLIDALLGDPQCDGFQNKKWDLFVERSKAYSNCYPYDVPDYASLRSLIASSGTLEFNNESFNWTGVTQNGTSSACKRRSNSSFFSRLNWLTHLKFKYPALNVTMPNNEEFDKLYIWGVHHPGTYNDQISLYAQASGRITVSTKRSQQTVIPNIGSRPRVRDIPSRISIYWTIVKPGDILLINSTGNLIAPRGYFKIRSGKSSIMRSDAPIGKCNSECITPNGSIPNDKPFQNVNRITYGACPRYVKQNTLKLATGMRNVPEKQTRGIFGAIAGFIENGWEGMVDGWYGFRHQNSEGIGQAADLKSTQAAIDQINGKLNRLIGKTNEKFHQIEKEFSEVEGRIQDLEKYVEDTKIDLWSYNAELLVALENQHTIDLTDLEMNKLFERTKKQLRENAEDMGNGCFKIYHKCDNACIGSIRNGTYDHDVYRDEALNNRFQIKGVELKSGYKDWILWISFAISCFLLCVALLGFIMWACQKGNIRCNICI

SEQ ID NO: 719 - protein, 566 aa, Artificial Sequence; identical to SEQ ID NO: 633
  derived and/or modified protein sequence (wt) from hemagglutinin__InfluenzaA__ABD16472

SEQ ID NO: 720 - protein, 566 aa, Artificial Sequence; identical to SEQ ID NO: 633
  derived and/or modified protein sequence (wt) from hemagglutinin__InfluenzaA__ABD16483

SEQ ID NO: 721 - protein, 566 aa, Artificial Sequence; identical to SEQ ID NO: 630
  derived and/or modified protein sequence (wt) from hemagglutinin__InfluenzaA__ABD16494

SEQ ID NO: 722 - protein, 566 aa, Artificial Sequence; identical to SEQ ID NO: 633
  derived and/or modified protein sequence (wt) from hemagglutinin__InfluenzaA__ABD16505

SEQ ID NO: 723 - protein, 566 aa, Artificial Sequence
  derived and/or modified protein sequence (wt) from hemagglutinin__InfluenzaA__ABD16516
MKTIIALSYILCMVFAQKLPGNDNSTATLCLGHHAVPNGTIVKTITNDQIEVTNATELVQSSSTGGICDSPHQILDGENCTLIDALLGDPQCDGFQNKKWDLFIERSKAYSNCYPYDVPDYASLRSLVASSGTLEFNNESFNWTGVTQNGTSSACKRRSNNSFFSRLNWLTHLKFKYPALNVTMPNNEKFDKLYIWGVHHPGTDNDQISLYAQASGRITVSTKRSQQTVIPNIGSRPRVRDIPSRISIYWTIVKPGDILLINSTGNLIAPRGYFKIRSGKSSIMRSDAPIDKCNSECITPNGSIPNDKPFQNVNRITYGACPRYVKQNTLKLATGMRNVPEKQTRGIFGAIAGFIENGWEGMVDGWYGFRHQNSEGIGQAADLKSTQAAINQINGKLNRLIGKTNEKFHQIEKEFSEVEGRIQDLEKYVEDTKVDLWSYNAELLVALENQHTIDLTDSEMNKLFERTKKQLRENAEDMGNGCFKIYHKCDNACIGSIRNGTYDHDVYRDEALNNRFQIKGVELKSGYKDWILWISFAISCFLLCVALLGFIMWACQKGNIRCNICI

SEQ ID NO: 724 - protein, 566 aa, Artificial Sequence
  derived and/or modified protein sequence (wt) from hemagglutinin__InfluenzaA__ABD16527
MKTIIALSYILCLVFAQKLPENDNSTATLCLGHHAVPNGTIVKTITNDQIEVTNATELVQSSSTGGICDSPHQILDGENCTLIDALLGDPQCDGFQNKKWDLFVERSKAYSNCYPYDVPDHASLRSLVASSGTLEFNNESFDWTGVTQNGTSSACKRRSNKSFFSRLNWLTHLKYKYPALNVTMPNNEKFDKLYIWGVHHPGTDSDQISLYAQASGRITVSTKRSQQTVIPNIGSRPRVRDVSSRISIYWTIVKPGDILLINSTGNLIAPRGYFKIRSGKSSIMRSDAPIGKCNSECITPNGSIPNDKPFQNVNRITYGACPRYVKQNTLKLATGMRNVPEKQTRGIFGAIAGFIENGWEGMVDGWYGFRHQNSEGTGQAADLKSTQAAINQINGKLNRLIGKTNEKFHQIEKEFSEVEGRIQDLEKYVEDTKIDLWSYNAELLVALENQHTIDLTDSEMNKLFERTKKQLRENAEDMGNGCFKIYHKCDNACIGSIRNGTYDHDVYRDEALNNRFQIKGVELKSGYKDWILWISFAISCFLLCVALLGFIMWACQKGNIRCDICI

SEQ ID NO: 725 - protein, 566 aa, Artificial Sequence; identical to SEQ ID NO: 516
  derived and/or modified protein sequence (wt) from hemagglutinin__InfluenzaA__ABD16538

SEQ ID NO: 726 - protein, 566 aa, Artificial Sequence
  derived and/or modified protein sequence (wt) from hemagglutinin__InfluenzaA__ABD16549
MKTIIALSYILCLVFAQKLPGNDNSTATLCLGHHAVPNGTIVKTITNDQIEVTNATELVQSSSTGGICDSPHQILDGENCTLIDALLGDPQCDGFQNKKWDLFVERSKAYSNCYPYDVPDYASLRSLIASSGTLEFNNESFNWTGVTQNGTSSACKRRSNSSFFSRLNWLTHLKFKYPALNVTMPNNEEFDKLYIWGVHHPGTYNDQISLYAQASGRITVSTKRSQQTVIPNIGSRPRVRDIPSRISIYWTIVKPGDILLINSTGNLIAPRGYFKIRSGKSSIMRSDAPIGKCNSECITPNGSIPNDKPFQNVNRITYGACPRYVKQNTLKLATGMRNVPEKQTRGIFGAIAGFIENGWEGMVDGWYGFRHQNSEGIGQAADLKSTQAAIDQINGKLNRLIGKTNEKFHQIEKEFSEVEGRIQDLEKYVEDTKIDLWSYNAELLVALENQHTIDLTDSEMNKLFERTKKQLRENAEDMGNGCFKIYHKCDNACIGSIRNGTYDHDVYRDEALNNRFQIKGVELKSGYKDWILWISFAISCFLLCVALLGFIVWACQKGNIRCNICI

SEQ ID NO: 727 - protein, 566 aa, Artificial Sequence; identical to SEQ ID NO: 630
  derived and/or modified protein sequence (wt) from hemagglutinin__InfluenzaA__ABD16560

SEQ ID NO: 728 - protein, 566 aa, Artificial Sequence
  derived and/or modified protein sequence (wt) from hemagglutinin__InfluenzaA__ABD16571
MKTIIALSYIFCLVVAQKLPGNDNSTATLCLGHHAVPNGTIVKTITNDQIEVTNATELVQSSSTGRICNSPHRILDGKNCTLIDALLGDPHCDSFQNKEWDLFVERSKAYSNCYPYDVPDYASLRSLVASSGTLEFINEDFNWTGVAQSGGSYACKRGSVNSFFSRLNWLHESEYKYPALNVTMPNNGKFDKLYIWGVHHPSTDREQTNLYVRASGRVTVSTKRSQQTVIPNIGSRPWVRGLSSRISIYWTIVKPGDILLINSTGNLIAPRGYFKIRTGKSSIMRSDAPIGTCSSECITPNGSIPNDKPFQNVNRITYGACPRYVKQNTLKLATGMRNVPEKQTRGIFGAIAGFIENGWEGMVDGWYGFRHQNSEGTGQAADLKSTQAAIDQINGKLNRLIEKTNEKFHQIEKEFSEVEGRIQDLEKYVEDTKIDLWSYNAELLVALENQHTIDLTDSEMNKLFEKTRKQLRENAEDMGNGCFKIYHKCDNACIGSIRNGTYDHDVYRDEALNNRFQIKGVELKSGYKDWILWISFAISCFLLCVVLLGFIMWACQKGNIRCNICI

SEQ ID NO: 729 - protein, 566 aa, Artificial Sequence
  derived and/or modified protein sequence (wt) from hemagglutinin__InfluenzaA__ABD16718
MKTIIALSYIFCLVFAQKLPGNDNSTATLCLGHHAVPNGTLVKTITNDQIEVTNATELVQSSSTGRICDSPHRILDGKNCTLIDALLGDPHCDGFQNEKWDLFIERSKAFSNCYPYDVPDYASLRSLVASSGTLEFINEGFNWTGVTQSGGSYACKRGSVNSFFSRLNWLYESEYKYPALNVTMPNNGKFDKLYIWGVHHPITEKEQTNLYVRASGRVTVSTKRSQQTVIPNIGSRPWVRGLSSRISIYWTIVKPGDILLINSTGNLIAPRGYFKIRTGKSSIMRSDAPIGTCSSECITPNGSIPNDKPFQNVNKITYGACPRYVKQNTLKLATGMRNVPEKQTRGIFGAIAGFIENGWEGMVDGWYGFRHQNSEGTGQAADLKSTQAAIDQINGKLNRLIEKTNEKFHQIEKEFSEVEGRIQDLEKYVEDTKIDLWSYNAELLVALENQHTIDLTDSEMNKLFEKTRKQLRENAEDMGNGCFKIYHKCDNACIGSIRNGTYDHDVYRDEALNNRFQIKGVELKSGYKDWILWISFAISCFLLCVVLLGFIMWACQKGNIRCNICI

SEQ ID NO: 730 - protein, 566 aa, Artificial Sequence
  derived and/or modified protein sequence (wt) from hemagglutinin__InfluenzaA__ABD16729
MKTIIALSYIFCLVFAQKLPGNDNSTATLCLGHHAVPNGTLVKTITNDQIEVTNATELVQSSSTGRICDSPHRILDGKNCTLIDALLGDPHCDGFQNEKWDLFVERSKAFSNCYPYDVPDYASLRSLVASSGTLEFINEGFNWTGVTQNGGSYTCKRGSVNSFFSRLNWLYESESKYPVLNVTMPNNGKFDKLYIWGVHHPSTDKEQTNLYVRASGKVTVSTKRSQQTVIPNIGSRPWVRGLSSRISIYWTIVKPGDILLINSTGNLIAPRGYFKIRTGKSSIMRSDAPIGTCSSECITPNGSIPNDKPFQNVNKITYGACPRYVKQNTLKLATGMRNVPEKQTRGIFGAIAGFIENGWEGMVDGWYGFRHQNSEGTGQAADLKSTQAAIDQINGKLNRLIEKTNEKFHQIEKEFSEVEGRIQDLEKYVEDTKIDLWSYNAELLVALENQHTIDLTDSEMNKLFEKTRKQLRENAEDMGNGCFKIYHKCDNACIGSIRNGTYDHDVYRDEALNNRFQIKGVELKSGYKDWILWISFAISCFLLCVVLLGFIMWACQKGNIRCNICI

SEQ ID NO: 731 - protein, 566 aa, Artificial Sequence
  derived and/or modified protein sequence (wt) from hemagglutinin__InfluenzaA__ABD16751
MKTIIALSYIFCLVFAQDLPGNDNSTATLCLGHHAVPNGTLVKTITNDQIEVTNATELVHSSSTGKICDNPHRILDGINCTLIDALLGDPHCDGFQNEKWDLFVERSKAFSNCYPYDVPDYASLRSLVASSGTLEFINEGFNWTGVTQNGGSSACKRGPDNGFFSRLNWLYKSGSTYPVQNVTMPNNDNSDKLYIWGVHHPSTDKEQTDLYVQASGKVTVSTKRSQQTVIPNVGSRPWVRGLSSRVSIYWTIVKPGDILVINSNGNLIAPRGYFKMRTGKSSIMRSDAPIGTCSSECITPNGSIPNDKPFQNVNKITYGACPKYVKQNTLKLATGMRNVPEKQTRGIFGAIAGFIENGWEGMIDGWYGFRHQNSEGTGQAADLKSTQAAIDQINGKLNRVIEKTNEKFHQIEKEFSEVEGRIQDLEKYVEDTKIDLWSYNAELLVALENQHTIDLTDSEMNKLFEKTRRQLRENAEDMGNGCFKIYHKCDNACIGSIRNGTYDHDVYRDEALNNRFQIKGVELKSGYKDWILWISFAISCFLLCVVLLGFIMWACQKGNIRCNICI

SEQ ID NO: 732 - protein, 566 aa, Artificial Sequence; identical to SEQ ID NO: 593
  derived and/or modified protein sequence (wt) from hemagglutinin__InfluenzaA__ABD16762

SEQ ID NO: 733 - protein, 566 aa, Artificial Sequence; identical to SEQ ID NO: 305
  derived and/or modified protein sequence (wt) from hemagglutinin__InfluenzaA__ABD17323

SEQ ID NO: 734 - protein, 566 aa, Artificial Sequence; identical to SEQ ID NO: 562
  derived and/or modified protein sequence (wt) from hemagglutinin__InfluenzaA__ABD38134

SEQ ID NO: 735 - protein, 565 aa, Artificial Sequence; identical to SEQ ID NO: 301
  derived and/or modified protein sequence (wt) from hemagglutinin__InfluenzaA__ABD60779

SEQ ID NO: 736 - protein, 566 aa, Artificial Sequence
  derived and/or modified protein sequence (wt) from hemagglutinin__InfluenzaA__ABD60790
MKTIIALSYIFCLVLGQDFPGNDNSTATLCLGHHAVPNGTLVKTITNDQIEVTNATELVQSSSTGKICNNPHRILDGIDCTLIDALLGDPHCDGFQNETWDLFVERSKAFSNCYPYDVPDYASLRSLVASSGTLEFINEGFTWTGVTQNGGSNACKRGPDSGFFSRLNWLYKSGSTYPVLNVTMPNNDNFDKLYIWGVHHPSTDQEQTSLYVQASGRVTVSTKRSQQTIIPNIGSRPWVRGLSSRISIYWTIVKPGDILIINSNGNLIAPRGYFKMRTGKSSIMRSDAPIGTCISECITPNGSIPNDKPFQNVNKITYGACPKYVKQNTLKLATGMRNVPEKQTRGIFGAIAGFIENGWEGMIDGWYGFRHQNSEGTGQAADLKSTQAAIDQINGKLNRIIEKTNEKFHQIEKEFSEVEGRIQDLEKYVEDTKIDLWSYNAELLVALENQHTIDLTDSEMNKLFEKTRRQLRENAEDMGNGCFKIYHKCDNACIGSIRNGTYDHDVYRDEALNNRFQIKGVELKSGYKDWILWISFAISCFLLCVVLLGFIMWACQKGNIRCNICI

SEQ ID NO: 737 - protein, 566 aa, Artificial Sequence
  derived and/or modified protein sequence (wt) from hemagglutinin__InfluenzaA__ABD60801
MKTIIALSYILCLVFAQKLPGNDNSTATLCLGHHAVPNGTLVKTITNDQIEVTNATELVQSSSTGRLCDSPHRILDGKNCTLIDALLGDPHCDGFQNKEWDLFVERSKAYSNCYPYDVPDYASLRSLVASSGTLEFINEDFNWTGVAQDGGSYACRRGSVNSFFSRLNWLHKLEYKYPALNVTMPNNGKFDKLYIWGVHHPSTDSDQTSLYVRASGRVTVSTKRSQQTVIPNIGSRPWVRGQSSRMSIYWTIVKPGDILLINSTGNLIAPRGYFKIRNGKSSIMRSDAPIGNCSSECITPNGSIPNDKPFQNVNRITYGACPRYVKQHTLKLATGMRNVPEKQTRGIFGAIAGFIENGWEGMVDGWYGFRHQNSEGTGQAADLKSTQAAIDQINGKLNRLIEKTNEKFHQIEKEFSEVEGRIQDLEKYVEDTKIDLWSYNAELLVALENQHTIDLTDSEMNKLFERTRKQLRENAEDMGNGCFKIYHKCDNACIGSIRNGTYDHDVYRDEALNNRFQIKGVELKSGYKDWILWISFAISCFLLCVVLLGFIMWACQKGNIRCNICI

SEQ ID NO: 738 - protein, 566 aa, Artificial Sequence
  derived and/or modified protein sequence (wt) from hemagglutinin__InfluenzaA__ABD60812
MKTIIALSYILCLIFAQKLPGNDNSTATLCLGHHAVPNGTIVKTITNDQIEVTNATELVQSSSTGGICDSPHQILDGENCTLIDALLGDPQCDGFQNKKWDLFVERSKAYSNCYPYDVPDYASLRSLVASSGTLEFNNESFNWTGVTQNGTSSACKRRSNNSFFSRLNWLTHLKFKYPALNVTMPNNEKFDKLYIWGVHHPGTDNDQIFLYAQASGRITVSTKRSQQTVIPSIGSRPRVRNIPSRISIYWTIVKPGDILLINSTGNLIAPRGYFKIRSGKSSIMRSDAPIGKCNSECITPNGSIPNDKPFQNVNRITYGACPRYVKQNTLKLATGMRNVPEKQTRGIFGAIAGFIENGWEGMVDGWYGFRHQNSEGIGQAADLKSTQAAINQINGKLNRLIGKTNEKFHQIEKEFSEVEGRIQDLEKYVEDTKIDLWSYNAELLVALENQHTIDLTDSEMNKLFERTKKQLRENAEDMGNGCFKIYHKCDNACIGSIRNGTYDHDVYRDEALNNRFQIKGVELKSGYKDWILWISFAISCFLLCVALLGFIMWACQKGNIRCNICI

SEQ ID NO: 739 - protein, 566 aa, Artificial Sequence; identical to SEQ ID NO: 633
  derived and/or modified protein sequence (wt) from hemagglutinin__InfluenzaA__ABD60823

SEQ ID NO: 740 - protein, 566 aa, Artificial Sequence
  derived and/or modified protein sequence (wt) from hemagglutinin__InfluenzaA__ABD60845
MKTIIALSYILCLVFAQKLPVNDNSTATLCLGHHAVPNGTLVKTITNDHIEVTNATELVQSSSTGRICDSPHQILDGENCTLIDALLGDPHCDGFQNKEWDLFVERSTAYSNCYPYDVPDYASLRSLVASSGTLEFNNESFNWTGVDQNGTSSACKRRSTKSFFSRLNWLHQLKYKYPALNVTMPNNEKFDKLYIWGVHHPSTDSDQISLYAQASGRVTVSTKRSQQTVTPNIGSRPWVRGVSSRISIYWTIVKPGDILLINSTGNLIAPRGYFKIRSGKSSIMRSNALIGKCNSECITPNGSIPNDKPFQNVNRITYGACPRYVKQNTLKLATGMRNVPEKQTRGIFGAIAGFIENGWEGMVDGWYGFRHQNSEGTGQAADLKSTQAAINQINGKLNRLIEKTNEKFHQIEKEFSEVEGRIQDLEKYVEDTKIDLWSYNAELLVALENQHTIDLTDSEMNKLFERTRKQLRENAEDMGNGCFKIYHKCDNACIGSIRNGTYDHDVYRDEALNNRFQIKGVELKSGYKDWILWISFAISCFLLCVVLLGFIMWACQKGNIRCNICI

SEQ ID NO: 741 - protein, 565 aa, Artificial Sequence
  derived and/or modified protein sequence (wt) from hemagglutinin__InfluenzaA__ABD60878
MKVKLLVLLCTFTATYADTICIGYHANNSTDTVDTVLEKNVTVTHSVNLLEDSHNGKLCLLKGIAPLQLGNCSVAGWILGNPECELLISKESWSYIVETPNPENGTCYPGYFADYEELREQLSSVSSFERFEIFPKESSWPNHTVTGVSASCSHNGKSSFYRNLLWLTGKNGLYPNLSKSYANNKEKEVLVLWGVHHPPNIGDQKALYHTENAYVSVVSSHYSRRFTPEIAKRPKVRDQEGRINYYWTLLEPGDTIIFEANGNLIAPRYAFALSRGFGSGIITSNAPMDECDAKCQTPQGAINSSLPFQNVHPVTIGECPKYVRSAKLRMVTGLRNIPSIQSRGLFGAIAGFIEGGWTGMVDGWYGYHHQNEQGSGYAADQKSTQNAINGITNKVNSVIEKMNTQFTAVGKEFNKLERRMENLNKKVDDGFLDIWTYNAELLVLLENERTLDFHDSNVKNLYEKVKSQLKNNAKEIGNGCFEFYHKCNNECMESVKNGTYDYPKYSEESKLNREKIDGVKLESMGVYQILAIYSTVASSLVLLVSLGAISFWMCSNGSLQCRICI

SEQ ID NO: 742 - protein, 565 aa, Artificial Sequence
  derived and/or modified protein sequence (wt) from hemagglutinin__InfluenzaA__ABD60889
MKVKLLVLLCTFTATYADTICIGYHANNSTDTVDTVLEKNVTVTHSVNLLEDSHNGKLCLLKGIAPLQLGNCSVAGWILGNPECELLISKESWSYIVETPNPENGTCYPGYFADYEELREQLSSVSSFERFEIFPKESSWPNHTVTGVSASCSHNGKSSFYRNLLWLTGKNGLYPNLSKSYANNKEKEVLVLWGVHHPPNIGDQRALYHTENAYVSVVSSHYSRRFTPEIAKRPKVRDQEGRINYYWTLLEPGDTIIFEANGNLIAPRYAFALSRGFGSGIITSNAPMDECDAKCQTPQGAINSSLPFQNVHPVTIGECPKYVRSAKLRMVTGLRNIPSIQSRGLFGAIAGFIEGGWTGMVDGWYGYHHQNEQGSGYAADQKSTQNAINGITNKVNSVIEKMNTQFTAVGKEFNKLERRMENLNKKVDDGFLDIWTYNAELLVLLENERTLDFHDSNVKNLYEKVKSQLKNNAKEIGNGCFEFYHKCNNECMESVKNGTYDYPKYSEESKLNREKIDGVKLESMGVYQILAIYSTVASSLVLLVSLGAISFWMCSNGSLQCRICI

SEQ ID NO: 743 - protein, 565 aa, Artificial Sequence
  derived and/or modified protein sequence (wt) from hemagglutinin__InfluenzaA__ABD60900
MKVKRLVLLCTFTATYADTICIGYHANNSTDTVDTVLEKNVTVTHSVNLLEDSHNGKLCLLKGIAPLQLGNCSVAGWILGNPECELLISKESWSYIVETPNPENGTCYPGYFADYEELREQLSSVSSFERFEIFPKESSWPNHTVTGVSASCSHNGKSSFYRNLLWLTGKNGLYPNLSKSYANNKEKEVLVLWGVHHPPNIGDQKALYHTENAYVSVVSSHYSRRFTPEIAKRPKVRDQEGRINYYWTLLEPGDTIIFEANGNLIAPRYAFALSRGFGSGIITSNAPMDECDAKCQTPQGAINSSLPFQNVHPVTIGECPKYVRSAKLRMVTGLRNIPSIQSRGLFGAIAGFIEGGWTGMVDGWYGYHHQNEQGSGYAADQKSTQNAINGITNKVNSVIEKMNTQFTAVGKEFNKLERRMENLNKKVDDGFLDIWTYNAELLVLLENERTLDFHDSNVKNLYEKVKSQLKNNAKEIGNGCFEFYHKCNNECMESVKNGTYDYPKYSEESKLNREKIDGVKLESMGVYQILAIYSTVASSLVLLVSLGAISFWMCSNGSLQCRICI

SEQ ID NO: 744 - protein, 565 aa, Artificial Sequence
  derived and/or modified protein sequence (wt) from hemagglutinin__InfluenzaA__ABD60911
MKAKLMVLLCTFTATYADTICIGYHANNSTDTVDTVLEKNVTVTHSVNLLEDSHNGKLCLLKGIAPLQLGNCSVAGWILGNPECELLISKESWSYIVETPNPENGTCYPGYFADYEELREQLSSVSSFERFEIFPKESSWPNHTVTGVSASCSHNGKSSFYRNLLWLTGKNGLYPNLSKSYANNKEKEVLVLWGVHHPPNIGDQRALYHTENAYVSVVSSHYSRRFTPEIAKRPKVRDQEGRINYYWTLLEPGDTIIFEANGNLIAPWYAFALSRGFGSGIITSNAPMGECDAKCQTPQGAINSSLPFQNVHPVTIGECPKYVRSAKLRMVTGLRNIPSIQSRGLFGAIAGFIEGGWTGMVDGWYGYHHQNEQGSGYAADQKSTQNAIDGITNKVNSIIEKMNTQFTAVGKEFNKLERRMENLNKKVDDGFLDIWTYNAELLVLLENERTLDFHDSNVKNLYEKVKSQLKNNAKEIGNGCFEFYHKCNNECMESVKNGTYDYPKYSEESKLNREKIDGVKLESMGVYQILAIYSTVASSLVLLVSLGAISFWMCSNGSLQCRICI

SEQ ID NO: 745 - protein, 566 aa, Artificial Sequence; identical to SEQ ID NO: 32
  derived and/or modified protein sequence (wt) from hemagglutinin__InfluenzaA__ABD60922

SEQ ID NO: 746 - protein, 566 aa, Artificial Sequence
  derived and/or modified protein sequence (wt) from hemagglutinin__InfluenzaA__ABD60933
MKAKLLVLLCALSATDADTICIGYHANNSTDTVDTVLEKNVTVTHSVNLLEDSHNGKLCRLKGIAPLQLGKCSIAGWILGNPECESLVSKKSWSYIAETPNSENGTCYPGYFADYEELREQLSSVSSFERFEIFPKERSWPKHNVTRGVTASCSHKGKSSFYRNLLWLTEKNGSYPNLSKSYVNNKEKEVLVLWGVHHPSNIEDQKTIYRKENAYVSVVSSNYNRRFTPEIAERPKVRGQAGRINYYWTLLEPGDTIIFEANGNLIAPWHAFALNRGFGSGIITSNASMDECDTKCQTPQGAINSSLPFQNIHPVTIGECPKYVRSTKLRMVTGLRNIPSIQSRGLFGAIAGFIEGGWTGMIDGWYGYHHQNEQGSGYAADQKSTQNAINGITNKVNSVIEKMNTQFTAVGKEFNKLEKRMENLNKKVDDGFLDIWTYNAELLVLLENERTLDFHDSNVKNLYEKVKSQLKNNAKEIGNGCFEFYHKCNNECMESVKNGTYDYPKYSEESKLNREKIDGVKLESMGVYQILAIYSTVASSLVLLVSLGAISFWMCSNGSLQCRICI

SEQ ID NO: 747 - protein, 566 aa, Artificial Sequence
  derived and/or modified protein sequence (wt) from hemagglutinin__InfluenzaA__ABD60944
MKAKLLVLLCALSATDADTICIGYHANNSTDTVDTVLEKNVTVTHSVNLLEDSHNGKLCRLKGIAPLQLGKCSIAGWILGNPECESLFSKKSWSYIAETPNSENGTCYPGYFADYEELREQLSSVSSFERFEIFPKERSWPKHNVTRGVTASCSHKGKSSFYRNLLWLTEKNGSYPNLSKSYVNNKEKEVLVLWGVHHPSNIEDQKTIYRKENAYVSVVSSNYNRRFTPEIAERPKVRGQAGRINYYWTLLEPGDTIIFEANGNLIAPWYAFALSRGFGSGIITSNASMDECDTKCQTPQGAINSSLPFQNVHPVTIGECPKYVRSTKLRMVTGLRNIPSIQSRGLFGAIAGFIEGGWTGMIDGWYGYHHQNEQGSGYAADQKSTQNAINGITNKVNSVIEKMNTQFTAVGKEFNKLEKRMENLNKKVDDGFLDIWTYNAELLVLLENERTLDFHDSNVKNLYEKVKSQLKNNAKEIGNGCFEFYHKCNNECMESVKNGTYDYPKYSEESKLNREKIDGVKLESMGVYQILAIYSTVASSLVLLVSLGAISFWMCSNGSLQCRICI

SEQ ID NO: 748 - protein, 566 aa, Artificial Sequence
  derived and/or modified protein sequence (wt) from hemagglutinin__InfluenzaA__ABD60955
MKAKLLVLLCAFTATYADTICIGYHANNSTDTVDTVLEKNVTVTHSVNLLEDSHNGKLCRLKGIAPLQLGNCSVAGWILGNPKCESLFSKESWSYIAETPNPENGTCYPGYFADYEELREQLSSVSSFERFEIFPKESSWPNHTVTKGVTTSCSHNGKSSFYRNLLWLTEKNGLYPNLSKSYVNNKEKEVLVLWGVHHPSNIRDQRAIYHTENAYVSVVSSHYSRRFTPEIAKRPKVRDQEGRINYYWTLLEPGDTIIFEANGNLIAPWYAFALSRGFGSGIITSNASMDECDAKCQTPQGAINSSLPFQNVHPVTIGECPKYVRSTKLRMVTGLRNIPSIQSRGLFGAIAGFIEGGWTGMIDGWYGYHHQNEQGSGYAADQKSTQNAINGITNKVNSVIEKMNTQFTAVGKEFNKLERRMENLNKKVDDGFLDIWTYNAELLVLLENGRTLDFHDSNVKNLYEKVKSQLKNNAKEIGNGCFEFYHKCNNECMESVKNGTYDYPKYSEESKLNRGKIDGVKLESMGVYQILAIYSTVASSLVLLVSLGAISFWMCSNGSLQCRICI

SEQ ID NO: 749 - protein, 566 aa, Artificial Sequence; identical to SEQ ID NO: 32
  derived and/or modified protein sequence (wt) from hemagglutinin__InfluenzaA__ABD61260

SEQ ID NO: 750 - protein, 566 aa, Artificial Sequence; identical to SEQ ID NO: 32
  derived and/or modified protein sequence (wt) from hemagglutinin__InfluenzaA__ABD61271

SEQ ID NO: 751 - protein, 566 aa, Artificial Sequence; identical to SEQ ID NO: 286
  derived and/or modified protein sequence (wt) from hemagglutinin__InfluenzaA__ABD61282

SEQ ID NO: 752 - protein, 566 aa, Artificial Sequence; identical to SEQ ID NO: 516
  derived and/or modified protein sequence (wt) from hemagglutinin__InfluenzaA__ABD61293

SEQ ID NO: 753 - protein, 566 aa, Artificial Sequence; identical to SEQ ID NO: 738
  derived and/or modified protein sequence (wt) from hemagglutinin__InfluenzaA__ABD61304

SEQ ID NO: 754 - protein, 566 aa, Artificial Sequence; identical to SEQ ID NO: 650
  derived and/or modified protein sequence (wt) from hemagglutinin__InfluenzaA__ABD61315

SEQ ID NO: 755 - protein, 566 aa, Artificial Sequence; identical to SEQ ID NO: 72
  derived and/or modified protein sequence (wt) from hemagglutinin__InfluenzaA__ABD61337

SEQ ID NO: 756 - protein, 566 aa, Artificial Sequence
  derived and/or modified protein sequence (wt) from hemagglutinin__InfluenzaA__ABD61348
MKTIIALSYILCLVFAQKLPVNDNSTATLCLGHHAVPNGTLVKTITNDHIEVTNATELVQSSSTGRICDSPHQILDGENCTLIDALLGDPHCDGFQNKEWDLFVERSTAYSNCYPYDVPDYASLRSLVASSGTLEFNNESFNWTGVAQNGTSSACKRRSIKSFFSRLNWLHQLKYKYPALNVTMPNNEKFDKLYIWGVHHPSTDSDQISLYAQASGRVTVSTKRSQQTVIPNIGSRPWVRGVSSRISIYWTIVKPGDILLINSTGNLIAPRGYFKIRSGKSSIMRSNAPIGKCNSECITPNGSIPNNKPFQNVNRITYGACPRYVKQNTLKLATGMRNVPEKQTRGIFGAIAGFIENGWEGMVDGWYGFRHQNSEGTGQAADLKSTQAAINQINGKLNRLIEKTNEKFHQIEKEFSEVEGRIQDLEKYVEDTKIDLWSYNAELLVALENQHTIDLTDSEMNKLFERTRKQLRENAEDMGNGCFKIYHKCDNACIGSIRNGTYDHDVYRDEALNNRFQIKGVELKSGYKDWILWISFAISCFLLCVVLLGFIMWACQKGNIRCNICI

SEQ ID NO: 757 - protein, 566 aa, Artificial Sequence; identical to SEQ ID NO: 72
  derived and/or modified protein sequence (wt) from hemagglutinin__InfluenzaA__ABD61359

SEQ ID NO: 758 - protein, 566 aa, Artificial Sequence; identical to SEQ ID NO: 710
  derived and/or modified protein sequence (wt) from hemagglutinin__InfluenzaA__ABD61370

SEQ ID NO: 759 - protein, 566 aa, Artificial Sequence; identical to SEQ ID NO: 650
  derived and/or modified protein sequence (wt) from hemagglutinin__InfluenzaA__ABD61381

SEQ ID NO: 760 - protein, 566 aa, Artificial Sequence
  derived and/or modified protein sequence (wt) from hemagglutinin__InfluenzaA__ABD61392
MKTIIALSYILCLVFAQKLPGNDNSTATLCLGHHAVPNGTLVKTITNDQIEVTNATELVQSSSTGGICDSPHQILDGENCTLIDALLGDPHCDGFQNKEWDLFVERSKAYSNCYPYDVPDYASLRSLVASSGTLEFNNESFNWTGVAQNGTSSACKRGSNKSFFSRLNWLHQLKYKYPALNVTMPNNEKFDKLYIWGVHHPSTDSDQISLYAQAPGRVTVSTKRSQQTVIPNIGSRPWVRGVSSRISIYWTIVKPGDILLINCTGNLIAPRGYFKIRSGKSSIMRSDASIGKCNSECITPNGSIPNDKPFQNVNRITYGACPRYVKQNTLKLATGMRNVPEKQTRGIFGAIAGFIENGWEGMVDGWYGFRHQNSEGTGQAADLKSTQAAINQINGKLNRLIEKTNEKFHQIEKEFSEVEGRIQDLEKYVEDTKIDLWSYNAELLVALENQHTIDLTDSEMNKLFERTKKQLRENAEDMGNGCFKIYHKCDNACIGSIRNGTYDHDVYRDEALNNRFQIKGVELKSGYKDWILWISFAISCFLLCVVLLGFIMWACQKGNIRCNICI

SEQ ID NO: 761 - protein, 566 aa, Artificial Sequence; identical to SEQ ID NO: 740
  derived and/or modified protein sequence (wt) from hemagglutinin__InfluenzaA__ABD61403

SEQ ID NO: 762 - protein, 566 aa, Artificial Sequence
  derived and/or modified protein sequence (wt) from hemagglutinin__InfluenzaA__ABD61529
MKTIIALSYIFCLVFAQKLPGNDNSTATLCLGHHAVPNGTLVKTITNDQIEVTNATELVQSSSTGRICDSPHRILDGKNCTLIDALLGDPHCDGFQNEKWDLFVERSKAFSNCYPYDVPDYASLRSLVASSGTLEFINEGFNWTGVTQSGGSYACKRGSVNSFFSRLNWLYESESKYPVLNVTMPNNGKFDKLYIWGVHHPSTDKEQTNLYVRASGRVTVSTKRSQQTVIPNIGSRPWVRGLSSRISIYWTIVKPGDILLINSTGNLIAPRGYFKIRTGKSSIMRSDAPIGTCSSECITPNGSIPNDKPFQNVNKITYGACPRYVKQNTLKLATGMRNVPEKQTRGIFGAIAGFIENGWEGMVDGWYGFRHQNSEGTGQAADLKSTQAAIDQINGRLNRLIEKTNEKFHQIEKEFSEVEGRIQDLEKYVEDTKIDLWSYNAELLVALENQHTIDLTDSEMNKLFEKTRKQLRENAEDMGNGCFKIYHKCDNACIGSIRNGTYDHDVYRDEALNNRFQIKGVELKSGYKDWILWISFAISCFLLCVVLLGFIMWACQKGNIRCNICI

SEQ ID NO: 763 - protein, 565 aa, Artificial Sequence; identical to SEQ ID NO: 741
  derived and/or modified protein sequence (wt) from hemagglutinin__InfluenzaA__ABD61540

SEQ ID NO: 764 - protein, 566 aa, Artificial Sequence
  derived and/or modified protein sequence (wt) from hemagglutinin__InfluenzaA__ABD61757
MKTIIALSYIFCLVFAQDLPGNDNSTATLCLGHHAVPNGTLVKTITNDQIEVTNATELVQSSSTGKICDNPHRILDGINCTLIDALLGDPHCDGFQNEKWDLFVERSKAFSNCYPYDVPDYASLRSLVASSGTLEFINEGFNWTGVTQNGGSSACKRGPDNGFFSRLNWLYKSGSTYPVQNVTMPNNDNSDKLYIWGVHHPSTDKEQTDLYVQASGKVTVSTKRSQQTVIPNVGSRPWVRGLSSRVSIYWTIVKPGDILVINSNGNLIAPRGYFKMRTGKSSIMRSDAPIGTCSSECITPNGSIPNDKPFQNVNKITYGACPKYVKQNTLKLATGMRNVPEKQTRGIFGAIAGFIENGWEGMIDGWYGFRHQNSEGTGQAADLKSTQAAIDQINGKLNRVIEKTNEKFHQIEKEFSEVEGRIQDLEKYVEDTKIDLWSYNAELLVALENQHTIDLTDSEMNKLFEKTRRQLRENAEDMGNGCFKIYHKCDNACIGSIRNGTYDHDVYRDEALNNRFQIKGVELKSGYKDWILWISFAISCFLLCVVLLGFIMWACQKGNIRCNICI

SEQ ID NO: 765 - protein, 566 aa, Artificial Sequence
  derived and/or modified protein sequence (wt) from hemagglutinin__InfluenzaA__ABD61777
MKTIIALSYIFCLGFAQKLPGNDNSTATLCLGHHAVPNGTLVKTITNDQIEVTNATELVQSSSTGRICDSPHRILDGKNCTLIDALLGDPHCDGFQNEKWDLFVERSKAFSNCYPYDVPDYASLRSLVASSGTLEFINEGFNWTGVTQSGGSYACKRGSVNSFFSRLNWLYESESKYPALNVTMPNNGKFDKLYIWGVHHPSTDKEQTNLYVRASGRVTVSTKRSQQTVIPNIGSRPWVRGLSSRISIYWTIVKPGDILLINSTGNLIAPRGYFKIRTGKSSIMRSDAPIGTCSSECITPNGSIPNDKPFQNVNKITYGACPRYVKQNTLKLATGMRNVPEKQTRGIFGAIAGFIENGWEGMVDGWYGFRHQNSEGTGQAADLKSTQAAIDQINGKLNRLIEKTNEKFHQIEKEFSEVEGRIQDLEKYVEDTKIDLWSYNAELLVALENQHTIDLTDSEMNKLFEKTRKQLRENAEDMGNGCFKIYHKCDNACIGSIRNGTYDHDVYRDEALNNRFQIKGVELKSGYKDWILWISFAISCFLLCVVLLGFIMWACQKGNIRCNICI

SEQ ID NO: 766 - protein, 566 aa, Artificial Sequence
  derived and/or modified protein sequence (wt) from hemagglutinin__InfluenzaA__ABD77598
MKTIIALSYILCLVFAQKLPVNDNSTATLCLGHHAVPNGTLVKTITNDHIEVTNATELVQSSPTGRICDSPHQILDGENCTLIDALLGDPHCDGFQNKEWDLFVERSTAYSNCYPYDVPDYASLRSLVASSGTLEFNNESFNWTGVAQNGTSSACKRRSIKSFFSRLNWLHQLKYKYPALNVTMPNNEKFDKLYIWGVHHPSTDSDQISLYAQASGRVTVSTKRSQQTVIPNIGSRPWVRGVSSRISIYWTIVKPGDILLINSTGNLIAPRGYFKIRSGKSSIMRSNAPIGKCNSECITPNGSIPNDKPFQNVNRITYGACPRYVKQNTLKLATGMRNVPEKQTRGIFGAIAGFIENGWEGMVDGWYGFRHQNSEGTGQAADLKSTQAAINQINGKLNRLIEKTNEKFHQIEKEFSEVEGRIQDLEKYVEDTKIDLWSYNAELLVALENQHTIDLTDSEMNKLFERTRKQLRENAEDMGNGCFKIYHKCDNACIGSIRNGTYDHDVYRDEALNNRFQIKGVELKSGYKDWILWISFAISCFLLCVVLLGFIMWACQKGNIRCNICI

SEQ ID NO: 767 - protein, 566 aa, Artificial Sequence; identical to SEQ ID NO: 650
  derived and/or modified protein sequence (wt) from hemagglutinin__InfluenzaA__ABD77609

SEQ ID NO: 768 - protein, 566 aa, Artificial Sequence; identical to SEQ ID NO: 650
  derived and/or modified protein sequence (wt) from hemagglutinin__InfluenzaA__ABD77620

SEQ ID NO: 769 - protein, 566 aa, Artificial Sequence; identical to SEQ ID NO: 650
  derived and/or modified protein sequence (wt) from hemagglutinin__InfluenzaA__ABD77631

SEQ ID NO: 770 - protein, 566 aa, Artificial Sequence; identical to SEQ ID NO: 650
  derived and/or modified protein sequence (wt) from hemagglutinin__InfluenzaA__ABD77642

SEQ ID NO: 771 - protein, 566 aa, Artificial Sequence; identical to SEQ ID NO: 650
  derived and/or modified protein sequence (wt) from hemagglutinin__InfluenzaA__ABD77653

SEQ ID NO: 772 - protein, 565 aa, Artificial Sequence; identical to SEQ ID NO: 741
  derived and/or modified protein sequence (wt) from hemagglutinin__InfluenzaA__ABD77708

SEQ ID NO: 773 - protein, 565 aa, Artificial Sequence
  derived and/or modified protein sequence (wt) from hemagglutinin__InfluenzaA__ABD77719
MKVKLLVLLCTFTATYADTICIGYHANNSTDTVDTVLEKNVTVTHSVNLLEDSHNGKLCLLKGIAPLQLGNCSVAGWILGNPECELLISKESWSYIVETPNPENGTCYPGYFADYEELREQLSSVSSFERFEIFPKESSWPNHTVTGVSASCSHNGKSSFYRNLLWLTGKNGLYPNLSKSYANNKEKEVLVLWGVHHPPNIGDQRALYHTENAYVSVVSSHYSRRFTPEIAKRPKVRNQEGRINYYWTLLEPGDTIIFEANGNLIAPRYAFALSRGFGSGIITSNAPMDECDAKCQTPQGAINSSLPFQNVHPVTIGECPKYVRSAKLRMVTGLRNIPSIQSRGLFGAIAGFIEGGWTGMVDGWYGYHHQNEQGSGYAADQKSTQNAINGITNKVNSVIEKMNTQFTAVGKEFNKLERRMENLNKKVDDGFLDIWTYNAELLVLLENERTLDFHDSNVKNLYEKVKSQLKNNAKEIGNGCFEFYHKCNNECMESVKNGTYDYPKYSEESKLNREKIDGVKLESMGVYQILAIYSTVASSLVLLVSLGAISFWMCSNGSLQCRICI

SEQ ID NO: 774 - protein, 565 aa, Artificial Sequence; identical to SEQ ID NO: 741
  derived and/or modified protein sequence (wt) from hemagglutinin__InfluenzaA__ABD77730

SEQ ID NO: 775 - protein, 566 aa, Artificial Sequence; identical to SEQ ID NO: 650
  derived and/or modified protein sequence (wt) from hemagglutinin__InfluenzaA__ABD77752

SEQ ID NO: 776 - protein, 566 aa, Artificial Sequence; identical to SEQ ID NO: 650
  derived and/or modified protein sequence (wt) from hemagglutinin__InfluenzaA__ABD77763

SEQ ID NO: 777 - protein, 566 aa, Artificial Sequence
  derived and/or modified protein sequence (wt) from hemagglutinin__InfluenzaA__ABD77774
MKTIIALSYILCLVFAQKLPVNDNSTATLCLGHHAVPNGTLVKTITNDNIEVTNATELVQSSSTGRICDSPHQILDGENCTLIDALLGDPHCDGFQNKEWDLFVERSTAYSNCYPYDVPDYASLRSLVASSGTLEFNNESFNWTGVDQNGTSSACKRRSNKSFFSRLNWLHQLKYKYPALNVTMPNNEKFDKLYIWGVHHPSTDSDQISLYAQASGRVTVSTKRSQQTVIPNIGSRPWVRGVSSRISIYWTIVKPGDILLINSTGNLIAPRGYFKIRSGKSSIMRSNAPIGKCNSECITQNGSIPNDKPFQNVNRITYGACPRYVKQNTLKLATGMRNVPEKQTRGIFGAIAGFIENGWEGMVDGWYGFRHQNSEGTGQAADLKSTQAAINQINGKLNRLIEKTNEKFHQIEKEFSEVEGRIQDLEKYVEDTKIDLWSYNAELLVALENQHTIDLTDSEMNKLFERTRKQLRENAEDMGNGCFKIYHKCDNACIGSIRNGTYDHDVYRDEALNNRFQIKGVELKSGYKDWILWISFAISCFLLCVVLLGFIMWACQKGNIRCNICI

SEQ ID NO: 778 - protein, 566 aa, Artificial Sequence; identical to SEQ ID NO: 777
  derived and/or modified protein sequence (wt) from hemagglutinin__InfluenzaA__ABD77785

SEQ ID NO: 779 - protein, 566 aa, Artificial Sequence
  derived and/or modified protein sequence (wt) from hemagglutinin__InfluenzaA__ABD77807
MKAKLLILLCALSATDADTICIGYHANNSTDTVDTVLEKNVTVTHSVNLLEDSHNGKLCRLKGIAPLQLGKCNIAGWILGNPECESLLSKRSWSYIAETPNSENGTCYPGDFADYEELREQLSSVSSFERFEIFPKERSWPKHNITRGVTAACSHAGKSSFYKNLLWLTETNGSYPKLSKSYVNNKEKEVLVLWGVHHPSNIEDQKTLYRKENAYVSVVSSNYNRRFTPEIAERPKVRGQAGRMNYYWTLLEPGDTIIFEANGNLIAPWYAFALSRGFGSGIITSNASMDECDTKCQTPQGAINSSLPFQNIHPVTIGECPKYVKSTKLRMVTGLRNIPSIQSRGLFGAIAGFIEGGWTGMIDGWYGYHHQNEQGSGYAADQKSTQNAINGITNKVNSVIEKMNTQFTAVGKEFNKLEKRMENLNKKVDDGFLDIWTYNAELLVLLENERTLDFHDSNVKNLYEKVKNQLRNNAKEIGNGCFEFYHKCNNECMESVKNGTYDYPKYSEESKLNREKIDGVKLESMGVYQILAIYSTVASSLVLLVSLGAISFWMCSNGSLQCRICI

SEQ ID NO: 780 - protein, 566 aa, Artificial Sequence
  derived and/or modified protein sequence (wt) from hemagglutinin__InfluenzaA__ABD77818
MKAKLLVLLCALSATDADTICIGYHANNSTDTVDTVLEKNVTVTHSVNLLEDSHNGKLCRLKGIAPLQLGKCSIAGWILGNPECESLFSKKSWSYIAETPNSENGTCYPGYFADYEELREQLSSVSSFERFEIFPKESSWPKHTVTRGVTASCSHKGKSSFYRNLLWLTEKNGSYPNLSKSYVNNKEKEVLVLWGVHHPSNIEDQKTIYRKENAYVSVVSSHYNRRFTPEIAKRPKVRDQEGRINYYWTLLEPGDTIIFEANGNLIAPWYAFALSRGFGSGIITSNASMDECDAKCQTPQGAINSSLPFQNVHPVTIGECPKYVRSTKLRMVTGLRNIPSIQSRGLFGAIAGFIEGGWTGMIDGWYGYHHQNEQGSGYAADQKSTQNAINGITNKVNSVIEKMNTQFTAVGKEFNKLEKRMENLNKKVDDGFLDIWTYNAELLVLLENERTLDFHDSNVKNLYEKVKSQLKSNAKEIGNGCFEFYHKCNNECMESVKNGTYDYPKYSEESKLNREKIDGVKLESMGVYQILAIYSTVASSLVLLVSLGAISFWMCSNGSLQCRICI

SEQ ID NO: 781 - protein, 566 aa, Artificial Sequence
  derived and/or modified protein sequence (wt) from hemagglutinin__InfluenzaA__ABD77829
MKTIIALSYILYLVFAQKLPGNDNSTATLCLGHHAVPNGTLVKTITNDQIEVTNATELVQSSSTGRLCDSPHRILDGKNCTLIDALLGDPHCDGFQNKEWDLFVERSKAYSDCYPYDVPDYASLRSLVASSGTLEFTNEGFNWTGVAQNGTSYACKRGSVKSFFSRLNWLHKLEYKYPALNVTMPNNDKFDKLYIWGVHHPSTDSDQTSLYVQASGRVTVSTKRSQQTVIPNIGSRPWVRGVSSRISIYWTIVKPGDILLINSTGNLIAPRGYFKIRSGKSSIMRSDAPIGNCNSECITPNGSIPNDKPFQNVNRITYGACPRYVKQNTLKLATGMRNVPEKQTRGIFGAIAGFIENGWEGMVDGWYGFRHQNSEGTGQAADLKSTQAAINQINGKLNRLIEKTNEKFHQIEKEFSEVEGRIQDLEKYVEDTKIDLWSYNAELLVALENQHTIDLTDSEMNKLFERTRKQLRENAEDMGNGCFKIYHKCDNACIGSIRNGTYDHDVYRDEALNNRFQIKGVELKSGYKDWILWISFAISCFLLCVVLLGFIMWACQKGNIRCNICI

SEQ ID NO: 782 - protein, 566 aa, Artificial Sequence
  derived and/or modified protein sequence (wt) from hemagglutinin__InfluenzaA__ABD77862
MKTIIALSYILCLVFAQKLPGNDNSTATLCLGHHAVPNGTLVKTITNDQIEVTNATELVQSSSTGRICDSPHRILDGKNCTLIDALLGDPHCDGFQNKEWDLFVERSKAYSDCYPYDVPDYASLRSLVASSGTLEFTNEGFNWTGVAQDGTSYACKRGSVKSFFSRLNWLHKLEYKYPALNVTMPNNDKFDKLYIWGVHHPSTDSDQTSIYVQASGRVTVSTKRSQQTVIPNIGSRPWVRGVSSRISIYWTIVKPGDILLINSTGNLIAPRGYFKIRSGKSSIMRSDAPIGNCNSECITPNGSIPNDKPFQNVNRITYGACPRYVKQNTLKLATGMRNVPEKQTRGIFGAIAGFIENGWEGMVDGWYGFRHQNSEGTGQAADLKSTQAAINQINGKLNRLIEKTNEKFHQIEKEFSEVEGRIQDLEKYVEDTKIDLWSYNAELLVALENQHTIDLTDSEMNKLFERTRKQLRENAEDMGNGCFKIYHKCDNACIGSIRNGTYDHDVYRDEALNNRFQIKGVELKSGYKDWILWISFAISCFLLCVVLLGFIMWACQKGNIRCNICI

SEQ ID NO: 783 - protein, 566 aa, Artificial Sequence
  derived and/or modified protein sequence (wt) from hemagglutinin__InfluenzaA__ABD77884
MKTIIALSYILCLVFAQKLPGNDNSTATLCLGHHAVPNGTLVKTITNDQIEVTNATELVQGSSTGRICDSPHRILDGKNCTLIDALLGDPHCDGFQNKEWDLFVERSKAYSNCYPYDVPDYASLRSLVASSGTLEFNNESFNWTGVAQNGTSYACKRRSVKSFFSRLNWLHKLEYKYPALNVTMPNNDKFDKLYIWGVHHPSTDSDQTSLYVQASGRVTVSTKRSQQTVIPNIGSRPWVRGVSSRISIYWTIVKPGDILLINSTGNLIAPRGYFKIRSGKSSIMRSDAPIDNCNSECITPNGSIPNDKPFQNVNRITYGACPRYVKQNTLKLATGMRNVPEKQTRGIFGAIAGFIENGWEGMVDGWYGFRHQNSEGTGQAADLKSTQAAINQINGKLNRLIEKTNEKFHQIEKEFSEVEGRIQDLEKYVEDTKIDLWSYNAELLVALENQHTIDLTDSEMNKLFERTRKQLRENAEDMGNGCFKIYHKCDNACIGSIRNGTYDHDVYRDEALNNRFQIKGVELKSGYKDWILWISFAISCFLLCVVLLGFIMWACQKGNIRCNICI

SEQ ID NO: 784 - protein, 566 aa, Artificial Sequence
  derived and/or modified protein sequence (wt) from hemagglutinin__InfluenzaA__ABD77895
MKTIIALSYILCLVFAQKLPGNDNSTATLCLGHHAVPNGTLVKTITNDQIEVTNATELVQSSSTGRICDSPHRILDGKNCTLIDALLGDPHCDGFQNKEWDLFVERSKAYSNCYPYDVPDYASLRSLVASSGTLEFNNESFNWTGVAQNGTSYACKRRSVKSFFSRLNWLHKLEYKYPALNVTMPNNDKFDKLYIWGVHHPSTDSDQTSLYVQASGRVTVSTKRSQQTVIPNIGSRPWVRGISSRISIYWTIVKPGDILLINSTGNLIAPRGYFKIRSGKSSIMRSDAPIDNCNSECITPNGSIPNDKPFQNVNRITYGACPRYVKQNTLKLATGMRNVPEKQTRGIFGAIAGFIENGWEGMVDGWYGFRHQNSEGTGQAADLKSTQAAINQISGKLNRLIEKTNEKFHQIEKEFSEVEGRIQDLEKYVEDTKIDLWSYNAELLVALENQHTIDLTDSEMNKLFERTRKQLRENAEDMGNGCFKIYHKCDNACIGSIRNGTYDHDVYRDEALNNRFQIKGVELKSGYKDWILWISFAISCFLLCVVLLGFIMWACQKGNIRCNICI

SEQ ID NO: 785 - protein, 566 aa, Artificial Sequence; identical to SEQ ID NO: 783
  derived and/or modified protein sequence (wt) from hemagglutinin__InfluenzaA__ABD77906

SEQ ID NO: 786 - protein, 565 aa, Artificial Sequence
  derived and/or modified protein sequence (wt) from hemagglutinin__InfluenzaA__ABD77917
MKVKLLVLLCTFTATYADTICIGYHANNSTDTVDTVLEKNVTVTHSVNLLEDSHNGKLCLLKGIAPLQLGNCSVAGWILGNPECELLISKESWSYIVETPNPENGTCYPGYFADYEELREQLSSVSSFERFEIFPKESSWPNHTVTGVSASCSHNGKSSFYRNLLWLTGKNGLYPNLSKSYANNKEKEVLVLWGVHHPPNIGNQKALYHTENAYVSVVSSHYSRRFTPEIAKRPKVRDQEGRINYYWTLLEPGDTIIFEANGNLIAPRYAFALSRGFGSGIITSNAPMDECDAKCQTPQGAINSSLPFQNVHPVTIGECPKYVRSAKLRMVTGLRNIPSIQSRGLFGAIAGFIEGGWTGMVDGWYGYHHQNEQGSGYAADQKSTQNAINGITNKVNSVIEKMNTQFTAVGKEFNKLERRMENLNKKVDDGFLDIWTYNAELLVLLENERTLDFHDSNVKNLYEKVKSQLKNNAKEIGNGCFEFYHKCNNECMESVKNGTYDYPKYSEESKLNREKIDGVKLESMGVYQILAIYSTVASSLVLLVSLGAISFWMCSNGSLQCRICI

SEQ ID NO: 787 - protein, 565 aa, Artificial Sequence
  derived and/or modified protein sequence (wt) from hemagglutinin__InfluenzaA__ABD77928
MKVKLLVLLCTFTATYADTICIGYHANNSTDTVDTVLEKNVTVTHSVNLLEDSHNGKLCLLKGIAPLQLGNCSVAGWILGNPECELLISKESWSYIVETPNPENGTCYPGYFADYEELREQLSSVSSFERFEIFPKESSWPNHTVTGVSASCSHNGKSSFYRNLLWLTGKNGLYPNLSKSYANNKEKKVLVLWGVHHPPNIGDQKALYHTENAYVSVVSSHYSRRFTPEIAKRPKVRDQEGRINYYWTLLEPGDTIIFEANGNLIAPRYAFALSRGFGSGIITSNAPMDECDAKCQTPQGAINSSLPFQNVHPVTIGECPKYVRSAKLRMVTGLRNIPSIQSRGLFGAIAGFIEGGWTGMVDGWYGYHHQNEQGSGYAADQKSTQNAINGITNKVNSVIEKMNTQFTAVGKEFNKLERRMENLNKKVDDGFLDIWTYNAELLVLLENERTLDFHDSNVKNLYEKVKSQLKNNAKEIGNGCFEFYHKCNNECMESVKNGTYDYPKYSEESKLNREKIDGVKLESMGVYQILAIYSTVASSLVLLVSLGAISFWMCSNGSLQCRICI

SEQ ID NO: 788 - protein, 565 aa, Artificial Sequence; identical to SEQ ID NO: 742
  derived and/or modified protein sequence (wt) from hemagglutinin__InfluenzaA__ABD77939

SEQ ID NO: 789 - protein, 565 aa, Artificial Sequence; identical to SEQ ID NO: 742
  derived and/or modified protein sequence (wt) from hemagglutinin__InfluenzaA__ABD77950

SEQ ID NO: 790 - protein, 565 aa, Artificial Sequence; identical to SEQ ID NO: 741
  derived and/or modified protein sequence (wt) from hemagglutinin__InfluenzaA__ABD77961

SEQ ID NO: 791 - protein, 565 aa, Artificial Sequence; identical to SEQ ID NO: 742
  derived and/or modified protein sequence (wt) from hemagglutinin__InfluenzaA__ABD77983

SEQ ID NO: 792 - protein, 565 aa, Artificial Sequence; identical to SEQ ID NO: 742
  derived and/or modified protein sequence (wt) from hemagglutinin__InfluenzaA__ABD77994

SEQ ID NO: 793 - protein, 565 aa, Artificial Sequence; identical to SEQ ID NO: 741
  derived and/or modified protein sequence (wt) from hemagglutinin__InfluenzaA__ABD78005

SEQ ID NO: 794 - protein, 565 aa, Artificial Sequence; identical to SEQ ID NO: 741
  derived and/or modified protein sequence (wt) from hemagglutinin__InfluenzaA__ABD78016

SEQ ID NO: 795 - protein, 565 aa, Artificial Sequence; identical to SEQ ID NO: 742
  derived and/or modified protein sequence (wt) from hemagglutinin__InfluenzaA__ABD78027

SEQ ID NO: 796 - protein, 565 aa, Artificial Sequence; identical to SEQ ID NO: 742
  derived and/or modified protein sequence (wt) from hemagglutinin__InfluenzaA__ABD78038

SEQ ID NO: 797 - protein, 566 aa, Artificial Sequence; identical to SEQ ID NO: 777
  derived and/or modified protein sequence (wt) from hemagglutinin__InfluenzaA__ABD78049

SEQ ID NO: 798 - protein, 565 aa, Artificial Sequence; identical to SEQ ID NO: 296
  derived and/or modified protein sequence (wt) from hemagglutinin__InfluenzaA__ABD78060

SEQ ID NO: 799 - protein, 565 aa, Artificial Sequence
  derived and/or modified protein sequence (wt) from hemagglutinin__InfluenzaA__ABD78071
MKAKLLVLLCTFTATYADTICIGYHANNSTDTVDTVLEKNVTVTHSVNLLEDSHNGKLCLLKGIAPLQLGNCSVAGWILGNPECELLISKESWSYIVETPNPENGTCYPGYFADYEELREQLSSVSSFERFEIFPKGSSWPNHTVTGVSASCSHNGKSSFYRNLLWLTGKNGLYPNLSMSYVNNKEKEVLVLWGVHHPPNIGDQRALYHTENAYVSVVSSHYSRRFTPEIAKRPKVRDQEGRINYYWTLLEPGDTIIFEANGNLIAPWYAFALSGGFGSGIITSNAPMGECDAKCQTPQGAINSSLPFQNVHPVTIGECPKYVRSAKLRMVTGLRNIPSIQSRGLFGAIAGFIEGGWTGMVDGWYGYHHQNEQGSGYAADQKSTQNAINGITNKVNSVIEKMNTQFTAVGKEFNKLERRMENLNKKVDDGFLDIWTYNAELLVLLENERTLDFHDSNVKNLYEKVKSQLKNNAKEIGNGCFEFYHKCNNECMESVKNGTYDYPKYSEESKLNREKIDGVKLESMGVYQILAIYSTVASSLVLLVSLGAISFWMCSNGSLQCRICI

SEQ ID NO: 800 - protein, 565 aa, Artificial Sequence
  derived and/or modified protein sequence (wt) from hemagglutinin__InfluenzaA__ABD78093
MKAKLLVLLCTFTATYADTICIGYHANNSTDTVDTVLEKNVTVTHSVNLLEDSHNGKLCLLKGIAPLQLGNCSVAGWILGNPECELLISKESWSYIVETPNPENGTCYPGYFADYEELREQLSSVSSFERFEIFPKGSSWPNHTVTGVSASCSHNGKSSFYRNLLWLTGKNGLYPNLSMSYVNNKEKEVLVLWGVHHPPNIGDQRALYHTENAYVSVVSSHYSRRFTPEIAKRPKVRDQEGRINYYWTLLEPGDTIIFEANGNLIAPWYAFALSRGFGSGIITSNAPMGECDAKCQTPQGAINSSLPFQNVHPVTIGECPKYVRSAKLRMVTGLRNIPSIQSRGLFGAIAGFIEGGWTGMVDGWYGYHHQNEQGSGYAADQKSTQNAINGITNKVNSVIEKMNTQFTAVGKEFNKLERRMENLNKKVDDGFLDIWTYNAELLVLLENERTLDFHDSNVKNLYEKVKSQLKNNAKEIGNGCFEFYHKCNNECMESVKNGTYDYPKYSEESKLNREKIDGVKLESMGVYQILAIYSTVASSLVLLVSLGAISFWMCSNGSLQCRICI

SEQ ID NO: 801 - protein, 566 aa, Artificial Sequence
  derived and/or modified protein sequence (wt) from hemagglutinin__InfluenzaA__ABD78115
MKTIIALSYILCLVFAQKLPGNDNSTATLCLGHHAVPNGTLVKTITNDQIEVTNATELVQSSSTGRICDSPHRILDGKNCTLIDALLGDPHCDGFQNKEWDLFVERSKAYSDCYPYDVPDYASLRSLVASSGTLEFTNEGFNWTGVAQDGTSYACKRGSVKSFFSRLNWLHKLEYKYPALNVTMPNNDKFDKLYIWGVHHPSTDSDQTSLYVQASGRVTVSTKRSQQTVIPNIGSRPWVRGVSSRISIYWTIVKPGDILLINSTGNLIAPRGYFKIRSGKSSIMRSDAPIGNCNSECITPNGSIPNDKPFQNVNRITYGACPRYVKQNTLKLATGMRNVPEKQTRGIFGAIAGFIENGWEGMVDGWYGFRHQNSEGTGQAADLKSTQAAINQINGKLNRLIEKTNEKFHQIEKEFSEVEGRIQDLEKYVEDTKIDLWSYNAELLVALENQHTIDLTDSEMNKLFERTRKQLRENAEDMGNGCFKIYHKCDNACIGSIRNGTYDHDVYRNEALNNRFQIKGVELKSGYKDWILWISFAISCFLLCVVLLGFIMWACQKGNIRCNICI

SEQ ID NO: 802 - protein, 566 aa, Artificial Sequence
  derived and/or modified protein sequence (wt) from hemagglutinin__InfluenzaA__ABD78126
MKTIIALSYILCLVFAQKLPGNDNSTATLCLGHHAVPNGTLVKTITNDQIEVTNATELVQSSSTGRICDSPHRILDGKNCTLIDALLGDPHCDGFQNKEWDLFVERSKAYSDCYPYDVPDYASLRSLVASSGTLEFTNEGFNWTGVAQDGTSYACKRGSVKSFFSRLNWLHKLEYKYPALNVTMPNNDKFDKLYIWGVHHPSTDSDQTSLYVQASGRVTVSTKRSQQTVIPNIGSRPWVRGVSSIISIYWTIVKPGDILLINSTGNLIAPRGYFKIRSGKSSIMRSDAPIGNCNSECITPNGSIPNDKPFQNVNRITYGACPRYVKQNTLKLATGMRNVPEKQTRGIFGAIAGFIENGWEGMVDGWYGFRHQNSEGTGQAADLKSTQAAINQINGKLNRLIEKTNEKFHQIEKEFSEVEGRIQDLEKYVEDTKIDLWSYNAELLVALENQHTIDLTDSEMNKLFERTRKQLRENAEDMGNGCFKIYHKCDNACIGSIRNGTYDHDVYRDEALNNRFQIKGVELKSGYKDWILWISFAISCFLLCVVLLGFIMWACQKGNIRCNICI

SEQ ID NO: 803 - protein, 566 aa, Artificial Sequence
  derived and/or modified protein sequence (wt) from hemagglutinin__InfluenzaA__ABD79032
MKTIIALSYIFCLVLGQDFPGNDNSTATLCLGHHAVPNGTLVKTITNDQIEVTNATELVQSSSTGKICNNPHRILDGIDCTLIDALLGDPHCDGFQNETWDLFVERSKAFSNCYPYDVPDYASLRSLVASSGTLEFISEGFTWTGVTQNGGSNACKRGPDIGFFSRLNWLYKSGSTYPVLNVTMPNNDNFDKLYIWGVHHPSTDQEQTSLYVQASGRVTVSTKRSQQTIIPNIGSRPWVRGLSSRISIYWTIVKPGDILVINSNGNLIAPRGYFKMRTGKSSIMRSDAPIGTCISECITPNGSIPNDKPFQNVNKITYGACPKYVKQNTLKLATGMRNVPEKQTRGLFSAIAGFIENGWEGMIDGWYGFRHQNSEGTGQAADLKSTQAAIDQINGKLNRVIEKTNEKFHQIEKEFSEVEGRIQDLEKYVEDTKIDLWSYNAELLVALENQHTIDLTDSEMNKLFEKTRRQLRENAEDMGNGCFKIYHKCDNACIGSIRNGTYDHDVYRDEALNNRFQIKGVELKSGYKDWILWISFAISCFLLCVVLLGFIMWACQKGNIRCNICI

SEQ ID NO: 804 - protein, 566 aa, Artificial Sequence
  derived and/or modified protein sequence (wt) from hemagglutinin__InfluenzaA__ABD79112
MKAKLLILLCALSATDADTICIGYHANNSTDTVDTVLEKNVTVTHSVNLLEDSHNGKLCRLKGIAPLQLGKCNIAGWILGNPECESLLSKRSWSYIAETPNSENGACYPGDFADYEELREQLSSVSSFERFEIFPKGRSWPEHNIDIGVTAACSHAGKSSFYKNLLWLTEKDGSYPNLNKSYVNKKEKEVLILWGVHHPPNIENQKTLYRKENAYVSVVSSNYNRRFTPEIAERPKVRGQAGRINYYWTLLEPGDTIIFEANGNLIAPWYAFALNRGIGSGIITSNASMDECDTKCQTPQGAINSSLPFQNIHPFTIGECPKYVRSTKLRMVTGLRNIPSIQSRGLFGAIAGFIEGGWDGMIDGWYGYHHQNEQGSGYAADQKSTQNAINGITNKVNSVIEKMNTQFTAVGKEFNKLEKRMENLNKKVDDGFLDIWTYNAELLVLLENERTLDFHDSNVKNLYEKVKNQLRNNAKEIGNGCFEFYHKCNNECMESVKNGTYDYPKFSEESKLNREKIDGVKLESMGVYQILAIYSTVASSLVLLVSLGAISFWMCSNGSLQCRICI

SEQ ID NO: 805 - protein, 566 aa, Artificial Sequence
  derived and/or modified protein sequence (wt) from hemagglutinin__InfluenzaA__ABD79123
MKTIIALSYILCLVFAQKLPGNDNSTATLCLGHHAVPNGTLVKTITNDQIEVTNATELVQSSSTGRICDSPHQILDGKNCTLIDALLGDPHCDGFQNKEWDLFVERSTAYSNCYPYDVPDYASLRSLVASSGTLEFTKEGFNWTGVAQDGTSYACKRGSVKSFFSRLNWLHKLEYKYPALNVTMPNNDKFDKLYIWGVHHPSTDSDQTSLYVQASGRVTVSTKRSQQTVIPNIGSRPWVRGVSSRISIYWTIVKPGDILLINSTGNLIAPRGYFKIRSGKSSIMRSDAPIDNCNSECITPNGSISNDKPFQNVNRITYGACPRYVKQNTLKLATGMRNVPEKQTRGIFGAIAGFIENGWEGMVDGWYGFRHQNSEGTGQAADLKSTQAAINQINGKLNRLIEKTNEKFHQIEKEFSEVEGRIQDLEKYVEDTKIDLWSYNAELLVALENQHTIDLTDSEMNKLFERTRKQLRENAEDMGNGCFRIYHKCDNACIGSIRNGTYDHDVYRDEALNNRFQIKGVELKSGYKDWILWISFAISCFLLCVVLLGFIMWACQKGNIRCNICI

SEQ ID NO: 806 - protein, 566 aa, Artificial Sequence
  derived and/or modified protein sequence (wt) from hemagglutinin__InfluenzaA__ABD79134
MKTIIALSYILCLVFAQKLPGNDNSTATLCLGHHAVPNGTLVKTITNDQIEVTNATELVQSSSTGRICDSPHQILDGKNCTLIDALLGDPHCDGFQNKKWDLFVERSTAYSNCYPYDVPDYASLRSLVASSGTLEFTKEGFNWTGVAQDGTSYACKRGSVKSFFSRLNWLHKLEYKYPALNVTMPNNDKFDKLYIWGVHHPSTDSDQTSLYVQASGRVTVSTKRSQQTVIPNIGSRPWVRGVSSRISIYWTIVKPGDILLINSTGNLIAPRGYFKIRSGKSSIMRSDAPIDNCNSECITPNGSISNDKPFQNVNRITYGACPRYVKQNTLKLATGMRNVPEKQTRGIFGAIAGFIENGWEGMVDGWYGFRHQNSEGTGQAADLKSTQAAINQINGKLNRLIEKTNEKFHQIEKEFSEVEGRIQDLEKYVEDTKIDLWSYNAELLVALENQHTIDLTDSEMNKLFERTRKQLRENAEDMGNGCFKIYHKCDNACIGSIRNGTYDHDVYRDEALNNRFQIKGVELKSGYKDWILWISFAISCFLLCVVLLGFIMWACQKGNIRCNICI

SEQ ID NO: 807 - protein, 566 aa, Artificial Sequence
  derived and/or modified protein sequence (wt) from hemagglutinin__InfluenzaA__ABD79145
MKTIIALSYILCLVFAQKLPGNDNSTATLCLGHHAVPNGTLVKTITNDQIEVTNATELVQSSSTGRICDSPHQILDGKNCTLIDALLGDPHCDGFQNKEWDLFVERSTAYSNCYPYDVPDYASLRSLVASSGTLEFTKEGFNWTGVAQDGTSYACKRGSVKSFFSRLNWLHKLEYKYPALNVTMPNNDKFDKLYIWGVHHPSTDSDQTSLYVQASGRVTVSTKRSQQTVIPNIGSRPWVRGVSSRISIYWTIVKPGDILLINSTGNLIAPRGYFKIRSGKSSIMRSDAPIDNCNSECITPNGSISNDKPFQNVNRITYGACPRYVKQNTLKLATGMRNVPEKQTRGIFGAIAGFIENGWEGMVDGWYGFRHQNSEGTGQAADLKSTQAAINQINGKLNRLIEKTNEKFHQIEKEFSEVEGRIQDLEKYVEDTKIDLWSYNAELLVALENQHTIDLTDSEMNKLFERTRKQLRENAEDMGNGCFKIYHKCDNACIGSIRNGTYDHDVYRDEALNNRFQIKGVELKSGYKDWILWISFAISCFLLCVVLLGFIMWACQKGNIRCNICI

SEQ ID NO: 808 - protein, 566 aa, Artificial Sequence; identical to SEQ ID NO: 807
  derived and/or modified protein sequence (wt) from hemagglutinin__InfluenzaA__ABD79156

SEQ ID NO: 809 - protein, 566 aa, Artificial Sequence; identical to SEQ ID NO: 23
  derived and/or modified protein sequence (wt) from hemagglutinin__InfluenzaA__ABD79167

SEQ ID NO: 810 - protein, 566 aa, Artificial Sequence; identical to SEQ ID NO: 807
  derived and/or modified protein sequence (wt) from hemagglutinin__InfluenzaA__ABD79178

SEQ ID NO: 811 - protein, 566 aa, Artificial Sequence
  derived and/or modified protein sequence (wt) from hemagglutinin__InfluenzaA__ABD79189
MKTIIALSYILCLVFAQKLPGNDNSTATLCLGHHAVPNGTLVKTITNDQIEVTNATELVQSSSTGRICDSPHQILDGKNCTLIDALLGDPHCDGFQNKEWDLFVERSTAYSNCYPYDVPDYASLRSLVASSGTLEFTKEGFNWTGVAQDGTSYACKRGSVKSFFSRLNWLHKLEYKYPALNVTMPNNDKFDKLYIWGVHHPSTDSDQTSLYVQASGRVTVSTKRSQQTVIPNIGSRPWVRGVSSRISIYWTVVKPGDILLINSTGNLIAPRGYFKIRSGKSSIMRSDAPIDSCNSECITPNGSISNDKPFQNVNRITYGACPRYVKQNTLKLATGMRNVPEKQTRGIFGAIAGFIENGWEGMVDGWYGFRHQNSEGTGQAADLKSTQAAINQINGKLNRLIEKTNEKFHQIEKEFSEVEGRIQDLEKYVEDTKIDLWSYNAELLVALENQHTIDLTDSEMNKLFERTRKQLRENAEDMGNGCFKIYHKCDNACIGSIRNGTYDHDVYRDEALNNRFQIKGVELKSGYKDWILWISFAISCFLLCVVLLGFIMWACQKGNIRCNICI

SEQ ID NO: 812 - protein, 566 aa, Artificial Sequence; identical to SEQ ID NO: 807
  derived and/or modified protein sequence (wt) from hemagglutinin__InfluenzaA__ABD79200

SEQ ID NO: 813 - protein, 566 aa, Artificial Sequence
  derived and/or modified protein sequence (wt) from hemagglutinin__InfluenzaA__ABD79211
MKTIIALSYILCLVFAQKLPGNDNSTATLCLGHHAVPNGTLVKTITNDQIEVTNATELVQSSSTGRICDSPHQILDGKNCTLIDALLGDPHCDGFQNKEWDLFVERSTAYSNCYPYDVPDYASLRSLVASSGTLEFTKEGFNWTGVAQDGTSYACKRGSVKSFFSRLNWLHKLEYKYPALNVTMPNNDKFDKLYIWGVHHPSTDSDQTSLYVQASGRVTVSTKRSQQTVIPNIGSRPWIRGVSSRISIYWTIVKPGDILLINSTGNLIAPRGYFKIRSGKSSIMRSDAPIDNCNSECITPNGSISNDKPFQNVNRITYGACPRYVKQNTLKLATGMRNVPEKQTRGIFGAIAGFIENGWEGMVDGWYGFRHQNSEGTGQAADLKSTQAAINQINGKLNRLIEKTNEKFHQIEKEFSEVEGRIQDLEKYVEDTKIDLWSYNAELLVALENQHTIDLTDSEMNKLFERTRKQLRENAEDMGNGCFKIYHKCDNACIGSIRNGTYDHDVYRDEALNNRFQIKGVELKSGYKDWILWISFAISCFLLCVVLLGFIMWACQKGNIRCNICI

SEQ ID NO: 814 - protein, 566 aa, Artificial Sequence; identical to SEQ ID NO: 23
  derived and/or modified protein sequence (wt) from hemagglutinin__InfluenzaA__ABD79222

SEQ ID NO: 815 - protein, 566 aa, Artificial Sequence; identical to SEQ ID NO: 23
  derived and/or modified protein sequence (wt) from hemagglutinin__InfluenzaA__ABD79233

SEQ ID NO: 816 - protein, 566 aa, Artificial Sequence
  derived and/or modified protein sequence (wt) from hemagglutinin__InfluenzaA__ABD79244
MKTIIALSYILCLVFAQKLPGNDNSTATLCLGHHAVPNGTLVKTITNDQIEVTNATELVQSSSTGRICDSPHQILDGKNCTLIDALLGDPHCDGFKNKEWDLFVERSTAYSNCYPYDVPDYASLRSLVASSGTLEFTNEGFNWTGVAQDGTSYACKRGSVKSFFSRLNWLHKLEYKYPALNVTMPNNDKFDKLYIWGVHHPSTDSDQTSLYVQASGRVTVSTKRSQQTVIPNIGSRPWVRGVSSRISIYWTIVKPGDILLINSTGNLIAPRGYFKIRSGKSSIMRSDAPIDNCNSECITPNGSIPNDKPFQNVNRITYGACPRYVKQNTLKLATGMRNVPEKQTRGIFGAIAGFIENGWEGMVDGWYGFRHQNSEGTGQAADLKSTQAAINQINGKLNRLIEKTNEKFHQIEKEFSEVEGRIQDLEKYVEDTKIDLWSYNAELLVALENQHTIDLTDSEMNKLFERTRKQLRENAEDMGNGCFKIYHKCDNACIGSIRNGTYDHDVYRDEALNNRFQIKGVELKSGYKDWILWISFAISCFLLCVVLLGFIMWACQKGNIRCNICI

SEQ ID NO: 817 - protein, 566 aa, Artificial Sequence; identical to SEQ ID NO: 243
  derived and/or modified protein sequence (wt) from hemagglutinin__InfluenzaA__ABD94734

SEQ ID NO: 818 - protein, 566 aa, Artificial Sequence; identical to SEQ ID NO: 630
  derived and/or modified protein sequence (wt) from hemagglutinin__InfluenzaA__ABD94745

SEQ ID NO: 819 - protein, 566 aa, Artificial Sequence
  derived and/or modified protein sequence (wt) from hemagglutinin__InfluenzaA__ABD94767
MKTIIALSYILCLVFAQKLPVNDNSTATLCLGHHAVPNGTLVKTITNDNIEVTNATELVQSSSTGRICDSPHQILDGENCTLIDALLGDPHCDGFQNKEWDLFVERSTAYSNCYPYDVPDYASLRSLVASSGTLEFNNESFNWTGVDQNGTSSACKRRSNKSFFSRLNWLHQLKYKYPALNVTMPNNEKFDKLYIWGVHHPSTDSDQISLYAQASGRVTVSTKRSQQNVIPNIGSRPWVRGVSSRISIYWTIVKPGDILLINSTGNLIAPRGYFKIRSGKSSIMRSNAPIGKCNSECITPNGSIPNDKPFQNVNRITYGACPRYVKQNTLKLATGMRNVPEKQTRGIFGAIAGFIENGWEGMVDGWYGFRHQNSEGTGQAADLKSTQAAINQINGKLNRLIEKTNEKFHQIEKEFSEVEGRIQDLEKYVEDTKIDLWSYNAELLVALENQHTIDLTDSEMNKLFERTRKQLRENAEDMGNGCFKIYHKCDNACIGSIRNGTYDHDVYRDEALNNRFQIKGVELKSGYKDWILWISFAISCFLLCVVLLGFIMWACQKGNIRCNICI

SEQ ID NO: 820 - protein, 565 aa, Artificial Sequence; identical to SEQ ID NO: 800
  derived and/or modified protein sequence (wt) from hemagglutinin__InfluenzaA__ABD94778

SEQ ID NO: 821 - protein, 565 aa, Artificial Sequence; identical to SEQ ID NO: 800
  derived and/or modified protein sequence (wt) from hemagglutinin__InfluenzaA__ABD94789

SEQ ID NO: 822 - protein, 566 aa, Artificial Sequence
  derived and/or modified protein sequence (wt) from hemagglutinin__InfluenzaA__ABD94822
MKTIIALSYILCLVFAQKIPGNDNSTATLCLGHHAVPNGTLVKTITNDQIEVTNATELVQSSSTGRICDSPHRILDGENCTLIDALLGDPHCDGFQNKEWDLFVERSKAYSNCYPYDVPDYASLRSLVASSGTLEFNNESFNWTGVAQNGTSYACKRSSIKSFFSRLNWLHQLKYKYPALNVTMPNNDKFDKLYIWGVHHPSTDSDQTSLYAQASGRVTVSTKRSQQTVIPNIGSRPWVRGVSSRISIYWTIVKPGDILLINSTGNLIAPRGYFKIRSGKSSIMRSDAPIGKCNSECITPNGSIPNDKPFQNVNRITYGACPRYVKQNTLKLATGMRNVPEKQTRGIFGAIAGFIENGWEGMVDGWYGFRHQNSEGTGQAADLKSTQAAINQINGKLNRLIEKTNEKFHQIEKEFSEVEGRIQDLEKYVEDTKIDLWSYNAELLVALENQHTIDLTDSEMNKLFERTRKQLRENAEDMGNGCFKIYHKCDNACIGSIRNGTYDHDVYRDEALNNRFQIKGVELKSGYKDWILWISFAISCFLLCVVLLGFIMWACQKGNIRCNICI

SEQ ID NO: 823 - protein, 566 aa, Artificial Sequence
  derived and/or modified protein sequence (wt) from hemagglutinin__InfluenzaA__ABD94833
MKTIIALSYILCLVFAQKLPGNDNSTATLCLGHHAVPNGTLVKTITNDQIEVTNATELVQSSSTGRICDSPHRILDGKNCTLIDALLGDPHCDGFQNKEWDLFVERSKAYSDCYPYDVPDYASLRSLVASSGTLEFTNEGFNWTGVAQDGTSYACKRGSVKSFFSRLNWLHKLEYKYPALNVTMPNNDKFDKLYIWGVHHPSTDSDQTSLYVQASGRVTVSTKRSQQTVIPNIGSRPWVRGVSSRISIYWTIVKPGDILLINSTGNLIAPRGYFKIRSGKSSIMRSDAPIGNCNSECITPNGSIPNDKPFQNVNRITYGACPRYVKQNTLKLATGMRNVPEKQTRGIFGAIAGFIENGWEGMVDGWYGFRHQNSEGTGQAADLKSTQAAINQINGKLNRLIEKTNEKFHQIEKEFSEVEGRIQDLEKYVEDTKIDLWSYNAELLVALENQHTIDLTDSEMNKLFERTRKQLRENAEDMGNGCFKIYHKCDNACIGSIRNGTYDHDVYRDEALNNRFQIKGVELKSGYKDWILWISFAISCFLLCVVLLGFIMWACQKGNIRCNICI

SEQ ID NO: 824 - protein, 566 aa, Artificial Sequence
  derived and/or modified protein sequence (wt) from hemagglutinin__InfluenzaA__ABD94844
MKTIIALSYILCMVFAQKLPGNDNSTATLCLGHHAVPNGTLVKTITNDQIEVTNATELVQSSSTGRICDSPHRILDGKNCTLIDALLGDPHCDGFQNKEWDLFVERSKAYSNCYPYDVPDYASLRSLVASSGTLEFNNESFNWTGVAQNGTSYACKRRSVKSFFSRLNWLHKLEYKYPALNVTMPNNDKFDKLYIWGVHHPSTDSDQTSLYVQASGRVTVSTKRSQQTVIPNIGSRPWVRGVSSIISIYWTIVKPGDILLINSTGNLIAPRGYFKIRSGKSSIMRSDAPIGNCNSECITPNGSIPNDKPFQNVNRITYGACPRYVKQNTLKLATGMRNVPEKQTRGIFGAIAGFIENGWEGMVDGWYGFRHQNSEGTGQAADLKSTQAAINQINGKLNRLIEKTNEKFHQIEKEFSEVEGRIQDLEKYVEDTKIDLWSYNAELLVALENQHTIDLTDSEMNKLFERTRKQLRENAEDMGNGCFKIYHKCDNACIGSIRNGTYDHDVYRDEALNNRFQIKGVELKSGYKDWILWISFAISCFLLCVVLLGFIMWACQKGNIRCNICI

SEQ ID NO: 825 - protein, 566 aa, Artificial Sequence
  derived and/or modified protein sequence (wt) from hemagglutinin__InfluenzaA__ABD94855
MKTIIALSYILCLVFAQKLPGNDNSTATLCLGHHAVPNGTLVKTITNDQIEVTNATELVQGSSTGRICDSPHRILDGKNCTLIDALLGDPHCDGFQNKEWDLFVERSKAYSNCYPYDVPDYASLRSLVASSGTLEFNNESFNWTGVAQNGTSYACKRGSVKSFFSRLNWLHKLEYKYPALNVTMPNNDKFDKLYIWGVHHPSTDSDQTSLYVQASGRVTVSTKRSQQTVIPNIGSRPWVRGVSSRISIYWTIVKPGDILLINSTGNLIAPRGYFKIRSGKSSIMRSDAPIDNCNSECITPNGSIPNDKPFQNVNRITYGACPRYVKQNTLKLATGMRNVPEKQTRGIFGAIAGFIENGWEGMVDGWYGFRHQNSEGTGQAADLKSTQAAINQINGKLNRLIEKTNEKFHQIEKEFSEVEGRIQDLEKYVEDTKIDLWSYNAELLVALENQHTIDLTDSEMNKLFERTRKQLRENAEDMGNGCFKIYHKCDNACIGSIRNGTYDHDVYRDEALNNRFQIKGVELKSGYKDWILWISFAISCFLLCVVLLGFIMWACQKGNIRCNICI

SEQ ID NO: 826 - protein, 566 aa, Artificial Sequence
  derived and/or modified protein sequence (wt) from hemagglutinin__InfluenzaA__ABD94866
MKTIIALSYISCLVFAQKLPGNDNSTATLCLGHHAVPNGTLVKTITNDQIEVTNATELVQSSSTGRICDGPHQILDGKNCTLIDALLGDPHCDGFQNKEWDLFVERSKAYSNCYPYDVPDYASLRSLVASSGTLEFTNESFNWTGVAQNGTSYACKRGSVKSFFSRLNWLHKLEYKYPALNVTMPNNDKFDKLYIWGVHHPSTDSDQTSLYVQSSGRITVSTKRSQQTVTPNIGSRPWVRGVSSRISIYWTIVKPGDILLITSTGNLIAPRGYFKIRRGKSSIMRSDAPIDNCNSECITPNGSIPNDKPFQNVNRITYGACPRYVKQNTLKLATGMRNVPEKQTRGIFGAIAGFIENGWEGMVDGWYGFRHQNSEGTGQAADLKSTQAAINQINGKLNRLIEKTNEKFHQIEKEFSEVEGRIQDLEKYVEDTKIDLWSYNAELLVALENQHTIDLTDSEMNKLFERTRKQLRENAEDMGNGCFKIYHKCDNACIGSIRNGTYDHDVYRDEALNNRFQIKGVELKSGYKDWILWISFAISCFLLCVVLLGFIMWACQKGNIRCNICI

SEQ ID NO: 827 - protein, 566 aa, Artificial Sequence
  derived and/or modified protein sequence (wt) from hemagglutinin__InfluenzaA__ABD94877
MKTIIALSYILCLVFAQKLPGNDNSTATLCLGHHAVPNGTLVKTITNDQIEVTNATELVQSSSTGRICDSPHRILDGKNCTLIDALLGDPHCDGFQNKEWDLFVERSKAYSNCYPYDVPDYASLRSLVASSGTLEFNNESFNWTGVAQNGTSYACKRRSVKSFFSRLNWLHKLEYKYPALNVTMPNNDKFDKLYIWGVHHPSTDSDQTSLYVQASGRVTVSTKRSQQTVIPNIGSRPWVRGVSSRISIYWTIVKPGDILLINSTGNLIAPRGYFKIRSGKSSIMRSDAPIDNCNSECITPNGSIPNDKPFQNVNRITYGACPRYVKQNTLKLATGMRNVPEKQTRGIFGAIAGFIENGWEGMVDGWYGFRHQNSEGTGQAADLKSTQAAINQINGKLNRLIEKTNEKFHQIEKEFSEVEGRIQDLEKYVEDTKIDLWSYNAELLVALENQHTIDLTDSEMNKLFERTRKQLRENAEDMGNGCFKIYHKCDNACIGSIRNGTYDHDVYRDEALNNRFQIKGVELKSGYKDWILWISFAISCFLLCVVLLGFIMWACQKGNIRCNICI

SEQ ID NO: 828 - protein, 566 aa, Artificial Sequence
  derived and/or modified protein sequence (wt) from hemagglutinin__InfluenzaA__ABD94888
MKTIIALSYILCLVFAQKLPGNDNSTATLCLGHHAVPNGTLVKTITNDQIEVTNATELVQSSSTGRICDSPHRILDGKNCTLIDALLGDPHCDGFKNKEWDLFVERSTAYSNCYPYDVPDYASLRSLVASSGTLEFTNEGFNWTGVAQDGTSYACKRGSVKSFFSRLNWLHKLEYKYPALNVTMPNNDKFDKLYIWGVHHPSTDSDQTSLYVQASGRVTVSTKRSQQTVIPNIGSRPWVRGVSSRISIYWTIVKPGDILLINSTGNLIAPRGYFKIRSGKSSIMRSDAPIDNCNSECITPNGSIPNDKPFQNVNRITYGACPRYVKQNTLKLATGMRNVPEKQTRGIFGAIAGFIENGWEGMVDGWYGFRHQNSEGTGQAADLKSTQAAINQINGKLNRLIEKTNEKFHQIEKEFSEVEGRIQDLEKYVEDTKIDLWSYNAELLVALENQHTIDLTDSEMNKLFERTRKQLRENAEDMGNGCFKIYHKCDNACIGSIRNGTYDHDVYRDEALNNRFQIKGVELKSGYKDWILWISFAISCFLLCVVLLGFIMWACQKGNIRCNICI

SEQ ID NO: 829 - protein, 566 aa, Artificial Sequence; identical to SEQ ID NO: 807
  derived and/or modified protein sequence (wt) from hemagglutinin__InfluenzaA__ABD94899

SEQ ID NO: 830 - protein, 566 aa, Artificial Sequence
  derived and/or modified protein sequence (wt) from hemagglutinin__InfluenzaA__ABD94910
MKTIIALSYILCLVFAQKLPGNDNSTATLCLGHHAVPNGTLVKTITNDQIEVTNATELVQNSSTGRICDSPHRILDGKNCTLIDALLGDPHCDGFQNKEWDLFVERSKAYSNCYPYDVPDYASLRSLVASSGTLEFNNESFNWTGVAQNGTSYACKRRSVKSFFSRLNWLHKLEYKYPALNVTMPNNDKFDKLYIWGVHHPSTDSDQTSLYVQASGRVTVSTKRSQQTVIPNIGSRPWVRGVSSRISIYWTIVKPGDILLINSTGNLIAPRGYFKIRSGKSSIMRSDAPIGNCNSECITPNGSIPNDKPFQNVNRITYGACPRYVKQNTLKLATGMRNVPEKQTRGIFGAIAGFIENGWEGMVDGWYGFRHQNSEGTGQAADLKSTQAAINQINGKLNRLIEKTNEKFHQIEKEFSEVEGRIQDLEKYVEDTKIDLWSYNAELLVALENQHTIDLTDSEMNKLFERTRKQLRENAEDMGNGCFRIYHKCDNACIGSIRNGTYDHDVYRDEALNNRFQIKGVELKSGYKDWILWISFAISCFLLCVVLLGFIMWACQKGNIRCNICI

SEQ ID NO: 831 - protein, 566 aa, Artificial Sequence
  derived and/or modified protein sequence (wt) from hemagglutinin__InfluenzaA__ABD94921
MKTIIALSYILCLVFAQKLPGNDNSTATLCLGHHAVPNGTLVKTITNDQIEVTNATELVQSSSTGRICDGPHQILDGKNCTLIDALLGDPHCDGFQNKEWDLFVERSKAYSNCYPYDVPDYASLRSLVASSGTLEFTNESFNWTGVAQNGTSYACKRGSVKSFFSRLNWLHKLEYKYPALNVTMPNNDKFDKLYIWGVHHPSTDSDQTSLYVQSSGRVTVSTKRSQQTVTPNIGSRPWVRGVSSRISIYWTIVKPGDILLINSTGNLIAPRGYFKIRRGKSSIMRSDAPIDNCNSECITPNGSIPNDKPFQNVNRITYGACPRYVKQNTLKLATGMRNVPEKQTRGIFGAIAGFIENGWEGMVDGWYGFRHQNSEGTGQAADLKSTQAAINQINGKLNRLIEKTNEKFHQIEKEFSEVEGRIQDLEKYVEDTKIDLWSYNAELLVALENQHTIDLTDSEMNKLFERTRKQLRENAEDMGNGCFKIYHKCDNACIGSIRNGTYDHDVYRDEALNNRFQIKGVELKSGYKDWILWISFAISCFLLCVVLLGFIMWACQKGNIRCNICI

SEQ ID NO: 832 - protein, 566 aa, Artificial Sequence; identical to SEQ ID NO: 807
  derived and/or modified protein sequence (wt) from hemagglutinin__InfluenzaA__ABD94932

SEQ ID NO: 833 - protein, 565 aa, Artificial Sequence
  derived and/or modified protein sequence (wt) from hemagglutinin__InfluenzaA__ABD94943
MKVKLLILLCTFTATYADTICIGYHANNSTDTVDTVLEKNVTVTHSVNLLEDSHNGKLCLLKGIAPLQLGNCSVAGWILGNPECELLISKESWSYIVETPNPENGACYPGYFADYEELREQLSSVSSFERFEIFPKESSWPNHTVTGVSASCSHNGKSSFYRNLLWLTGKNGLYPNLSKSYANNKKKEVLILWGVHHPPNIGDQRTLYHTENAYVSVVSSHYSRRFTPEITKRPKVRDQEGRINYYWTLLEPGDTIIFEANGNLIAPWYAFALSRGFGSGIITSNAPMDECDAKCQTPQGAINSSLPFQNVHPVTIGECPKYVRSAKLRMVTGLRNIPSIQSRGLFGAIAGFIEGGWTGMVDGWYGYHHQNEQGSGYAADQKSTQNAINGITNKVNSVIEKMNTQFTAVGKEFNKLERRMENLNKKVDDGFLDIWTYNAELLVLLENERTLDFHDSNVKNLYEKVKSQLKNNAKEIGNGCFEFYHKCNNECMESVKNGTYDYPKYSEESKLNREKIDGVKLDSMGVYQILAIYSTVASSLVLLVSLGAISFWMCSNGSLQCRICI

SEQ ID NO: 834 - protein, 566 aa, Artificial Sequence; identical to SEQ ID NO: 633
  derived and/or modified protein sequence (wt) from hemagglutinin__InfluenzaA__ABD94954

SEQ ID NO: 835 - protein, 565 aa, Artificial Sequence; identical to SEQ ID NO: 742
  derived and/or modified protein sequence (wt) from hemagglutinin__InfluenzaA__ABD94965

SEQ ID NO: 836 - protein, 565 aa, Artificial Sequence; identical to SEQ ID NO: 741
  derived and/or modified protein sequence (wt) from hemagglutinin__InfluenzaA__ABD94987

SEQ ID NO: 837 - protein, 565 aa, Artificial Sequence; identical to SEQ ID NO: 741
  derived and/or modified protein sequence (wt) from hemagglutinin__InfluenzaA__ABD94998

SEQ ID NO: 838 - protein, 565 aa, Artificial Sequence; identical to SEQ ID NO: 741
  derived and/or modified protein sequence (wt) from hemagglutinin__InfluenzaA__ABD95009

SEQ ID NO: 839 - protein, 565 aa, Artificial Sequence; identical to SEQ ID NO: 742
  derived and/or modified protein sequence (wt) from hemagglutinin__InfluenzaA__ABD95020

SEQ ID NO: 840 - protein, 565 aa, Artificial Sequence
  derived and/or modified protein sequence (wt) from hemagglutinin__InfluenzaA__ABD95031
MKVKLLVLLCTFTATYADTICIGYHANNSTDTVDTVLEKNVTVTHSVNLLEDSHNGKLCLLKGIAPLQLGNCSVAGWILGNPECELLISKESWSYIVETPNPENGTCYPGYFTDYEELREQLSSVSSFERFEIFPKESSWPNHTVTGVSASCSHNGKSSFYRNLLWLTGKNGLYPNLRRSYANNKEKEVLVLWGVHHPPNIGDQKALYHTENAYVSVVSSHYSRRFTPEIAKRPKVRGQEGRINYYWTLLEPGDTIIFEANGNLIAPRYAFALSRGFGSGIITSNAPMDECDAKCQTPQGAINSSLPFQNVHPVTIGECPKYVRSAKLRMVTGLRNIPSIQSRGLFGAIAGFIEGGWTGMVDGWYGYHHQNEQGSGYAADQKSTQNAINGITNKVNSIIEKMNTQFTAVGKEFNKLERRMENLNKKVDDGFLDIWTYNAELLVLLENERTLDFHDSNVKNLYEKVKSQLKNNAKEIGNGCFEFYHKCNNECMESVKNGTYDYPKYSEESKLNREKIDGVKLESMGVYQILAIYSTVASSLVLLVSLGAISFWMCSNGSLQCRICI

SEQ ID NO: 841 - protein, 565 aa, Artificial Sequence
  derived and/or modified protein sequence (wt) from hemagglutinin__InfluenzaA__ABD95042
MKAKLLVLLCTFTATYADTICIGYHANNSTDTVDTVLEKNVTVTHSVNLLEDSHNGKLCLLKGIAPLQLGNCSVAGWILGNPECELLISKESWSYIVETPNPENGTCYPGYFADYEELREQLSSVSSFERFEIFPKGSSWPNHTVTGVSASCSHNGKSSFYRNLLWLTGKNGLYPNLSMSYVNNKGKEVLVLWGVHHPPNIGDQRALYHTENAYVSVVSSHYSRRFTPEIAKRPKVRDQEGRINYYWTLLEPGDTIIFEANGNLIAPWYAFALSRGFGSGIITSNAPMGECDAKCQTPQGAINSSLPFQNVHPVTIGECPKYVRSAKLRMVTGLRNIPSIQSRGLFGAIAGFIEGGWTGMVDGWYGYHHQNEQGSGYAADQKSTQNAINGITNKVNSVIEKMNTQFTAVGKEFNKLERRMENLNKKVDDGFLDIWTYNAELLVLLENERTLDFHDSNVKNLYEKVKSQLKNNAKEIGNGCFEFYHKCNNECMESVKNGTYDYPKYSEESKLNREKIDGVKLESMGVYQILAIYSTVASSLVLLVSLGAISFWMCSNGSLQCRICI

SEQ ID NO: 842 - protein, 565 aa, Artificial Sequence; identical to SEQ ID NO: 841
  derived and/or modified protein sequence (wt) from hemagglutinin__InfluenzaA__ABD95053

SEQ ID NO: 843 - protein, 565 aa, Artificial Sequence; identical to SEQ ID NO: 800
  derived and/or modified protein sequence (wt) from hemagglutinin__InfluenzaA__ABD95064

SEQ ID NO: 844 - protein, 565 aa, Artificial Sequence
  derived and/or modified protein sequence (wt) from hemagglutinin__InfluenzaA__ABD95075
MKAKLLVLLCTFTATYADTICIGYHANNSTDTVDTVLEKNVTVTHSVNLLEDSHNGKLCLLKGIAPLQLGNCSVAGWILGNPECELLISKESWSYIVETPNPENGTCYPGYFADYEELREQLSSVSSFERFEIFPKGSSWPNHTVTGVSASCSHNGKSSFYRNLLWLTGKNGLYPNLSMSYVNNKEKEVLVLWGVHHPPNIGDQRALYHTENAYVSVVSSHYSRRFTPEIAKRPKVRDQEGRINYYWTLLEPGDTIIFEANGNLIAPWYAFALSKGFGSGIITSNAPMGECDAKCQTPQGAINSSLPFQNVHPVTIGECPKYVRSAKLRMVTGLRNIPSIQSRGLFGAIAGFIEGGWTGMVDGWYGYHHQNEQGSGYAADQKSTQNAINGITNKVNSVIEKMNTQFTAVGKEFNKLERRMENLNKKVDDGFLDIWTYNAELLVLLENERTLDFHDSNVKNLYEKVKSQLKNNAKEIGNGCFEFYHKCNNECMESVKNGTYDYPKYSEESKLNREKIDGVKLESMGVYQILAIYSTVASSLVLLVSLGAISFWMCSNGSLQCRICI

SEQ ID NO: 845 - protein, 565 aa, Artificial Sequence; identical to SEQ ID NO: 841
  derived and/or modified protein sequence (wt) from hemagglutinin__InfluenzaA__ABD95086

SEQ ID NO: 846 - protein, 565 aa, Artificial Sequence; identical to SEQ ID NO: 800
  derived and/or modified protein sequence (wt) from hemagglutinin__InfluenzaA__ABD95097

SEQ ID NO: 847 - protein, 565 aa, Artificial Sequence
  derived and/or modified protein sequence (wt) from hemagglutinin__InfluenzaA__ABD95119
MKAKLLILLCTFTATYADTICIGYHANNSTDTVDTVLEKNVTVTHSVNLLEDSHNGKLCLLKGIAPLQLGNCSVAGWILGNPECELLISKESWSYIVETPNPENGTCYPGYFADYEELREQLSSVSSFERFEIFPKGSSWPNHTVTGVSASCSHNGKSSFYRNLLWLTGKNGLYPNLSMSYVNNKEKEVLVLWGVHHPPNIGDQRALYHTENAYVSVVSSHYSRRFTPEIAKRPKVRDQEGRINYYWTLLEPGDTIIFEANGNLIAPWYAFALSRGFGSGIITSNAPMGECDAKCQTPQGAINSSLPFQNVHPVTIGECPKYVRSAKLRMVTGLRNIPSIQSRGLFGAIAGFIEGGWTGMVDGWYGYHHQNEQGSGYAADQKSTQNAINGITNKVNSVIEKMNTQFTAVGKEFNKLERRMENLNKKVDDGFLDIWTYNAELLVLLENERTLDFHDSNVKNLYEKVKSQLKNNAKEIGNGCFEFYHKCNNECMESVKNGTYDYPKYSEESKLNREKIDGVKLESMGVYQILAIYSTVASSLVLLVSLGAISFWMCSNGSLQCRICI

SEQ ID NO: 848 - protein, 565 aa, Artificial Sequence
  derived and/or modified protein sequence (wt) from hemagglutinin__InfluenzaA__ABD95130
MKAKLLVLLCTFTATYADTICIGYHANNSTDTVDTVLEKNVTVTHSVNLLEDSHNGKLCLLKGIAPLQLGNCSVAGWILGNPECELLISKESWSYIVETPNPENGTCYPGYFADYEELREQLSSVSSFERFEIFPKGSSWPNHTVTGVSASCSHNGKSSFYRNLLWLTGKNGSYPNLSMSYVNNKEKEVLVLWGVHHPPNIGDQRALYHTENAYVSVVSSHYSRRFTPEIAKRPKVRDQEGRINYYWTLLEPGDTIIFEANGNLIAPWYAFALSRGFGSGIITSNAPMGECDAKCQTPQGAINSSLPFQNVHPVTIGECPKYVRSAKLRMVTGLRNIPSIQSRGLFGAIAGFIEGGWTGMVDGWYGYHHQNEQGSGYAADQKSTQNAINGITNKVNSVIEKMNTQFTAVGKEFNKLERRMENLNKKVDDGFLDIWTYNAELLVLLENERTLDFHDSNVKNLYEKVKSQLKNNAKEIGNGCFEFYHKCNNECMESVKNGTYDYPKYSEESKLNREKIDGVKLESMGVYQILAIYSTVASSLVLLVSLGAISFWMCSNGSLQCRICI

SEQ ID NO: 849 - protein, 565 aa, Artificial Sequence; identical to SEQ ID NO: 800
  derived and/or modified protein sequence (wt) from hemagglutinin__InfluenzaA__ABD95141

SEQ ID NO: 850 - protein, 565 aa, Artificial Sequence; identical to SEQ ID NO: 800
  derived and/or modified protein sequence (wt) from hemagglutinin__InfluenzaA__ABD95152

SEQ ID NO: 851 - protein, 565 aa, Artificial Sequence; identical to SEQ ID NO: 847
  derived and/or modified protein sequence (wt) from hemagglutinin__InfluenzaA__ABD95163

SEQ ID NO: 852 - protein, 565 aa, Artificial Sequence; identical to SEQ ID NO: 841
  derived and/or modified protein sequence (wt) from hemagglutinin__InfluenzaA__ABD95174

SEQ ID NO: 853 - protein, 565 aa, Artificial Sequence
  derived and/or modified protein sequence (wt) from hemagglutinin__InfluenzaA__ABD95185
MKAKLLVLLCTFTATYADTICIGYHANNSTDTVDTVLEKNVTVTHSVNLLEDSHNGKLCLLKGIAPLQLGNCSVAGWILGNPECELLISKESWSYIVETPNPENGTCYPGYFADYEELREQLSSVSSFERFEIFPKGSSWPNHTVTGVSASCSHNGESSFYRNLLWLTGKNGLYPNLSMSYVNNKEKEVLVLWGVHHPPNIGDQRALYHTENAYVSVVSSHYSRRFTPEIAKRPKVRDQEGRINYYWTLLEPGDTIIFEANGNLIAPWYAFALSRGFGSGIITSNAPMGECDAKCQTPQGAINSSLPFQNVHPVTIGECPKYVRSAKLRMVTGLRNIPSIQSRGLFGAIAGFIEGGWTGMVDGWYGYHHQNEQGSGYAADQKSTQNAINGITNKVNSVIEKMNTQFTAVGKEFNKLERRMENLNKKVDDGFLDIWTYNAELLVLLENERTLDFHDSNVKNLYEKVKSQLKNNAKEIGNGCFEFYHKCNNECMESVKNGTYDYPKYSEESKLNREKIDGVKLESMGVYQILAIYSTVASSLVLLVSLGAISFWMCSNGSLQCRICI

SEQ ID NO: 854 - protein, 565 aa, Artificial Sequence; identical to SEQ ID NO: 841
  derived and/or modified protein sequence (wt) from hemagglutinin__InfluenzaA__ABD95196

SEQ ID NO: 855 - protein, 565 aa, Artificial Sequence; identical to SEQ ID NO: 299
  derived and/or modified protein sequence (wt) from hemagglutinin__InfluenzaA__ABD95207

SEQ ID NO: 856 - protein, 565 aa, Artificial Sequence; identical to SEQ ID NO: 800
  derived and/or modified protein sequence (wt) from hemagglutinin__InfluenzaA__ABD95218

SEQ ID NO: 857 - protein, 565 aa, Artificial Sequence; identical to SEQ ID NO: 847
  derived and/or modified protein sequence (wt) from hemagglutinin__InfluenzaA__ABD95229

SEQ ID NO: 858 - protein, 565 aa, Artificial Sequence; identical to SEQ ID NO: 800
  derived and/or modified protein sequence (wt) from hemagglutinin__InfluenzaA__ABD95240

SEQ ID NO: 859 - protein, 565 aa, Artificial Sequence; identical to SEQ ID NO: 841
  derived and/or modified protein sequence (wt) from hemagglutinin__InfluenzaA__ABD95251

SEQ ID NO: 860 - protein, 565 aa, Artificial Sequence; identical to SEQ ID NO: 299
  derived and/or modified protein sequence (wt) from hemagglutinin__InfluenzaA__ABD95262

SEQ ID NO: 861 - protein, 565 aa, Artificial Sequence; identical to SEQ ID NO: 800
  derived and/or modified protein sequence (wt) from hemagglutinin__InfluenzaA__ABD95273

SEQ ID NO: 862 - protein, 565 aa, Artificial Sequence; identical to SEQ ID NO: 296
  derived and/or modified protein sequence (wt) from hemagglutinin__InfluenzaA__ABD95284

SEQ ID NO: 863 - protein, 565 aa, Artificial Sequence; identical to SEQ ID NO: 800
  derived and/or modified protein sequence (wt) from hemagglutinin__InfluenzaA__ABD95295

SEQ ID NO: 864 - protein, 565 aa, Artificial Sequence
  derived and/or modified protein sequence (wt) from hemagglutinin__InfluenzaA__ABD95306
MKAKLLVLLCTFTATYADTICIGYHANNSTDTVDTVLEKNVTVTHSVNLLEDSHNGKLCLLKGIAPLQLGNCSVAGWILGNPECELLISKESWSYIVETPNPENGTCYPGYFADYEELREQLSSVSSFERFEIFPKGSSWPNHTVTGVSASCSHNGKSSFYRNLLWLTGKNGLYPNLSMSYVNNKEKEILVLWGVHHPPNIGDQRALYHTENAYVSVVSSHYSRRFTPEIAKRPKVRDQEGRINYYWTLLEPGDTIIFEANGNLIAPWYAFALSRGFGSGIITSNAPMGECDAKCQTPQGAINSSLPFQNVHPVTIGECPKYVRSAKLRMVTGLRNIPSIQSRGLFGAIAGFIEGGWTGMVDGWYGYHHQNEQGSGYAADQKSTQNAINGITNKVNSVIEKMNTQFTAVGKEFNKLERRMENLNKKVDDGFLDIWTYNAELLVLLENERTLDFHDSNVKNLYEKVKSQLKNNAKEIGNGCFEFYHKCNNECMESVKNGTYDYPKYSEESKLNREKIDGVKLESMGVYQILAIYSTVASSLVLLVSLGAISFWMCSNGSLQCRICI

SEQ ID NO: 865 - protein, 565 aa, Artificial Sequence; identical to SEQ ID NO: 841
  derived and/or modified protein sequence (wt) from hemagglutinin__InfluenzaA__ABD95328

SEQ ID NO: 866 - protein, 566 aa, Artificial Sequence
  derived and/or modified protein sequence (wt) from hemagglutinin__InfluenzaA__ABD95339
MKAKLLVLLCALSATDADTICIGYHANNSTDTVDTVLEKNVTVTHSVNLLEDSHNGKLCRLKGIAPLQLGKCSIAGWILGNPECESLFSKKSWSYIAETPNSENGTCYPGYFADYEELREQLSSVSSFERFEIFPKESSWPKHSVTRGVTASCSHKGKSSFYRNLLWLTEKNGSYPNLSKSYVNDKEKEVLVLWGVHHPSNIEDQKTIYRKENAYVSVVSSHYNRRFTPEIAKRPKVRDQEGRINYYWTLLEPGDTIIFEANGNLIAPWYAFALSRGFGSGIITSNVSMDECDAKCQTPQGAINSSLPFQNVHPVTIGECPKYVRSTKLRMVTGLRNIPSIQSRGLFGAIAGFIEGGWTGMIDGWYGYHHQNEQGSGYAADQKSTQNAINGITNKVNSVIEKMNTQFTAVGKEFNKLEKRMENLNKKVDDGFLDIWTYNAELLVLLENERTLDFHDSNVKNLYEKVKSQLKNNAKEIGNGCFEFYHKCNNECMESVKNGTYDYPKYSEESKLNREKIDGVKLESMGVYQILAIYSTVASSLVLLVSLGAISFWMCSNGSLQCRICI

SEQ ID NO: 867 - protein, 565 aa, Artificial Sequence; identical to SEQ ID NO: 742
  derived and/or modified protein sequence (wt) from hemagglutinin__InfluenzaA__ABE11657

SEQ ID NO: 868 - protein, 565 aa, Artificial Sequence
  derived and/or modified protein sequence (wt) from hemagglutinin__InfluenzaA__ABE11668
MKAKLLVLLCTFTATYADTICIGYHANNSTDTVDTVLEKNVTVTHSVNLLEDSHNGKLCLLKGIAPLQLGNCSVAGWILGNPECELLISKESWSYIVETPNPENGTCYPGYFADYEELREQLSSVSSFERFEIFPKESSWPNHTVTGVSASCSHNGKSSFYRNLLWLTGKNGLYPNLSMSYVNNKEKEVLVLWGVHHPPNIGDQRALYHTENAYVSVVSSHYSRRFTPEIAKRPKVRDQEGRINYYWTLLEPGDTIIFEANGNLIAPWYAFALSRGFGSGIITSNAPMDECDAKCQTPQGAINSSLPFQNVHPVTIGECPKYVRSAKLRMVTGLRNIPSIQSRGLFGAIAGFIEGGWTGMVDGWYGYHHQNEQGSGYAADQKSTQNAINGITNKVNSVIEKMNTQFTAVGKEFNKLERRMENLNKKVDDGFLDIWTYNAELLVLLENERTLDFHDSNVKNLYEKVKSQLKNNAKEIGNGCFEFYHKCNNECMESVKNGTYDYPKYSEESKLNREKIDGVKLESMGVYQILAIYSTVASSLVLLVSLGAISFWMCSNGSLQCRICI

SEQ ID NO: 869 - protein, 565 aa, Artificial Sequence
  derived and/or modified protein sequence (wt) from hemagglutinin__InfluenzaA__ABE11679
MKVKLLVLLCTFTATYADTICIGYHANNSTDTVDTVLEKNVTVTHSVNLLEDSHNGKLCLLKGIAPLQLGNCSVAGWILGNPECELLISKESWSYIVETPNPENGTCYPGYFADYEELREQLSSVSSFERFEIFPKESSWPNHTVTGVSASCSHNGKSSFYRNLLWLTGRNGLYPNLSKSYANNKEKEVLVLWGVHHPPNIGDQRALYHTENAYVSVVSSHYSRRFTPEIAKRPKVRDQEGRINYYWTLLEPGDTIIFEANGNLIAPRYAFALSRGFGSGIITSNAPMDECDAKCQTPQGAINSSLPFQNVHPVTIGECPKYVRSAKLRMVTGLRNIPSIQSRGLFGAIAGFIEGGWTGMVDGWYGYHHQNEQGSGYAADQKSTQNAINGITNKVNSVIEKMNTQFTAVGKEFNKLERRMENLNKKVDDGFLDIWTYNAELLVLLENERTLDFHDSNVKNLYEKVKSQLKNNAKEIGNGCFEFYHKCNDECMESVKNGTYDYPKYSEESKLNREKIDGVKLESMGVYQILAIYSTVASSLVLLVSLGAISFWMCSNGSLQCRICI

SEQ ID NO: 870 - protein, 565 aa, Artificial Sequence
  derived and/or modified protein sequence (wt) from hemagglutinin__InfluenzaA__ABE11690
MKAKLLVLLCTFTATYADTICIGYHANNSTDTVDTVLEKNVTVTHSVNLLEDSHNGKLCLLKGIAPLQLGNCSVAGWILGNPECELLISKESWSYIVETPNPENGTCYPGYFADYEELREQLSSVSSFERFEIFPKGSSWPNHTVTGVSASCSHNGKSSFYRNLLWLTGKNGLYPNLSMSYVNNKEKEVLVLWGVHHPPNIGNQRALYHTENAYVSVVSSHYSRRFTPEIAKRPKVRDQEGRINYYWTLLEPGDTIIFEANGNLIAPWYAFALSRGFGSGIITSNAPMGECDAKCQTPQGAINSSLPFQNVHPVTIGECPKYVRSAKLRMVTGLRNIPSIQSRGLFGAIAGFIEGGWTGMVDGWYGYHHQNEQGSGYAADQKSTQNAINGITNKVNSVIEKMNTQFTAVGKEFNKLERRMENLNKKVDDGFLDIWTYNAELLVLLENERTLDFHDSNVKNLYEKVKSQLKNNAKEIGNGCFEFYHKCNNECMESVKNGTYDYPKYSEESKLNREKIDGVKLESMGVYQILAIYSTVASSLVLLVSLGAISFWMCSNGSLQCRICI

SEQ ID NO: 871 - protein, 565 aa, Artificial Sequence
  derived and/or modified protein sequence (wt) from hemagglutinin__InfluenzaA__ABE11701
MKAKLLVLLCTFTATYADTICIGYHANNSTDTVDTVLEKNVTVTHSVNLLEDSHNGKLCLLKGIAPLQLGNCSVAGWILGNPECELLISKESWSYIVETPNPENGTCYPGYFADYEELREQLSSVSSFERFEIFPKGSSWPNHTVTGVSASCSHNGKSSFYRNLLWLTGKNGLYPNLSMSYVNNKEKEVLVLWGVHHPPNIGDQKALYHTENAYVSVVSSHYSRRFTPEIAKRPKVRDQEGRINYYWTLLEPGDTIIFEANGNLIAPWYAFALSRGFGSGIITSNAPMGECDAKCQTPQGAINSSLPFQNVHPVTIGECPKYVRSAKLRMVTGLRNIPSIQSRGLFGAIAGFIEGGWTGMVDGWYGYHHQNEQGSGYAADQKSTQNAINGITNKVNSIIEKMNTQFTAVGKEFNKLERRMENLNKKVDDGFLDIWTYNAELLVLLENERTLDFHDSNVKNLYEKVKSQLKNNAKEIGNGCFEFYHKCNNECMESVKNGTYDYPKYSEESKLNREKIDGVKLESMGVYQILAIYSTVASSLVLLVSLGAISFWMCSNGSLQCRICI

SEQ ID NO: 872 - protein, 565 aa, Artificial Sequence; identical to SEQ ID NO: 800
  derived and/or modified protein sequence (wt) from hemagglutinin__InfluenzaA__ABE11712

SEQ ID NO: 873 - protein, 565 aa, Artificial Sequence; identical to SEQ ID NO: 841
  derived and/or modified protein sequence (wt) from hemagglutinin__InfluenzaA__ABE11723

SEQ ID NO: 874 - protein, 565 aa, Artificial Sequence; identical to SEQ ID NO: 847
  derived and/or modified protein sequence (wt) from hemagglutinin__InfluenzaA__ABE11734

SEQ ID NO: 875 - protein, 565 aa, Artificial Sequence; identical to SEQ ID NO: 800
  derived and/or modified protein sequence (wt) from hemagglutinin__InfluenzaA__ABE11812

SEQ ID NO: 876 - protein, 565 aa, Artificial Sequence; identical to SEQ ID NO: 841
  derived and/or modified protein sequence (wt) from hemagglutinin__InfluenzaA__ABE11823

SEQ ID NO: 877 - protein, 565 aa, Artificial Sequence; identical to SEQ ID NO: 841
  derived and/or modified protein sequence (wt) from hemagglutinin__InfluenzaA__ABE11834

SEQ ID NO: 878 - protein, 565 aa, Artificial Sequence; identical to SEQ ID NO: 841
  derived and/or modified protein sequence (wt) from hemagglutinin__InfluenzaA__ABE11845

SEQ ID NO: 879 - protein, 565 aa, Artificial Sequence; identical to SEQ ID NO: 847
  derived and/or modified protein sequence (wt) from hemagglutinin__InfluenzaA__ABE11856

SEQ ID NO: 880 - protein, 566 aa, Artificial Sequence
  derived and/or modified protein sequence (wt) from hemagglutinin__InfluenzaA__ABE11900
MKAKLLVLLCAFTATYADTICIGYHANNSTDTVDTVLEKNVTVTHSVNLLEDSHNGKLCRLKGTAPLQLGNCSVAGWILGNPECESLFSKESWSYIAETPNPENGTCYPGYFADYEELREQLSSVSSFERFEIFPKESSWPNHTVTKGVTASCSHNGKSSFYKNLLWLTEKNGLYPNLSKSYVNNKEKEVLVLWGVHHPSNIGDQRAIYHTENAYVSVVSSHYSRRFTPEIAKRPKVRDQEGRINYYWTLLEPGDTIIFEANGNLIAPWYAFALSRGFGSGIITSNASMGECDAKCQTPQGAINSSLPFQNVHPVTIGECPKYVRSTKLRMVTGLRNIPSIQSRGLFGAIAGFIEGGWTGMIDGWYGYHHQNEQGSGYAADQKSTQNAINGITNKVNSVIEKMNTQFTAVGKEFNKLERRMENLNKKVDDGFLDIWTYNAELLVLLENERTLDFHDSNVKNLYEKVKTQLKNNAKEIGNGCFEFYHKCNNECMESVKNGTYDYPKYSEESKLNREKIDGVKLESMGVYQILAIYSTVASSLVLLISLGAISFWMCSNGSLQCRICI

SEQ ID NO: 881 - protein, 566 aa, Artificial Sequence
  derived and/or modified protein sequence (wt) from hemagglutinin__InfluenzaA__ABE11942
MKAKLLVLLCAFTATYADTICIGYHANNSTDTVDTVLEKNVTVTHSVNLLEDSHNGKLCRLKGTAPLQLGNCSVAGWILGNPECESLFSKESWSYIAETPNPENGTCYPGYFADYEELREQLSSVSSFERFEIFPKESSWPNHTVTKGVTASCSHNGKSSFYKNLLWLTEKNGLYPSLSKSYVNNKEKEVLVLWGVHHPSNIGDQRAIYHTENAYVSVVSSHYSRRFTPEIAKRPKVRDQEGRINYYWTLLEPGDTIIFEANGNLIAPWYAFALSRGFGSGIITSNASMGECDAKCQTPQGAINSSLPFQNVHPVTIGECPKYVRSTKLRMVTGLRNIPSIQSRGLFGAIAGFIEGGWTGMIDGWYGYHHQNEQGSGYAADQKSTQNAINGITNKVNSVIEKMNTQFTAVGKEFNKLERRMENLNKKVDDGFLDIWTYNAELLVLLENERTLDFHDSNVKNLYEKVKTQLKNNAKEIGNGCFEFYHKCNNECMESVKNGTYDYPKYSEESKLNREKIDGVKLESMGVYQILAIYSTVASSLVLLVSLGAISFWMCSNGSLQCRICI

SEQ ID NO: 882 - protein, 566 aa, Artificial Sequence
  derived and/or modified protein sequence (wt) from hemagglutinin__InfluenzaA__ABE12078
MKTIIALSYILCLVFAQKLPGNDNSTATLCLGHHAVPNGTLVKTITNDQIEVTNATELVQSSSTGGICDSPHQILDGENCTLIDALLGDPHCDGFQNKEWDLFVERSKAYSNCYPYDVPDYASLRSLVASSGTLEFNNESFNWTGVAQNGTSSACKRRSNKSFFSRLNWLHQLKYKYPALNVTMPNNEKFDKLYIWGVHHPSTDSDQISLYAQAPGRVTVSTKRSQQTVIPNIGSRPWVRGVSSRISIYWTIVKPGDILLINCTGNLIAPRGYFKIRSGKSSIMRSDASIGKCNSECITPNGSIPNDKPFQNVNRITYGACPRYVKQNTLKLATGMRNVPEKQTRGIFGAIAGFIENGWEGMVDGWYGFRHQNSEGTGQAADLKSTQAAINQINGKLNRLIEKTNEKFHQIEKEFSEVEGRIQDLEKYVEDTKIDLWSYNAELLVALENQHTIDLTDSEMNKLFEKTKKQLRENAEDMGNGCFKIYHKCDNACIGSIRNGTYDHDVYRDEALNNRFQIKGVELKSGYKDWILWISFAISCFLLCVVLLGFIMWACQKGNIRCSICI

SEQ ID NO: 883 - protein, 566 aa, Artificial Sequence; identical to SEQ ID NO: 777
  derived and/or modified protein sequence (wt) from hemagglutinin__InfluenzaA__ABE12123

SEQ ID NO: 884 - protein, 565 aa, Artificial Sequence; identical to SEQ ID NO: 800
  derived and/or modified protein sequence (wt) from hemagglutinin__InfluenzaA__ABE12248

SEQ ID NO: 885 - protein, 566 aa, Artificial Sequence
  derived and/or modified protein sequence (wt) from hemagglutinin__InfluenzaA__ABE12623
MKTIIALSYIFCLVLGQDLPGNDNSTATLCLGHHAVPNGTLVKTITNDQIEVTNATELVQSSSTGKICNNPHRILDGIDCTLIDALLGDPHCDGFQNETWDLFVERSKAFSNCYPYDVPDYASLRSLVASSGTLEFINEGFTWTGVTQNGGSNACKRGPDSGFFSRLNWLYKSGSTYPVLNVTMPNNDNFDKLYIWGVHHPSTNQEQTSLYVQASGRVTVSTKRSQQTIIPNIGSRPWVRGLSSRISIYWTIVKPGDILVINSNGNLIAPRGYFKMRTGKSSIMRSDAPIGTCISECITPNGSIPNDKPFQNVNKITYGACPKYVKQNTLKLATGMRNVPEKQTRGLFGAIAGFIENGWEGMIDGWYGFRHQNSEGTGQAADLKSTQAAIDQINGKLNRVIEKTNEKFHQIEKEFSEVEGRIQDLEKYVEDTKIDLWSYNAELLVALENQHTIDLTDSEMNKLFEKTRRQLRENAEDMGNGCFRIYHKCDNACIGSIRNGTYDHDVYRDEALNNRFQIKGVELKSGYKDWILWISFAISCFLLCVVLLGFIMWACQKGNIRCNICI

SEQ ID NO: 886 - protein, 566 aa, Artificial Sequence; identical to SEQ ID NO: 830
  derived and/or modified protein sequence (wt) from hemagglutinin__InfluenzaA__ABE12645

SEQ ID NO: 887 - protein, 566 aa, Artificial Sequence; identical to SEQ ID NO: 807
  derived and/or modified protein sequence (wt) from hemagglutinin__InfluenzaA__ABE13076

SEQ ID NO: 888 - protein, 566 aa, Artificial Sequence; identical to SEQ ID NO: 783
  derived and/or modified protein sequence (wt) from hemagglutinin__InfluenzaA__ABE13323

SEQ ID NO: 889 - protein, 566 aa, Artificial Sequence
  derived and/or modified protein sequence (wt) from hemagglutinin__InfluenzaA__ABE13471
MKTIIALSYILCLVFAQKLPGNDNSTATLCLGHHAVPNGTLVKTITNDQIEVTNATELVQNSSTGRICDSPHRILDGKNCTLIDALLGDPHCDGFQNKEWDLFVERSKAYSNCYPYDVPDYASLRSLVASSGTLEFYNESFNWTGVAQNGTSYACKRRSVKSFFSRLNWLHKLEYKYPALNVTMPNNDKFDKLYIWGVHHPSTDSDQTSLYVQASGRVTVSTKRSQQTVIPNIGSRPWVRGVSSRISIYWTIVKPGDILLINSTGNLIAPRGYFKIRSGKSSIMRSDAPIGNCNSECITPNGSIPNDKPFQNVNRITYGACPRYVKQNTLKLATGMRNVPEKQTRGIFGAIAGFIENGWEGMVDGWYGFRHQNSEGTGQAADLKSTQAAINQINGKLNRLIEKTNEKFHQIEKEFSEVEGRIQDLEKYVEDTKIDLWSYNAELLVALENQHTIDLTDSEMNKLFERTRKQLRENAEDMGNGCFRIYHKCDNACIGSIRNGTYDHDVYRDEALNNRFQIKGVELKSGYKDWILWISFAISCFLLCVVLLGFIMWACQKGNIRCNICI

SEQ ID NO: 890 - protein, 566 aa, Artificial Sequence
  derived and/or modified protein sequence (wt) from hemagglutinin__InfluenzaA__ABE13555
MKTIIALSYILCLVFAQKLPGNDNSTATLCLGHHAVPNGTLVKTITNDQIEVTNATELVQGSSTGRICDSPHRILDGKNCTLIDALLGDPHCDGFQNKEWDLFVERSKAYSNCYPYDVPDYASLRSLVASSGTLEFNNESFNWTGVAQNGTSYACKRRSVKSFFSRLNWLHKLEYKYPALNVTMPNNDKFDKLYIWGVHHPSTDSDQTSLYVQASGRVTVSTKRSQQTVIPNIGSRPWVRGVSSRISIYWTIVKPGDILLISSTGNLIAPRGYFKIRSGKSSIMRSDAPIDNCNSECITPNGSIPNDKPFQNVNRITYGACPRYVKQNTLKLATGMRNVPEKQTKGIFGAIAGFIENGWEGMVDGWYGFRHQNSEGTGQAADLKSTQAAINQINGKLNRLIEKTNEKFHQIEKEFSEVEGRIQDLEKYVEDTKIDLWSYNAELLVALENQHTIDLTDSEMNKLFERTRKQLRENAEDMGNGCFKIYHKCDNACIGSIRNGTYDHDVYRDEALNNRFQIKGVELKSGYKDWILWISFAMSCFLLCVVLLGFIMWACQKGNIRCNICI

SEQ ID NO: 891 - protein, 566 aa, Artificial Sequence
  derived and/or modified protein sequence (wt) from hemagglutinin__InfluenzaA__ABE13606
MKTIIALSYILCLVFAQKLPGNDNSTATLCLGHHAVPNGTLVKTITNDQIEVTNATEMVQSSSTGRICDSPHRILDGKNCTLIDALLGDPHCDGFQNKEWDLFVERSKAYSNCYPYDVPDYASLRSLVASSGTLEFTNEGFNWTGVAQDGTSYACKRGSVKSFFSRLNWLHKLEYKYPALNVTMPNNDKFDKLYIWGVHHPSTDSDQTSLYVQASGRVTVSTKRSQQTVIPNIGSRPWVRGVSSRISIYWTIVKPGDILLINSTGNLIAPRGYFKIRSGKSSIMRSDAPIGNCNSECITPNGSIPNDKPFQNVNRITYGACPRYVKQNTLKLATGMRNVPEKQTRGIFGAIAGFIENGWEGMVDGWYGFRHQNSEGTGQAADLKSTQAAINQINGKLNRLIEKTNEKFHQIEKEFSEVEGRIQDLEKYVEDTKIDLWSYNAELLIALENQHTIDLTDSEMNKLFERTRKQLRENAEDMGNGCFKIYHKCDNACIGSIRNGTYDHDVYRDEALNNRFQIKGVELKSGYKDWILWISFAISCFLLCVVLLGFIMWACQKGNIRCNICI

SEQ ID NO: 892 - protein, 566 aa, Artificial Sequence
  derived and/or modified protein sequence (wt) from hemagglutinin__InfluenzaA__ABE13628
MKTIIALSYILCLVFAQKLPGNDNSTATLCLGHHAVPNGTLVKTITNDQIEVTNATELVQSSSTGRICDSPHRILDGKNCTLIDALLGDPHCDGFQNKEWDLFVERSKAYSNCYPYDVPDYASLRSLVASSGTLEFTNEGFNWTGVAQDGKSYACKRGSVNSFFSRLNWLHKLEYKYPALNVTMPNNDKFDKLYIWGVHHPSTDSDQTSLYVQASGRVTVSTKRSQQTVIPNIGSRPWVRGISSRISIYWTIVKPGDILLINSTGNLIAPRGYFKIRNGKSSIMRSDAPIDNCNSECITPNGSIPNDKPFQNVNRITYGACPRYVKQNTLKLATGMRNVPEKQTRGIFGAIAGFIENGWEGMVDGWYGFRHQNSEGTGQAADLKSTQAAIDQINGKLNRLIEKTNEKFHQIEKEFSEVEGRIQDLEKYVEDTKIDLWSYNAELLVALENQHTIDLTDSEMNKLFERTRKQLRENAEDMGNGCFKIYHKCDNACIGSIRNGTYDHDVYRDEALNNRFQIKGVELKSGYKDWILWISFAISCFLLCVVLLGFIMWACQKGNIRCNICI

SEQ ID NO: 893 - protein, 566 aa, Artificial Sequence
  derived and/or modified protein sequence (wt) from hemagglutinin__InfluenzaA__ABE13824
MKTIIALSYILCQVFAQKLPGNDNSTATLCLGHHAVPNGTLVKTITNDQIEVTNATELVQSSSTGRICDSPHRILDGKNCTLIDALLGDPHCDGFQNKEWDLFVERSKAYSNCYPYDVPDYASLRSLVASSGTLEFTNEGFNWTGVAQDGKSYACKRGSVNSFFSRLNWLHKLEYKYPALNVTMPNNDKFDKLYIWGVHHPSTDSDQTSLYVQASGRVTVSTKRSQQTVIPNIGSRPWVRGISSRISIYWTIVKPGDILLINSTGNLIAPRGYFKIRNGKSSIMRSDAPIDNCNSECITPNGSIPNDKPFQNVNRITYGACPRYVKQNTLKLATGMRNVPEKQTRGIFGAIAGFIENGWEGMVDGWYGFRHQNSEGTGQAADLKSTQAAIDQINGKLNRLIEKTNEKFHQIEKEFSEVEGRIQDLEKYVEDTKIDLWSYNAELLVALENQHTIDLTDSEMNKLFERTRKQLRENAEDMGNGCFKIYHKCDNACIGSIRNGTYDHDVYRDEALNNRFQIKGVELKSGYKDWILWISFAISCFLLCVVLLGFIMWACQKGNIRCNICI

SEQ ID NO: 894 - protein, 566 aa, Artificial Sequence; identical to SEQ ID NO: 893
  derived and/or modified protein sequence (wt) from hemagglutinin__InfluenzaA__ABE14019

SEQ ID NO: 895 - protein, 566 aa, Artificial Sequence
  derived and/or modified protein sequence (wt) from hemagglutinin__InfluenzaA__ABE14030
MKTIIALSYILCLVFAQKLPGNDNSTATLCLGHHAVPNGTLVKTITNDQIEVTNATELVQSSSIGRICDSPHRILDGKNCTLIDALLGDPHCDGFQNKEWDLFVERSKAYSNCYPYDVPDYASLRSLVASSGTLEFTNEGFNWTGVAQDGKSYACKRGSVNSFFSRLNWLHKLEYKYPALNVTMPNNDKFDKLYIWGVHHPSTDSDQTSLYVQASGRVTVSTKRSQQTVIPNIGSRPWVRGISSRISIYWTIVKPGDILLINSTGNLIAPRGYFKIRNGKSSIMRSDAPIDNCNSECITPNGSIPNDKPFQNVNRITYGACPRYVKQNTLKLATGMRNVPEKQTRGIFGAIAGFIENGWEGMVDGWYGFRHQNSEGTGQAADLKSTQAAIDQINGKLNRLIEKTNEKFHQIEKEFSEVEGRIQDLEKYVEDTKIDLWSYNAELLVALENQHTIDLTDSEMNKLFERTRKQLRENAEDMGNGCFKIYHKCDNACIGSIRNGTYDHDVYRDEALNNRFQIKGVELKSGYKDWILWISFAISCFLLCVVLLGFIMWACQKGNIRCNICI

SEQ ID NO: 896 - protein, 566 aa, Artificial Sequence; identical to SEQ ID NO: 892
  derived and/or modified protein sequence (wt) from hemagglutinin__InfluenzaA__ABE14041

SEQ ID NO: 897 - protein, 566 aa, Artificial Sequence; identical to SEQ ID NO: 893
  derived and/or modified protein sequence (wt) from hemagglutinin__InfluenzaA__ABE14063

SEQ ID NO: 898 - protein, 566 aa, Artificial Sequence
  derived and/or modified protein sequence (wt) from hemagglutinin__InfluenzaA__ABE14124
MKTIIALSYILCLVFAQKLPGNDNSTATLCLGHHAVPNGTLVKTITNDQIEVTNATELVQSSSTGRICDSPHRILDGKNCTLIDALLGDPHCDGFQNKEWDLFVERSKAYSNCYPYDVPDYASLRSLVASSGTLEFTNEGFNWTGVAQDGTSYACKRGSVKSFFSRLNWLHKLEYKYPALNVTMPNNDKFDKLYIWGVHHPSTDSDQTSLYVQASGRVTVSTKRSQQTVIPNIGSRPWVRGVSSRISIYWTIVKPGDILLINSTGNLIAPRGYFKIRSGKSSIMRSDAPIGNCNSECITPNGSIPNDKPFQNVNRITYGACPRYVKQNTLKLATGMRNVPEKQTRGIFGAIAGFIENGWEGMVDGWYGFRHQNSEGTGQAADLKSTQAAINQINGKLNRLIEKTNEKFHQIEKEFSEVEGRIQDLEKYVEDTKIDLWSYNAELLIALENQHTIDLTDSEMNKLFERTRKQLRENAEDMGNGCFKIYHKCDNACIGSIRNGTYDHDVYRDEALNNRFQIKGVELKSGYKDWILWISFAISCFLLCVVLLGFIMWACQKGNIRCNICI

SEQ ID NO: 899 - protein, 566 aa, Artificial Sequence
  derived and/or modified protein sequence (wt) from hemagglutinin__InfluenzaA__ABE14464
MKTIIALSYILCQVFAQKLPGNDNSTATLCLGHHAVPNGTLVKTITNDQIEVTNATELVQSSSTGRICDSPHRILDGKNCTLIDALLGDPHCDGFQNKEWDLFVERSKAYSNCYPYDVPDYASLRSLVASSGTLEFTNEGFNWTGVAQDGKSYACKRGSVNSFFSRLNWLHKLEYKYPALNVTMPNNDKFDKLYIWGVHHPSTDSDQTSLYVQASGRVTVSTKRSQQTVIPNIGSRPWVRGISSRISIYWTIVKPGDILLINSTGNLIAPRGYFKIRNGKSSIMRSDAPIDNCNSECITPNGSIPNDKPFQNVNRITYGACPRYVKQNTLKLATGMRNVPEKQTRGIFGAIAGFIENGWEGMIDGWYGFRHQNSEGTGQAADLKSTQAAIDQINGKLNRLIEKTNEKFHQIEKEFSEVEGRIQDLEKYVEDTKIDLWSYNAELLVALENQHTIDLTDSEMNKLFERTRKQLRENAEDMGNGCFKIYHKCDNACIGSIRNGTYDHDVYRDEALNNRFQIKGVELKSGYKDWILWISFAISCFLLCVVLLGFIMWACQKGNIRCNICI

SEQ ID NO: 900 - protein, 566 aa, Artificial Sequence
  derived and/or modified protein sequence (wt) from hemagglutinin__InfluenzaA__ABE14840
MKTIIALSYILCLVFAQKLPRNDNSTATLCLGHHAVPNGTLVKTITNDQIEVTNATELVQSSSTGRICDSPHRILDGKNCTLIDALLGDPHCDGFQNKEWDLFVERSKAYSNCYPYDVPDYASLRSLVASSGTLEFTNEGFNWTGVAQDGKSYACKRGSVNSFFSRLNWLHKLEYKYPALNVTMPNNDKFDKLYIWGVHHPSTDSDQTSLYVQASGRVTVSTKRSQQTVIPNIGSRPWVRGISSRISIYWTIVKPGDILLISSTGNLIAPRGYFKIRNGKSSIMRSDAPIDNCNSECITPNGSIPNDKPFQNVNRITYGACPRYVKQNTLKLATGMRNVPEKQTRGIFGAIAGFIENGWEGMVDGWYGFRHQNSEGTGQAADLKSTQAAIDQINGKLNRLIEKTNEKFHQIEKEFSEVEGRIQDLEKYVEDTKIDLWSYNAELLVALENQHTIDLTDSEMNKLFERTRKQLRENAEDMGNGCFKIYHKCDNACIGSIRNGTYDHDVYRDEALNNRFQIKGVELKSGYKDWILWISFAISCFLLCVVLLGFIMWACQKGNIRCSICI

SEQ ID NO: 901 - protein, 566 aa, Artificial Sequence
  derived and/or modified protein sequence (wt) from hemagglutinin__InfluenzaA__ABE15578
MKTIIALSYILCLVFAQKLPGNDNSTATLCLGHHAVPNGTLVKTITNDQIEVTNATELVQSSSTGRICDSPHRILDGKNCTLIDALLGDPHCDGFQNKEWDLFVERSKAYSNCYPYDVPDYASLRSLVASSGTLEFTNEGFNWTGVAQDGKSYACKRGSVNSFFSRLNWLHKLEYKYPALNVTMPNNDKFDKLYIWGVHHPSTDSDQTSLYVQASGRVTVSTKRSQQTVIPNIGSRPWVRGISSRISIYWTIVKPGDILLINSTGNLIAPRGYFKIRNGKSSIMRSDAPIDNCNSECITPNGSIPNDKPFQNVNRITYGACPRYVKQNTLKLATGMRNVPEKQTRGIFGAIAGFIENGWEGMVDGWYGFRHQNSEGTGQAADLKSTQAAIDQINGKLNRLIEKTNEKFHQIEKEFSEVEGRIQDLEKYVEDTKIDLWSYNAELLVALENQHTIDLTDSEMNKLFERTRKQLRENAEDMGNGCFKIYHKCDNACIGSIRNGTYDHDVYRDEALNNRFQIKGVELKSGYKDWILWISFAISCFLLCVVLLGFIMWACQKGNIRCSICI

SEQ ID NO: 902 - protein, 566 aa, Artificial Sequence
  derived and/or modified protein sequence (wt) from hemagglutinin__InfluenzaA__ABE26991
MKAKLLVLLCAFTATYADTICIGYHANNSTDTVDTVLEKNVTVTHSVNLLEDSHNGKLCRLKGTAPLQLGNCSVAGWILGNPECESLFSKESWSYIAETPNPENGTCYPGYFADYEELREQLSSVSSFERFEIFPKESSWPNHTVTKGVTASCSHNGKSSFYKNLLWLTEKNGLYPNLSKSYVNNKEKEVLVLWGVHHPSNIGDQRAIYHTENAYVSVVSSHYSRRFTPEIAKRPKVRDQEGRINYYWTLLEPGDTIIFEANGNLIAPWYAFALSRGFGSGIITSNASMGDCDAKCQTPQGAINSSLPFQNVHPVTIGECPKYVRSTKLRMVTGLRNIPSIQSRGLFGAIAGFIEGGWTGMIDGWYGYHHQNEQGSGYAADKKSTQNAIDGITNKVNSVIEKMNTQFTAVGKEFNKLERRMENLNKKVDDGFLDIWTYNAELLVLLENERTLDFHDSNVKNLYEKVKNQLKNNAKEIGNGCFEFYHKCNNECMESVKNGTYDYPKYSEESTLKREKIDGVKLESMGVYQILAIYSTVASSLVLLVSLGAISFWMCSNGSLQCRICI

SEQ ID NO: 903 - protein, 566 aa, Artificial Sequence
  derived and/or modified protein sequence (wt) from hemagglutinin__InfluenzaA__ABF47550
MKTIIALSYIFCLVFAQKLPGNDNSTATLCLGHHAVPNGTLVKTITNDQIEVTNATELVQSSSTGRICDSPHRILDGKNCTLIDALLGDPHCDGFQNEKWDLFVERSKAYSNCYPYDVPDYASLRSLVASSGTLEFINEDFNWTGVTQSGGSYACKRGSVNSFFSRLNWLHESEYKYPALNVTMPNNGKFDKLYIWGVHHPSTDREQTNLYVRASGRVTVSTKRSQQTVIPNIGSRPWVRGLSSRISIYWTIVKPGDILLINSTGNLIAPRGYFKIRTGKSSIMRSDAPIGTCSSECITPNGSIPNDKPFQNVNKITYGACPRYVKQNTLKLATGMRNVPEKQTRGIFGAIAGFIENGWEGMVDGWYGFRHQNSEGTGQAADLKSTQAAIDQINGKLNRLIEKTNEKFHQIEKEFSEVEGRIQDLEKYVEDTKIDLWSYNAELLVALENQHTIDLTDSEMNKLFEKTRKQLRENAEDMGNGCFKIYHKCDNACIGSIRNGTYDHDVYRDEALNNRFQIKGVELKSGYKDWILWISFAISCFLLCVVLLGFIMWACQKGNIRCNICI

SEQ ID NO: 904 - protein, 565 aa, Artificial Sequence
  derived and/or modified protein sequence (wt) from hemagglutinin__InfluenzaA__ABF47561
MKAKLLVLLCTFTATYADTICIGYHANNSTDTVDTVLEKNVTVTHSVNLLEDSHNGKLCLLKGIAPLQLGNCSVAGWILGNPECELLISKESWSYIVETPNPENGTCYPGYFADYEELREQLSSVSSFERFEIFPKGSSWPNHTVTGVSASCSHNGKSSFYRNLLWLTGKNGLYPKLSMSYVNNKEKEVLVLWGVHHPPNIGDQRALYHTENAYVSVVSSHYSRRFTPEIAKRPKVRDQEGRINYYWTLLEPGDTIIFEANGNLIAPWYAFALSRGFGSGIITSNAPMGECDAKCQTPQGAINSSLPFQNVHPVTIGECPKYVRSAKLRMVTGLRNIPSIQSRGLFGAIAGFIEGGWTGMVDGWYGYHHQNEQGSGYAADQKSTQNAINGITNKVNSVIEKMNTQFTAVGKEFNKLERRMENLNKKVDDGFLDIWTYNAELLVLLENERTLDFHDSNVKNLYEKVKSQLKNNAKEIGNGCFEFYHKCNNECMESVKNGTYDYPKYSEESKLNREKIDGVKLESMGVYQILAIYSTVASSLVLLVSLGAISFWMCSNGSLQCRICI

SEQ ID NO: 905 - protein, 565 aa, Artificial Sequence
  derived and/or modified protein sequence (wt) from hemagglutinin__InfluenzaA__ABF47572
MKAKLLVLLCTFTATYADTICIGYHANNSTDTVDTVLEKNVTVTHSVNLLEDSHNGKLCLLKGIAPLQLGNCSVAGWILGNPECELLISKESWSYIVETPNPENGTCYPGYFADYEELREQLSSVSSFERFEIFPKGSSWPNHTVTGVSASCSHNGKSSFYRNLLWLTGKNGLYPNLSMSYVNNKDKEVLVLWGVHHPPNIGDQRALYHTENAYVSVVSSHYSRRFTPEIAKRPKVRDQEGRINYYWTLLEPGDTIIFEANGNLIAPWYAFALSRGFGSGIITSNAPMGECDAKCQTPQGAINSSLPFQNVHPVTIGECPKYVRSAKLRMVTGLRNIPSIQSRGLFGAIAGFIEGGWTGMVDGWYGYHHQNEQGSGYAADQKSTQNAINGITNKVNSVIEKMNTQFTAVGKEFNKLERRMENLNKKVDDGFLDIWTYNAELLVLLENERTLDFHDSNVKNLYEKVKSQLKNNAKEIGNGCFEFYHKCNNECMESVKNGTYDYPKYSEESKLNREKIDGVKLESMGVYQILAIYSTVASSLVLLVSLGAISFWMCSNGSLQCRICI

SEQ ID NO: 906 - protein, 565 aa, Artificial Sequence; identical to SEQ ID NO: 800
  derived and/or modified protein sequence (wt) from hemagglutinin__InfluenzaA__ABF47583

SEQ ID NO: 907 - protein, 566 aa, Artificial Sequence
  derived and/or modified protein sequence (wt) from hemagglutinin__InfluenzaA__ABF47594
MKTIIALSYILCLVFAQKLPGNDNSTATLCLGHHAVPNGTLVKTITNDQIEVTNATELVQSSSTGRICDSPHRILDGKNCTLIDALLGDPHCDGFQNKEWDLFVERSKAYSNCYPYDVPDYASLRSLVASSGTLEFNNESFNWTGVAQNGTSYACKRRSVKSFFSRLNWLHKLEYKYPAQNVTMPNNDKFDKLYIWGVHHPSTDSDQTSLYVQASGRVTVSTKRSQQTVIPNIGSRPWVRGVSSRISIYWTIVKPGDILLINSTGNLIAPRGYFKIRSGKSSIMRSDAPIGNCNSECITPNGSIPNDKPFQNVNRITYGACPRYVKQNTLKLATGMRNVPEKQTRGIFGAIAGFIENGWEGMVDGWYGFRHQNSEGTGQAADLKSTQAAINQINGKLNRLIEKTNEKFHQIEKEFSEVEGRIQDLEKYVEDTKIDLWSYNAELLVALENQHTIDLTDSEMNKLFERTRKQLRENAEDMGNGCFKIYHKCDNACIGSIRNGTYDHDVYRDEALNNRFQIKGVELKSGYKDWILWISFAISCFLLCVVLLGFIMWACQKGNIRCNICI

SEQ ID NO: 908 - protein, 566 aa, Artificial Sequence
  derived and/or modified protein sequence (wt) from hemagglutinin__InfluenzaA__ABF47605
MKAKLLVLLCAFTATYADTICIGYHANNSTDTVDTVLEKNVTVTHSVNLLEDSHNGKLCRLKGTAPLQLGNCSVAGWILGNPECESLFSKESWSYIAETPNPENGTCYPGYFADYEELREQLSSVSSFERFEIFPKESSWPNHTVTKGVTASCSHNGKSSFYKNLLWLTEKNGLYPNLSKSYVNNKEKEVLVLWGVHHPSNIGDQRAIYHTENAYVSVVSSHYSRRFTPEIAKRPKVRDQEGRINYYWTLLEPGDTIIFEASGNLIAPWYAFALSRGFGSGIITSNASMGECDAKCQTPQGAINSSLPFQNVHPVTIGECPKYVRSTKLRMVTGLRNIPSIQSRGLFGAIAGFIEGGWTGMIDGWYGYHHQNEQGSGYAADKKSTQNAIDGITNKVNSVIEKMNTQFTAVGKEFNKLERRIENLNKKVDDGFLDIWTYNAELLVLLENERTLDFHDSNVKNLYEKVKNQLKNNAKEIGNGCFEFYHKCNNECMESVKNGTYDYPKYSEESKLKREKIDGVKLESMGVYQILAIYSTVASSLVLLVSLGAISFWMCSNGSLQCRICI

SEQ ID NO: 909 - protein, 566 aa, Artificial Sequence; identical to SEQ ID NO: 893
  derived and/or modified protein sequence (wt) from hemagglutinin__InfluenzaA__ABF47616

SEQ ID NO: 910 - protein, 566 aa, Artificial Sequence
  derived and/or modified protein sequence (wt) from hemagglutinin__InfluenzaA__ABF47627
MKAKLLVLLCAFTATYADTICIGYHANNSTDTVDTVLEKNVTVTHSVNLLEDSHNGKLCRLKGTAPLQLGNCSVAGWILGNPECESLFSKESWSYIAETPNPENGTCYPGYFADYEELREQLSSVSSFERFEIFPKESSWPNHTVTKGVTASCSHNGKSSFYKNLLWLTEKNGLYPNLSKSYVNNKEKEVLVLWGVHHPSNIGDQRAIYHTENAYVSVVSSHYSRRFTPEIAKRPKVRDQEGRINYYWTLLEPGDTIIFEANGNLIAPWYAFALSRGFGSGIITSNASMGDCDAKCQTPQGAINSSLPFQNVHPVTIGECPKYVRSTKLRMVTGLRNIPSIQSRGLFGAIAGFIEGGWTGMIDGWYGYHHQNEQGSGYAADKKSTQNAIDGITNKVNSVIEKMNTQFTAVGKEFNKLERRMENLNKKVDDGFLDIWTYNAELLVLLENERTLDFHDSNVKNLYEKVKNQLKNNAKEIGNGCFEFYHKCNNECMESVKNGTYDYPKYSEESKLKREKIDGVKLESMGVYQILAIYSTVASSLVLLVSLGAISFWMCSNGSLQCRICI

SEQ ID NO: 911 - protein, 566 aa, Artificial Sequence
  derived and/or modified protein sequence (wt) from hemagglutinin__InfluenzaA__ABF47638
MKAKLLVLLCAFTATYADTICIGYHANNSTDTVDTVLEKNVTVTHSVNLLEDSHNGKLCRLKGTAPLQLGNCSVAGWILGNPECESLFSKESWSYIAETPNPENGTCYPGYFADYEELREQLSSVSSFERFEIFPKESSWPNHTVTKGVTASCSHNGKSSFYKNLLWLTEKNGLYPNLSKSYVNNKEKEVLVLWGVHHPSNIGDQRAIYHTENAYVSVVSSHYSRRFTPEITKRPKVRDQEGRINYYWTLLEPGDTIIFEANGNLIAPWYAFALSRGFGSGIITSNASMGECDAKCQTPQGAINSSLPFQNVHPVTIGECPKYVRSTKLRMVTGLRNIPSIQSRGLFGAIAGFIEGGWTGMIDGWYGYHHQNEQGSGYAADQKSTQNAIDGITNKVNSVIEKMNTQFTAVGKEFNKLERRMENLNKKVDDGFLDIWTYNAELLVLLENERTLDFHDSNVKNLYEKVKTQLKNNAKEIGNGCFEFYHKCNNECMESVKNGTYDYPKYSEESKLNREKIDGVKLESMGVYQILAIYSTVASSLVLLVSLGAISFWMCSNGSLQCRICI

SEQ ID NO: 912 - protein, 566 aa, Artificial Sequence; identical to SEQ ID NO: 911
  derived and/or modified protein sequence (wt) from hemagglutinin__InfluenzaA__ABF47649

SEQ ID NO: 913 - protein, 566 aa, Artificial Sequence
  derived and/or modified protein sequence (wt) from hemagglutinin__InfluenzaA__ABF47660
MKAKLLVLLCAFTATYADTICIGYHANNSTDTVDTVLEKNVTVTHSVNLLEDSHNGKLCRLKGTAPLQLGNCSVAGWILGNPECESLFSKESWSYIAETPNPENGTCYPGYFADYEELREQLSSVSSFERFEIFPKESSWPNHTVTKGVTASCSHNGKSSFYKNLLWLTEKNGLYPNLSKSYVNNKEKEVLVLWGIHHPSNIGDQRAIYHTENAYVSVVSSHYSRRFTPEIAKRPKVRDQEGRINYYWTLLEPGDTIIFEANGNLIAPWYAFALSRGFGSGIITSNASMGDCDAKCQTPQGAINSSLPFQNVHPVTIGECPKYVRSTKLRMVTGLRNIPSIQSRGLFGAIAGFIEGGWTGMIDGWYGYHHQNEQGSGYAADKKSTQNAIDGITNKVNSVIEKMNTQFTAVGKEFNKLERRMENLNKKVDDGFLDIWTYNAELLVLLENERTLDFHDSNVKNLYEKVKTQLKNNAKEIGNGCFEFYHKCNNECMESVKNGTYDYPKYSEESKLKREKIDGVKLESMGVYQILAIYSTVASSLVLLVSLGAISFWMCSNGSLQCRICI

SEQ ID NO: 914 - protein, 565 aa, Artificial Sequence
  derived and/or modified protein sequence (wt) from hemagglutinin__InfluenzaA__ABF47671
MKAKLLVLLCTFTATYADTICIGYHANNSTDTVDTVLEKNVTVTHSVNLLEDSHNGKLCLLKGIAPLQLGNCSVAGWILGNPECELLISKESWSYIVETPNPENGTCYPGYFADYEELREQLSSVSSFERFEIFPKGSSWPNHTVTGVSASCSHNGKSSFYRNLLWLTGKNGLYPNLSMSYVNNKEKEVLVLWGVHHPPNIGDQRALYHTENAFVSVVSSHYSRRFTPEIAKRPKVRDQEGRINYYWTLLEPGDTIIFEANGNLIAPWYAFALSRGFGSGIITSNAPMDECDAKCQTPQGAINSSLPFQNVHPVTIGECPKYVRSAKLRMVTGLRNIPSIQSRGLFGAIAGFIEGGWTGMVDGWYGYHHQNEQGSGYAADQKSTQNAINGITNKVNSVIEKMNTQFTAVGKEFNKLERRMENLNKKVDDGFLDIWTYNAELLVLLENERTLDFHDSNVKNLYEKVKSQLKNNAKEIGNGCFEFYHKCNNECMESVKNGTYDYPKYSEESKLNREKIDGVKLESMGVYQILAIYSTVASSLVLLVSLGAISFWMCSNGSLQCRICI

SEQ ID NO: 915 - protein, 566 aa, Artificial Sequence
  derived and/or modified protein sequence (wt) from hemagglutinin__InfluenzaA__ABF47693
MKAKLLVLLCALSATDADTICIGYHANNSTDTVDTVLEKNVTVTHSVNLLEDSHNGKLCRLKGIAPLQLGKCNIAGWILGNPECESLFSKKSWSYIAETPNSENGTCYPGYFADYEELREQLSSVSSFERFEIFPKERSWPKHNVTRGVTASCSHKGKSSFYRNLLWLTEKNGSYPNLSKSYVNNKEKEVLVLWGVHHPSNIEDQKTIYRKENAYVSVVSSNYNRRFTPEIAERPKVRGQAGRINYYWTLLEPGDTIIFEANGNLIAPWHAFALNRGFGSGIITSNASMDECDTKCQTPQGAINSSLPFQNIHPVTIGECPKYVRSTKLRMVTGLRNIPSIQSRGLFGAIAGFIEGGWTGMIDGWYGYHHQNEQGSGYAADQKSTQNAINGITNKVNSVIEKMNTQFTAVGKEFNKLEKRMENLNKKVDDGFLDIWTYNAELLVLLENERTLDFHDSNVKNLYEKVKSQLKNNAKEIGNGCFEFYHKCNNECMESVKNGTYDYPKYSEESKLNREKIDGVKLESMGVYQILAIYSTVASSLVLLVSLGAISFWMCSNGSLQCRICI

SEQ ID NO: 916 - protein, 566 aa, Artificial Sequence; identical to SEQ ID NO: 915
  derived and/or modified protein sequence (wt) from hemagglutinin__InfluenzaA__ABF47704

SEQ ID NO: 917 - protein, 566 aa, Artificial Sequence
  derived and/or modified protein sequence (wt) from hemagglutinin__InfluenzaA__ABF47715
MKAKLLVLLCALSATDADTICIGYHANNSTDTVDTVLEKNVTVTHSVNLLEDSHNGKLCRLKGIAPLQLGKCSIAGWILGNPECESLFSKKSWSYIAETPNSENGTCYPGYFADYEELREQLSSVSSFERFEIFPKERSWPKHNVTRGVTASCSHKGKSSFYRNLLWLTEKNGSYPNLSKSYVNNKEKEVLVLWGVHHPSNIEDQKTIYRKENAYVSVVSSNYNRRFTPEIAERPKVRGQAGRINYYWTLLEPGDTIIFEANGNLIAPWHAFALNRGFGSGIITSNASMDECDTKCQTPQGAINSSLPFQNIHPVTIGECPKYVRSTKLRMVTGLRNIPSIQSRGLFGAIAGFIEGGWTGMIDGWYGYHHQNEQGSGYAADQKSTQNAINGITNKVNSVIEKMNTQFTAVGKEFNKLEKRMENLNKKVDDGFLDIWTYNAELLVLLENERTLDFHDSNVKNLYEKVKSQLKNNAKEIGNGCFEFYHKCNNECMESVKNGTYDYPKYSEESKLNREKIDGVKLESMGVYQILAIYSTVASSLVLLVSLGAISFWMCSNGSLQCRICI

SEQ ID NO: 918 - protein, 566 aa, Artificial Sequence; identical to SEQ ID NO: 915
  derived and/or modified protein sequence (wt) from hemagglutinin__InfluenzaA__ABF47726

SEQ ID NO: 919 - protein, 566 aa, Artificial Sequence; identical to SEQ ID NO: 915
  derived and/or modified protein sequence (wt) from hemagglutinin__InfluenzaA__ABF47737

SEQ ID NO: 920 - protein, 566 aa, Artificial Sequence
  derived and/or modified protein sequence (wt) from hemagglutinin__InfluenzaA__ABF47748
MKAKLLVLLCALSATDADTICIGYHANNSTDTVDTVLEKNVTVTHSVNLLEDSHNGKLCRLKGIAPLQLGKCSIAGWILGNPECESLFSKKSWSYIAETPNSENGTCYPGYFADYEELREQLSSVSSFERFEIFPKESSWPKHNVTRGVTASCSHKGKSSFYRNLLWLTEKNGSYPNLSKSYVNNKEKEVLVLWGVHHPSNIEDQKTIYRKENAYVSVVSSHYNRRFTPEIAKRPKVRDQEGRINYYWTLLEPGDTIIFEANGNLIAPWYAFALSRGFGSGIITSNASMDECDAKCQTPQGAINSSLPFQNVHPVTIGECPKYVRSTKLRMVTGLRNIPSIQSRGLFGAIAGFIEGGWTGMIDGWYGYHHQNEQGSGYAADQKSTQNAINGITNKVNSVIEKMNTQFTAVGKEFNKLEKRMENLNKKVDDGFLDIWTYNAELLVLLENERTLDFHDSNVKNLYEKVKSQLKNNAKEIGNGCFEFYHKCNNECMESVKNGTYDYPKYSEESKLNREKIDGVKLESMGVYQILAIYSTVASSLVLLVSLGAISFWMCSNGSLQCRICI

SEQ ID NO: 921 - protein, 566 aa, Artificial Sequence
  derived and/or modified protein sequence (wt) from hemagglutinin__InfluenzaA__ABF47770
MKAKLLVLLCALSATDADTICIGYHANNSTDTVDTVLEKNVTVTHSVNLLEDNHNGKLCKLKGIAPLQLGKCSIAGWILGNPECESLFSKKSWSYIAETPNSENGTCYPGYFADYEELREQLSSVSSFERFEIFPKESSWPKHNVTKGVTASCSHKGKSSFYRNLLWLTEKNGSYPNLSKSYVNNKEKEVLVLWGVHHPSNIEDQKTIYRKENAYVSVVSSHYNRRFTPEIAKRPKVRNQEGRINYYWTLLEPGDTIIFEANGNLIAPWYAFALSRGFGSGIITSNASMDECDAKCQTPQGAINSSLPFQNVHPVTIGECPKYVRSTKLRMVTGLRNIPSIQSRGLFGAIAGFIEGGWTGMIDGWYGYHHQNEQGSGYAADQKSTQNAINGITNKVNSIIEKMNTQFTAVGKEFNKLEKRMENLNKKVDDGFLDIWTYNAELLVLLENERTLDFHDSNVKNLYEKVKSQLKNNAKEIGNGCFEFYHKCNNECMESVKNGTYDYPKYSEESKLNREKIDGVKLESMGVYQILAIYSTVASSLVLLVSLGAISFWMCSNGSLQCRICI

SEQ ID NO: 922 - protein, 566 aa, Artificial Sequence; identical to SEQ ID NO: 921
  derived and/or modified protein sequence (wt) from hemagglutinin__InfluenzaA__ABF47781

SEQ ID NO: 923 - protein, 566 aa, Artificial Sequence; identical to SEQ ID NO: 921
  derived and/or modified protein sequence (wt) from hemagglutinin__InfluenzaA__ABF47792

SEQ ID NO: 924 - protein, 566 aa, Artificial Sequence; identical to SEQ ID NO: 921
  derived and/or modified protein sequence (wt) from hemagglutinin__InfluenzaA__ABF47803

SEQ ID NO: 925 - protein, 566 aa, Artificial Sequence; identical to SEQ ID NO: 921
  derived and/or modified protein sequence (wt) from hemagglutinin__InfluenzaA__ABF47814

SEQ ID NO: 926 - protein, 566 aa, Artificial Sequence; identical to SEQ ID NO: 921
  derived and/or modified protein sequence (wt) from hemagglutinin__InfluenzaA__ABF47825

SEQ ID NO: 927 - protein, 566 aa, Artificial Sequence; identical to SEQ ID NO: 921
  derived and/or modified protein sequence (wt) from hemagglutinin__InfluenzaA__ABF47836

SEQ ID NO: 928 - protein, 566 aa, Artificial Sequence; identical to SEQ ID NO: 921
  derived and/or modified protein sequence (wt) from hemagglutinin__InfluenzaA__ABF47847

SEQ ID NO: 929 - protein, 566 aa, Artificial Sequence
  derived and/or modified protein sequence (wt) from hemagglutinin__InfluenzaA__ABF47858
MKTIIALSYILCLVFAQKLPGNDNGTATLCLGHHAVPNGTLVKTITNDQIEVTNATELVQSSSTGRICDSPHRILDGKNCTLIDALLGDPHCDGFQNKEWDLFVERSKAYSNCYPYDVPDYASLRSLVASSGTLEFINEDFNWTGVAQDGKSYACKRGSVNSFFSRLNWLHKLEYKYPALNVTMPNNGKFDKLYIWGVHHPSTDSDQTSLYVRASGRVTVSTKRSQQTVIPNIGFRPWVRGLSSRISIYWTIVKPGDILLINSTGNLIAPRGYFKIRNGKSSIMRSDAPIGNCSSECITPNGSIPNDKPFQNVNRITYGACPRYVKQNTLKLATGMRNVPEKQTRGIFGAIAGFIENGWEGMVDGWYGFRHQNSEGTGQAADLKSTQAAIDQINGKLNRLIEKTNEKFHQIEKEFSEVEGRIQDLEKYVEDTKIDLWSYNAGLLVALENQHTIDLTDSEMNKLFERTRKQLRENAEDMGNGCFKIYHKCDNACIGSIRNGTYDHDVYRDEALNNRFQIKGVELKSGYKDWILWISFAISCFLLCVVLLGFIMWACQKGNIRCNICI

SEQ ID NO: 930 - protein, 565 aa, Artificial Sequence; identical to SEQ ID NO: 742
  derived and/or modified protein sequence (wt) from hemagglutinin__InfluenzaA__ABF47869

SEQ ID NO: 931 - protein, 565 aa, Artificial Sequence; identical to SEQ ID NO: 742
  derived and/or modified protein sequence (wt) from hemagglutinin__InfluenzaA__ABF47880

SEQ ID NO: 932 - protein, 565 aa, Artificial Sequence
  derived and/or modified protein sequence (wt) from hemagglutinin__InfluenzaA__ABF47891
MKVKLLVLLCTFTATYADTICIGYHANNSTDTVDTVLEKNVTVTHSVNLLEDSHNGKLCLLKGIAPLQLGNCSVAGWILGNPECELLISKESWSYIVETPNPENGTCYPGYFADYEELREQLSSVSSFERFEIFPKESSWPNHTVTGVSASCSHNGKSSFYRNLLWLTRKNGLYPNLSKSYANNKEKEVLVLWGVHHPPNIGDQRALYHTENAYVSVVSSHYSRRFTPEIAKRPKVRDQEGRINYYWTLLEPGDTIIFEANGNLIAPRYAFALSRGFGSGIITSNAPMDECDAKCQTPQGAINSSLPFQNVHPVTIGECPKYVRSAKLRMVTGLRNIPSIQSRGLFGAIAGFIEGGWTGMVDGWYGYHHQNEQGSGYAADQKSTQNAINGITNKVNSVIEKMNTQFTAVGKEFNKLERRMENLNKKVDDGFLDIWTYNAELLVLLENERTLDFHDSNVKNLYEKVKSQLKNNAKEIGNGCFEFYHKCNNECMESVKNGTYDYPKYSEESKLNREKIDGVKLESMGVYQILAIYSTVASSLVLLVSLGAISFWMCSNGSLQCRICI

SEQ ID NO: 933 - protein, 566 aa, Artificial Sequence
  derived and/or modified protein sequence (wt) from hemagglutinin__InfluenzaA__ABF47902
MKTIIALSYILCLVFAQKLPGNDNSTATLCLGHHAVPNGTLVKTITNDQIEVTNATELVQSSSTGGICDSPHQILDGENCTLIDALLGDPHCDGFQNKEWDLFVERSKAYSNCYPYDVPDYASLRSLVASSGTLEFNNESFNWTGVAQNGTSSACKRRSNKSFFSRLNWLHQLKYKYPALNVTMPNNEKFDKLYIWGVHHPSTDSDQISLYAQAPGRVTVSTKRSQQTVIPNIGSRPWVRGVSSRISIYWTIVKSGDILLINCTGNLIAPRGYFKIRSGKSSIMRSDASIGKCNSECITPNGSIPNDKPFQNVNRITYGACPRYVKQNTLKLATGMRNVPEKQTRGIFGAIAGFIENGWEGMVDGWYGFRHQNSEGTGQAADLKSTQAAINQINGKLNRLIEKTNEKFHQIEKEFSEVEGRIQDLEKYVEDTKIDLWSYNAELLVALENQHTIDLTDSEMNKLFERTKKQLRENAEDMGNGCFKIYHKCDNACIGSIRNGTYDHDVYRDEALNNRFQIKGVELKSGYKDWILWISFAISCFLLCVVLLGFIMWACQKGNIRCNICI

SEQ ID NO: 934 - protein, 565 aa, Artificial Sequence
  derived and/or modified protein sequence (wt) from hemagglutinin__InfluenzaA__ABF47955
MKAKLLVLLYAFVATDADTICIGYHANNSTDTVDTIFEKNVAVTHSVNLLEDRHNGKLCKLKGIAPLQLGKCNITGWLLGNPECDSLLPARSWSYIVETPNSENGACYPGDFIDYEELREQLSSVSSLERFEIFPKESSWPNHTFNGVTVSCSHRGKSSFYRNLLWLTKKGDSYPKLTNSYVNNKGKEVLVLWGVHHPSSSDEQQSLYSNGNAYVSVASSNYNRRFTPEIAARPKVKDQHGRMNYYWTLLEPGDTIIFEATGNLIAPWYAFALSRGFESGIITSNASMHECNTKCQTPQGSINSNLPFQNIHPVTIGECPKYVRSTKLRMVTGLRNIPSIQYRGLFGAIAGFIEGGWTGMIDGWYGYHHQNEQGSGYAADQKSTQNAINRITNKVNSVIEKMNTQFTAVGKEFNNLEKRMENLNKKVDDGFLDIWTYNAELLVLLENERTLDFHDLNVKNLYEKVKSQLKNNAKEIGNGCFEFYHKCDNECMESVRNGTYDYPKYSEESKLNREKIDGVKLESMGVYQILAIYSTVASSLVLLVSLGAISFWMCSNGSLQCRICI

SEQ ID NO: 935 - protein, 565 aa, Artificial Sequence
  derived and/or modified protein sequence (wt) from hemagglutinin__InfluenzaA__ABF60576
MKTTIILILLTHAVDSQNPISGNNTATLCLGHHAVANGTLVKTITDDQIEVTNATELVQSTSIGKICNNPYRVLDGRNCTLIDAMLGDPHCDVFQYENWDLFIERSSAFSNCYPYDIPDYASLRSIVASSGTLEFTAEGFTWTGVTQNGGSGACRRGSADSFFSRLNWLTKSGNSYPTLNVTMPNNDNFDKLYIWGIHHPSTNNEQTKLYVQELGRVTVSTKRSQQTIIPNIGSRPGVRGQAGRISIYWTIVKPGDILMINSNGNLVAPRGYFKMRTGKSSIMRSDAPIDTCWSECITPNGSIPNDKPFQNVNKVTYGKCPKYIKQNTLKLATGMRNVPEKQIRGIFGAIAGFIENGWEGMVDGWYGFRYQNSEGTGQAADLKSTQAAIDQINGKLNRVIERTNEKFHQIEKEFSEVEGRIQDLEKYVEDTKIDLWSYNAELLVALENQHTIDLTDAEMNKLFEKTRRQLRENAEDMGGGCFKIYHKCDNACIGSIRNGTYDHYIYRDEALNNRFQIKGVELKSGYKDWILWISFAISCFLICVVLLGFIMWACEKGNIRCNICI

SEQ ID NO: 936 - protein, 566 aa, Artificial Sequence
  derived and/or modified protein sequence (wt) from hemagglutinin__InfluenzaA__ABF60577
MKTIIVLSYFFCLALSQDYSESNNSTATLCLGHHAVPNGTIVKTITDDQIEVTNATELVQSSSTGKICNNPHRILDGRDCTLIDALLGDPHCDVFQDETWDLYVERSSAFSNCYPYDVPDYASLRSLVASSGTLEFITEGFTWTGVTQNGGSNACKRGPASGFFSRLNWLTKSGSTYPVLNVTMPNDDNFDKLYVWGVHHPSTNQEQTDLYVQASGRVTVSTRRSQQTIIPNIGSRPWVRGQSGRISIYWTIVKPGDVLVINSNGNLIAPRGYFKIRTGKSSIMRSDAPIDTCISECITPNGSIPNDKPFQNVNKITYGACPKYVKQSTLKLATGMRNVPEKKTRGLFVAIAGFIENGWEGMIDCWYGFRHQNSEGTGQAADLKSTQAAIDQINGKLNRVIEKTNEKFHQIEKEFSEVEGRIQDLENYVEDTKIDLWSYNAELLVALENQHTIDLTDSEMNKLFERTRRQLRENAEDMGSGCFKIYHKCDNACIESIRNGTYDHDIYRDEALNNRFQIKGVELKSGYKDWILWISFATSCFLLCVVLGGFIMWACQRGNIRCNICI

SEQ ID NO: 937 - protein, 566 aa, Artificial Sequence
  derived and/or modified protein sequence (wt) from hemagglutinin__InfluenzaA__ABF60578
MKTIIVLSCFFCLAFSQDLSENNNNTATLCLGHHAVPNGTIVKTITDDQIEVTNATELVQSSSTGKICNNPHRILDGRDCTLIDALLGDPHCDVFQDETWDLYVERSKSFSNCYPYDVPDYASLRSLVASSGTLEFITEAFTWTGVTQNGGSGACKRGPGNGFFSRLNWLTKSGSAYPVLNVTMPNNDNFDKLYVWGVHHPSTNQEQTNLYVQASGRVTVSTRRSQQTIIPNIGSRPWVRGQSRRISIYWTIVKPGDILVINSNGNLIAPRGYFKMRTGKSSIMRSDAPIDTCISECITPNGSIPNDKPFQNVNKITYGACPKYIKQSTLKLATGMRNVPEKQTRGLFGAIAGFIENGWEGMIDGWYGFRHQNSEGTGQAADLKSTQAAIDQINGKLNRVIEKTNEKFHQIEKEFSEVEGRIQDLEKYVEDTKIDLWSYNADVLVALENQHTIDLTDSEMNKLFEKTRRQLRENAEDMGNGCFKIYHKCDNACIESIRNGTYDHDIYRDEALNNRFQIKGCGVKSGYKDWILWISFAISCFLLCVVLLGFIMWACQRGNIRCNICI

SEQ ID NO: 938 - protein, 566 aa, Artificial Sequence
  derived and/or modified protein sequence (wt) from hemagglutinin__InfluenzaA__ABF60579
MKTLIALSYIFCLVLGQDLPGNGNSTATLCLGHHAVPNGTLVKTITDDQIEVTNATELVQNFSMDKICNNPHRILDGANCTLIDALLGDPHCDDFQNEKWDLFVERSKAFSNCYPYDVPDYTSLRSLIASSGTLEFINEDFNWTGVTQNGGSNACKRGPDSSFFSRLNWLYKSGNTYPMLNVTMPNSDNFDKLYIWGVHHPSTAREQTNLYVQASGKVTVSTKRSQQTIIPNIGSRPWVRGLSSRISIYWTIVKPGDILVINSNGNLIAPRGYFKMHTGRSSIMRSDAPIDTCSSECITPNGSIPNDKPFQNVNKITYGACPKYVKQNTLKLATGMRNIPEKQTRGIFGAIAGFIENGWEGMVDGWYGFRHQNSEGTGQAADLKSTQAAIDQINGKLNRVIEKTNEKFHQIEKEFSGVEGRIQDLEKYVEDTKIDLWSYNAELLVALENQHTIDLTDSEMNKLFEKTRRQLRENAEDMGNGCFKIYHKCDNACIESIRNGTYDHNEYRDEALNNRFQIKGVELKSGYKDWILWISFAISCFLLCVVLLGFIMWACQKGNIRCNICI

SEQ ID NO: 939 - protein, 566 aa, Artificial Sequence
  derived and/or modified protein sequence (wt) from hemagglutinin__InfluenzaA__ABF60580
MKTIIALSYIFCLAFAQDLPGNDNSTATLCLGHHAVPNGTLVKTITNDQIEVTNATELVQSSSTGKICDNPHRILDGINCTLIDALLGDPHCDGFQNEKWDLFVERSKAFSNCYPYDVPDYASLRSLVASSGTLEFINEGFNWTGVTQNGGSSACKRGPDNGFFSRLNWLYKSGSTYPVQNVTMPNNDNSDKLYIWGVHHPSTDKEQTDLYVQASGKVTVSTKRIQQTVIPNVGSRPWVRGLSSRVSIYWTIVKPGDVLVINSNGNLIAPRGYYKMRTGKSSIMRSDAPIGTCSSECITPNGSIPNDKPFQNVNKITYGACPKYVKQNTLKLATGMRNVPEKQTRGIFGAIAGFIENGWEGMIDGWYGFRHQNSEGTGQAADLKSTQAAIDQINGKLNRVIEKTNEKFHQIEKEFSEVEGRIQDLEKYVEDTKIDLWSYNAEVLVALENQHTIDLTDSEMNKLFEKTRRQLRENAEDMGNGCFKIYHKCDNACIGSIRNGTYDHDVYRDEALNNRFQIKGVELKSGYKDWILWISFAISCFLLCVVLLGFIMWACQKGNIRCNICI

SEQ ID NO: 940 - protein, 566 aa, Artificial Sequence
  derived and/or modified protein sequence (wt) from hemagglutinin__InfluenzaA__ABF60581
MKTIIVLSYFFCLALSQDYSESNNSTATLCLGHHAVPNGTIVKTITDDQIEVTNATELVQSSSTGKICNNPHRILDGRDCTLIDALLGDPHCDVFQDETWDLYVERSSAFSNCYPYDVPDYDSLRSLVASSGTLEFITEGFTWTGVTQNGGSNACKRGPASGFFSRLNWLTKSGSTYPVLNVTMPNNDNFDKLYVWGVHHPSTNQEQTNLYVQASGRVTVSTRRSQQTIIPNIGSRPWVRGQSGRISIYWTIVKPGDVLVINSNGNLIAPRGYFKMRTGKSSIMRSDAPIDTCISECITPNGSIPNDMPFQNVNKITYGACPKYVKQGTLKLATGMRNVPEKQTRGLFGAIAGFIENGWEGMIDGWYGFRHQNSEGTGQAADLKSTQAAIDQINGKLNRVIEKTNEKFHQIEKEFSEVEGRIQDLEKYVEDTKIDLWSDNAELLVALENQHTIDLTDSEMNKLFEKTRRQLRENAEVMGNGCFKIYHKCDNACIESIRNGTYDHDIYRDEALNNRFQIKGVELKSGYKDWILWISFAISCFLLCVVLLGFIMWACQRGNIRCNICI

SEQ ID NO: 941 - protein, 566 aa, Artificial Sequence; identical to SEQ ID NO: 740
  derived and/or modified protein sequence (wt) from hemagglutinin__InfluenzaA__ABF82651

SEQ ID NO: 942 - protein, 565 aa, Artificial Sequence; identical to SEQ ID NO: 800
  derived and/or modified protein sequence (wt) from hemagglutinin__InfluenzaA__ABF82662

SEQ ID NO: 943 - protein, 565 aa, Artificial Sequence
  derived and/or modified protein sequence (wt) from hemagglutinin__InfluenzaA__ABF82673
MKAKLLVLLCTFTATYADTICIGYHANNSTDTVDTVLEKNVTVTHSVNLLEDSHNGKLCLLKGIAPLQLGNCSVAGWILGNPECELLISKGSWSYIVETPNPENGTCYPGYFADYEELREQLSSVSSFERFEIFPKGSSWPNHTVTGVSASCSHNGKSSFYRNLLWLTGKNGLYPNLSMSYVNNKEKEVLVLWGVHHPPNIGDQRALYHTENAYVSVVSSHYSRRFTPEIAKRPKVRDQEGRINYYWTLLEPGDTIIFEANGNLIAPWYAFALSRGFGSGIITSNAPMGECDAKCQTPQGAINSSLPFQNVHPVTIGECPKYVRSAKLRMVTGLRNIPSIQSRGLFGAIAGFIEGGWTGMVDGWYGYHHQNEQGSGYAADQKSTQNAINGITNKVNSVIEKMNTQFTAVGKEFNKLERRMENLNKKVDDGFLDIWTYNAELLVLLENERTLDFHDSNVKNLYEKVKSQLKNNAKEIGNGCFEFYHKCNNECMESVKNGTYDYPKYSEESKLNREKIDGVKLESMGVYQILAIYSTVASSLVLLVSLGAISFWMCSNGSLQCRICI

SEQ ID NO: 944 - protein, 565 aa, Artificial Sequence; identical to SEQ ID NO: 841
  derived and/or modified protein sequence (wt) from hemagglutinin__InfluenzaA__ABF82684

SEQ ID NO: 945 - protein, 566 aa, Artificial Sequence; identical to SEQ ID NO: 807
  derived and/or modified protein sequence (wt) from hemagglutinin__InfluenzaA__ABF82695

SEQ ID NO: 946 - protein, 566 aa, Artificial Sequence; identical to SEQ ID NO: 783
  derived and/or modified protein sequence (wt) from hemagglutinin__InfluenzaA__ABF82706

SEQ ID NO: 947 - protein, 565 aa, Artificial Sequence; identical to SEQ ID NO: 299
  derived and/or modified protein sequence (wt) from hemagglutinin__InfluenzaA__ABF82819

SEQ ID NO: 948 - protein, 565 aa, Artificial Sequence; identical to SEQ ID NO: 800
  derived and/or modified protein sequence (wt) from hemagglutinin__InfluenzaA__ABF82830

SEQ ID NO: 949 - protein, 565 aa, Artificial Sequence; identical to SEQ ID NO: 800
  derived and/or modified protein sequence (wt) from hemagglutinin__InfluenzaA__ABF82841

SEQ ID NO: 950 - protein, 565 aa, Artificial Sequence; identical to SEQ ID NO: 800
  derived and/or modified protein sequence (wt) from hemagglutinin__InfluenzaA__ABF82852

SEQ ID NO: 951 - protein, 565 aa, Artificial Sequence
  derived and/or modified protein sequence (wt) from hemagglutinin__InfluenzaA__ABF82863
MKAKLLVLLCTFTATYADTICIGYHANNSTDTVDTVLEKNVTVTHSVNLLEDSHNGKLCLLKGIAPLQLGNCSVAGWILGNPECELLISKESWSYIVETPNPENGTCYPGYFADYEELREQLSSVSSFERFEIFPKGSSWPNHTVTGVSASCSHNGKSSFYRNLLWLTGKNGLYPNLSMFYVNNKEKEVLVLWGVHHPPNIGDQRALYHTENAYVSVVSSHYSRRFTPEIAKRPKVRDQEGRINYYWTLLEPGDTIIFEANGNLIAPWYAFALSRGFGSGIITSNAPMGECDAKCQTPQGAINSSLPFQNVHPVTIGECPKYVRSAKLRMVTGLRNIPSIQSRGLFGAIAGFIEGGWTGMVDGWYGYHHQNEQGSGYAADQKSTQNAINGITNKVNSVIEKMNTQFTAVGKEFNKLERRMENLNKKVDDGFLDIWTYNAELLVLLENERTLDFHDSNVKNLYEKVKSQLKNNAKEIGNGCFEFYHKCNNECMESVKNGTYDYPKYSEESKLNREKIDGVKLESMGVYQILAIYSTVASSLVLLVSLGAISFWMCSNGSLQCRICI

SEQ ID NO: 952 - protein, 565 aa, Artificial Sequence
  derived and/or modified protein sequence (wt) from hemagglutinin__InfluenzaA__ABF82874
MKAKLLVLLCTFTATYADTICIGYHANNSTDTVDTVLEKNVTVTHSVNLLEDSHNGKLCLLKGIAPLQLGNCSVAGWILGNPECELLISKESWSYIVETPNPENGTCYPGYFADYEELREQLSSVSSFERFEIFPKGSSWPNHTVTGVSASCSHNGKSSFYRNLLWLTGKNGLYPNLSMSYVNNKEKEVLVLWGVHHPPNIGDQRALYHTENAYVSVVSSHYSRRFTPEIAKRPKVRDQEGRINYYWTLLEPGDTIIFEANGNLIAPWYAFALSRGFGSGIITSNAPMGECDAKCQTPQGAINSSLPFQNVHPVTIGECPKYVRSAKLRMVTGLRNIPSIQSRGLFGAIAGFIEGGWTGMVDGWYGYHHQNEQGSGYAADQKSTQNAINGITNKVNSVIEKMNTQFTAVGKEFNKLERRMENLIKKVDDGFLDIWTYNAELLVLLENERTLDFHDSNVKNLYEKVKSQLKNNAKEIGNGCFEFYHKCNNECMESVKNGTYDYPKYSEESKLNREKIDGVKLESMGVYQILAIYSTVASSLVLLVSLGAISFWMCSNGSLQCRICI

SEQ ID NO: 953 - protein, 565 aa, Artificial Sequence; identical to SEQ ID NO: 800
  derived and/or modified protein sequence (wt) from hemagglutinin__InfluenzaA__ABF82885

SEQ ID NO: 954 - protein, 565 aa, Artificial Sequence; identical to SEQ ID NO: 800
  derived and/or modified protein sequence (wt) from hemagglutinin__InfluenzaA__ABF82896

SEQ ID NO: 955 - protein, 565 aa, Artificial Sequence; identical to SEQ ID NO: 800
  derived and/or modified protein sequence (wt) from hemagglutinin__InfluenzaA__ABF82907

SEQ ID NO: 956 - protein, 565 aa, Artificial Sequence; identical to SEQ ID NO: 844
  derived and/or modified protein sequence (wt) from hemagglutinin__InfluenzaA__ABF82929

SEQ ID NO: 957 - protein, 565 aa, Artificial Sequence; identical to SEQ ID NO: 800
  derived and/or modified protein sequence (wt) from hemagglutinin__InfluenzaA__ABF82940

SEQ ID NO: 958 - protein, 566 aa, Artificial Sequence
  derived and/or modified protein sequence (wt) from hemagglutinin__InfluenzaA__ABF83447
MKTIIALSYIFCLALGQDLPGNDNNTATLCLGHHAVPNGTLVKTITDDQIEVTNATELVQSSSTGKICNNPHRILDGIDCTLIDALLGDPHCDVFQNETWDLFVERSKAFSNCYPYDVPDYASLRSLVASSGTLEFITEGFTWTGVTQNGGSNACKRGPGSGFFSRLNWLTKSGSTYPVLNVTMPNNDNFDKLYIWGVHHPSTNQEQTSLYVQASGGVTVSTRRSQQTIIPNIGSRPWVRGLSSRISIYWTIVKPGDVLVINSNGNLIAPRGYFKMRTGKSSIMRSDAPIDTCISECITPNGSIPNDKPFQNVNKITYGACPKYVKQNTLKLATGMRNVPEKQTRGLFGAIAGFIENGWEGMIDGWYGFRHQNSEGTGQAADLKSTQAAIDQINGKLNRVIEKTNEKFHQIEKEFSEVEGRIQDLEKYVEDTKIDLWSYNAELLVALENQHTIDLTDSEMNKLFEKTRRQLRENAEDMGNGCFKIYHKCDNACIESIRNGTYDHDVYRDEALNNRFQIKGVELKSGYKDWILWISFAISCFLLCVVLLGFIMWACQRGNIRCNICI

SEQ ID NO: 959 - protein, 547 aa, Artificial Sequence
  derived and/or modified protein sequence (wt) from hemagglutinin__InfluenzaA__ABG20468
MEKIVLLLAIVSLVKSDQICIGYHANNSTEQVDTIMEKNVTVTHAQDILEKTHNGKLCDLDGVKPLILRDCSVAGEKINPANDLCYPGNFNDYEELKHLLSRINHFEKIQIIPKSSWSDHEASSGVSSACPYQGRSSFFRNVVWLIKKNNAYPTIKRSYNNTNQEDLLVLWGIHHPNDAAEQTRLYQNPTTYISVGTSTLNQRLVPKIATRSKVNGQSGRMEFFWTILKPNDAINFESNGNFIAPENAYKIVKKGDSTIMKSELEYGNCNTKCETPIGAINSSMPFHNIHPLTIGECPKYVKSNRLVLATGLRNSPQGERRRKKRGLFGAIAGFIEGGWQGMVDGWYGYHHSNEQGSGYAADKESTQKAIDGVTNKVNSIIDKMNTQFEAVGREFNNLERRIENLNKKMEDGFLDVWTYNAELLVLMENERTLDFHDSNVKNLYDKVRLQLRDNAKELGNGCFEFYHRCDNECMESVRNGTYDYPQYSEEARLKREEISGVKLESIGTYQILSIYSTVASSLALAIMVAGLSLWMCSNGSLQCRICI

SEQ ID NO: 960 - protein, 568 aa, Artificial Sequence
  derived and/or modified protein sequence (wt) from hemagglutinin__InfluenzaA__ABG20472
MEKIVLLLAIVSLVKSDQICIGYHANNSTEQVDTIMEKNVTVTHAQDILEKAHNGKLCDLDGVKPLILRDCSVAGWLLGNPMCDEFLNVPEWSYIVEKINPANDLCYPGNFNDYEELKHLLSRINHFEKIQIIPKSSWSDHEASSGVSSACPYQGRSSFFRNVVWLIKKDNAYPTIKRSYNNTNQEDLLVLWGIHHPNDAAEQTRLYQNPTTYISVGTSTLNQRLVPKIATRSKVNGQSGRMEFFWTILKPNDAINFESNGNFIAPENAYKIVKKGDSTIMKSELEYGNCNTKCQTPIGAINSSMPFHNIHPLTIGECPKYVKSNRLVLATGLRNSPQGERRRKKRGLFGAIAGFIEGGWQGMVDGWYGYHHSNEQGSGYAADKESTQKAIDGVTNKVNSIIDKMNTQFEAVGREFNNLERRIENLNKKMEDGFLDVWTYNAELLVLMENERTLDFHDSNVKNLYDKVRLQLRDNAKELGNGCFEFYHRCDNECMESVRNGTYDYPQYSEEARLKREEISGVKLESIGTYQILSIYSTVASSLALAIMVAGLSLWMCSNGSLQCRICI

SEQ ID NO: 961 - protein, 568 aa, Artificial Sequence
  derived and/or modified protein sequence (wt) from hemagglutinin__InfluenzaA__ABG20478
MEKIVLLFAIVSLVKSDQICIGYHANNSTEQVDTIMEKNVTVTHAQDILEKTHNGKLCDLDGVKPLILRDCSVAGWLLGNPMCDEFLNVPEWSYIVEKINPANDLCYPGNFNDYEELKHLLSRINHFEKIQIIPKSSWSDHEASSGVSSACPYQGRSSFFRNVVWLIKKDNAYPTIKRSYNNTNQEDLLVLWGIHHPNDAAEQTRLYQNPTTYISVGTSTLNQRLVPKIATRSKVNGQSGRMEFFWTILKPNDAINFESNGNFIAPENAYKIVKKGDSTIMKSELEYGNCNTKCQTPIGAINSSMPFHNIHPLTIGECPKYVKSNRLVLATGLRNSPQGERRRKKRGLFGAIAGFIEGGWQGMVDGWYGYHHSNEQGSGYAADKESTQKAIDGVTNKVNSIIDKMNTQFEAVGREFNNLERRIENLNKKMEDGFLDVWTYNAELLVLMENERTLDFHDSNVKNLYDKVRLQLRDNAKELGNGCFEFYHRCDNECMESVRNGTYDYPQYSEEARLKREEISGVKLESIGTYQILSIYSTVASSLALAIMVAGLSLWMCSNGSLQCRICI

SEQ ID NO: 962 - protein, 566 aa, Artificial Sequence; identical to SEQ ID NO: 783
  derived and/or modified protein sequence (wt) from hemagglutinin__InfluenzaA__ABG26758

SEQ ID NO: 963 - protein, 566 aa, Artificial Sequence
  derived and/or modified protein sequence (wt) from hemagglutinin__InfluenzaA__ABG26769
MKTIIALSYILCLVFAQKLPGNDNSTATLCLGHHAVPNGTLVKTITNDQIEVTNATELVQNSSTGRICDSPHRILDGKNCTLIDALLGDPHCDGFQNKEWDLFVERSKAYSNCYPYDVPDYASLRSLVASSGTLEFNNESFNWTGVAQNGTSYACKRRSVKSFFSRLNWLHKLEYKYPALNVTMPNNDKFDKLYIWGVHHPSTDSDQTSLYVQASGRVTVSTKRSQQTVIPNIGSGPWVRGVSSRISIYWTIVKPGDILLINSTGNLIAPRGYFKIRSGKSSIMRSDAPIGNCNSECITPNGSIPNDKPFQNVNRITYGACPRYVKQNTLKLATGMRNVPEKQTRGIFGAIAGFIENGWEGMVDGWYGFRHQNSEGTGQAADLKSTQAAINQINGKLNRLIEKTNEKFHQIEKEFSEVEGRIQDLEKYVEDTKIDLWSYNAELLVALENQHTIDLTDSEMNKLFERTRKQLRENAEDMGNGCFRIYHKCDNACIGSIRNGTYDHDVYRDEALNNRFQIKGVELKSGYKDWILWISFAISCFLLCVVLLGFIMWACQKGNIRCNICI

SEQ ID NO: 964 - protein, 566 aa, Artificial Sequence; identical to SEQ ID NO: 911
  derived and/or modified protein sequence (wt) from hemagglutinin__InfluenzaA__ABG26780

SEQ ID NO: 965 - protein, 566 aa, Artificial Sequence
  derived and/or modified protein sequence (wt) from hemagglutinin__InfluenzaA__ABG26791
MKAKLLVLLCAFTATYADTICIGYHANNSTDTVDTVLEKNVTVTHSVNLLEDSHNGKLCRLKGTAPLQLGNCSVAGWILGNPECESLFSKESWSYIAETPNPENGTCYPGYFADYEELKEQLSSVSSFERFEIFPKESSWPNHTVTKGVTASCSHNGKSSFYKNLLWLTEKNGLYPNLSKSYVNNKEKEVLVLWGVHHPSNIGDQRAIYHTENAYVSVVSSHYSRRFTPEIAKRPKVRDQEGRINYYWTLLEPGDTIIFEANGNLIAPWYAFALSRGFGSGIITSNASMGECDAKCQTPQGAINSSLPFQNVHPVTIGECPKYVRSTKLRMVTGLRNIPSIQSRGLFGAIAGFIEGGWTGMIDGWYGYHHQNEQGSGYAADKKSTQNAIDGITNKVNSVIEKMNTQFTAVGKEFNKLERRMENLNKKVDDGFLDIWTYNAELLVLLENERTLDFHDSNVKNLYEKVKNQLKNNAKEIGNGCFEFYHKCNNECMESVKNGTYDYPKYSEESKLKREKIDGVKLESMGVYQILAIYSTVASSLVLLVSLGAISFWMCSNGSLQCRICI

SEQ ID NO: 966 - protein, 566 aa, Artificial Sequence
  derived and/or modified protein sequence (wt) from hemagglutinin__InfluenzaA__ABG26802
MKTIIALSYISCLVFAQKLPGNDNSTATLCLGHHAVPNGTLVKTITNDQIEVTNATELVQSSSTGRICDSPHRILDGKNCTLIDALLGDPHCDGFQNEKWDLFVERSKAFSNCYPYDVPDYASLRSLVASSGTLEFINEGFNWTGVTQSGGSYACKRGSVNSFFSRLNWLYESESKYPALNVTMPNNGKFDKLYIWGVHHPSTDKEQTNLYVRASGRVTVSTKRSQQTVIPNIGPRPWVRGLSSRISIYWTIVKPGDILLINSTGNLIAPRGYFKIRTGKSSIMRSDAPIGTCSSGCITPNGSIPNDKPFQNVNKITYGACPRYVKQNTLKLATGMRNVPEKQTRGIFGAIAGFIENGWEGMVDGWYGFRHQNSEGTGQAADLKSTQAAIDQINGKLNRLIEKTNEKFHQIEKEFSEVEGRIQDLEKYVEDTKIDLWSYNAELLVALENQHTIDMTDSEMNKLFEKTRKQLRENAEDMGNGCFKIYHKCDNACIGSIRNGTYDHDVYRDEALNNRFQIKGVELKSGYKDWILWISFAISCFLLCVVLLGFIMWACQKGNIRCNICI

SEQ ID NO: 967 - protein, 566 aa, Artificial Sequence; identical to SEQ ID NO: 915
  derived and/or modified protein sequence (wt) from hemagglutinin__InfluenzaA__ABG26813

SEQ ID NO: 968 - protein, 566 aa, Artificial Sequence
  derived and/or modified protein sequence (wt) from hemagglutinin__InfluenzaA__ABG26824
MKAKLLVLLCALSATDADTICIGYHANNSTDTVDTVLEKNVTVTHSVNLLEDNHNGKLCKLKGIAPLQLGKCSIAGWILGNPECESLFSKKSWSYIAETPNSENGTCYPGYFADYEELREQLSSVSSFERFEIFPKESSWPKHNVTKGVTASCSHKGKSSFYRNLLWLTEKNGSYPNLSKSYVNNKEKEVLVLWGVHHPSNIEDQKTIYRKENAYVSVVSSHYNRRFTPEIAKRPKVRNQEGRINYYWTLLEPGDTIIFEANGNLIAPWYAFALSRGFGSGIITSNASMDECDAKCQTPQGAINSSLPFQNVHPVTIGECPKYVRSTKLRMVTGLRNIPSIQSRGLFGAIAGFIEGGWTGMIDGWYGYHHQNEQGSGYAADQKSTQNAINGITNKVNSIIEKMNTQFTAVGKEFNKLEKRMENLNKKVDDGFLDIWTYNAELLVLLENERTLDFHDSNVKNLYEKVKSQLKNNAKEIGNGCFEFYHKCNNECMESVKNGTYDYPKYSEESKLNREKIDGVKLESMGVYQILAIYSTVASSLVLLVSLGAISFWMCSNGSLQCKICI

SEQ ID NO: 969 - protein, 566 aa, Artificial Sequence; identical to SEQ ID NO: 921
  derived and/or modified protein sequence (wt) from hemagglutinin__InfluenzaA__ABG26835

SEQ ID NO: 970 - protein, 566 aa, Artificial Sequence
  derived and/or modified protein sequence (wt) from hemagglutinin__InfluenzaA__ABG26890
MKTIIALSYILCLVFAQKLPGNDNSTATLCLGHHAVPNGTLVKTITNDQIEVTNATELVQNSPTGRICDSPHRILDGKNCTLIDALLGDPHCDGFQNKEWDLFVERSKAYSNCYPYDVPDYASLRSLVASSGTLEFTNENFNWTGVAQDGKSYACKRGSVNSFFSRLNWLHKLEYKYPALNVTMPNNGKFDKLYIWGVHHPSTDSDQTSLYVRASGKVTVSTKRSQQTVIPDIGYRPWVRGLSSRISIYWTIVKPGDILLINSTGNLIAPRGYFKIRNGKSSIMRSDAPIGNCSSECITPNGSIPNDKPFQNVNRITYGACPRYVKQNTLKLATGMRNVPEKQTRGIFGAIAGFIENGWEGMVDGWYGFRHQNSEGTGQAADLKSTQAAIDQINGKLNRLVEKTNEKFHQIEKEFSEVEGRIQDLEKYVEDTKIDLWSYNAELLVALENQHTIDLTDSEMNKLFERTRKQLRENAEDMGNGCFKIYHKCDNACIGSIRNGTYDHDVYRDEALNNRFQIKGVELKSGYKDWILWISFAISCFLLCVVLLGFIMWACQKGNIRCNICI

SEQ ID NO: 971 - protein, 566 aa, Artificial Sequence
  derived and/or modified protein sequence (wt) from hemagglutinin__InfluenzaA__ABG26901
MKTIIALSYILCLVFAQKLPGNDNSTATLCLGHHAVPNGTLVKTITNDQIEVTNATELVQNSPTGRICDSPHRILDGKNCTLIDALLGDPHCDGFQNKEWDLFVERSKAYSNCYPYDVPDYASLRSLVASSGTLEFTNENFNWTGVAQDGKSYSCKRGSVNSFFSRLNWLHKSEYKYPALNVTMPNNGKFDKLYIWGVHHPSTDSDQTSLYVRASGKVTVSTKRSQQTVIPDIGYRPWVRGLSSRISIYWTIVKPGDILLINSTGNLIAPRGYFKIRNGKSSIMRSDAPIGNCSSECITPNGSIPNDKPFQNVNRITYGACPRYVKQNTLKLATGMRNVPEKQTRGIFGAIAGFIENGWEGMVDGWYGFRHQNSEGTGQAADLKSTQAAIDQINGKLNRLVEKTNEKFHQIEKEFSEVEGRIQDLEKYVEDTKIDLWSYNAELLVALENQHTIDLTDSEMNKLFERTRKQLRENAEDMGNGCFKIYHKCDNACIGSIRNGTYDHDVYRDEALNNRFQIKGVELKSGYKDWILWISFAISCFLLCVVLLGFIMWACQKGNIRCNICI

SEQ ID NO: 972 - protein, 566 aa, Artificial Sequence
  derived and/or modified protein sequence (wt) from hemagglutinin__InfluenzaA__ABG26912
MKTIIALSYILCLVFAQKLPGNDNSTATLCLGHHAVPNGTLVKTITNDQIEVTNATELVQSSSTGRICDSPHRILDGKNCTLIDALLGDPHCDGFQNKEWDLFVERSKAYSNCYPYDVPDYASLRSLVASSGTLEFTKEGFNWTGVAQDGKSYACKRGSVNSFFSRLNWLHKLEYKYPALNVTMPNNDKFDKLYIWGVHHPSTDSDQTSLYVQASGRVTVSTKRSQQTVIPNIGSRPWVRGISSRISIYWTIVKPGDILLINSTGNLIAPRGYFKIRNGKSSIMRSDAPISNCNSECITPNGSIPNDKPFQNVNRITYGACPRYVKQNTLKLATGMRNVPEKQTRGIFGAIAGFIENGWEGMVDGWYGFRHQNSEGTGQAADLKSTQAAIDQINGKLNRLIEKTNEKFHQIEKEFSEVEGRIQDLEKYVEDTKIDLWSYNAELLVALENQHTIDLTDSEMNKLFERTRKQLRENAEDMGNGCFKIYHKCDNACIGSIRNGTYDHDVYRDEALNNRFQIKGVELKSGYKDWILWISFAISCFLLCVVLLGFIMWACQKGNIRCNICI

SEQ ID NO: 973 - protein, 565 aa, Artificial Sequence
  derived and/or modified protein sequence (wt) from hemagglutinin__InfluenzaA__ABG26945
MKAKLLVLLCTFTATYADTICIGYHANNSTDTVDTVLEKNVTVTHSVNLLEDSHNGKLCLLKGIAPLQLGNCSVAGWILGNPECELLISKESWSYIVETPNPENGTCYPGYFADYEELREQLSSVSSFERFEIFPKGSSWPNHTVTGVSASCSHNGKSSFYRNLLWLTGKNGLYPNLSMSYVNNKEKEVLVLWGVHHPPNIGNQRALYHTENAYVSVVSSHYSRRFTPEIAKRPKVRDQEGRINYYWTLLEPGDTIIFEASGNLIAPWYAFALSRGFGSGIITSNAPMGECDAKCQTPQGAINSSLPFQNVHPVTIGECPKYVRSAKLRMVTGLRNIPSIQSRGLFGAIAGFIEGGWTGMVDGWYGYHHQNEQGSGYAADQKSTQNAINGITNKVNSVIEKMNTQFTAVGKEFNKLERRMENLNKKVDDGFLDIWTYNAELLVLLENERTLDFHDSNVKNLYEKVKSQLKNNAKEIGNGCFEFYHKCNNECMESVKNGTYDYPKYSEESKLNREKIDGVKLESMGVYQILAIYSTVASSLVLLVSLGAISFWMCSNGSLQCRICI

SEQ ID NO: 974 - protein, 566 aa, Artificial Sequence
  derived and/or modified protein sequence (wt) from hemagglutinin__InfluenzaA__ABG26956
MKTIIALSYILCLVFAQKLPGNDNRTATLCLGHHAVPNGTLVKTITNDQIEVTNATELVQSSSTGRICDSPHQILDGENCTLIDALLGDPHCDGFQNKEWDLFVERSKAYSNCYPYDVPDYVSLRSLVASSGTLEFNNESFNWTGVAQNGTSSACKRRSDKSFFSKLNWLHQLKYKYPALNVTMPNNEKFDKLYIWGVHHPGTDSDQISLYAQASGRVTVSTKRSQQTVIPNIGSRPWVRGVSSRISIYWTIVKPGDILLINSTGNLIAPRGYFKIRSGKSSIMRSDAPIGKCNSECITPNGSIPNDKPFQNVNRITYGACPRYVKQNTLKLATGMRNVPEKQTRGIFGAIAGFIENGWEGMMDGWYGFRHQNSEGTGQAADLKSTQAAINQINGKLNRLIEKTNEKFHQIEKEFSEVEGRIQDLEKYVEDTKIDLWSYNAELLVALENQHTIDLTDSEMNKLFERTKKQLRENAEDMGNGCFKIYHKCDNACIGSIRNGTYDHDVYRDEALNNRFQIKGVELKSGYKDWVLWISFAISCFLLCIVLLGFIMWACQKGNIRCNICI

SEQ ID NO: 975 - protein, 565 aa, Artificial Sequence
  derived and/or modified protein sequence (wt) from hemagglutinin__InfluenzaA__ABG37120
MKAKLLVLLCTFTATYADTICIGYHANNSTDTVDTVLEKNVTVTHSVNLLEDSHNGKLCLLKGIAPLQLGNCSVAGWILGNPECELLISKESWSYIVETPNPENGTCYPGYFADYEELREQLSSVSSFERFEIFPKGSSWPNHTVTGVSASCSHNGESSFYRNLLWLTGKNGLYPNLSMSYVNNKEKEVLVLWGVHHPPNIGNQRALYHTENAYVSVVSSHYSRRFTPEIAKRPKVRDQEGRINYYWTLLEPGDTIIFEANGNLIAPWYAFALSRGFGSGIITSNAPMGECDAKCQTPQGAINSSLPFQNVHPVTIGECPKYVRSAKLRMVTGLRNIPSIQSRGLFGAIAGFIEGGWTGMVDGWYGYHHQNEQGSGYAADQKSTQNAINGITNKVNSVIEKMNTQFTAVGKEFNKLERRMENLNKKVDDGFLDIWTYNAELLVLLENERTLDFHDSNVKNLYEKVKSQLKNNAKEIGNGCFEFYHKCNNECMESVKNGTYDYPKYSEESKLNREKIDGVKLESMGVYQILAIYSTVASSLVLLVSLGAISFWMCSNGSLQCRICI

SEQ ID NO: 976 - protein, 566 aa, Artificial Sequence
  derived and/or modified protein sequence (wt) from hemagglutinin__InfluenzaA__ABG37131
MKTIIALSYISCLVFAQKLPGNDNSTATLCLGHHAVPNGTLVKTITNDQIEVTNATELVQSSSTGRICDGPHQILDGKNCTLIDALLGDPHCDGFQNKEWDLFVERSKAYSNCYPYDVPDYASLRSLVASSGTLEFTNESFNWTGVAQNGTSYACKRGSVKSFFSRLNWLHKLEYKYPALNVTMPNNDKFDKLYIWGVHHPSTDSDQTSLYVQSSGRVTVSTKRSQQTVTPNIGSRPWVRGISSRISIYWTIVKPGDILLINSTGNLIAPRGYFKIRRGKSSIMRSDAPIDNCNSECITPNGSIPNDKPFQNVNRITYGACPRYVKQNTLKLATGMRNVPEKQTRGIFGAIAGFIENGWEGMVDGWYGFRHQNSEGTGQAADLKSTQAAINQINGKLNRLIEKTNEKFHQIEKEFSEVEGRIQDLEKYVEDTKIDLWSYNAELLVALENQHTIDLTDSEMNKLFERTRKQLRENAEDMGNGCFKIYHKCDNACIGSIRNGTYDHDVYRDEALNNRFQIKGVELKSGYKDWILWISFAISCFLLCVVLLGFIMWACQKGNIRCNICI

SEQ ID NO: 977 - protein, 566 aa, Artificial Sequence; identical to SEQ ID NO: 783
  derived and/or modified protein sequence (wt) from hemagglutinin__InfluenzaA__ABG37142

SEQ ID NO: 978 - protein, 566 aa, Artificial Sequence
  derived and/or modified protein sequence (wt) from hemagglutinin__InfluenzaA__ABG37164
MKTIIALSYILCLVFAQKLPGNDNSTATLCLGHHAVPNGTLVKTITNDQIEVTNATELVQSSSTGRICDSPHRILDGKNCTLIDALLGDPHCDDFQNKEWDLFVERSKAYSNCYPYDVPDYASLRSLVASSGTLEFTKEGFNWTGVAQDGKSYACKRGSVNSFFSRLNWLHKLEYKYPALNVTMPNNDKFDKLYIWGVHHPSTDSDQTSLYVQASGRVTVSTKRSQQTVIPNIGSRPWVRGISSRISIYWTIVKPGDILLINSTGNLIAPRGYFKIRNGKSSIMRSDAPIGNCNSECITPNGSIPNDKPFQNVNRITYGACPRYVKQNTLKLATGMRNVPEKQTRGIFGAIAGFIENGWEGMVDGWYGFRHQNSEGTGQAADLKSTQAAIDQINGKLNRLIEKTNEKFHQIEKEFSEVEGRIQDLEKYVEDTKIDLWSYNAELLVALENQHTIDLTDSEMNKLFERTRKQLRENAEDMGNGCFKIYHKCDNACIGSIRNGTYDHDVYRDEALNNRFQIKGVELKSGYKDWILWISFAISCFLLCVVLLGFIMWACQKGNIRCNICI

SEQ ID NO: 979 - protein, 566 aa, Artificial Sequence
  derived and/or modified protein sequence (wt) from hemagglutinin__InfluenzaA__ABG37175
MKTIIALSYILCQVFAKKLPGNDNSTATLCLGHHAVPNGTLVKTITNDQIEVTNATELVQSSSTGRICDSPHRILDGKNCTLIDALLGDPHCDGFQNKEWDLFVERSKAYSNCYPYDVPDYASLRSLVASSGTLEFTNEGFNWTGVAQDGKSYSCKRGSVNSFFSRLNWLHKLEYKYPALNVTMPNNDKFDKLYIWGVHHPSTDSDQTSLYVQASGRVTVSTKRSQQTVIPNIGSRPWVRGISSRISIYWTIVKPGDILLINSTGNLIAPRGYFKIRNGKSSIMRSDAPIDNCNSECITPNGSIPNDKPFQNVNRITYGACPRYVKQNTLKLATGMRNVPEKQTRGIFGAIAGFIENGWEGMVDGWYGFRHQNSEGTGQAADLKSTQAAIDQINGKLNRLIEKTNEKFHQIEKEFSEVEGRIQDLEKYVEDTKIDLWSYNAELLVALENQHTIDLTDSEMNKLFERTRKQLRENAEDMGNGCFKIYHKCDNACIGSIRNGTYDHDVYRDEALNNRFQIKGVELKSGYKDWILWISFAISCFLLCVVLLGFIMWACQKGNIRCNICI

SEQ ID NO: 980 - protein, 566 aa, Artificial Sequence
  derived and/or modified protein sequence (wt) from hemagglutinin__InfluenzaA__ABG37186
MKTIIALSYILCQVFAQKLPGNDNSTATLCLGHHAVPNGTLVKTITNDQIEVTNATELVQSSSTGRICDSPHRILDGKNCTLIDALLGDPHCDGFQNKEWDLFVERSKAYSNCYPYDVPDYASLRSLVASSGTLEFTNEGFNWTGVAQDGKSYACKRGSVNSFFSRLNWLHKLEYKYPALNVTMPNNDKFDKLYIWGVHHPSTDSDQTSLYVQASGRVTVSTKRSQQTVIPNIGSRPWVRGISSRISIYWTIVKPGDILLISSTGNLIAPRGYFKIRNGKSSIMRSDAPIDNCNSECITPNGSIPNDKPFQNVNRVTYGACPRYVKQNTLKLATGMRNVPEKQTRGIFGAIAGFIENGWEGMVDGWYGFRHQNSEGTGQAADLKSTQAAIDQINGKLNRLIEKTNEKFHQIEKEFSEVEGRIQDLEKYVEDTKIDLWSYNAELLVALENQHTIDLTDSEMNKLFERTRKQLRENAEDMGNGCFKIYHKCDNACIGSIRNGTYDHDVYKDEALNNRFQIKGVVLKSGYKDWILWISFAISCFLLCVVLLGFIMWACQKGNIRCNICI

SEQ ID NO: 981 - protein, 566 aa, Artificial Sequence
  derived and/or modified protein sequence (wt) from hemagglutinin__InfluenzaA__ABG37197
MKTIIALSYILCQVFAQKLPGNDNSTATLCLGHHAVPNGTLVKTITNDQIEVTNATELVQSSSTGRICDSPHRILDGKNCTLIDALLGDPHCDGFQNKEWDLFVERSKAYSNCYPYDVPDYASLRSLVASSGTLEFTNEGFNWNGVAQDGKSYACKRGSVKSFFSRLNWLHKLEYKYPALNVTMPNNDKFDKLYIWGVHHPSTDSDQTSLYVQASGRVTVSTKRSQQTVIPNIGSRPWVRGISSRISIYWTIVKPGDILLINSTGNLIAPRGYFKIRNGKSSIMRSDAPIDNCNSECITPNGSIPNDKPFQNVNRITYGACPRYVKQNTLKLATGMRNVPEKQTRGIFGAIAGFIENGWEGMVDGWYGFRHQNSEGTGQAADLKSTQAAIDQINGKLNRLIEKTNEKFHQIEKEFSEVEGRIQDLEKYVEDTKIDLWSYNAELLVALENQHTIDLTDSEMNKLFERTRKQLRENAEDMGNGCFKIYHKCDNACIGSIRNGTYDHDVYRDEALNNRFQIKGVELKSGYKDWILWISFAISCFLLCVVLLGFIMWACQKGNIRCNICI

SEQ ID NO: 982 - protein, 566 aa, Artificial Sequence
  derived and/or modified protein sequence (wt) from hemagglutinin__InfluenzaA__ABG37208
MKTIIALSYISCLVFAQKLPGNDNSTATLCLGHHAVPNGTLVKTITNDQIEVTNATELVQSSSTGRICDSPHRILDGKNCTLIDALLGDPHCDGFQNEKWDLFVERSKAFSNCYPYDVPDYASLRSLVASSGTLEFINEGFNWTGVTQSGGSYACKRGSVNSFFSRLNWLYKSESKYPALNVTMPNNGKFDKLYIWGVHHPSTDKEQTNLYVRASGRVTVSTKRSQQTVIPNIGPRPWVRGLSSRISIYWTIVKPGDILLINSTGNLIAPRGYFKIRTGKSSIMRSDAPIGTCSSGCITPNGSIPNDKPFQNVNKITYGACPRYVKQNTLKLATGMRNVPEKQTRGIFGAIAGFIENGWEGMVDGWYGFRHQNSEGTGQAADLKSTQAAIDQINGKLNRLIEKTNEKFHQIEKEFSEVEGRIQDLEKYVEDTKIDLWSYNAELLVALENQHTIDMTDSEMNKLFEKTRKQLRENAEDMGNGCFKIYHKCDNACIGSIRNGTYDHDVYRDEALNNRFQIKGVELKSGYKDWILWISFAISCFLLCVVLLGFIMWACQKGNIRCNICI

SEQ ID NO: 983 - protein, 566 aa, Artificial Sequence
  derived and/or modified protein sequence (wt) from hemagglutinin__InfluenzaA__ABG37230
MKTIIALSYILCLVFAQKLPGNDNSTATLCLGHHAVPNGTLVKTITNDQIEVTNATELVQSSSTGRICDSPHRILDGKNCTLIDALLGDPHCDGFQNKEWDLFVERSKAYSNCYPYDVPDYASLRSLVASSGTLEFINEDFNWTGVAQDGKSYACKRGSVNSFFSRLNWLHQSKYKYPELNVTMPNNGKFDKLYIWGVHHPSTDSDQTSLYARASGRVTVSTKRSQQTVIPNIGFRPWVRGLSSRISIYWTIVKPGDILLINSTGNLIAPRGYFKIRNGKSSIMRSDAPIGNCSSECITPNGSIPNDKPFQNVNRITYGACPRYVKQNTLKLATGMRNVPEKQTRGIFGAIAGFIENGWEGMVDGWYGFRHQNSEGTGQAADLKSTQAAIDQINGKLNRLIEKTNEKFHQIEKEFSEVEGRIQDLEKYVEDTKIDLWSYNAGLLVALENQHTIDLTDSEMNKLFERTRKQLRENAEDMGNGCFKIYHKCDNACIGSIRNGTYDHDVYRDEALNNRFQIKGVELKSGYKDWILWISFAISCFLLCVVLLGFIMWACQKGNIRCNICI

SEQ ID NO: 984 - protein, 566 aa, Artificial Sequence
  derived and/or modified protein sequence (wt) from hemagglutinin__InfluenzaA__ABG37241
MKTIIALSYILCLVFAQKLPGNDNSTATLCLGHHAVPNGTLVKTITNDQIEVTNATELVQSSPTGRICDSPHRILDGKNCTLIDALLGDPHCDGFQNKEWDLFVERSKAYSNCYPYDVPDYASLRSLVASSGTLEFTNENFNWTGVAQDGKSYACKRGSVNSFFSRLNWLHKLEYKYPALNVTMPNNGKFDKLYIWGVHHPSTDSDQTSLYVRASGKVTVSTKRSQQTVIPDIGYRPWVRGLSSRISIYWTIVKPGDILLINSTGNLIAPRGYFKIRNGKSSIMRSDAPIGNCSSECITPNGSIPNDKPFQNVNRITYGACPRYVKQNTLKLATGMRNVPEKQTRGIFGAIAGFIENGWEGMVDGWYGFRHQNSEGTGQAADLKSTQAAIDQINGKLNRLVEKTNEKFHQIEKEFSEVEGRIQDLEKYVEDTKIDLWSYNAELLVALENQHTIDLTDSEMNKLFERTRKQLRENAEDMGNGCFKIYHKCDNACIGSIRNGTYDHDVYRDEALNNRFQIKGVELKSGYKDWILWISFAISCFLLCVVLLGFIMWACQKGNIRCNICI

SEQ ID NO: 985 - protein, 566 aa, Artificial Sequence
  derived and/or modified protein sequence (wt) from hemagglutinin__InfluenzaA__ABG37252
MKTIIALSYILCLVFAQKLTGNDNSTATLCLGHHAVPNGTLVKTITNDQIEVTNATELVQSSPTGRICDSPHRILDGKNCTLIDALLGDPHCDGFQNKEWDLFVERSKAYSNCYPYDVPDYASLRSLVASSGTLEFTNENFNWTGVAQDGKSYACKRGSVNSFFSRLNWLHKLEYKYPALNVTMPNNGKFDKLYIWGVHHPSTDSDQTSLYVRASGKVTVSTKRSQQTVIPDIGYRPWVRGLSSRISIYWTIVKPGDILLINSTGNLIAPRGYFKIRNGKSSIMRSDAPIGNCSSECITPNGSIPNDKPFQNVNRITYGACPRYVKQNTLKLATGMRNVPEKQTRGIFGAIAGFIENGWEGMVDGWYGFRHQNSEGTGQAADLKSTQAAIDQINGKLNRLVEKTNEKFHQIEKEFSEVEGRIQDLEKYVEDTKIDLWSYNAELLVALENQHTIDLTDSEMNKLFERTRKQLRENAEDMGNGCFKIYHKCDNACIGSIRNGTYDHDVYRDEALNNRFQIKGVELKSGYKDWILWISFAISCFLLCVVLLGFIMWACQKGNIRCNICI

SEQ ID NO: 986 - protein, 566 aa, Artificial Sequence
  derived and/or modified protein sequence (wt) from hemagglutinin__InfluenzaA__ABG37263
MKTIIALSYILCLVFAQKLPGNDNSTATLCLGHHAVPNGTLVKTITNDQIEVTNATELVQSSSTGRICDSPHRILDGKNCTLIDALLGDPHCDGFQNKEWDLFVERSKAYSNCYPYDVPDYASLRSLVASSGTLEFTKEGFNWTGVAQDGKSYACKRGSVNSFFSRLNWLHKLEYKYPALNVTMPNNDKFDKLYIWGVHHPSTDSDQTSLYVQASGRVTVSTKRSQQTVIPNIGSRPWVRGISSRISIYWTIVKPGDILLINSTGNLIAPRGYFKIRNGKSSIMRSDAPIGNCNSECITPNGSIPNDKPFQNVNRITYGACPRYVKQNTLKLATGMRNVPEKQTRGIFGAIAGFIENGWEGMVDGWYGFRHQNSEGTGQAADLKSTQAAIDQINGKLNRLIEKTNEKFHQIEKEFSEVEGRIQDLEKYVEDTKIDLWSYNAELLVALENQHTIDLTDSEMNKLFERTRKQLRENAEDMGNGCFKIYHKCDNTCIGSIRNGTYDHDVYRDEALNNRFQIKGVELKSGYKDWILWISFAISCFLLCVVLLGFIMWACQKGNIRCNICI

SEQ ID NO: 987 - protein, 566 aa, Artificial Sequence
  derived and/or modified protein sequence (wt) from hemagglutinin__InfluenzaA__ABG37274
MKTIIALSYILCLVFAQKLPGNDNSTATLCLGHHAVPNGTLVKTITNDQIEVTNATELVQSSPTGRICDSPHRILDGKNCTLIDALLGDPHCDGFQNKEWDLFVERSKAYSNCYPYDVPDYASLRSLVASSGTLEFTNENFNWTGVAQDGKSYACKRGSVNSFFSRLNWLHKLEYKYPALNVTMPNNGKFDKLYIWGVHHPSTDSDQISLYVRASGKVTVSTKRSQQTVIPDIGYRPWVRGLSSRISIYWTIVKPGDILLISSTGNLIAPRGYFKIRNGKSSIMRSDAPIGNCSSECITPNGSIPNDKPFQNVNRITYGACPRYVKQNTLKLATGMRNVPEKQTRGIFGAIAGFIENGWEGMVDGWYGFRHQNSEGTGQAADLKSTQAAIDQINGKLNRLVEKTNEKFHQIEKEFSEVEGRIQDLEKYVEDTKIDLWSYNAELLVALENQHTIDLTDSEMNKLFERTRKQLRENAEDMGNGCFKIYHKCDNACIGSIRNGTYDHDVYRDEALNNRFQIKGVELKSGYKDWILWISFAISCFLLCVVLLGFIMWACQKGNIRCNICI

SEQ ID NO: 988 - protein, 566 aa, Artificial Sequence
  derived and/or modified protein sequence (wt) from hemagglutinin__InfluenzaA__ABG37285
MKTIIALSYILCLVFAQKLPGNDNSTATLCLGHHAVPNGTLVKTITNDQIEVTNATELVQSSPTGRICDSPHRILDGKNCTLIDALLGDPHCDGFQNKEWDLFVERSKAYSNCYPYDVPDYASLRSLVASSGTLEFTNENFNWTGVAQDGKSYACKRGSVNSFFSRLNWLHKLDYKYPALNVTMPNNGKFDKLYIWGVHHPSTDSDQTSLYVRASGKVTVSTKRSQQTVIPDIGYRPWVRGLSSRISIYWTIVKPGDILLINSTGNLIAPRGYFKIRNGKSSIMRSDAPIGNCSSECITPNGSIPNDKPFQNVNRITYGACPRYVKQNTLKLATGMRNVPEKQTRGIFGAIAGFIENGWEGMVDGWYGFRHQNSEGTGQAADLKSTQAAIDQINGKLNRLVEKTNEKFHQIEKEFSEVEGRIQDLEKYVEDTKIDLWSYNAELLVALENQHTIDLTDSEMNKLFERTRKQLRENAEDMGNGCFKIYHKCDNACIGSIRNGTYDHDVYRDEALNNRFQIKGVELKSGYKDWILWISFAISCFLLCFVLLGFIMWACQKGNIRCNICI

SEQ ID NO: 989 - protein, 566 aa, Artificial Sequence
  derived and/or modified protein sequence (wt) from hemagglutinin__InfluenzaA__ABG37296
MKTIIALSYILCLVFAQKLPGNDNSTATLCLGHHAVPNGTLVKTITNDQIEVTNATELVQSSSTGRICDSPHRILDGKNCTLIDALLGDPHCDGFQNKEWDLFVERSKAYSNCYPYDVPDYASLRSLVASSGTLEFTKEGFNWTGVAQDGKSYACKRGSVNSFFSRLNWLHKLEYKYPALNVTMPNNDKFDKLYIWGVHHPSTDSDQTSLYVQASGRVTVSTKRSQQTVIPNIGSRPWVRGISSRISIYWTIVKPGDILLINSTGNLIAPRGYFKIRNGKSSIMRSDAPIGNCNSECITPNGSIPNDKPFQNVNRITYGACPRYVKQNTLKLATGMRNVPEKQTRGIFGAIAGFIENGWEGMVDGWYGFRHQNSEGTGQAADLKSTQAAIDQINGKLNRLIEKTNEKFHQIEKEFSEVEGRIQDLEKYVEDTKIDLWSYNAELLVALENQHTIDLTDSEMNKLFERTRKQLRENAEDMGNGCFKIYHKCDNACIGSIRNGTYDHDVYRDEALNNRFQIKGVELKSGYKDWILWISFAISCFLLCVVLLGFIMWACQKGNIRCNICI

SEQ ID NO: 990 - protein, 566 aa, Artificial Sequence; identical to SEQ ID NO: 984
  derived and/or modified protein sequence (wt) from hemagglutinin__InfluenzaA__ABG37307

SEQ ID NO: 991 - protein, 566 aa, Artificial Sequence; identical to SEQ ID NO: 989
  derived and/or modified protein sequence (wt) from hemagglutinin__InfluenzaA__ABG37318

SEQ ID NO: 992 - protein, 566 aa, Artificial Sequence
  derived and/or modified protein sequence (wt) from hemagglutinin__InfluenzaA__ABG37329
MKTIIALSYILCLVFAQKLPENDNSTATLCLGHHAVPNGTLVKTITNDQIEVTNATELVQSSPTGRICDSPHRILDGKNCTLIDALLGDPHCDGFQNKEWDLFVERSKAYSNCYPYDVPDYASLRSLVASSGTLEFTNENFNWTGVAQDGKSYACKRGSVNSFFSRLNWLHKLEYKYPALNVTMPNNGKFDKLYIWGVHHPSTDSDQTSLYVRASGKVTVSTKRSQQTVIPDIGYRPWVRGLSSRISIYWTIVKPGDILLINSTGNLIAPRGYFKIRNGKSSIMRSDAPIGNCSSECITPNGSIPNDKPFQNVNRITYGACPRYVKQNTLKLATGMRNVPEKQTRGIFGAIAGFIENGWEGMVDGWYGFRHQNSEGTGQAADLKSTQAAIDQINGKLNRLVEKTNEKFHQIEKEFSEVEGRIQDLEKYVEDTKIDLWSYNAELLVALENQHTIDLTDSEMNKLFERTRKQLRENAEDMGNGCFKIYHKCDNACIGSIRNGTYDHDVYRDEALNNRFQIKGVELKSGYKDWILWISFAISCFLLCVVLLGFIMWACQKGNIRCNICI

SEQ ID NO: 993 - protein, 566 aa, Artificial Sequence
  derived and/or modified protein sequence (wt) from hemagglutinin__InfluenzaA__ABG37340
MKTIIALSYILCLVFAQKLPGNDNSTATLCLGHHAVPNGTLVKTITNDQIEVTNATELVQSFPTGRICDSPHRILDGKNCTLIDALLGDPHCDGFQNKEWDLFVERSKAYSNCYPYDVPDYASLRSLVASSGTLEFTNENFNWTGVAQDGKSYSCKRGSVNSFFSRLNWLHKLEYKYPALNVTMPNNGKFDKLYIWGVHHPSTDSDQTSLYVRASGKVTVSTKRSQQTVIPDIGYRPWVRGLSSRISIYWTIVKPGDILLINSTGNLIAPRGYFKIRNGKSSIMRSDAPIGNCSSECITPNGSIPNDKPFQNVNRITYGACPRYVKQNTLKLATGMRNVPEKQTRGIFGAIAGFIENGWEGMVDGWYGFRHQNSEGTGQAADLKSTQAAIDQINGKLNRLVEKTNEKFHQIEKEFSEVEGRIQDLEKYVEDTKIDLWSYNAELLVALENQHTIDLTDSEMNKLFERTRKQLRENAEDMGNGCFKIYHKCDNACIGSIRNGTYDHDVYRDEALNNRFQIKGVELKSGYKDWILWISFAISCFLLCVVLLGFIMWACQKGNIRCNICI

SEQ ID NO: 994 - protein, 566 aa, Artificial Sequence
  derived and/or modified protein sequence (wt) from hemagglutinin__InfluenzaA__ABG37351
MKTIIALSYILCLVFAQKLPGNDNSTATLCLGHHAVPNGTLVKTITNDQIEVTNATELVQSSSTGRICDSPHRILDGKNCTLIDALLGDPHCDGFQNKEWDLFVERSKAYSNCYPYDVPDYASLRSLVASSGTLEFINEDFNWTGVAQDGKSYACKRGSVNSFFSRLNWLHKLEYKYPALNVTMPNNGKFDKLYIWGVHHPSTDSDQTSLYVRASGRVTVSTKRSQQTVIPNIGFRPWVRGLSSRISIYWTIVKPGDILLIDSTGNLIAPRGYFKIRNGKSSIMRSDAPIGNCSSECITPNGSIPNDKPFQNVNRITYGACPRYVKQNTLKLATGMRNVPEKQTRGIFGAIAGFIENGWEGMVDGWYGFRHQNSEGTGQAADLKSTQAAIDQINGKLNRLIEKTNEKFHQIEKEFSEVEGRIQDLEKYVEDTKIDLWSYNAGLLVALENQHTIDLTDSEMNKLFERTRKQLRENAEDMGNGCFKIYHKCDNACIGSIRNGTYDHDVYRDEALNNRFQIKGVELKSGYKDWILWISFAISCFLLCVVLLGFIMWACQKGNIRCNICI

SEQ ID NO: 995 - protein, 565 aa, Artificial Sequence
  derived and/or modified protein sequence (wt) from hemagglutinin__InfluenzaA__ABG37362
MKVKLLVLLCTFTATYADTICIGYHANNSTDTVDTVLEKNVTVTHSVNLLEDSHNGKLCLLKGIAPLQLGNCSVAGWILGNPECELLISKESWSYIVETPNPENGTCYPGYFADYEELREQLSSVSSFERFEIFPKESSWPNHTVTGVSASCSHNGKSSFYRNLLWLTGKNGLYPNLSKSYANNKEKEVLVLWGVHHPPNIGNQRALYHTENAYVSVVSSHYSRRFTPEIAKRPKVRDQEGRINYYWTLLEPGDTIIFEANGNLIAPWYAFALSRGFGSGIITSNAPMDECDAKCQTPQGAINSSLPFQNVHPVTIGECPKYVRSAKLRMVTGLRNIPSIQSRGLFGAIAGFIEGGWTGMVDGWYGYHHQNEQGSGYAADQKSTQNAINGITNKVNSVIEKMNTQFTAVGKEFNKLERRMENLNKKVDDGFLDIWTYNAELLVLLENERTLDFHDSNVKNLYEKVKSQLKNNAKEIGNGCFEFYHKCNNECMESVKNGTYDYPKYSEESKLNREKIDGVKLESMGVYQILAIYSTVASSLVLLVSLGAISFWMCSNGSLQCRICI

SEQ ID NO: 996 - protein, 565 aa, Artificial Sequence; identical to SEQ ID NO: 800
  derived and/or modified protein sequence (wt) from hemagglutinin__InfluenzaA__ABG37384

SEQ ID NO: 997 - protein, 565 aa, Artificial Sequence; identical to SEQ ID NO: 870
  derived and/or modified protein sequence (wt) from hemagglutinin__InfluenzaA__ABG37395

SEQ ID NO: 998 - protein, 566 aa, Artificial Sequence; identical to SEQ ID NO: 777
  derived and/or modified protein sequence (wt) from hemagglutinin__InfluenzaA__ABG37406

SEQ ID NO: 999 - protein, 566 aa, Artificial Sequence
  derived and/or modified protein sequence (wt) from hemagglutinin__InfluenzaA__ABG37428
MKTIIALSYILCLVFAQKLPGNDNSTATLCLGHHAVPNGTLVKTITNDQIEVTNATELVQSSSTGRICDSPHQILDGENCTLIDALLGDPHCDGFQNKEWDLFVERSKAYSNCYPYDVPDYVSLRSLVASSGTLEFNNESFNWTGVAQNGTSSACKRRSDKSFFSRLNWLHQLKYKYPALNVTMPNNEKFDKLYIWGVHHPGTDSDQISLYAQASGRVTVSTKRSQQTVIPNIGSRPWVRGVSSRISIYWTIVKPGDILLINSTGNLIAPRGYFKIRSGKSSIMRSDAPIGKCNSECITPNGSIPNDKPFQNVNRITYGACPRYVKQNTLKLATGMRNVPEKQTRGIFGAIAGFIENGWEGMMDGWYGFRHQNSEGTGQAADLKSTQAAINQINGKLNRLIEKTNEKSHQIEKEFSEVEGRIQDLEKYVEDTKIDLWSYNAELLVALENQHTIDLTDSEMNKLFERTKKQLRENAEDMGNGCFKIYHKCDNACIGSIRNGTYDHDVYRDEALNNRFQIKGVELKSGYKDWVLWISFAISCFLLCIVLLGFIMWACQKGNIRCNICI

SEQ ID NO: 1000 - protein, 566 aa, Artificial Sequence; identical to SEQ ID NO: 562
  derived and/or modified protein sequence (wt) from hemagglutinin__InfluenzaA__ABG37439

SEQ ID NO: 1001 - protein, 566 aa, Artificial Sequence; identical to SEQ ID NO: 640
  derived and/or modified protein sequence (wt) from hemagglutinin__InfluenzaA__ABG37461

SEQ ID NO: 1002 - protein, 566 aa, Artificial Sequence
  derived and/or modified protein sequence (wt) from hemagglutinin__InfluenzaA__ABG37472
MKTIIALSYILCLVFAQKLPGNDNSTATLCLGHHAVPNGTLVKTITNDQIEVTNATELVQSSSTGRICDSPHQVLDGENCTLIDALLGDPHCDGFQNKEWDLFVERSKAYSNCYPYDVPDYVSLRSLVASSGTLEFNNESFNWTGVAQNGTSSACKRRSDKSFFSRLNWLHQLKYKYPALNVTMPNNEKFDKLYIWGVHHPGTDSDQISLYAQASGRVTVSTKRSQQTVIPNIGSRPWVRGVSSRISIYWTIVKPGDILLINSTGNLIAPRGYFKIRSGKSSIMRSDAPIGKCNSECITPNGSIPNDKPFQNVNRITYGPCPRYVKQNTLKLATGMRNVPEKQTRGIFGAIAGFIENGWEGMMDGWYGFRHQNSEGTGQAADLKSTQAAINQINGKLNRLIEKTNEKFHQIEKEFSEVEGRIQDLEKYVEDTKIDLWSYNAELLVALENQHTIDLTDSEMNKLFERTKKQLRENAEDMGNGCFKIYHKCDNACIGSIRNGTYDHDVYRDEALNNRFQIKGVELKSGYKDWILWISFAISCFLLCIVLLGFIMWACQKGNIRCNICI

SEQ ID NO: 1003 - protein, 566 aa, Artificial Sequence; identical to SEQ ID NO: 562
  derived and/or modified protein sequence (wt) from hemagglutinin__InfluenzaA__ABG37483

SEQ ID NO: 1004 - protein, 566 aa, Artificial Sequence; identical to SEQ ID NO: 640
  derived and/or modified protein sequence (wt) from hemagglutinin__InfluenzaA__ABG37494

SEQ ID NO: 1005 - protein, 566 aa, Artificial Sequence
  derived and/or modified protein sequence (wt) from hemagglutinin__InfluenzaA__ABG37505
MKTIIALSYILCLVFAQKLPGNDNSMATLCLGHHAVPNGTLVKTITNDQIEVTNATELVQSSSTGRICDSPHQILDGENCTLIDALLGDPHCDGFQNKEWDLFVERSKAYSNCYPYDVPDYVSLRSLVASSGTLEFNNESFNWTGVAQNGTSSACKRRSDKSFFSRLNWLHQLKYKYPALNVTMPNNEKFDKLYIWGVHHPGTDSDQISLYAQASGRVTVSTKRSQQTVIPNIGSRPWVRGVSSRISIYWTIVKPGDILLINSTGNLIAPRGYFKIRSGKSSIMRSDAPIDKCNSECITPNGSIPNDKPFQNVNRITYGLCPRYVKQNTLKLATGMRNVPEKQTRGIFGAIAGFIENGWEGMMDGWYGFRHQNSEGTGQAADLKSTQAAINQINGKLNRLIEKTNEKFHQIEKEFSEVEGRIQDLEKYVEDTKIDLWSYNAELLVALENQHTIDLTDSEMNKLFERTKKQLRENAEDMGNGCFKIYHKCDNACIGSIRNGTYDHDVYRDEALNNRFQIKGVELKSGYKDWILWISFAISCFLLCIVLLGFIMWACQKGNIRCNICI

SEQ ID NO: 1006 - protein, 566 aa, Artificial Sequence; identical to SEQ ID NO: 516
  derived and/or modified protein sequence (wt) from hemagglutinin__InfluenzaA__ABG37516

SEQ ID NO: 1007 - protein, 566 aa, Artificial Sequence; identical to SEQ ID NO: 516
  derived and/or modified protein sequence (wt) from hemagglutinin__InfluenzaA__ABG37527

SEQ ID NO: 1008 - protein, 566 aa, Artificial Sequence; identical to SEQ ID NO: 516
  derived and/or modified protein sequence (wt) from hemagglutinin__InfluenzaA__ABG37538

SEQ ID NO: 1009 - protein, 566 aa, Artificial Sequence; identical to SEQ ID NO: 516
  derived and/or modified protein sequence (wt) from hemagglutinin__InfluenzaA__ABG37549

SEQ ID NO: 1010 - protein, 566 aa, Artificial Sequence; identical to SEQ ID NO: 516
  derived and/or modified protein sequence (wt) from hemagglutinin__InfluenzaA__ABG37560

SEQ ID NO: 1011 - protein, 566 aa, Artificial Sequence; identical to SEQ ID NO: 516
  derived and/or modified protein sequence (wt) from hemagglutinin__InfluenzaA__ABG37571

SEQ ID NO: 1012 - protein, 566 aa, Artificial Sequence
  derived and/or modified protein sequence (wt) from hemagglutinin__InfluenzaA__ABG37582
MKTIIALSYILCLVFAQKLPGNDNSTATLCLGHHAVPNGTIVKTITNDQIEVTNATELVQISSTGGICDSPHQILDGENCTLIDALLGDPQCDGFQNKKWDLFVERSKAYSNCYPYDVPDHASLRSLVASSGTLEFNNESFDWTGVTQNGTSSACKRRSNKSFFSRLNWLTHLKYKYPALNVTMPNNEKFDKLYIWGVHHPGTDSDQISLYAQASGRITVSTKRSQQTVIPNIGSRPRVRDVSSRISIYWTIVKPGDILLINSTGNLIAPRGYFKIRSGKSSIMRSDAPIGKCNSECITPNGSIPNDKPFQNVNRITYGACPRYVKQNTLKLATGMRNVPEKQTRGIFGAIAGFIENGWEGMVDGWYGFRHQNSEGTGQAADLKSTQAAINQINGKLNRLIGKTNEKFHQIEKEFSEVEGRIQDLEKYVEDTKIDLWSYNAELLVALENQHTIDLTDSEMNKLFERTKKQLRENAEDMGNGCFKIYHKCDNACIGSIRNGTYDHDVYRDEALNNRFQIKGVELKSGYKDWILWISFAISCFLLCVALLGFIMWACQKGNIRCNICI

SEQ ID NO: 1013 - protein, 566 aa, Artificial Sequence; identical to SEQ ID NO: 516
  derived and/or modified protein sequence (wt) from hemagglutinin__InfluenzaA__ABG37604

SEQ ID NO: 1014 - protein, 566 aa, Artificial Sequence; identical to SEQ ID NO: 516
  derived and/or modified protein sequence (wt) from hemagglutinin__InfluenzaA__ABG37615

SEQ ID NO: 1015 - protein, 565 aa, Artificial Sequence; identical to SEQ ID NO: 742
  derived and/or modified protein sequence (wt) from hemagglutinin__InfluenzaA__ABG47807

SEQ ID NO: 1016 - protein, 565 aa, Artificial Sequence; identical to SEQ ID NO: 741
  derived and/or modified protein sequence (wt) from hemagglutinin__InfluenzaA__ABG47818

SEQ ID NO: 1017 - protein, 566 aa, Artificial Sequence
  derived and/or modified protein sequence (wt) from hemagglutinin__InfluenzaA__ABG47829
MKAKLLVLLCAFTATYADTICIGYHANNSTDTVDTVLEKNVTVTHSVNLLEDSHNGKLCRLKGTAPLQLGNCSVAGWILGNPECESLFSKESWSYIAETPNPENGTCYPGYFADYEELREQLSSVSSFERFEIFPKESSWPNHTVTKGVTASCSHNGKSSFYKNLLWLTEKNGLYPNLSKSYVNNKEKEVLVLWGVHHPSNIGDQRAIYHTENAYVSVVSSHYSRRFTPEITKRPKVRNQEGRINYYWTLLEPGDTIIFEANGNLIAPWYAFALSRGFGSGIITSNASMGECDAKCQTPQGAINSSLPFQNVHPVTIGECPKYVRSTKLRMVTGLRNIPSIQSRGLFGAIAGFIEGGWTGMIDGWYGYHHQNEQGSGYAADQKSTQNAIDGITNKVNSVIEKMNTQFTAVGKEFNKLERRMENLNKKVDDGFLDIWTYNAELLVLLENERTLDFHDSNVKNLYEKVKTQLKNNAKEIGNGCFEFYHKCNNECMESVKNGTYDYPKYSEESKLNREKIDGVKLESMGVYQILAIYSTVASSLVLLVSLGAISFWMCSNGSLQCRICI

SEQ ID NO: 1018 - protein, 566 aa, Artificial Sequence
  derived and/or modified protein sequence (wt) from hemagglutinin__InfluenzaA__ABG47840
MKVKLLVLLCAFTATYADTICIGYHANNSTDTVDTVLEKNVTVTHSVNLLEDSHNGKLCRLKGTAPLQLGNCSVAGWILGNPECESLFSKESWSYIAETPNPENGTCYPGYFADYEELREQLSSVSSFERFEIFPKESSWPNHTVTKGVTASCSHNGKSSFYKNLLWLTEKNGLYPNLSKSYVNNKEKEVLVLWGVHHPSNIGDQRAIYHTENAYVSVVSSHYSRRFTPEIAKRPKVRDQEGRINYYWTLLEPGDTIIFEANGNLIAPWYAFALSRGFGSGIITSNASMSECDAKCQTPQGAINSSLPFQNVHPVTIGECPKYVRSTKLRMVTGLRNIPSIQSRGLFGAIAGFIEGGWTGMIDGWYGYHHQNEQGSGYAADQKSTQNAIDGITNKVNSVIEKMNTQFTAVGKEFNKLERRMENLNKKVDDGFLDIWTYNAELLVLLENERTLDFHDSNVKNLYEKVKNQLKNNAKEIGNGCFEFYHKCNNECMESVKNGTYDYPKYSEESKLNREKIDGVKLESMGVYQILAIYSTVASSLVLLVSLGAISFWMCSNGSLQCRICI

SEQ ID NO: 1019 - protein, 566 aa, Artificial Sequence
  derived and/or modified protein sequence (wt) from hemagglutinin__InfluenzaA__ABG47851
MKTIIALSYILCLVFAQKLPGNDNSTATLCLGHHAVPNGTLVKTITNDQIEVTNATELVQSSSTGRICDSPHRILDGKNCTLIDALLGDPHCDGFQNKEWDLFVERSKAYSNCYPYDVPDYASLRSLVASSGTLEFTNEGFNWTGVAQDGKSYACKRGSVNSFFSRLNWLHKLEYKYPALNVTMPNNDKFDKLYIWGVHHPSTDSDQTSLYVQASGRVTVSTKRSQQTVIPNIGSRPWVRGISSRISIYWTIVKPGDILLINSTGNLIAPRGYFKIRNGKSSIMRSDAPIDNCNSECITPNGSIPNDKPFQNVNRITYGACPRYVKQNTLKLATGMRNVPEKQTRGIFGAIAGFIENGWEGMVDGWYGFRHQNSEGTGQAADLKSTQAAIDQINGKLNRLIEKTNEKFHQIEKEFSEVEGRIQDLEKYVEDTKIDLWSYNAELLVALENQHTIDLTDSEMNKLFERTRKQLRENAEDMGNGCFKIYHKCDNACIGSIRNGTYNHDVYRDEALNNRFQIKGVELKSGYKDWILWISFAISCFLLCVVLLGFIMWACQKGNIRCSICI

SEQ ID NO: 1020 - protein, 566 aa, Artificial Sequence
  derived and/or modified protein sequence (wt) from hemagglutinin__InfluenzaA__ABG47862
MRTIIALSYILCLVFAQKLPGNDNSTATLCLGHHAVPNGTLVKTITNDQIEVTNATELVQSSSTGRICNSPHRILDGKNCTLIDALLGDPHCDGFQNKEWDLFVERSKAYSNCYPYDVPDYASLRSLIASSGTLEFTNEGFNWTGVAQDGTSYACKRGSVKSFFSRLNWLHKLEYKYPALNVTMPNNDKFDKLYIWGVHHPSTDSDQTSLYVQASGRVTVSTKRSQQTVIPNIGSRPWVRGVSSRISIYWTIVKPGDILLINSTGNLIAPRGYFKIRSGKSSIMRSDAPIGNCNSECITPNGSIPNDKPFQNVNRITYGACPRYVKQNTLKLATGMRNVPEKQTRGIFGAIAGFIENGWEGMVDGWYGFRHQNSEGTGQAADLKSTQAAINQINGKLNRLIEKTNEKFHQIEKEFSEVEGRIQDLEKYVEDTKIDLWSYNAELLVALENQHTIDLTDSEMNKLFERTRKQLRENAEDMGNGCFKIYHKCDNACIGSIRNGTYDHDVYRDEALNNRFQIKGVELKSGYKDWILWISFAISCFLLCVVLLGFIMWACQKGNIRCNICI

SEQ ID NO: 1021 - protein, 566 aa, Artificial Sequence; identical to SEQ ID NO: 984
  derived and/or modified protein sequence (wt) from hemagglutinin__InfluenzaA__ABG47873

SEQ ID NO: 1022 - protein, 566 aa, Artificial Sequence; identical to SEQ ID NO: 989
  derived and/or modified protein sequence (wt) from hemagglutinin__InfluenzaA__ABG47895

SEQ ID NO: 1023 - protein, 566 aa, Artificial Sequence; identical to SEQ ID NO: 984
  derived and/or modified protein sequence (wt) from hemagglutinin__InfluenzaA__ABG47906

SEQ ID NO: 1024 - protein, 566 aa, Artificial Sequence
  derived and/or modified protein sequence (wt) from hemagglutinin__InfluenzaA__ABG47917
MKTIIALSYILCLVFAQKLPGNDNSTATLCLGHHAVPNGTLVKTITNDQIEVTNATELVQSSSTGRICDSPHRILDGKNCTLIDALLGDPHCDGFQNKEWDLFVERSKAYSNCYPYDVPDYASLRSLVASSGTLEFINEDFNWTGVAQDGKSYACKRGSVNSFFSRLNWLHKLEYKYPALNVTMPNNGKFDKLYIWGVHHPSTDSDQTSLYVRASGRVTVSTKRSQQTVIPNIGFRPWVRGLSSRISIYWTIVKPGDILLINSTGNLIAPRGYFKIRNGKSSIMRSDAPIGNCSSECITPNGSIPNDKPFQNVNRITYGACPRYVKQNTLKLATGMRNVPEKQTRGIFGAIAGFIENGWEGMVDGWYGFRHQNSEGTGQAADLKSTQAAIDQINGKLNRLIEKTNEKFHQIEKEFSEVEGRIQDLEKYVEDTKIDLWSYNAGLLVALENQHTIDLTDSEMNKLFERTRKQLRENAEDMGNGCFKIYHKCDNACIGSIRNGTYDHDVYRDEALNNRFQIKGVELKSGYKDWILWISFAISCFLLCVVLLGFIMWACQKGNIRCNICI

SEQ ID NO: 1025 - protein, 566 aa, Artificial Sequence; identical to SEQ ID NO: 1024
  derived and/or modified protein sequence (wt) from hemagglutinin__InfluenzaA__ABG47928

SEQ ID NO: 1026 - protein, 566 aa, Artificial Sequence
  derived and/or modified protein sequence (wt) from hemagglutinin__InfluenzaA__ABG47939
MKTIIALSYILCLVFAQKLPGNDNSTATLCLGHHAVPNGTLVKTITNDQIEVTNATELVQSSSTGRICDSPYRILDGKNCTLIDALLGDPHCDGFQNKEWDLFVERSKAYSNCYPYDVPDYASLRSLVASSGTLEFINEDFNWTGVAQDGKSYACKRGSVNSFFSRLNWLHKLEYKYPALNVTMPNNGKFDKLYIWGVHHPSTDSDQTSLYVRASGRVTVSTKRSQQTVIPNIGFRPWVRGLSSRISIYWTIVKPGDILLINSTGNLIAPRGYFKIRNGKSSIMRSDAPIGNCSSECITPNGSIPNDKPFQNVNRITYGACPRYVKQNTLKLATGMRNVPEKQTRGIFGAIAGFIENGWEGMVDGWYGFRHQNSEGTGQAADLKSTQAAIDQINGKLNRLIEKTNEKFHQIEKEFSEVEGRIQDLEKYVEDTKIDLWSYNAGLLVALENQHTIDLTDSEMNKLFERTRKQLRENAEDMGNGCFKIYHKCDNACIGSIRNGTYDHDVYRDEALNNRFQIKGVELKSGYKDWILWISFAISCFLLCVVLLGFIMWACQKGNIRCNICI

SEQ ID NO: 1027 - protein, 566 aa, Artificial Sequence
  derived and/or modified protein sequence (wt) from hemagglutinin__InfluenzaA__ABG47950
MKTIIALSYILCLVFAQKLPGNDNSTATLCLGHHAVPNGTLVKTITNDQIEVTNATELVQSSSTGRICDSPHRILDGKNCTLIDALLGDPHCDGFQNKEWDLFVERSKAYSNCYPYDVPDYASLRSLVASLGTLEFINEDFNWTGVAQDGKSYSCKRGSVNSFFSRLNWLHKLEYKYPALNVTMPNNGKFDKLYIWGVHHPSTDSDQTSLYARASGRVTVSTKRSQQTVIPNIGFRPWVRGLSSRISIYWTIVKPGDILLINSTGNLIAPRGYFKIRTGKSSIMRSDAPIGNCSSECITPNGNIPNDKPFQNVNRITYGACPRYVKQNTLKLATGMRNVPEKQTRGIFGAIAGFIENGWEGMVDGWYGFRHQNSEGTGQAADLKSTQAAIDQINGKLNRLIEKTNEKFHQIEKEFSEVEGRIQDLEKYVEDTKIDLWSYNAGFLVALENQHTIDLTDSEMNKLFERTRKQLRENAEDMGNGCFKIYHKCDNACIGSIRNGTYDHDVYRDEALNNRFQIKGVELKSGYKDWILWISFAISCFLLCVVLLGFIMWACQKGNIRCNICI

SEQ ID NO: 1028 - protein, 566 aa, Artificial Sequence
  derived and/or modified protein sequence (wt) from hemagglutinin__InfluenzaA__ABG47961
MKTIIALSYILCLVFAQKLPGNDNSTATLCLGHHAVPNGTLVKTITNDQIEVTNATELVQSSSTGRICDSPHRILDGKNCTLIDALLGDPHCDGFQNKEWDLFVERSKAYSNCYPYDVPDYASLRSLVASSGTLEFINEDFNWTGVAQDGKSYSCKRGSVNSFFSRLNWLHKLEYKYPALNVTMPNNGKFDKLYIWGVHHPSTDSDQTSLYVRASGGVTVSTKRSQQTVIPNIGSRPWVRGLSSRISIYWTIVKPGDILLINSTGNLIAPRGYFKMRNGKSSIMRSDAPIGNCSSECITPNGSIPNDKPFQNVNRITYGACPRYVKQNTLKLATGMRNVPEKQTRGIFGAIAGFIENGWEGMVDGWYGFRHQNSEGTGQAADLKSTQAAIDQINGKLNRLIGKTNEKFHQIEKEFSEVEGRIQDLEKYVEDTKIDLWSYNAELLVALENQHTIDLTDSEMNKLFERTRKQLRENAEDMGNGCFKIYHKCDNACIGSIRNGTYDHDVYRDEALNNRFQIKGVELKSGYKDWILWISFAISCFLLCVVLLGFIMWACQKGNIRCNICI

SEQ ID NO: 1029 - protein, 566 aa, Artificial Sequence; identical to SEQ ID NO: 1024
  derived and/or modified protein sequence (wt) from hemagglutinin__InfluenzaA__ABG47972

SEQ ID NO: 1030 - protein, 566 aa, Artificial Sequence; identical to SEQ ID NO: 1024
  derived and/or modified protein sequence (wt) from hemagglutinin__InfluenzaA__ABG47983

SEQ ID NO: 1031 - protein, 566 aa, Artificial Sequence; identical to SEQ ID NO: 1024
  derived and/or modified protein sequence (wt) from hemagglutinin__InfluenzaA__ABG47994

SEQ ID NO: 1032 - protein, 566 aa, Artificial Sequence
  derived and/or modified protein sequence (wt) from hemagglutinin__InfluenzaA__ABG48005
MKTIIALSYILCLVFAQKLPGNDNSTATLCLGHHAVPNGTLVKTITNDQIEVTNATELVQSSSTGRICDSPHRILDGKNCTLIDALLGDPHCDGFQNKEWDLFVERSKAYSNCYPYDVPDYASLRSLVASSGTLEFINEDFNWTGVAQDGKSYACKRGSVNSFFSRLNWLHKLEYKYPALNVTMPNNGKFDKLYIWGVHHPSTDSDQTSLYVRASGRVTVSTKRSQQTVIPNIGFRPWVRGLSSRISIYWTIVKPGDILLINSTGNLIAPRGYFKIRNGKSSIMRSDAPIGNCSSECITPNGSIPNDKPFQNVNRITYGACPRYVKQNTLKLATGMRNVPEKQTRGIFGAIAGFIENGWEGMVDGWYGFRHQNSEGTGQAADLKSTQAAINQINGKLNRLIEKTNEKFHQIEKEFSEVEGRIQDLEKYVEDTKIDLWSYNAGLLVALENQHTIDLTDSEMNKLFERTRKQLRENAEDMGNGCFKIYHKCDNACIGSIRNGTYDHDVYRDEALNNRFQIKGVELKSGYKDWILWISFAISCFLLCVVLLGFIMWACQKGNIRCNICI

SEQ ID NO: 1033 - protein, 566 aa, Artificial Sequence; identical to SEQ ID NO: 1024
  derived and/or modified protein sequence (wt) from hemagglutinin__InfluenzaA__ABG48016

SEQ ID NO: 1034 - protein, 566 aa, Artificial Sequence; identical to SEQ ID NO: 1024
  derived and/or modified protein sequence (wt) from hemagglutinin__InfluenzaA__ABG48027

SEQ ID NO: 1035 - protein, 565 aa, Artificial Sequence
  derived and/or modified protein sequence (wt) from hemagglutinin__InfluenzaA__ABG48049
MKVKLLVLLCTFTATYADTICIGYHANNSTDTVDTVLEKNVTVTHSVNLLEDSHNGKLCLLKGIAPLQLGNCSVAGWILGNPECELLISKESWSYIVETPNPENGTCYPGYFADYEELREQLSSVSSFERFEIFPKESSWPNHTVTGVSASCSHNGKSSFYRNLLWLTGKNGLYPNLSKSYANNKEKEVLVLWGVHHPPNIGDQRALYHTENAYVSVVSTHYSRRFTPEIAKRPKVRDQEGRINYYWTLLEPGDTIIFEANGNLIAPRYAFALSRGFGSGIITSNAPMDECDAKCQTPQGAINSSLPFQNVHPVTIGECPKYVRSAKLRMVTGLRNIPSIQSRGLFGAIAGFIEGGWTGMVDGWYGYHHQNEQGSGYAADQKSTQNAINGITNKVNSVIEKMNTQFTAVGKEFNKLERRMENLNKKVDDGFLDIWTYNAELLVLLENERTLDFHDSNVKNLYEKVKSQLKNNAKEIGNGCFEFYHKCNNECMESVKNGTYDYPKYSEESKLNREKIDGVKLESMGVYQILAIYSTVASSLVLLVSLGAISFWMCSNGSLQCRICI

SEQ ID NO: 1036 - protein, 566 aa, Artificial Sequence; identical to SEQ ID NO: 650
  derived and/or modified protein sequence (wt) from hemagglutinin__InfluenzaA__ABG48060

SEQ ID NO: 1037 - protein, 566 aa, Artificial Sequence; identical to SEQ ID NO: 650
  derived and/or modified protein sequence (wt) from hemagglutinin__InfluenzaA__ABG48071

SEQ ID NO: 1038 - protein, 566 aa, Artificial Sequence
  derived and/or modified protein sequence (wt) from hemagglutinin__InfluenzaA__ABG48082
MKTIIALSYILCLVFAQKLPGNDNSTATLCLGHHAVPNGTLVKTITNDQIEVTNATELVQSSSTGRICDSPHQILDGENCTLIDALLGDPHCDGFQNKEWDLFVERSKAYSNCYPYDVPDYVSLRSLVASSGTLEFNNESFNWTGVAQNGTSSACKRRSDKSFFSRLNWLHQLKYKYPALNVTMPNNEKFDKLYIWGVLHPGTDSDQISLYAQASGRVTVSTKRSQQTVIPNIGSRPWVRGVSSRISIYWTIVKPGDILLINSTGNLIAPRGYFKIRSGKSSIMRSDAPIGKCNSECITPNGSIPNGKPFQNVNRITYGACPRYVKQNTLKLATGMRNVPEKQTRGIFGAIAGFIENGWEGMMDGWYGFRHQNSEGTGQAADLKSTQAAINQINGKLNRLIEKTNEKFHQIEKEFSEVEGRIQDLEKYVEDTKIDLWSYNAELLVALENQHTIDLTDSEMNKLFERTKKQLRENAEDMGNGCFKIYHKCDNACIGSIRNGTYDHDVYRDEALNNRFQIKGVELKSGYKDWILWISFAISCFLLCIVLLGFIMWACQKGNIRCNICI

SEQ ID NO: 1039 - protein, 566 aa, Artificial Sequence
  derived and/or modified protein sequence (wt) from hemagglutinin__InfluenzaA__ABG48104
MKTIIALSYILCLVFAQKLPGNDNSTATLCLGHHAVPNGTLVKTITNDQIEVTNATELVQSSSTGRICDSPHQILDGENCTLIDALLGDPHCDGFQNKEWDLFVERSRAYSNCYPYDVPDYVSLRSLVASSGTLEFNNESFNWTGVAQNGTSSACKRRSDKSFFSRLNWLHQLKYKYPALNVTMPNNEKFDKLYIWGVHHPGTDSDQISLYAQASGRVTVSTKRSQQTVIPNIGSRPWVRGVSSRISIYWTIVKPGDILLINSTGNLIAPRGYFKIRSGKSSIMRSDAPIGKCNSECITPNGSIPNDKPFQNVNRITYGPCPRYVKQNTLKLATGMRNVPEKQTRGIFGAIAGFIENGWEGMMDGWYGFRHQNSEGTGQAADLKSTQAAINQINGKLNRLIEKTNEKFHQIEKEFSEVEGRIQDLEKYVEDTKIDLWSYNAELLVALENQHTIDLTDSEMNKLFERTKKQLRENAEDMGNGCFKIYHKCDNACIGSIRNGTYDHDVYRDEALNNRFQIKGVELKSGYKDWILWISFAISCFLLCIVLLGFIMWACQKGNIRCNICI

SEQ ID NO: 1040 - protein, 566 aa, Artificial Sequence; identical to SEQ ID NO: 640
  derived and/or modified protein sequence (wt) from hemagglutinin__InfluenzaA__ABG48115

SEQ ID NO: 1041 - protein, 566 aa, Artificial Sequence; identical to SEQ ID NO: 647
  derived and/or modified protein sequence (wt) from hemagglutinin__InfluenzaA__ABG48126

SEQ ID NO: 1042 - protein, 566 aa, Artificial Sequence; identical to SEQ ID NO: 562
  derived and/or modified protein sequence (wt) from hemagglutinin__InfluenzaA__ABG48148

SEQ ID NO: 1043 - protein, 566 aa, Artificial Sequence; identical to SEQ ID NO: 562
  derived and/or modified protein sequence (wt) from hemagglutinin__InfluenzaA__ABG48159

SEQ ID NO: 1044 - protein, 566 aa, Artificial Sequence
  derived and/or modified protein sequence (wt) from hemagglutinin__InfluenzaA__ABG48170
MKTIIALSYILCLVFAQKLPGNDNSTATLCLGHHAVPNGTLVKTITNDQIEVTNATELVQSSSTGRICDSPHQILDGENCTLIDALLGDPHCDGFQNKEWDLFVERSKAYSNCYPYDVPDYVSLRSLVASSGTLEFNNESFNWTGVAQNGTSSACKRRSDKSFFSRLNWLHQLKYKYPALNVTMPNNEKFDKLYIWGVHHPGTDSDQISLYAQASGRVTVSTKRSQQTVIPNIGSRPWVRGVSSRISIYWTIVKPGDILLINSTGNLIAPRGYFKIRSGKSSIMKSDAPIGKCNFECITPNGSIPNGKPFQNVNRITYGACPRYVKQNTLKLATGMRNVPEKQTRGIFGAIAGFIENGWEGMMDGWYGFRHQNSEGTGQAADLKSTQAAINQINGKLNRLIEKTNEKFHQIEKEFSEVEGRIQDLEKYVEDTKIDLWSYNAELLVALENQHTIDLTDSEMNKLFERTKKQLRENAEDMGNGCFKIYHKCDNACIGSIRNGTYDHDVYRDEALNNRFQIKGVELKSGYKDWILWISFAISCFLLCIVLLGFIMWACQKGNIRCNICI

SEQ ID NO: 1045 - protein, 566 aa, Artificial Sequence
  derived and/or modified protein sequence (wt) from hemagglutinin__InfluenzaA__ABG48181
MKTIIALSYILCLVFAQKLPGNDNSTATLCLGHHAVPNGTLVKTITNDQIEVTNATELVQSSSTGRICDSPHQILDGENCTLIDALLGDPHCDGFQNKEWDLFVERSKAYSNCYPYDVPDYVSLRSLVASSGTLEFNNESFNWTGVAQNGTSYACKRRSDKSFFSRLNWLHQLKYKYPALNVTMPNNEKFDKLYIWGVHHPGTDSDQISLYAQASGRVTVSTKRSQQTVIPNIGSRPWVRGVSSRISIYWTIVKPGDILLINSTGNLIAPRGYFKIRSGKSSIMRSDAPIGKCNSECITPNGSIPNDKPFQNVNRITYGACPRYVKQNTLKLATGMRNVPEKQTRGIFGAIAGFIENGWEGMMDGWYGFRHQNSEGTGQAADLKSTQAAINQINGKLNRLIEKTNEKFHQIEKEFSEVEGRIQDLEKYVEDTKIDLWSYNAELLVALENQHTIDLTDSEMNKLFERTKKQLRENAEDMGNGCFKIYHKCDNACIGSIRNGTYDHDVYRDEALNNRFQIKGVELKSGYKDWVLWISFAISCFLLCIVLLGFIMWACQKGNIRCNICI

SEQ ID NO: 1046 - protein, 566 aa, Artificial Sequence; identical to SEQ ID NO: 562
  derived and/or modified protein sequence (wt) from hemagglutinin__InfluenzaA__ABG48192

SEQ ID NO: 1047 - protein, 566 aa, Artificial Sequence
  derived and/or modified protein sequence (wt) from hemagglutinin__InfluenzaA__ABG48203
MKTIIALSYILCLVFAQKLPGNDNSTATLCLGHHAVPNGTIVKTITNDQIEVTNATELVQSSSTGGICDSPHQILDGENCTLIDALLGDPQCDGFQNKKWDLFVERSKAYSNCYPYDVPDHASLRSLVASSGTLEFNNESFDWTGVTQNGTSSACKRRSNKSFFSRLNWLTHLKYKYPALNVTMPNNEKFDKLYIWGVHHPGTDSDQISLYAQASGRITVSTKRSQQTVIPNIGSRPRVRDVSSRISIYWTIVKPGDILLINSTGNLIAPRGYFKIRSGKSSIMRSDAPIGKCNSECITPNGSIPNDKPFQNVNRITYGACPRYVKQNTLKLATGMRNVPEKQTRGIFGAIAGFIENGWEGMVDGWYGFRHQNSEGTGQAADLKSTQAAINQINGKLNRLIGKTNEKFHQIEKEFSEVEGRIQDLEKYVEDTKIDLWSYNAELLVALENQHTIDLTDSEMNKLFERTKKQLRENAEDMGNGCFKIYHKCDNACIGSIRNGTYDHDVYRDEALNNRFQIKGVELKSGYKDWILWISFAISCFLLCVALLGFIMWACQKGNIRCNVCI

SEQ ID NO: 1048 - protein, 566 aa, Artificial Sequence; identical to SEQ ID NO: 516
  derived and/or modified protein sequence (wt) from hemagglutinin__InfluenzaA__ABG48214

SEQ ID NO: 1049 - protein, 566 aa, Artificial Sequence; identical to SEQ ID NO: 516
  derived and/or modified protein sequence (wt) from hemagglutinin__InfluenzaA__ABG48236

SEQ ID NO: 1050 - protein, 566 aa, Artificial Sequence
  derived and/or modified protein sequence (wt) from hemagglutinin__InfluenzaA__ABG48247
MKTIIALSYILCLVFAQKLPGNDNNTATLCLGHHAVPNGTIVKTITNDQIEVTNATELVQSSSTGGICDSPHQILDGENCTLIDALLGDPQCDGFQNKKWDLFVERSKAYSNCYPYDVPDHASLRSLVASSGTLEFNNESFDWTGVTQNGTSSACKRRSNKSFFSRLNWLTHLKYKYPALNVTMPNNEKFDKLYIWGVHHPGTDSDQISLYAQASGRITVSTKRSQQTVIPNIGSRPRVRDVSSRISIYWTIVKPGDILLINSTGNLIAPRGYFKIRSGKSSIMRSDAPIGKCNSECITPNGSIPNDKPFQNVNRITYGACPRYVKQNTLKLATGMRNVPEKQTRGIFGAIAGFIENGWEGMVDGWYGFRHQNSEGTGQAADLKSTQAAINQINGKLNRLIGKTNEKFHQIEKEFSEVEGRIQDLEKYVEDTKIDLWSYNAELLVALENQHTIDLTDSEMNKLFERTKKQLRENAEDMGNGCFKIYHKCDNACIGSIRNGTYDHDVYRDEALNNRFQIKGVELKSGYKDWILWISFAISCFLLCVALLGFIMWACQKGNIRCNICI

SEQ ID NO: 1051 - protein, 566 aa, Artificial Sequence
  derived and/or modified protein sequence (wt) from hemagglutinin__InfluenzaA__ABG48269
MKTIIALSYILCLVFAQKLPGNDNSTATLCLGHHAVPNGTIVKTITNDQIEVTNATELVQSSPTGGICDSPHQILDGENCTLIDALLGDPQCDGFQNKKWDLFVERSKAHSNCYPYDVPDYASLRSLVASSGTLEFNNESFNWTGVTQNGTSSACKRRSNKSFFSRLNWLTHLKFKYPALNVTMPNNEKFDKLYIWGVHHPGTDNDQISLYAQASGRITVSTKRSQQTVIPNIGSRPRVRDVPSRISIYWTIVKPGDILLINSTGNLIAPRGYFKIRSGKSSIMRSDAPIGKCNSECITPNGSIPNDKPFQNVNRITYGACPRYVKQNTLKLATGMRNVPEKQTRGIFGAIAGFIENGWEGMVDGWYGFRHQNSEGTGQAADLKSTQAAINQINGKLNRLIGKTNEKFHQIEKEFSEVEGRIQDLEKYVEDTKIDLWSYNAELLVALENQHTIDLTDSEMNKLFERTKKQLRENAEDMGNGCFKIYHKCDNACIGSIRNGTYDHDVYRDEALNNRFQIKGVELKSGYKDWILWISFAISCFLLCVALLGFIMWACQKGNIRCNICI

SEQ ID NO: 1052 - protein, 566 aa, Artificial Sequence
  derived and/or modified protein sequence (wt) from hemagglutinin__InfluenzaA__ABG48291
MKTIIALSYILCLVFAQKLPGNDNSTATLCLGHHAVPNGTLVKTITNDQIEVTNATELVQSSSTGRICDSPHRILDGKNCTLIDALLGDPHCDGFQNKEWDLFVERSKAYSNCYPYDVPDYASLRSLVASSGTLEFINEDFNWTGVAQDGGSYACKRGSVNSFFSRLNWLHKSEYKYPALNVSMPNNGKFNKLYIWGVHHPSTDSDQTSLYVRASGRVTVSTKRSQQTVTPNIGSRPWVRGLSSRISIYWTIVKPGDILLINSTGNLIAPRGYFKIRNGKSSIMRSDAPIGTCSFECITPNGSIPNDKPFQNVNRITYGACPRYVKQNTLKLATGMRNVPEKQTRGIFGAIAGFIENGWEGMVDGWYGFRHQNSEGTGQAADLKSTQAAIDQINGKLNRLIEKTNEKFHQIEKEFSEVEGRIQDLEKYVEDTKIDLWSYNAELLVALENQHTIDLTDSEMNKLFEKTRKQLRENAEDMGNGCFKIYHKCDNACIGSIRNGTYDHDVYRDEALNNRFQIKGVELKSGYKDWILWISFAISCFLLCVVLLGFIMWACQKGNIRCNICI

SEQ ID NO: 1053 - protein, 566 aa, Artificial Sequence
  derived and/or modified protein sequence (wt) from hemagglutinin__InfluenzaA__ABG48335
MKTIIALSYILCLVFAQKLPGNDNSTATLCLGHHAVPNGTLVKTITNDQIEVTNATELVQSSSTGRICDSPHRILDGKNCTLIDALLGDPHCDGFQNKEWDLFVERSKAYSNCYPYDVPDYASLRSLVASSGTLEFINEDFNWTGVAQDGKSYACKRGSVNSFFSRLNWLHKLEYKYPALNVTMPNNGKFDKLYIWGVHHPSTDSDQTSLYVRASGRVTVSTKRSQQTVIPNIGSRPWVRGLSSRISIYWTIVKPGDILLINSTGNLIAPRGYFKIRNGKSSIMRSDAPIGNCSSECITPNGSIPNDKPFQNVNRITYGACPRYVKQNTLKLATGMRNVPEKQTRGIFGAIAGFIENGWEGMVDGWYGFRHQNSEGTGQAADLKSTQAAIDQINGKLNRLIEKTNEKFHQIEKEFSEVEGRIQDLEKYVEDTKIDLWSYNAELLVALENQHTIDLTDSEMNKLFERTRKQLRENAEDMGNGCFKIYHKCDNACIGSIRNGTYDHDVYRDEALNNRFQIKGVELKSGYKDWILWISFAISCFLLCVVLLGFIMWACQKGNIRCNICI

SEQ ID NO: 1054 - protein, 566 aa, Artificial Sequence
  derived and/or modified protein sequence (wt) from hemagglutinin__InfluenzaA__ABG48346
MKTIIALSYILCLVFAQKLPGNDNSTATLCLGHHAVPNGTLVKTITNDQIEVTNATELVQSSSTGRICDSPHRILDGKNCTLIDALLGDPHCDGFQNKEWDLFVERNKAYSNCYPYDVPDYASLRSLVASSGTLEFINEDFNWTGVAQDGKSYACKRGSVNSFFSRLNWLHKLEYKYPALNVTMPNNGKFDKLYIWGVHHPSTDSDQTSLYVRASGRVTVSTKRSQQTVIPNIGSRPWVRGLSSRISIYWTIVKPGDILLINSTGNLIAPRGYFKIRNGKSSIMRSDAPIGNCSSECITPNGSIPNDRPFQNVNRITYGACPRYVKQNTLKLATGMRNVPEKQTRGIFGAIAGFIENGWEGMVDGWYGFRHQNSEGTGQAADLKSTQAAIDQINGKLNRLIEKTNEKFHQIEKEFSEVEGRIQDLEKYVEDTKIDLWSYNAELLVALENQHTIDLTDSEMNKLFERTRKQLRENAEDMGNGCFKIYHKCDNACIGSIRNGTYDHDVYRDEALNNRFQIKGVELKSGYKDWILWISFAISCFLLCVVLLGFIMWACQKGNIRCNICI

SEQ ID NO: 1055 - protein, 566 aa, Artificial Sequence; identical to SEQ ID NO: 1053
  derived and/or modified protein sequence (wt) from hemagglutinin__InfluenzaA__ABG48357

SEQ ID NO: 1056 - protein, 566 aa, Artificial Sequence
  derived and/or modified protein sequence (wt) from hemagglutinin__InfluenzaA__ABG48368
MKTIIALSYILCLVFAQKLPGNDNSTATLCLGHHAVPNGTLVKTITNDQIEVTNATELVQSSSTGRICDSPHRILDGKNCTLIDALLGDPHCDGFQNKEWDLFVERSKAYSNCYPYDVPDYASLRSLVASSGTLEFINEDFNWTGVAQDGKSYACKRGSVNSFFSRLNWLHKLEYKYPALNVTMPNNGKFDKLYIWGVHHPSTDSDQTSLYVRASGRVTVSTKRSQQTVIPNIGSRPWVRGLSSRISIYWTIVKPGDILLINSTGNLIAPRGYFKIRNGKSSIMRSDAPIGNCSSECITPNGSIPNDKPFQNVNRITYGACPRYVKQNTLKLATGMRNVPEKQTRGIFGAIAGFIENGWEGMVDGWYGFRHQNSEGTGQAADLKSTQAAIDQINGKLNRLIEKTNEKFHQIEKEFSEVEGRIQDLEKYVEDTKIDLWSYNAELLVALENQHTIDLTDSEMNKLFERTRKQLRENAEDMGNGCFKVYHKCDNACIESIRNGTYDHDVYRDEALNNRFQIKGVELKSGYKDWILWISFAISCFLLCVVLLGFIMWACQKGNIRCNICI

SEQ ID NO: 1057 - protein, 566 aa, Artificial Sequence; identical to SEQ ID NO: 907
  derived and/or modified protein sequence (wt) from hemagglutinin__InfluenzaA__ABG67135

SEQ ID NO: 1058 - protein, 566 aa, Artificial Sequence; identical to SEQ ID NO: 783
  derived and/or modified protein sequence (wt) from hemagglutinin__InfluenzaA__ABG67146

SEQ ID NO: 1059 - protein, 566 aa, Artificial Sequence
  derived and/or modified protein sequence (wt) from hemagglutinin__InfluenzaA__ABG67157
MKTIIALSYILCLVFAQKLPGNDNSTATLCLGHHAVPNGTLVKTITNDQIEVTNATELVQSSPTGRICNSPHRIIDGKNCTLIDALLGDPHCDGFQNKEWDLFVERSKAYSNCYPYDVPDYASLRSLVASSGTLEFINENFNWTGVAQDGKSYACKRGSVNSFFSRLNWLHKLEYKYPALNVTMPNNGKFDKLYIWGVHHPSTDSDQTSLYVRASGRVTVSTKRSQQTVIPDIGYRPWVRGLSSRISIYWTIVKPGDILLINSTGNLIAPRGYFKLRNGKSSIMRSDAPIGNCSSECITPNGSIPNDKPFQNVNRITYGACPRYIKQNTLKLATGMRNVPEKQTRGIFGAIAGFIENGWEGMVDGWYGFRHQNSEGTGQAADLKSTQAAIDQINGKLNRLVEKTNEKFHQIEKEFSEVEGRIQDLEKYVEDTKIDLWSYNAELLVALENQHTIDLTDSEMNKLFERTKKQLRENAEDMGNGCFKIYHKCDNACIGSIRNGTYDHDVYRDEALNNRFQIKGVELKSGYKDWILWISFAISCFLLCVVLLGFIMWACQKGNIRCNICI

SEQ ID NO: 1060 - protein, 566 aa, Artificial Sequence; identical to SEQ ID NO: 984
  derived and/or modified protein sequence (wt) from hemagglutinin__InfluenzaA__ABG67168

SEQ ID NO: 1061 - protein, 566 aa, Artificial Sequence; identical to SEQ ID NO: 984
  derived and/or modified protein sequence (wt) from hemagglutinin__InfluenzaA__ABG67179

SEQ ID NO: 1062 - protein, 566 aa, Artificial Sequence
  derived and/or modified protein sequence (wt) from hemagglutinin__InfluenzaA__ABG67190
MKTIIALSYILCLVFAQKLPGNDNSTATLCLGHHAVPNGTLVKTITNDQIEVTNATELVQSFPTGRICDSPHRILDGKNCTLIDALLGDPHCDGFQNKEWDLFVERSKAYSNCYPYDVPDYASLRSLVASSGTLEFTNENFNWTGVAQDGKSYACKRGSVNSFFSRLNWLHKLEYKYPALNVTMPNNGKFDKLYIWGVHHPSTDSDQTSLYVRASGKVTVSTKRSQQTVIPDIGYRPWVRGLSSRISIYWTIVKPGDILLINSTGNLIAPRGYFKIRNGKSSIMRSDAPIGNCSSECITPNGSIPNDKPFQNVNRITYGACPRYVKQNTLKLATGMRNVPEKQTRGIFGAIAGFIENGWEGMVDGWYGFRHQNSEGTGQAADLKSTQAAIDQINGKLNRLVEKTNEKFHQIEKEFSEVEGRIQDLEKYVEDTKIDLWSYNAELLVALENQHTIDLTDSEMNKLFERTRKQLRENAEDMGNGCFKIYHKCDNACIGSIRNGTYDHDVYRDEALNNRFQIKGVELKSGYKDWILWISFAISCFLLCVVLLGFIMWACQKGNIRCNICI

SEQ ID NO: 1063 - protein, 566 aa, Artificial Sequence
  derived and/or modified protein sequence (wt) from hemagglutinin__InfluenzaA__ABG67212
MKTIIALSYILCLVFAQKLPGNDNSTATLCLGHHAVPNGTLVKTITNDQIEVTNATELVQSSSTGRICDSPHRILDGKNCTLIDALLGDPHCDGFQNKEWDLFVERSKAYSNCYPYDVPDYASLRSLVASSGTLEFINEDFNWTGVAQDGKSYACKRGSVNSFFSRLNWLHKLEYRYPALNVTMPNNGKFDKLYIWGVHHPSTDSDQTSLYVRASGRVTVSTKRSQQTVIPNIGFRPWVRGLSSRISIYWTIVKPGDILLINSTGNLIAPRGYFKIRNGKSSIMRSDAPIGNCSSECITPNGSIPNDKPFQNVNRITYGACPRYVKQNTLKLATGMRNVPEKQTRGIFGAIAGFIENGWEGMVDGWYGFRHQNSEGTGQAADLKSTQAAIDQINGKLNRLIEKTNEKFHQIEKEFSEVEGRIQDLEKYVEDTKIDLWSYNAGLLVALENQHTIDLTDSEMNKLFERTRKQLRENAEDMGNGCFKIYHKCDNACIGSIRNGTYDHDVYRDEALNNRFQIKGVELKSGYKDWILWISFAISCFLLCVVLLGFIMWACQKGNIRCNICI

SEQ ID NO: 1064 - protein, 566 aa, Artificial Sequence; identical to SEQ ID NO: 1024
  derived and/or modified protein sequence (wt) from hemagglutinin__InfluenzaA__ABG67223

SEQ ID NO: 1065 - protein, 566 aa, Artificial Sequence
  derived and/or modified protein sequence (wt) from hemagglutinin__InfluenzaA__ABG67234
MKTIIALSYILCLVFAQKLPGDDNSTATLCLGHHAVPNGTLVKTITNDQIEVTNATELVQSSSTGRICDSPHRILDGKNCTLIDALLGDPHCDGFQNKEWDLFVERSKAYSNCYPYDVPDYASLRSLVASSGTLEFINEDFNWTGVAQDGKSYACKRGSVNSFFSRLNWLHKLEYKYPALNVTMPNNGKFDKLYIWGVHHPSTDSDQTSLYVRASGRVTVSTKRSQQTVIPNIGFRPWVRGLSSRISIYWTIVEPGDILLINSTGNLIAPRGYFKIRNGKSSIMRSDAPIGNCSSECITPNGSIPNDKPFQNVNRITYGACPRYVKQNTLKLATGMRNVPEKQTRGIFGAIAGFIENGWEGMVDGWYGFRHQNSEGTGQAADLKSTQAAIDQINGKLNRLIEKTNEKFHQIEKEFSEVEGRIQDLEKYVEDTKIDLWSYNAGLLVALENQHTIDLTDSEMNKLFERTRKQLRENAEDMGNGCFKIYHKCDNACIGSIRNGTYDHDVYRDEALNNRFQIKGVELKSGYKDWILWISFAISCFLLCVVLLGFIMWACQKGNIRCNICI

SEQ ID NO: 1066 - protein, 566 aa, Artificial Sequence
  derived and/or modified protein sequence (wt) from hemagglutinin__InfluenzaA__ABG67245
MKTIIALSYILCLVFAQKLPGNDNSTATLCLGHHAVPNGTLVKTITNDQIEVTNATELVQSSSTGRICDSPHRILDGKNCTLIDALLGDPHCDGFQNKEWDLFVERSKAYSNCYPYDVPDYASLRSLVASSGTLEFINEDFNWTGVAQDGKSYACKRGSVNSFFSRLNWLHKLEYKYPALNVTMPNNGKFDKLYIWGVHHPSTDSDQTSLYVRASGRVTVSTKRSQQTVIPNIGFRPWVRGLSSRISIYWTIVKPGDILLINSTGNLIAPRGYFKIRNGKSSIMRSDAPIGNCSSECITPNGSIPNDKPFQNVNRITYGACPRYVKQNTLKLATGMRNVPEKQTRGIFGAIAGFIENGWEGMVDGWYGFRHQNSEGTGQAADLKSTQAAIDQIDGKLNRLIEKTNEKFHQIEKEFSEVEGRIQDLEKYVEDTKIDLWSYNAGLLVALENQHTIDLTDSEMNKLFERTRKQLRENAEDMGNGCFKIYHKCDNACIGSIRNGTYDHDVYRDEALNNRFQIKGVELKSGYKDWILWISFAISCFLLCVVLLGFIMWACQKGNIRCNICI

SEQ ID NO: 1067 - protein, 565 aa, Artificial Sequence; identical to SEQ ID NO: 742
  derived and/or modified protein sequence (wt) from hemagglutinin__InfluenzaA__ABG67477

SEQ ID NO: 1068 - protein, 565 aa, Artificial Sequence; identical to SEQ ID NO: 800
  derived and/or modified protein sequence (wt) from hemagglutinin__InfluenzaA__ABG67491

SEQ ID NO: 1069 - protein, 566 aa, Artificial Sequence
  derived and/or modified protein sequence (wt) from hemagglutinin__InfluenzaA__ABG67502
MKTIIALSYILCLVFAQKLPGNDNSTATLCLGHHAVPNGTLVKTITNDQIEVTNATELVQSSSTGRICDSPHQILDGENCTLIDALLGDPHCDGFQNKEWDLFVERSKAYSNCYPYDVSDYVSLRSLVASSGTLEFNNESFNWTGVAQNGTSSACKRRSDKSFFSRLNWLHQLKYKYPALNVTMPNNEKFDKLYIWGVHHPGTDSDQISLYAQASGRVTVSTKRSQQTVIPNIGSRPWVRGISSRISIYWTIVKPGDILLINSTGNLIAPRGYFKIRSGKSSIMRSDAPIGKCNSECITPNGSIPNDKPFQNVNRITYGPCPRYVKQNTLKLATGMRNVPEKQTRGIFGAIAGFIENGWEGMMDGWYGFRHQNSEGTGQAADLKSTQAAINQINGKLNRLIEKTNEKFHQIEKEFSEVEGRIQDLEKYVEDTKIDLWSYNAELLVALENQHTIDLTDSEMNKLFERTKKQLRENAEDMGNGCFKIYHKCDNACIGSIRNGTYDHDVYRDEALNNRFQIKGVELKSGYKDWILWISFAISCFLLCIVLLGFIMWACQKGNIRCNICI

SEQ ID NO: 1070 - protein, 566 aa, Artificial Sequence
  derived and/or modified protein sequence (wt) from hemagglutinin__InfluenzaA__ABG67524
MKTIIALSYILCLVFAQKLPGNDNSTATLCLGHHAVPNGTLVKTITNDQIEVTNATELVQSSSTGRICDSPHQILDGENCTLIDALLGDPHCDGFQNKEWDLFVERSRAYSNCYPYDVPDYVSLRSLVASSGTLEFNNESFNWTGVAQNGTSSACKRRSDKSFFSRLNWLHQLKYKYPALNVTMPNNEKFDKLYIWGVHHPGTDSDQISLYAQASGRVTVSTKRSQQTVIPNIGSRPWVRGVSSRISIYWTIVKPGDILLINSTGNLIAPRGYFKIRSGKSSIMRSDAPIGKCNSECITPNGSIPNDKPFQNVNRITYGPCPRYVKQNTLKLATGMRNVPEKQTRGIFGAIAGFIENGWEGMMDGWYGFRHQNSEGTGQAADLKSTQAAVNQINGKLNRLIEKTNEKFHQIEKEFSEVEGRIQDLEKYVEDTKIDLWSYNAELLVALENQHTIDLTDSEMNKLFERTKKQLRENAEDMGNGCFKIYHKCDNACIGSIRNGTYDHDVYRDEALNNRFQIKGVELKSGYKDWILWISFAISCFLLCIVLLGFIMWACQKGNIRCNICI

SEQ ID NO: 1071 - protein, 566 aa, Artificial Sequence; identical to SEQ ID NO: 562
  derived and/or modified protein sequence (wt) from hemagglutinin__InfluenzaA__ABG67535

SEQ ID NO: 1072 - protein, 566 aa, Artificial Sequence; identical to SEQ ID NO: 516
  derived and/or modified protein sequence (wt) from hemagglutinin__InfluenzaA__ABG67546

SEQ ID NO: 1073 - protein, 566 aa, Artificial Sequence
  derived and/or modified protein sequence (wt) from hemagglutinin__InfluenzaA__ABG67557
MKTIIALSYILCLVFAQKLPGNDNSTATLCLGHHAVPNGTIVKTITNDQIEVTNATELVQSSSTGGICDSPHQILDGENCTLIDALLGDPQCDGFQNKKWDLFVERSKAYSNCYPYDVPDHASLRSLVASSGTLEFNNESFDWTGVTQNGTSSACKRRSNKSFFSRLNWLTHLKYKYPALNVTMPNNEKFDKLYIWGVHHPGTDSDQISLYAQASGRITVSTKRSQQTVIPNIGSRPRVRDVSSRISIYWTIVKPGDILLINSTGNLIAPRGYFKIRSGKSSIMRSDAPIGKCNSECITPNGSIPNDKPFQNVNRITYGACPRYVKQNTLKLATGMRNVPEKQTRGIFGAIAGFIENGWEGMVDGWYGFRHQNSEGTGQAADLKSTQATINQINGKLNRLIGKTNEKFHQIEKEFSEVEGRIQDLEKYVEDTKIDLWSYNAELLVALENQHTIDLTDSEMNKLFERTKKQLRENAEDMGNGCFKIYHKCDNACIGSIRNGTYDHDVYRDEALNNRFQIKGVELKSGYKDWILWISFAISCFLLCVALLGFIMWACQKGNIRCNICI

SEQ ID NO: 1074 - protein, 566 aa, Artificial Sequence; identical to SEQ ID NO: 516
  derived and/or modified protein sequence (wt) from hemagglutinin__InfluenzaA__ABG67568

SEQ ID NO: 1075 - protein, 566 aa, Artificial Sequence; identical to SEQ ID NO: 516
  derived and/or modified protein sequence (wt) from hemagglutinin__InfluenzaA__ABG67579

SEQ ID NO: 1076 - protein, 566 aa, Artificial Sequence; identical to SEQ ID NO: 516
  derived and/or modified protein sequence (wt) from hemagglutinin__InfluenzaA__ABG67590

SEQ ID NO: 1077 - protein, 566 aa, Artificial Sequence; identical to SEQ ID NO: 516
  derived and/or modified protein sequence (wt) from hemagglutinin__InfluenzaA__ABG67601

SEQ ID NO: 1078 - protein, 566 aa, Artificial Sequence; identical to SEQ ID NO: 516
  derived and/or modified protein sequence (wt) from hemagglutinin__InfluenzaA__ABG67612

SEQ ID NO: 1079 - protein, 566 aa, Artificial Sequence; identical to SEQ ID NO: 516
  derived and/or modified protein sequence (wt) from hemagglutinin__InfluenzaA__ABG67623

SEQ ID NO: 1080 - protein, 566 aa, Artificial Sequence
  derived and/or modified protein sequence (wt) from hemagglutinin__InfluenzaA__ABG67634
MKTIIALSYILCLVFAQKLPGNDNNTATLCLGHHAVPNGTIVKTITNDQIEVTNATELVQSSSTGGICDSPHQILDGENCTLIDALLGDPQCDGFQNKKWDLFVERSKAYSNCYPYDVPDHASLRSLVASSGTLEFNNESFDWTGVTQNGTSSACKRRSNKSFFSRLNWLTHLKYKYPALNVTMPNNEKFDKLYIWGVHHPGTDSDQISLYAQASGRITVSTKRSQQTVIPNIGSRPRVRDVSSRISIYWTIVKPGDILLINSTGNLIAPRGYFKIRSGKSSIMRSDAPIGKCNSECITPNGSIPNDKPFQNVNRITYGACPRYVKQNTLKLATGMRNVPEKQTRGIFGAIAGFIENGWEGMVDGWYGFRHQNSEGTGQAADLKSTQAAINQINGKLNRLIGKTNEKFHQIEKEFSEVEGRIQDLEKYVEDTKIDLWSYNAELLVALENQHTIDLTDSKMNKLFERTKKQLRENAEDMGNGCFKIYHKCDNACIGSIRNGTYDHDVYRDEALNNRFQIKGVELKSGYKDWILWISFAISCFLLCVALLGFIMWACQKGNIRCNICI

SEQ ID NO: 1081 - protein, 566 aa, Artificial Sequence; identical to SEQ ID NO: 516
  derived and/or modified protein sequence (wt) from hemagglutinin__InfluenzaA__ABG67645

SEQ ID NO: 1082 - protein, 566 aa, Artificial Sequence
  derived and/or modified protein sequence (wt) from hemagglutinin__InfluenzaA__ABG67656
MKTIIALSYILCLVFAQKLPGNDNSTATLCLGHHAVPNGTIVKTITNDQIEVTNATELVQSSSTGGICDSPHQILDGENCTLIDALLGDPQCDGFQNKKWDLFVERSKAYSNCYPYDVPDHASLRSLVASSGTLEFNNESFDWAGVTQNGTSSACKRRSNKSFFSRLNWLTHLKYKYPALNVTMPNNEKFDKLYIWGVHHPGTDSDQISLYAQASGRITVSTKRSQQTVIPNIGSRPRVRDVSSRISIYWTIVKPGDILLINSTGNLIAPRGYFKIRSGKSSIMRSDAPIGKCNSECITPNGSIPNDKPFQNVNRITYGACPRYVKQNTLKLATGMRNVPEKQTRGIFGAIAGFIENGWEGMVDGWYGFRHQNSEGTGQAADLKSTQAAINQINGKLNRLIGKTNEKFHQIEKEFSEIEGRIQDLEKYVEDTKIDLWSYNAELLVALENQHTIDLTDSEMNKLFERTKKQLRENAEDMGNGCFKIYHKCDNACIGSIRNGTYDHDVYRDEALNNRFQIKGVELKSGYKDWILWISFAISCFLLCVALLGFIMWACQKGNIRCNICI

SEQ ID NO: 1083 - protein, 566 aa, Artificial Sequence
  derived and/or modified protein sequence (wt) from hemagglutinin__InfluenzaA__ABG67667
MKTIIALSYILCQVFAQKLPGNDNSTATLCLGHHAVPNGTLVKTITNDQIEVTNATELVQSSSTGRICDSPHRILDGKNCTLIDALLGDPHCDGFQNKEWDLFVERSKAYSNCYPYDVPDYASLRSLVASSGTLEFTNEGFNWIGVAQDGKSYACKRGSVNSFFSRLNWLHKLEYKYPALNVTMPNNDKFDKLYIWGVHHPSTDSDQTSLYVQASGRVTVSTKRSQQTVIPNIGSRPWVRGISSRISIYWTIVKPGDILLINSTGNLIAPRGYFKIRNGKSSIMRSDAPIDNCNSECITPNGSIPNDKPFQNVNRITYGACPRYVKQNTLKLATGMRNVPEKQTRGIFGAIAGFIENGWEGMIDGWYGFRHQNSEGTGQAADLKSTQAAIDQINGKLNRLIEKTNEKFHQIEKEFSEVEGRIQDLEKYVEDTKIDLWSYNAELLVALENQHTIDLTDSEMNKLFERTRKQLRENAEDMGNGCFKIYHKCDNACIGSIRNGTYDHDVYRDEALNNRFQIKGVELKSGYKDWILWISFAISCFLLCVVLLGFIMWACQKGNIRCNICI

SEQ ID NO: 1084 - protein, 566 aa, Artificial Sequence
  derived and/or modified protein sequence (wt) from hemagglutinin__InfluenzaA__ABG79941
MKTIIALSYILCLVFAQKLPGNDNSTATLCLGHHAVPNGTLVKTITNDQIEVTNATELVQSSSTGGICDSPHQILDGENCTLIDALLGDPHCDGFQNKEWDLFVERSKAYSNCYPYDVPDYASLRSLVASSGTLEFNNESFNWTGVAQNGTSSACKRRSNKSFFSRLNWLHQLKYKYPALNVTMPNNEKFDKLYIWGVHHPSTDSDQISLYAQAPGRVTVSTKRSQQTVIPNIGSRPWVRGVSSRISIYWTIVKPGDILLINCTGNLIAPRGYFKIRSGKSSIMRSDASIGKCNSECITPNGSIPNDKPFQNVNRITYGACPRYVKQNTLKLATGMRNVPEKQTRGIFGAIAGFIENGWEGMVDGWYGFRHQNSEGTGQAADLKSTQAAINQINGKLNRLIEKTNEKFHQIEKEFSEVEGRIQDLEKYVEDTKIDLWSYNAELLVALENQHTIDLTDSEMNKLFERTKKQLRENAEDMGNGCFKIYHKCDNACIGSIRNGTYDHDVYRDEALNNRFQIKGVELKSGYKDWILWISFAISCFLLCVVLLGFIMWACQKGNIRCSICI

SEQ ID NO: 1085 - protein, 566 aa, Artificial Sequence; identical to SEQ ID NO: 921
  derived and/or modified protein sequence (wt) from hemagglutinin__InfluenzaA__ABG79952

SEQ ID NO: 1086 - protein, 566 aa, Artificial Sequence; identical to SEQ ID NO: 984
  derived and/or modified protein sequence (wt) from hemagglutinin__InfluenzaA__ABG79974

SEQ ID NO: 1087 - protein, 566 aa, Artificial Sequence; identical to SEQ ID NO: 984
  derived and/or modified protein sequence (wt) from hemagglutinin__InfluenzaA__ABG79985

SEQ ID NO: 1088 - protein, 566 aa, Artificial Sequence
  derived and/or modified protein sequence (wt) from hemagglutinin__InfluenzaA__ABG79996
MKTIIALSYILCLVFAQKLPGNDNSTATLCLGHHAVPNGTLVKTITNDQIEVTNATELVQSSPTGRICDSPHRILDGKNCTLIDALLGDPHCDGFQNKEWDLFVERSKAYSNCYPYDVPDYASLRSLVASSGTLEFTNENFNWTGVAQDGKSYSCKRGSVNSFFSRLNWLHKLEYKYPALNVTMPNNGKFDKLYIWGVHHPSTDSDQTSLYVRASGKVTVSTKRSQQTVIPDIGYRPWVRGLSSRISIYWTIVKPGDILLINSTGNLIAPRGYFKIRNGKSSIMRSDAPIGNCSSECITPNGSIPNDKPFQNVNRITYGACPRYVKQNTLKLATGMRNVPEKQTRGIFGAIAGFIENGWEGMVDGWYGFRHQNSEGTGQAADLKSTQAAIDQINGKLNRLVEKTNEKFHQIEKEFSEVEGRIQDLEKYVEDTKIDLWSYNAELLVALENQHTIDLTDSEMNKLFERTRKQLRENAEDMGNGCFKIYHKCDNACIGSIRNGTYDHDVYRDEALNNRFQIKGVELKSGYKDWILWISFAISCFLLCVVLLGFIMWACQKGNIRCNICI

SEQ ID NO: 1089 - protein, 566 aa, Artificial Sequence; identical to SEQ ID NO: 984
  derived and/or modified protein sequence (wt) from hemagglutinin__InfluenzaA__ABG80007

SEQ ID NO: 1090 - protein, 566 aa, Artificial Sequence; identical to SEQ ID NO: 984
  derived and/or modified protein sequence (wt) from hemagglutinin__InfluenzaA__ABG80018

SEQ ID NO: 1091 - protein, 566 aa, Artificial Sequence; identical to SEQ ID NO: 989
  derived and/or modified protein sequence (wt) from hemagglutinin__InfluenzaA__ABG80029

SEQ ID NO: 1092 - protein, 566 aa, Artificial Sequence; identical to SEQ ID NO: 989
  derived and/or modified protein sequence (wt) from hemagglutinin__InfluenzaA__ABG80040

SEQ ID NO: 1093 - protein, 566 aa, Artificial Sequence; identical to SEQ ID NO: 984
  derived and/or modified protein sequence (wt) from hemagglutinin__InfluenzaA__ABG80051

SEQ ID NO: 1094 - protein, 566 aa, Artificial Sequence
  derived and/or modified protein sequence (wt) from hemagglutinin__InfluenzaA__ABG80062
MKTIIALSYILCLVFAQKLPGNDNSTATLCLGHHAVPNGTLVKTITNDQIEVTNATELVQSSSTGRICDSPHRILDGKNCTLIDALLGDPHCDGFQNKEWDLFVERSKAYSNCYPYDVPDYASLRSLVASSGTLEFTKEGFNWTGVAQDGKSYACKRGSVNSFFSRLNWLHKLEYKYPALNVTMPNNDKFDKLYIWGVHHPSTDSDQTSLYVQASGRVTVSTKRSQQTVIPNIGSRPWVRGISSRISIYWTIVKPGDILLINSTGNLIAPRGYFKIRNGKSSIMRSDAPIGNCNSECITPNGSIPNDKPFQNVNRITYGACPRYVKQNTLKLATGMRNVPEKQTRGIFGAIAGFIENGWEGMVDGWYGFRHQNSEGTGQAADLKSTQAAIDQINGKLNRLIEKTNEKFHQIEKEFSEVEGRIQDLEKYVEDTKIDLWSYNAELLVALENQHTIDLTDSEMNKLFERTRKQLRENAEDMGNGCFKIYHKCDNACIGSIRNGTYDHDVYRDEALNNRFQIKGVELKTGYKDWILWISFAISCFLLCVVLLGFIMWACQKGNIRCNICI

SEQ ID NO: 1095 - protein, 566 aa, Artificial Sequence
  derived and/or modified protein sequence (wt) from hemagglutinin__InfluenzaA__ABG80073
MKTIIALSYILCLVFAQKLPGNDNSTATLCLGHHAVPNGTLVKTITNDQIEVTNATELVQSSSTGRICDSPHRILDGKNCTLIDALLGDPNCDGFQNKEWDLFVERSKAYSNCYPYDVPDYASLRSLVASSGTLEFTNEDFNWTGVAQDGGSYACKRGSVNSFFSRLNWLHKLEYKYPALNVTMPNNGKFDKLYIWGVHHPSTDSDQTSLYVRASGRVTVSTKRSQQTVTPNIGSRPWVRGLSSRISIYWTIVKPGDILLINSTGNLIAPRGYFKIRNGKSSIMRSDAPIGTCSSECITPNGSIPNDKPFQNVNRITYGACPRYVKQNTLKLATGMRNVPEKQTRGIFGAIAGFIENGWEGMVDGWYGFRHQNSEGTGQAADLKSTQAAIDQINGKLNRLIEKTNEKFHQIEKEFSEVEGRIQDLEKYVEDTKIDLWSYNAELLVALENQHTIDLTDSEMNKLFEKTRKQLRENAEDMGNGCFKIYHKCDNACIGSIRNGTYDHDVYRDEALNNRFQIKGVELKSGYKDWILWISFAISCFLLCVVLLGFIMWACQKGNIRCNICI

SEQ ID NO: 1096 - protein, 566 aa, Artificial Sequence
  derived and/or modified protein sequence (wt) from hemagglutinin__InfluenzaA__ABG80084
MKTIIALSYILCLVFAQKLPGNDNSTATLCLGHHAVPNGTLVKTITNDQIEVTNATELVQSSSTGRICDSPHRILDGKNCTLIDALLGDPHCDGFQNKEWDLFVERSKAYSNCYPYDVPDYASLRSLVASSGTLEFINEDFNWTGVAQDGKSYACKRGSVNSFFSRLNWLHKLEYKYPALNVTMPNNGKFDKLYIWGVHHPSTDSDQTSLYVRASGRVTVSTKRSQQTVIPNIGFRPWVRGLSSGISIYWTIVKPGDILLINSTGNLIAPRGYFKIRNGKSSIMRSDAPIGNCSSECITPNGSIPNDKPFQNVNRITYGACPRYVKQNTLKLATGMRNVPEKQTRGIFGAIAGFIENGWEGMVDGWYGFRHQNSEGTGQAADLKSTQAAIDQINGKLNRLIEKTNEKFHQIEKEFSEVEGRIQDLEKYVEDTKIDLWSYNAGLLVALENQHTIDLTDSEMNKLFERTRKQLRENAEDMGNGCFKIYHKCDNACIGSIRNGTYDHDIYRDEALNNRFQIKGVELKSGYKDWILWISFAISCFLLCVVLLGFIMWACQKGNIRCNICI

SEQ ID NO: 1097 - protein, 566 aa, Artificial Sequence
  derived and/or modified protein sequence (wt) from hemagglutinin__InfluenzaA__ABG80095
MKTIIALSYILCLVFAQKLPGNDNSTATLCLGHHAVPNGTLVKTITNDQIEVTNATELVQSSSTGRICDSPHRILDGKNCTLIDALLGDPHCDGFQNKEWDLFVERSKAYSNCYPYDVPDYASLRSLVASSGTLEFINEDFNWTGVAQDGKSYACKRGSVNSFFSRLNWLHKLEYKYPALNVTMPNNGKVDKLYIWGVHHPSTDSDQTSLYVRASGRVTVSTKRSQQTVIPNIGFRPWVRGLSSRISIYWTIVKPGDILLINSTGNLIAPRGYFKIRNGKSSIMRSDAPIGNCSSECITPNGSIPNDKPFQNVNRITYGACPRYVKQNTLKLATGMRNVPEKQTRGIFGAIAGFIENGWEGMVDGWYGFRHQNSEGTGQAADLKSTQAAIDQINGKLNRLIEKTNEKFHQIEKEFSEVEGRIQDLEKYVEDTKIDLWSYNAGLLVALENQHTIDLTDSEMNKLFERTRKQLRENAEDMGNGCFKIYHKCDNACIGSIRNGTYDHDVYRDEALNNRFQIKGVELKSGYKDWILWISFAISCFLLCVVLLGFIMWACQKGNIRCNICI

SEQ ID NO: 1098 - protein, 566 aa, Artificial Sequence; identical to SEQ ID NO: 1024
  derived and/or modified protein sequence (wt) from hemagglutinin__InfluenzaA__ABG80106

SEQ ID NO: 1099 - protein, 566 aa, Artificial Sequence
  derived and/or modified protein sequence (wt) from hemagglutinin__InfluenzaA__ABG80117
MKTIIALSYILCLVFAQKLPGNDNSTATLCLGHHAVPNGTLVKTITNDQIEVTNATELVQSSSTGRICDSPHRILDGKNCTLIDALLGDPHCDGFQNKEWDLFVERSKAYSNCYPYDVPDYASLRSLVASSGTLEFINEDFNWTGVAQDGKSYACKRGSVNSFFSRLNWLHKLEYKYPALNVTMPNNGKFDKLYIWGVHHPSTDSDQTSLYVRASGRVTVSTKRSQQTVIPNIGFRPWVRGLSSRISIYWTIVKPGDILLINSTGNLIAPRGYFKIRNGKSSIMRSDAPIGNCSSECITPNGSIPNDKPFQNVNRITYGACPRYVKQNTLKLATGMRNVPVKQTRGIFGAIAGFIENGWEGMVDGWYGFRHQNSEGTGQAADLKSTQAAIDQINGKLNRLIEKTNEKFHQIEKEFSEVEGRIQDLEKYVEDTKIDLWSYNAGLLVALENQHTIDLTDSEMNKLFERTRKQLRENAEDMGNGCFKIYHKCDNACIGSIRNGTYDHDVYRDEALNNRFQIKGVELKSGYKDWILWISFAISCFLLCVVLLGFIMWACQKGNIRCNICI

SEQ ID NO: 1100 - protein, 566 aa, Artificial Sequence
  derived and/or modified protein sequence (wt) from hemagglutinin__InfluenzaA__ABG80128
MKTIIALSYILCLVFAQKLPGNDNSTATLCLGHHAVPNGTLVKTITNDRIEVTNATELVQSSSTGRICDSPHRILDGKNCTLIDALLGDPHCDGFQNKEWDLFVERSKAYSNCYPYDVPDYASLRSLVASSGTLEFINEDFNWTGVAQDGKSYACKRGSVNSFFSRLNWLHKLEYKYPALNVTMPNNGKFDKLYIWGVHHPSTDSDQTSLYVRASGRVTVSTKRSQQTVIPNIGFRPWVRGLSSRISIYWTIVKPGDILLINSTGNLIAPRGYFKIRNGKSSIMRSDAPIGNCSSECITPNGSIPNDKPFQNVNRITYGACPRYVKQNTLKLATGMRNVPEKQTRGIFGAIAGFIENGWEGMVDGWYGFRHQNSEGTGQAADLKSTQAAIDQINGKLNRLIEKTNEKFHQIEKEFSEVEGRIQDLEKYVEDTKIDLWSYNAGLLVALENQHTIDLTDSEMNKLFERTRKQLRENAEDMGNGCFKIYHKCDNACIGSIRNGTYDHDVYRDEALNNRFQIKGVELKSGYKDWILWISFAISCFLLCVVLLGFIMWACQKGNIRCNICI

SEQ ID NO: 1101 - protein, 566 aa, Artificial Sequence
  derived and/or modified protein sequence (wt) from hemagglutinin__InfluenzaA__ABG80139
MKTIIALSYILCLVFAQKLPGNDNSTATLCLGHHAVPNGTLVKTITNDQIEVTNATELVQSSSTGRICDSPHRILDGKNCTLIDALLGDPHCDGFQNKEWDLFVERSKAYSNCYPYDVPDYASLRSLVASSGTLEFINEDFNWTGVAQDGKSYACKRGSVNSFFSRLNWLHKLEYKYPALNVTMPNNGKFDKLYIWGVHHPSTDSDQTSLYVRASGRVTVSTKRSQQTVIPNIGFRPWVRGLSSRISIYWTIVKPGDILLINSTGNLIAPRGYFKIRNGKSSIMRSDAPIGNCSYECITPNGSIPNDKPFQNVNRITYGACPRYVKQNTLKLATGMRNVPEKQTRGIFGAIAGFIENGWEGMVDGWYGFRHQNSEGTGQAADLKSTQAAIDQINGKLNRLIEKTNEKFHQIEKEFSEVEGRIQDLEKYVEDTKIDLWSYNAGLLVALENQHTIDLTDSEMNKLFERTRKQLRENAEDMGNGCFKIYHKCDNTCIGSIRNGTYDHDVYRDEALNNRFQIKGVELKSGYKDWILWISFAISCFLLCVVLLGFIMWACQKGNIRCNICI

SEQ ID NO: 1102 - protein, 566 aa, Artificial Sequence
  derived and/or modified protein sequence (wt) from hemagglutinin__InfluenzaA__ABG80150
MKTIIALSYILCLVFAQKLPGNDNSTATLCLGHHAVPNGTLVKTITNDQIEVTNATELVQSSSTGRICDSPHRILDGKNCTLIDALLGDPHCDGFQNKEWDLFVERSKAYSNCYPYDVPDYASLRSLVASSGTLEFINENFNWTGVAQDGKSYACKRGSVNSFFSRLNWLHKLEYKYPALNVTMPNNGKFDKLYIWGVHHPSTDSDQTSLYVRASGRVTVSTKRSQQTVIPNIGFRPWVRGLSSGISIYWTIVKPGDILLINSTGNLIAPRGYFKIRNGKSSIMRSDAPIGNCSSECITPNGSIPNDKPFQNVNRITYGACPRYVKQNTLKLATGMRNVPEKQTRGIFGAIAGFIENGWEGMVDGWYGFRHQNSEGTGQAADLKSTQAAIDQINGKLNRLIEKTNEKFHQIEKEFSEVEGRIQDLEKYVEDTKIDLWSYNAGLLVALENQHTIDLTDSEMNKLFERTRKQLRENAEDMGNGCFKIYHKCDNACIGSIRNGTYDHDVYRDEALNNRFQIKGVELKSGYKDWILWISFAISCFLLCVVLLGFIMWACQKGNIRCNICI

SEQ ID NO: 1103 - protein, 566 aa, Artificial Sequence
  derived and/or modified protein sequence (wt) from hemagglutinin__InfluenzaA__ABG80161
MKTIIALSYISCLVFAQKLPGNDNSTATLCLGHHAVPNGTLVKTITNDQIEVTNATELVQSSSTGRICDSPHRILDGKNCTLIDALLGDPHCDGFQNKEWDLFVERSKAYSNCYPYDVPDYASLRSLVASSGTLEFINEDFNWTGVAQDGKSYACKRGSVNSFFSRLNWLHKLEYKYPALNVTMPNNGKFDKLYIWGVHHPSTDSDQTSLYVQASGRVTVSTKRSQQTVIPNIGFRPWVRGLSSRISIYWTIVKPGDILLINSTGNLIAPRGYFKIRNGKSSIMRSDAPIGNCSSECITPNGSIPNDKPFQNVNRITYGACPRYVKQNTLKLATGMRNVPEKQTRGIFGAIAGFIENGWEGMVDGWYGFRHQNSEGTGQAADLKSTQAAIDQINGKLNRLIEKTNEKFHQIEKEFSEVEGRIQDLEKYVEDTKIDLWSYNAGLLVALENQHTIDLTDSEMNKLFERTRKQLRENAEDMGNGCFKIYHKCDNACIGSIRNGTYDHDVYRDEALNNRFQIKGVELKSGYKDWILWISFAISCFLLCVVLLGFIMWACQKGNIRCNICI

SEQ ID NO: 1104 - protein, 565 aa, Artificial Sequence
  derived and/or modified protein sequence (wt) from hemagglutinin__InfluenzaA__ABG80172
MKVKLLVLLCTFTATYADTICIGYHANNSTDTVDTVLEKNVTVTHSVNLLEDSHNGKLCLLKGIAPLQLGNCSVAGWILGNPECELLISKESWSYIVETPNPENGTCYPGYFADYEELREQLSSVSSFERFEIFPKESSWPNHTVTGVSASCSHNGKSSFYRNLLWLTGKNGLYPNLSKSYANNKEKEVLVLWGVHHPPNIGDQRALYHTENAYVSVVSSHYSRRFTPEIAKRPKVRDQEGRINYYWTLLEPGDTIIFEANGNLIAPRYAFALSRGFGSGIITSNAPMDECDAKCQTPQGAINSSLPFQNVHPVTIGECPKYVRSAKLRMVTGLRNIPSIQSRGLFGAIAGFIEGGWTGMVDGWYGYHHQNEQGSGYAADQKSTQNAINGITNKVNSVIEKMNTQFTAVGKEFNKLERRMENLNKKVDDGFLDIWTYNAELLVLLENERTLDFHNSNVKNLYEKVKSQLKNNAKEIGNGCFEFYHKCNNECMESVKNGTYDYPKYSEESKLNREKIDGVKLESMGVYQILAIYSTVASSLVLLVSLGAISFWMCSNGSLQCRICI

SEQ ID NO: 1105 - protein, 565 aa, Artificial Sequence
  derived and/or modified protein sequence (wt) from hemagglutinin__InfluenzaA__ABG80183
MKVKLLVLLCTFTATYADTICIGYHANNSTDTVDTVLEKNVTVTHSVNLLEDSHNGKLCLLKGIAPLQLGNCSVAGWILGNPECELLISKESWSYIVETPNPENGTCYPGYFADYEELREQLSSVSSFERFEIFPKESSWPNHTVTGVSASCSHNGKSSFYRNLLWLTGKNGLYPNLSKSYANNKEKEVLVLWGVHHPPNIGGQRALYHTENAYVSVVSSHYSRRFTPEIAKRPKVRDQEGRINYYWTLLEPGDTIIFEANGNLIAPRYAFALSRGFGSGIITSNAPMDECDAKCQTPQGAINSSLPFQNVHPVTIGECPKYVRSAKLRMVTGLRNIPSIQSRGLFGAIAGFIEGGWTGMVDGWYGYHHQNEQGSGYAADQKSTQNAINGITNKVNSVIEKMNTQFTAVGKEFNKLERRMENLNKKVDDGFLDIWTYNAELLVLLENERTLDFHDSNVKNLYEKVKSQLKNNAKEIGNGCFEFYHKCNNECMESVKNGTYDYPKYSEESKLNREKIDGVKLESMGVYQILAIYSTVASSLVLLVSLGAISFWMCSNGSLQCRICI

SEQ ID NO: 1106 - protein, 566 aa, Artificial Sequence
  derived and/or modified protein sequence (wt) from hemagglutinin__InfluenzaA__ABG80194
MKTIIALSYILCLVFAQKLPVNDNSTATLCLGHHAVPNGTLVKTITNDHIEVTNATELVQSSSTGRICDSPHQILDGENCTLIDALLGDPHCDGFQNKEWNLFVERSTAYSNCYPYDVPDYASLRSLVASSGTLEFNNESFNWTGVAQNGTSSACKRRSIKSFFSRLNWLHQLKYKYPALNVTMPNNEKFDKLYIWGVHHPSTDSDQISLYAQASGRVTVSTKRSQQTVIPNIGSRPWVRGVSSIISIYWTIVKPGDILLINSTGNLIAPRGYFKIRSGKSSIMRSNAPIGKCNSECITPNGSIPNDKPFQNVNRITYGACPRYVKQNTLKLATGMRNVPEKQTRGIFGAIAGFIENGWEGMVDGWYGFRHQNSEGTGQAADLKSTQAAINQINGKLNRLIEKTNEKFHQIEKEFSEVEGRIQDLEKYVEDTKIDLWSYNAELLVALENQHTIDLTDSEMNKLFERTRKQLRENAEDMGNGCFKIYHKCDNACIGSIRNGTYDHDVYRDEALNNRFQIKGVELKSGYKDWILWISFAISCFLLCVVLLGFIMWACQKGNIRCNICI

SEQ ID NO: 1107 - protein, 566 aa, Artificial Sequence
  derived and/or modified protein sequence (wt) from hemagglutinin__InfluenzaA__ABG80205
MKTIIALSYILCLVFAQKLPGNDNSTATLCLGHHAVPNGTLVKTITNDQIEVTNATELVQSSSTGGICDSPHQILDGENCTLIDALLGDPHCDGFQNKEWDLFVERSKAYSNCYPYDVPDYASLRSLVASSGTLEFNNESFNWTGVAQNGTSSACKRRSNKSFFSRLNWLHQLKYKYPALNVAMPNNEKFDKLYIWGVHHPSTDSDQISLYAQAPGRVTVSTKRSQQTVIPNIGSRPWVRGVSSRISIYWTIVKPGDILLINCTGNLIAPRGYFKIRSGKSSIMRSDASIGKCNSECITPNGSIPNDKPFQNVNRITYGACPRYVKQNTLKLATGMRNVPEKQTRGIFGAIAGFIENGWEGMVDGWYGFRHQNSEGTGQAADLKSTQAAINQINGKLNRLIEKTNEKFHQIEKEFSEVEGRIQDLEKYVEDTKINLWSYNAELLVALENQHTIDLTDSEMNKLFERTKKQLRENAEDMGNGCFKIYHKCDNACIGSIRNGTYDHDVYRDEALNNRFQIKGVELKSGYKDWILWISFAISCFLLCVVLLGFIMWACQKGNIRCNICI

SEQ ID NO: 1108 - protein, 566 aa, Artificial Sequence
  derived and/or modified protein sequence (wt) from hemagglutinin__InfluenzaA__ABG80216
MKTIIALSYILCLVFAQKLPVNDNSTATLCLGHHAVPNGTLVKTITNDHIEVTNATELVQSSPTGRICDSPHQILDGENCTLIDALLGDPHCDGFQNKEWDLFVERSTAYSNCYPYDVPDYASLRSLVASSGTLEFNNESFNWTGVAQNGTSSACKRRSIKSFFSRLNWLHQLKYKYPALNVTMPNNEKFDKLYIWGVHHPSTDSDQISLYAQAPGRVTVSTKRSQQTVIPNIGSRPWVRGVSSRISIYWTIVKPGDILLINSTGNLIAPRGYFKIRSGKSSIMRSNTPIGKCNSECITPNGSIPNDKPFQNVNRITYGACPRYVKQNTLKLATGMRNVPEKQTRGIFGAIAGFIENGWEGMVDGWYGFRHQNSEGTGQAADLKSTQAAINQINGKLNRLIEKTNEKFHQIEKEFSEVEGRIQDLEKYVEDTKIDLWSYNAELLVALENQHTIDLTDSEMNKLFERTRKQLRENAEDMGNGCFKIYHKCDNACIGSIRNGTYDHDVYRDEALNNRFQIKGVELKSGYKDWILWISFAISCFLLCVVLLGFIMWACQKGNIRCNICI

SEQ ID NO: 1109 - protein, 566 aa, Artificial Sequence; identical to SEQ ID NO: 640
  derived and/or modified protein sequence (wt) from hemagglutinin__InfluenzaA__ABG80227

SEQ ID NO: 1110 - protein, 566 aa, Artificial Sequence; identical to SEQ ID NO: 516
  derived and/or modified protein sequence (wt) from hemagglutinin__InfluenzaA__ABG80238

SEQ ID NO: 1111 - protein, 566 aa, Artificial Sequence; identical to SEQ ID NO: 516
  derived and/or modified protein sequence (wt) from hemagglutinin__InfluenzaA__ABG80249

SEQ ID NO: 1112 - protein, 566 aa, Artificial Sequence; identical to SEQ ID NO: 516
  derived and/or modified protein sequence (wt) from hemagglutinin__InfluenzaA__ABG80260

SEQ ID NO: 1113 - protein, 566 aa, Artificial Sequence
  derived and/or modified protein sequence (wt) from hemagglutinin__InfluenzaA__ABG80271
MKTIIALSYILCLVFAQKLPGNDNSTATLCLGHHAVPNGTVVKTITNDQIEVTNATELVQSSSTGGICDSPHQILDGENCTLMDALLGDPQCDGFQNKKWDLFVERSKAYSNCYPYDVPDYASLRSLVASSGTLEFNNESFNWTGVTQNGTSSACKRRSNNSFFSRLNWLTHLKFKYPALNVTMPNNEKFDKLYIWGVHHPGTDNDQISLYAQASGRITVSTKRSQQTVIPNIGSRPRVRDIPSRISIYWTIVKPGDILLINSTGNLIAPRGYFKIRSGKSSIMRSDAPIGKCNSECITPNGSIPNDKPFQNVNRITYGACPRYVKQNTLKLATGMRNVPEKQTRGIFGAIAGFIENGWEGMVDGWYGFRHQNSEGTGQAADLKSTQAAINQINGKLNRLIGKTNEKFHQIEKEFSEVEGRIQDLEKYVEDTKIDLWSYNAELLVALENQHTIDLTDSEMNKLFERTKKQLRENAEDMGNGCFKIYHKCDNACIGSIRNGTYDHDVYRDEALNNRFQIKGVELKSGYKDWILWISFAISCFLLCVALLGFIMWACQKGNIRCNICI

SEQ ID NO: 1114 - protein, 566 aa, Artificial Sequence; identical to SEQ ID NO: 591
  derived and/or modified protein sequence (wt) from hemagglutinin__InfluenzaA__ABG80282

SEQ ID NO: 1115 - protein, 566 aa, Artificial Sequence; identical to SEQ ID NO: 243
  derived and/or modified protein sequence (wt) from hemagglutinin__InfluenzaA__ABG80293

SEQ ID NO: 1116 - protein, 566 aa, Artificial Sequence
  derived and/or modified protein sequence (wt) from hemagglutinin__InfluenzaA__ABG80304
MKTIIALSYILCLVFAQKLPGNDNSTATLCLGHHAVPNGTIVKTITNDQIEVTNATELVQSSSTGGICDSPHQILDGENCTLIDALLGDPQCDGFQNKKWDLFVERSKAYSNCYPYDVPDYASLRSLVASSGTLEFNNESFNWTGVTQNGTSSACKRRSNNSFFSRLNWLTHLKFKYPALNVTMPNNEKFDKLYIWGVHHPGTNNDQINLYAQASGRITVSTKRSQQTVIPNIGSRPRVRDIPSRISIYWTIVKPGDILLINSTGNLIAPRGYFKIRSGKSSIMRSDAPIGKCNSECITPNGSIPNDKPFQNVNRITYGACPRYVKQNTLKLATGMRNVPEKQTRGIFGAIAGFIENGWEGMVDGWYGFRHQNSEGIGQAADLKSTQAAINQINGKLNRLIGKTNEKFHQIEKEFSEVEGRIQDLEKYVEDTKIDLWSYNAELLVALENQHTIDLTDSEMNKLFERTKKQLRENAEDMGNGCFKIYHKCDNACIGSIRNGTYDHDVYRDEALNNRFQIKGVELKSGYKDWILWISFAISCFLLCVALLGFIMWACQKGNIRCNICI

SEQ ID NO: 1117 - protein, 566 aa, Artificial Sequence
  derived and/or modified protein sequence (wt) from hemagglutinin__InfluenzaA__ABG80315
MKTIIALSYILCLVFAQKLPGNDNSTATLCLGHHAVPNGTIVKTITNDQIEVTNATELIQSSSTGGICDSPHQILDGENCTLIDALLGDPQCDGFQNKKWDLFVERSKAYSNCYPYDVPDYASLRSLVASSGTLEFNNESFNWTGVTQNGTSSACKRRSNNSFFSRLNWLTHLKFKYPALNVTMPNNEKFDKLYIWGVHHPGTDNDQISLYAQASGRITVSTKRSQQTVIPNIGSRPRVRDIPSRISIYWTIVKPGDMLLINSTGNLIAPRGYFKIRSGKSSIMRSDAPIGKCNSECITPNGSIPNDKPFQNVNRITYGACPRYVKQNTLKLATGMRNVPEKQTRGIFGAIAGFIENGWEGMVDGWYGFRHQNSEGTGQAADLKSTQAAINQINGKLNRLIGKTNEKFHQIEKEFSEVEGRIQDLEKYVEDTKIDLWSYNAELLVALENQHTIDLTDSEMNKLFERTKKQLRENAEDMGNGCFKIYHKCDNACIGSIRNGTYDHDVYRDEALNNRFQIKGVELKSGYKDWILWISFAISCFLLCVALLGFIMWACQKGNIRCNICI

SEQ ID NO: 1118 - protein, 566 aa, Artificial Sequence; identical to SEQ ID NO: 282
  derived and/or modified protein sequence (wt) from hemagglutinin__InfluenzaA__ABG80326

SEQ ID NO: 1119 - protein, 566 aa, Artificial Sequence; identical to SEQ ID NO: 282
  derived and/or modified protein sequence (wt) from hemagglutinin__InfluenzaA__ABG80337

SEQ ID NO: 1120 - protein, 566 aa, Artificial Sequence
  derived and/or modified protein sequence (wt) from hemagglutinin__InfluenzaA__ABG80359
MKTIIALSYILCLVFAQKLPGNDNSTATLCLGHHAVPNGTLVKTITNDQIEVTNATELVQSSSTGRICDSPHRILDGKNCTLIDALLGDPHCDGFQNKEWDLFVERSKAYSNCYPYDVPDYASLRSLVASSGTLEFINEDFNWTGVAQDGGSYACKRGSVNSFFSRLNWLHKLEYKYPALNVTMPNNGKFDKLYIWGVHHPSTDSDQTSLYVRASGRVTVSTKRSQQTVTPNIGSRPWVRGLSSRISIYWTIVKPGDILLINSTGNLIAPRGYFKIRNGKSSIMRSDAPIGNCSSECITPNGSIPSDKPFQNVNRITYGACPRYVKQNTLKLATGMRNVPEKQTRGIFGAIAGFIENGWEGMVDGWYGFRHQNSEGTGQAADLKSTQAAVDQINGKLNRLIERTNEKFHQIEKEFSEVEGRIQDLEKYVEDTKIDLWSYNAELLVALENQHTIDLTDSEMNKLFEKTRKQLRENAEDMGNGCFKIYHKCDNACIGSIRNGTYDHDVYRDEALNNRFQIKGVELKSGYKDWILWISFAISCFLLCVVLLGFIMWACQKGNIRCNICI

SEQ ID NO: 1121 - protein, 566 aa, Artificial Sequence
  derived and/or modified protein sequence (wt) from hemagglutinin__InfluenzaA__ABG80370
MKTIIALSYILCLVFAQKLPGNDNSTATLCLGHHAVPNGTLVKTITNDQIEVTNATELVQSSSTGRICDSPHRILDGKNCTLIDALLGDPHCDGFQNKEWDLFVERSKAYSNCYPYDVPDYASLRSLVASSGTLEFINEDFNWTGVAQDGKSYACKRGSVKSFFSRLNWLHKLEYKYPALNVTMPNNGKFDKLYIWGVHHPSTDSDQTSLYVRASGRVTVSTKRSQQTVIPNIGSRPWVRGLSSRISIYWTIVKPGDILLINSTGNLIAPRGYFKIRNGKSSIMRSDAPIGNCSSECITPNGSIPNDKPFQNVNRITYGACPRYVKQNTLKLATGMRNVPEKQTRGIFGAIAGFIENGWEGMVDGWYGFRHQNSEGTGQAADLKSTQAAIDQINGKLNRLIEKTNEKFHQIEKEFSEVEGRIQDLEKYVEDTKIDLWSYNAELLVALENQHTIDLTDSEMNKLFERTRKQLRENAEDMGNGCFKIYHKCDNACIGSIRNGTYDHDVYRDEALNNRFQIKGVELKSGYKDWILWISFAISCFLLCVVLLGFIMWACQKGNIRCNICI

SEQ ID NO: 1122 - protein, 566 aa, Artificial Sequence; identical to SEQ ID NO: 1053
  derived and/or modified protein sequence (wt) from hemagglutinin__InfluenzaA__ABG80392

SEQ ID NO: 1123 - protein, 566 aa, Artificial Sequence; identical to SEQ ID NO: 1053
  derived and/or modified protein sequence (wt) from hemagglutinin__InfluenzaA__ABG80403

SEQ ID NO: 1124 - protein, 566 aa, Artificial Sequence; identical to SEQ ID NO: 1053
  derived and/or modified protein sequence (wt) from hemagglutinin__InfluenzaA__ABG80414

SEQ ID NO: 1125 - protein, 566 aa, Artificial Sequence; identical to SEQ ID NO: 1053
  derived and/or modified protein sequence (wt) from hemagglutinin__InfluenzaA__ABG80425

SEQ ID NO: 1126 - protein, 566 aa, Artificial Sequence; identical to SEQ ID NO: 783
  derived and/or modified protein sequence (wt) from hemagglutinin__InfluenzaA__ABG88289

SEQ ID NO: 1127 - protein, 566 aa, Artificial Sequence
  derived and/or modified protein sequence (wt) from hemagglutinin__InfluenzaA__ABG88300
MKAKLLVLLCAFTATYADTICIGYHANNSTDTVDTVLEKNVTVTHSVNLLEDSHNGKLCRLKGTAPLQLGNCSVAGWILGNPECESLFSKESWSYIAETPNPENGTCYPGYFADYEELREQLSSVSSFERFEIFPKESSWPNHTVTKGVTASCSHNGKSSFYKNLLWLTEKNGLYPDLSKSYVNNKEKEVLVLWGVHHPSNIGDQRAIYHTENAYVSVVSSHYSRRFTPEITKRPKVRDQEGRINYYWTLLEPGDTIIFEANGNLIAPWYAFALSRGFGSGIITSNASMGECDAKCQTPQGAINSSLPFQNVHPVTIGECPKYVRSTKLRMVTGLRNIPSIQSRGLFGAIAGFIEGGWTGMIDGWYGYHHQNEQGSGYAADQKSTQNAIDGITNKVNSVIEKMNTQFTAVGKEFNKLERRMENLNKKVDDGFLDIWTYNAELLVLLENERTLDFHDSNVKNLYEKVKTQLKNNAKEIGNGCFEFYHKCNNECMESVKNGTYDYPKYSEESKLNREKIDGVKLESMGVYQILAIYSTVASSLVLLVSLGAISFWMCSNGSLQCRICI

SEQ ID NO: 1128 - protein, 566 aa, Artificial Sequence; identical to SEQ ID NO: 911
  derived and/or modified protein sequence (wt) from hemagglutinin__InfluenzaA__ABG88311

SEQ ID NO: 1129 - protein, 566 aa, Artificial Sequence
  derived and/or modified protein sequence (wt) from hemagglutinin__InfluenzaA__ABG88322
MKAKLLVLLCAFTATYADTICIGYHANNSTDTVDTVLEKNVTVTHSVNLLEDSHNGKLCRLKGTAPLQLGNCSVAGWILGNPECESLFSKESWSYIAETPNPENGTCYPGYFADYEELREQLSSVSSFERFEIFPKESSWPNHTVTKGVTASCSHNGKSSFYKNLLWLTEKNGLYPILSKSYVNNKEKEVLVLWGVHHPSNIGDQRAIYHTENAYVSVVSSHYSRRFTPEIAKRPKVRDQEGRINYYWTLLEPGDTIIFEANGNLIAPWYAFALSRGFGSGIITSNASMGECDAKCQTPQGAINSSLPFQNVHPVTIGECPKYVRSTKLRMVTGLRNIPSIQSRGLFGAIAGFIEGGWTGMIDGWYGYHHQNEQGSGYAADQKSTQNAIDGITNKVNSVIEKMNTQFTAVGKEFNKLERRMENLNKKVDDGFLDIWTYNAELLVLLENERTLDFHDSNVKNLYEKVKNQLKNNAKEIGNGCFEFYHKCNNECMESVKNGTYDYPKYSEESKLNREKIDGVKLESMGVYQILAIYSTVASSLVLLVSLGAISFWMCSNGSLQCRICI

SEQ ID NO: 1130 - protein, 566 aa, Artificial Sequence
  derived and/or modified protein sequence (wt) from hemagglutinin__InfluenzaA__ABG88333
MKAKLLVLLCALSATDADTICIGYHANNSTDTVDTVLEKNVTVTHSVNLLEDSHNGKLCRLKGIAPLQLGKCSIAGWILGNPECESLFSKKSWSYIAETPNSENGTCYPGYFADYEELREQLSSVSSFERFEIFPKESSWPKHNVTRGVTASCSHKGKSSFYRNLLWLTEKNGSYPNLSKSYVNNKEKEVLVLWGVHHPSNIEDQKTIYRKENAYVSVVSSHYNRRFTPEISKRPKVRGQEGRINYYWTLLEPGDTIIFEANGNLIAPWYAFALSRGFGSGIITSNASMDECDAKCQTPQGAINSSLPFQNVHPVTIGECPKYVRSTKLRMVTGLRNIPSIQSRGLFGAIAGFIEGGWTGMIDGWYGYHHQNEQGSGYAADQKSTQNAINGITNKVNSVIEKMNTQFTAVGKEFNKLEKRMENLNKKVDDGFLDIWTYNAELLVLLENERTLDFHDSNVKNLYEKVKSQLKNNAKEIGNGCFEFYHKCNNECMESVKNGTYDYPKYSEESKLNREKIDGVKLESMGVYQILAIYSTVASSLVLLVSLGAISFWMCSNGSLQCRICI

SEQ ID NO: 1131 - protein, 566 aa, Artificial Sequence
  derived and/or modified protein sequence (wt) from hemagglutinin__InfluenzaA__ABG88344
MKAKLLVLLCALSATDADTICIGYHANNSTDTVDTVLEKNVTVTHSVNLLEDSHNGKLCRLKGIAPLQLGKCSIAGWILGNPECESLFSKKSWSYIAETPNSENGTCYPGYFADYEELREQLSSVSSFERFEIFPKESSWPKHNVTRGVTASCSHKGKSSFYRNLLWLTEKNGSYPNLSKSYVNNKEKEVLVLWGVHHPSNIEDQKTIYRKENAYVSVVSSHYNRRFTPEISKRPKVRNQEGRINYYWTLLEPGDTIIFEANGNLIAPWYAFALSRGFGSGIITSNASMDECDAKCQTPQGAINSSLPFQNVHPVTIGECPKYVRSTKLRMVTGLRNIPSIQSRGLFGAIAGFIEGGWTGMIDGWYGYHHQNEQGSGYAADQKSTQNAINGITNKVNSVIEKMNTQFTAVGKEFNKLEKRMENLNKKVDDGFLDIWTYNAELLVLLENERTLDFHDSNVKNLYEKVKSQLKNNAKEIGNGCFEFYHKCNNECMESVKNGTYDYPKYSEESKLNREKIDGVKLESMGVYQILAIYSTVASSLVLLVSLGAISFWMCSNGSLQCRICI

SEQ ID NO: 1132 - protein, 566 aa, Artificial Sequence
  derived and/or modified protein sequence (wt) from hemagglutinin__InfluenzaA__ABG88355
MKTIIALSYILCLVFAQKLPGNDNSTATLCLGHHAVPNGTLVKTITNDQIEVTNATELVQSSPTGRICDSPHRILDGKNCTLIDALLGDPHCDGFQNKEWDLFVERSKAYSNCYPYDVPDYASLRSLVASSGTLEFTNENFNWTGVAQDGKSYACKRGSVNSFFSRLNWLHKLEYKYPALNVTMPNNGKFDKLYIWGVHHPSTDSDQTSLYVRASGKVTVSTKRSQQTVIPDIGYRPWVRGLSSRISIYWTIVKPGDILLINSTGNLIAPRGYFKIRNGESSIMRSDAPIGNCSSECITPNGSIPNDKPFQNVNRITYGACPRYVKQNTLKLATGMRNVPEKQTRGIFGAIAGFIENGWEGMVDGWYGFRHQNSEGTGQAADLKSTQAAIDQINGKLNRLVEKTNEKFHQIEKEFSEVEGRIQDLEKYVEDTKIDLWSYNAELLVALENQHTIDLTDSEMNKLFERTRKQLRENAEDMGNGCFKIYHKCDNACIGSIRNGTYDHDVYRDEALNNRFQIKGVELKSGYKDWILWISFAISCFLLCVVLLGFIMWACQKGNIRCNICI

SEQ ID NO: 1133 - protein, 566 aa, Artificial Sequence
  derived and/or modified protein sequence (wt) from hemagglutinin__InfluenzaA__ABG88366
MKTIIALSYFLCLVFAQKLPGNDNSTATLCLGHHAVPNGTLVKTITNDQIEVTNATELVQNSPTGRICDSPHRILDGKNCTLIDALLGDPHCDGFQNKEWDLFVERSKAYSNCYPYDVPDYASLRSLVASSGTLEFTNENFNWTGVAQDGKSYACKRGSVNSFFSRLNWLHKLEYKYPALNVTMPNNGKFDKLYIWGVHHPSTDSDQTSLYVRASGKVTVSTKRSQQTVIPDIGYRPWVRGLSSRISIYWTIVKPGDILLINSTGNLIAPRGYFKIRNGKSSIMRSDAPIGNCSSECITPNGSIPNDKPFQNVNRITYGACPRYVKQNTLKLATGMRNVPEKQTRGIFGAIAGFIENGWEGMVDGWYGFRHQNSEGTGQAADLKSTQAAIDQINGKLNRLVEKTNEKFHQIEKEFSEVEGRIQDLEKYVEDTKIDLWSYNAELLVALENQHTIDLTDSEMNKLFERTRKQLRENAEDMGNGCFKIYHKCDNACIGSIRNGTYDHDVYRDEALNNRFQIKGVELKSGYKDWILWISFAISCFLLCVVLLGFIMWACQKGNIRCNICI

SEQ ID NO: 1134 - protein, 566 aa, Artificial Sequence; identical to SEQ ID NO: 984
  derived and/or modified protein sequence (wt) from hemagglutinin__InfluenzaA__ABG88377

SEQ ID NO: 1135 - protein, 566 aa, Artificial Sequence; identical to SEQ ID NO: 984
  derived and/or modified protein sequence (wt) from hemagglutinin__InfluenzaA__ABG88388

SEQ ID NO: 1136 - protein, 566 aa, Artificial Sequence
  derived and/or modified protein sequence (wt) from hemagglutinin__InfluenzaA__ABG88399
MKTIIALSYILCLVFAQKLPGNDNSTATLCLGHHAVPNGTLVKTITNDQIEVTNATELVQSSSTGRICDSPHRILDGKNCTLIDALLGDPHCDGFQNKEWDLFVERSKAYSNCYPYDVPDYASLRSLVASSGTLEFTKESFNWTGVAQDGKSYACKRGSVNSFFSRLNWLHKLEYKYPALNVTMPNNDKFDKLYIWGVHHPSTDSDQTSLYVQASGRVTVSTKRSQQTVIPNIGSRPWVRGISSRISIYWTIVKPGDILLINSTGNLIAPRGYFKIRNGKSSIMRSDAPIGNCNSECITPNGSIPNDKPFQNVNRITYGACPRYVKQNTLKLATGMRNVPEKQTRGIFGAIAGFIENGWEGMVDGWYGFRHQNSEGTGQAADLKSTQAAIDQINGKLNRLIEKTNEKFHQIEKEFSEVEGRIQDLEKYVEDTKIDLWSYNAELLVALENQHTIDLTDSEMNKLFERTRKQLRENAEDMGNGCFKIYHKCDNACIGSIRNGTYDHDVYRDEALNNRFQIKGVELKSGYKDWILWISFAISCFLLCVVLLGFIMWACQKGNIRCNICI

SEQ ID NO: 1137 - protein, 566 aa, Artificial Sequence; identical to SEQ ID NO: 1024
  derived and/or modified protein sequence (wt) from hemagglutinin__InfluenzaA__ABG88410

SEQ ID NO: 1138 - protein, 566 aa, Artificial Sequence; identical to SEQ ID NO: 1024
  derived and/or modified protein sequence (wt) from hemagglutinin__InfluenzaA__ABG88421

SEQ ID NO: 1139 - protein, 566 aa, Artificial Sequence
  derived and/or modified protein sequence (wt) from hemagglutinin__InfluenzaA__ABG88432
MKTIIALSYILCLVFAQKLPGNDNSTATLCLGHHAVPNGTLVKTITNDQIEVTNATELVQSSSTGRICDSPHRILDGKNCTLIDALLGDPHCDGFQNKEWDLFVERSKAYSNCYPYDVPDYASLRSLVASSGTLEFINEDFNWTGVAQDGKSYACKRGSVNSFFSRLNWLHKLEYKYPALNVTMPNNGKFDKLYIWGVHHPSTDSDQTSLYVRASGRVTVSTKRSQQTVIPNIGFRPWVRGLSSRISIYWTIVKPGDILLINSTGNLIAPRGYFKMRNGKSSIMRSDAPIGNCSSECITPNGSIPNDKPFQNVNRITYGACPRYVKQNTLKLATGMRNVPEKQTRGIFGAIAGFIENGWEGMVDGWYGFRHQNSEGTGQAADLKSTQAAIDQINGKLNRLIEKTNEKFHQIEKEFSEVEGRIQDLEKYVEDTKIDLWSYNAGLLVALENQHTIDLTDSEMNKLFERTRKQLRENAEDMGNGCFKIYHKCDNACIGSIRNGTYDHDVYRDEALNNRFQIKGVELKSGYKDWILWISFAISCFLLCVVLLGFIMWACQKGNIRCNICI

SEQ ID NO: 1140 - protein, 566 aa, Artificial Sequence; identical to SEQ ID NO: 1024
  derived and/or modified protein sequence (wt) from hemagglutinin__InfluenzaA__ABG88443

SEQ ID NO: 1141 - protein, 566 aa, Artificial Sequence
  derived and/or modified protein sequence (wt) from hemagglutinin__InfluenzaA__ABG88454
MKTIIALSYILCLVFAQKLPGNDNSTATLCLGHHAVPNGTLVKTITNDQIEVTNATELVQSSSTGRICDSPHRILDGKNCTLIDALLGDPHCDGFQNKEWDLFVERSKAYSNCYPYDVPDYASLRSLVASSGTLEFINEDFNWTGVAQDGKSYACKRGSANSFFSRLNWLHKLEYKYPALNVTMPNNGKFDKLYIWGVHHPSTDSDQTSLYVRASGGVTVSTKRSQQTVIPNIGSRPWVRGLSSRISIYWTIVKPGDILLINSTGNLIAPRGYFKIRSGKSSIMRSDASIGNCSSECITPNGSIPNDKPFQNVNRITYGACPRYVKQNTLKLATGMRNVPEKQTRGIFGAIAGFIENGWEGMVDGWYGFRHQNSEGTGQAADLKSTQAAIDQINGKLNRLIGKTNDKFHQIEKEFSEVEGRIQDLEKYVEDTKIDLWSYNAELLVALENQHTIDLTDSEMNKLFERTRKQLRENAEDMGNGCFKIYHKCDNACIGSIRNGTYDHDVYRDEALNNRFQIKGVELKSGYKDWILWISFAISCFLLCVVLLGFIMWACQKGNIRCNICI

SEQ ID NO: 1142 - protein, 566 aa, Artificial Sequence
  derived and/or modified protein sequence (wt) from hemagglutinin__InfluenzaA__ABG88465
MKTIIALSYILCLVFAQKLPGNDNSTATLCLGHHAVPNGTLVKTITNDQIEVTNATELVQSSSTGRICDSPHRILDGKNCTLIDALLGDPHCDGFQNKEWDLFVERSKAYSNCYPYDVPDYASLRSLVASSGTLEFINEDFNWTGVAQDGKSYACKRGSVNSFFSRLNWLHKLEYKYPALNVTMPNNGKFDKLYIWGVHHPSTDSDQTSLYVRASGRVTVSTKRSQQTVIPNIGFRPWVRGLSSRISIYWTIVKPGDILLINSTGNLIAPRGYFKIRNGKSSIMRSDAPIGNCSSECITPNGSIPNDKPFQNVNRITYGACPRYVKQNTLKLATGMRNIPEKQTRGIFGAIAGFIENGWEGMVDGWYGFRHQNSEGTGQAADLKSTQAAIDQINGKLNRLIEKTNEKFHQIEKEFSEVEGRIQDLEKYVEDTKIDLWSYNAGLLVALENQHTIDLTDSEMNKLFERTRKQLRENAEDMGNGCFKIYHKCDNACIGSIRNGTYDHDVYRDEALNNRFQIKGVELKSGYKDWILWISFAISCFLLCVVLLGFIMWACQKGNIRCNICI

SEQ ID NO: 1143 - protein, 566 aa, Artificial Sequence; identical to SEQ ID NO: 1024
  derived and/or modified protein sequence (wt) from hemagglutinin__InfluenzaA__ABG88476

SEQ ID NO: 1144 - protein, 566 aa, Artificial Sequence; identical to SEQ ID NO: 1024
  derived and/or modified protein sequence (wt) from hemagglutinin__InfluenzaA__ABG88487

SEQ ID NO: 1145 - protein, 566 aa, Artificial Sequence; identical to SEQ ID NO: 1024
  derived and/or modified protein sequence (wt) from hemagglutinin__InfluenzaA__ABG88498

SEQ ID NO: 1146 - protein, 566 aa, Artificial Sequence; identical to SEQ ID NO: 1024
  derived and/or modified protein sequence (wt) from hemagglutinin__InfluenzaA__ABG88509

SEQ ID NO: 1147 - protein, 566 aa, Artificial Sequence
  derived and/or modified protein sequence (wt) from hemagglutinin__InfluenzaA__ABG88520
MKTIIALSYISCLVFAQKLPGNDNSTATLCLGHHAVPNGTLVKTITNDQIEVTNATELVQSSSTGRICDSPHRILDGKNCTLIDALLGDPHCDGFQNKEWDLFVERSKAYSNCYPYDVPDYASLRSLVASSGTLEFINEDFNWTGVAQDGKSYACKRGSVNSFFSRLNWLHKLEYKYPALNVTMPNNGKFDKLYIWGVHHPSTDSDQTSLYVRASGRVTVSTKRSQQTVIPNIGFRPWVRGLSSRISIYWTIVKPGDILLINSTGNLIAPRGYFKIRNGKSSIMRSDAPIGNCSSECITPNGSIPNDKPFQNVNRITYGACPRYVKQNTLKLATGMRNVPEKQTRGIFGAIAGFIENGWEGMVDGWYGFRHQNSEGTGQAADLKSTQAAIDQINGKLNRLIEKTNEKFHQIEKEFSEVEGRIQDLEKYVEDTKIDLWSYNAGLLVALENQHTIDLTDSEMNKLFERTRKQLRENAEDMGNGCFKIYHKCDNACIGSIRNGTYDHDVYRDEALNNRFQIKGVELKSGYKDWILWISFAISCFLLCVVLLGFTMWACQKGNIRCNICI

SEQ ID NO: 1148 - protein, 566 aa, Artificial Sequence
  derived and/or modified protein sequence (wt) from hemagglutinin__InfluenzaA__ABG88531
MKTIIALSYILCLVFAQKLPGNDNSTATLCLGHHAVPNGTLVKTITNDQIEVTNATELVQSSSTGRICDSPHRILDGKNCTLIDALLGDPHCDGFQNKEWDLFVERSKAYSNCYPYDVPDYASLRSLVASSGTLEFINEDFNWTGVAQDGKSYACKRGSVNSFFSRLNWLHKLEYKYPALNVTMPNNGKFDKLYIWGVHHPSTDSVQTSLYVRASGRVTVSTKRSQQTVIPNIGFRPWVRGLSSRISIYWTIVKPGDILLINSTGNLIAPRGYFKIRNGKSSIMRSDAPIGNCSSECITPNGSIPNDKPFQNVNRITYGACPRYVKQNTLKLATGMRNVPEKQTRGIFGAIAGFIENGWEGMVDGWYGFRHQNSEGTGQAADLKSTQAAIDQINGKLNRLIEKTNEKFHQIEKEFSEVEGRIQDLEKYVEDTKIDLWSYNAGLLVALENQHTIDLTDSEMNKLFERTRKQLRENAEDMGNGCFKIYHKCDNACIGSIRNGTYDHDVYRDEALNNRFQIKGVELKSGYKDWILWISFAISCFLLCVVLLGFIMWACQKGNIRCNICI

SEQ ID NO: 1149 - protein, 565 aa, Artificial Sequence; identical to SEQ ID NO: 1035
  derived and/or modified protein sequence (wt) from hemagglutinin__InfluenzaA__ABG88553

SEQ ID NO: 1150 - protein, 566 aa, Artificial Sequence; identical to SEQ ID NO: 710
  derived and/or modified protein sequence (wt) from hemagglutinin__InfluenzaA__ABG88564

SEQ ID NO: 1151 - protein, 566 aa, Artificial Sequence; identical to SEQ ID NO: 740
  derived and/or modified protein sequence (wt) from hemagglutinin__InfluenzaA__ABG88575

SEQ ID NO: 1152 - protein, 566 aa, Artificial Sequence; identical to SEQ ID NO: 650
  derived and/or modified protein sequence (wt) from hemagglutinin__InfluenzaA__ABG88586

SEQ ID NO: 1153 - protein, 566 aa, Artificial Sequence
  derived and/or modified protein sequence (wt) from hemagglutinin__InfluenzaA__ABG88597
MKTIIALSYILCLVFAQKLPANDNSTATLCLGHHAVPNGTLVKTITNDNIEVTNATELVQSSSTGRICDSPHQILDGENCTLIDALLGDPHCDGFQNKEWDLFVERSTAYSNCYPYDVPDYASLRSLVASSGTLEFNNESFNWTGVDQNGTSSACKRRSNKSFFSRLNWLHQLKYKYPALNVTMPNNEKFDKLYIWGVHHPSTDSDQISLYAQASGRVTVSTKRSQQTVIPNIGSRPWVRGVSSRISIYWTIVKPGDILLINSTGNLIAPRGYFKIRSGKSSIMRSNAPIGKCNSECITPNGSIPNDKPFQNVNRITYGACPRYVKQNTLKLATGMRNVPEKQTRGIFGAIAGFIENGWEGMVDGWYGFRHQNSEGTGQAADLKSTQAAINQINGKLNRLIEKTNEKFHQIEKEFSEVEGRIQDLEKYVEDTKIDLWSYNAELLVALENQHTIDLTDSEMNKLFERTRKQLRENAEDMGNGCFKIYHKCDNACIGSIRNGTYDHDVYRDEALNNRFQIKGVELKSGYKDWILWISFAISCFLLCVVLLGFIMWACQKGNIRCNICI

SEQ ID NO: 1154 - protein, 566 aa, Artificial Sequence
  derived and/or modified protein sequence (wt) from hemagglutinin__InfluenzaA__ABG88608
MKTIIALSYILCLVFAQKLPGNDNSTATLCLGHHAVPNGTLVKTITNDQIEVTNATELVQSSSTGRICDSPHQILDGENCTLIDALLGDPHCDGFQNKEWDLFVERSRAYSNCYPYDVPDYVSLRSLVASSGTLEFNNESFNWTGVAQNGTSSACKRRSDKSFFSRLNWLHQLKYKYPALNVTMPNNEKFDKLYIWGVHHPGTDSDQISLYAQASGRVTVSTKRSQQTVIPNIGSRPWVRGVSSRISIYWTIVKPGDILLINSTGNLIAPRGYFKIRSGKSSIMRSDAPIGKCNSECITPNGSIPNDKPFQNVNRITYGPCPRYVKQNTLKLATGMRNVPEKQTRGIFGAIAGFIENGWEGMMDGWYGFRHQNSEGTGQAADLKSTQAAINQINGKLNRLIEKTNEKFHQIEKEFSEVEGRIQDLEKYVEDTKIDLWSYNAELLVALENQHTIDLTDSEMNKLFERTKKQLRENAEDMGNGCFKIYHKCDNACIGSIRNGTYDHDVYRDEALNTRFQIKGVELKSGYKDWILWISFAISCFLLCIVLLGFIMWACQKGNIRCNICI

SEQ ID NO: 1155 - protein, 566 aa, Artificial Sequence; identical to SEQ ID NO: 562
  derived and/or modified protein sequence (wt) from hemagglutinin__InfluenzaA__ABG88619

SEQ ID NO: 1156 - protein, 566 aa, Artificial Sequence
  derived and/or modified protein sequence (wt) from hemagglutinin__InfluenzaA__ABG88630
MKTIIALSYILCLVFAQKLPGNDNSTATLCLGHHAVPNGTLVKTITNDQIEVTNATELVQSSSTGRICDSPHQVLDGENCTLIDALLGDPHCDGFQNKEWDLFVERSKAYSNCYPYDVPDYVSLRSLVASSGTLEFNNESFNWTGVAQNGTSSACKRRSDKSFFSRLNWLHQLKYKYPALNVTMPNNEKFDKLYIWGVHHPGTDSDQISLYAQASGRVTVSTKRSQQTVIPNIGSRPWVRGVSSRISIYWTIVKPGDILLINSTGNLIAPRGYFKIRSGKSSIMRSDAPIGKCNSECITPNGSIPNDKPFQNVNRITYGACPRYVKQKTLKLATGMRNVPEKQTRGIFGAIAGFIENGWEGMMDGWYGFRHQNSEGTGQAADLKSTQAAINQINGKLNRLIEKTNEKFHQIEKEFSEVEGRIQDLEKYVEDTKIDLWSYNAELLVALENQHTIDLTDSEMNKLFERTKKQLRENAEDMGNGCFKIYHKCDNACIGSIRNGTYDHDVYRDEALNNRFQIKGVELKSGYKDWILWISFAISCFLLCIVLLGFIMWACQKGNIRCNICI

SEQ ID NO: 1157 - protein, 566 aa, Artificial Sequence
  derived and/or modified protein sequence (wt) from hemagglutinin__InfluenzaA__ABG88641
MKTIIALSYILCLVFAQKLPGNDNSTATLCLGHHAVPNGTLVKTITNDQIEVTNATELVQSSSTSRICDSPHQILDGENCTLIDALLGDPHCDGFQNKEWDLFVERSKAYSNCYPYDVPDYVSLRSLVASSGTLEFNNESFNWTGVAQNGTSSACKRRSDKSFFSRLNWLHQLKYKYPALNVTMPNNEKFDKLYIWGVHHPGTDSDQISLYAQASGRVTVSTKRSQQTVIPNIGSGPWVRGVSSRISIYWTIVKPGDILLINSTGNLIAPRGYFKIRSGKSSIMRSDAPIGKCNSECITPNGSIPNGKPFQNVNRITYGACPRYVKQNTLKLATGMRNVPEKQTRGIFGAIAGFIENGWEGMMDGWYGFRHQNSEGTGQAADLKSTQAAINQINGKLNRLIEKTNEKFHQIEKEFSEVEGRIQDLEKYVEDTKIDLWSYNAELLVALENQHTIDLTDSEMNKLFERTKKQLRENAEDMGNGCFKIYHKCDNACIGSIRNGTYDHDVYRDEALNNRFQIKGVELKSGYKDWILWISFATSCFLLCIVLLGFIMWACQKGNIRCNICI

SEQ ID NO: 1158 - protein, 566 aa, Artificial Sequence; identical to SEQ ID NO: 516
  derived and/or modified protein sequence (wt) from hemagglutinin__InfluenzaA__ABG88652

SEQ ID NO: 1159 - protein, 566 aa, Artificial Sequence; identical to SEQ ID NO: 516
  derived and/or modified protein sequence (wt) from hemagglutinin__InfluenzaA__ABG88663

SEQ ID NO: 1160 - protein, 566 aa, Artificial Sequence; identical to SEQ ID NO: 516
  derived and/or modified protein sequence (wt) from hemagglutinin__InfluenzaA__ABG88674

SEQ ID NO: 1161 - protein, 566 aa, Artificial Sequence; identical to SEQ ID NO: 516
  derived and/or modified protein sequence (wt) from hemagglutinin__InfluenzaA__ABG88685

SEQ ID NO: 1162 - protein, 566 aa, Artificial Sequence; identical to SEQ ID NO: 516
  derived and/or modified protein sequence (wt) from hemagglutinin__InfluenzaA__ABG88696

SEQ ID NO: 1163 - protein, 566 aa, Artificial Sequence; identical to SEQ ID NO: 282
  derived and/or modified protein sequence (wt) from hemagglutinin__InfluenzaA__ABG88707

SEQ ID NO: 1164 - protein, 566 aa, Artificial Sequence; identical to SEQ ID NO: 282
  derived and/or modified protein sequence (wt) from hemagglutinin__InfluenzaA__ABG88718

SEQ ID NO: 1165 - protein, 566 aa, Artificial Sequence
  derived and/or modified protein sequence (wt) from hemagglutinin__InfluenzaA__ABG88729
MKTIIALSYILCLVFAQKLPGNDNSTATLCLGHHAVPNGTLVKTITNDQIEVTNATELVQSSSTGRICDSPHRILDGKNCTLIDALLGDPHCDGFQNKEWDLFVERSKAYSNCYPYDVPDYASLRSLVASSGTLEFINEDFNWTGVAQDGGSYACKRGSVNSFFSRLNWLHKLEYKYPALNVTMPNSGKFDKLYIWGVHHPSTDSDQTSLYVRASGRVTVSTKRSQQTVTPNIGSRPWVRGLSSRISIYWTIVKPGDILLINSTGNLIAPRGYFKIRNGKSSIMRSDAPIGNCSSECITPNGSIPNDKPFQNVNRITYGACPRYVKQNTLKLATGMRNVPEKQTRGIFGAIAGFIENGWEGMVDGWYGFRHQNSEGTGQAADLKSTQAAIDQINGKLNRLIEKTNEKFHQIEKEFSEVEGRIQDLEKYVEDTKIDLWSYNAELLVALENQHTIDLTDSEMNKLFEKTRKQLRENAEDMGNGCFKIYHKCDNACIGSIRNGTYDHDVYRDEALNNRFQIKGVELKSGYKDWILWISFAISCFLLCVVLLGFIMWACQKGNIRCNICI

SEQ ID NO: 1166 - protein, 566 aa, Artificial Sequence
  derived and/or modified protein sequence (wt) from hemagglutinin__InfluenzaA__ABG88740
MKTIIALSYILCLVFAQKLPGNDNSTATLCLGHHAVPNGTLVKTITNDQIEVTNATELVQSSSTGRICDSPHRILDGKNCTLIDALLGDPHCDGFQNKEWDLFVERSKAYSNCYPYDVPDYASLRSLVASSGTLEFINEDFNWTGVAQDGKSYACKRGSVNSFFSRLNWLHKLEYKYPALNVTMPNNGKFDKLYIWGVHHPSTDSDQTSLYVRASGRVTVSTKRSQQTVIPNIGSRPWVRGLSSRISIYWTIVKPGDILLINSTGNLIAPRGYFKIRNGKSSIMRSDAPIGNCSSECITPNGSIPNDKPFQNVNRITYGACPRYIKQNTLKLATGMRNVPEKQTRGIFGAIAGFIENGWEGMVDGWYGFRHQNSEGTGQAADLKSTQAAIDQINGKLNRLIEKTNEKFHQIEKEFSEVEGRIQDLEKYVEDTKIDLWSYNAELLVALENQHTIDLTDSEMNKLFERTRKQLRENAEDMGNGCFKIYHKCDNACIGSIRNGTYDHDVYRDEALNNRFQIKGVELKSGYKDWILWISFAISCFLLCVVLLGFIMWACQKGNIRCNICI

SEQ ID NO: 1167 - protein, 566 aa, Artificial Sequence; identical to SEQ ID NO: 1053
  derived and/or modified protein sequence (wt) from hemagglutinin__InfluenzaA__ABG88751

SEQ ID NO: 1168 - protein, 566 aa, Artificial Sequence
  derived and/or modified protein sequence (wt) from hemagglutinin__InfluenzaA__ABG88762
MKTIIALSYILCLVFTQKLPGNDNSTATLCLGHHAVPNGTLVKTITNDQIEVTNATELVQSSSTGRICDSPHRILDGKNCTLIDALLGDPHCDGFQNKEWDLFVERSKAYSNCYPYDVPDYASLRSLVASSGTLEFINEDFNWTGVAQDGGSYACKRGSVNSFFSRLNWLHKLEYKYPALNVTMPNNGKFDKLYIWGVHHPSTDSDQTSLYVRASGRVTVSTKRSQQTVIPNIGSRPWVRGLSSRISIYWTIVKPGDILLINSTGNLIAPRGYFKIRNGKSSIMRSDASIGNCSSECITPNGSIPNDKPFQNVNRITYGACPRYVKQNTLKLATGMRNVPEKQTRGIFGAIAGFIENGWEGMVDGWYGFRHQNSEGTGQAADLKSTQAAIDQINGKLNRLIEKTNEKFHQIEKEVSEVEGRIQDLEKYVEDTKIDLWSYNAELLVALENQHTIDLTDSEMNKLFERTRKQLRENAEDMGNGCFKIYHKCDNACIGSIRNGTYDHDVYRDEALNNRFQIKSVELKSGYKDWILWISFAISCFLLCVVLLGFIMWACQKGNIRCNICI

SEQ ID NO: 1169 - protein, 566 aa, Artificial Sequence
  derived and/or modified protein sequence (wt) from hemagglutinin__InfluenzaA__ABG88773
MKTIIALSYILCLVFAQKLPGNDNSTATLCLGHHAVPNGTLVKTITNDQIEVTNATELVQSSSAGRICDSPHRILDGKNCTLIDALLGDPHCDGFQNKEWDLFVERSKAYSNCYPYDVPDYASLRSLVASSGTLEFINEDFNWTGVAQDGKSYACKRGSVNSFFSRLNWLHKLEYKYPALNVTMPNNGKFDKLYIWGVHHPSTDSDQTSLYVRASGRVTVSTKRSQQTVIPNIGSRPWVRGLSSRISIYWTIVKPGDILLINSTGNLIAPRGYFKIRNGKSSIMRSDAPIGNCSSECITPNGSIPNDKPFQNVNRITYGACPRYVKQNTLKLATGMRNVPEKQTRGIFGAIAGFIENGWEGMVDGWYGFRHQNSEGTGQAADLKSTQAATDQINGKLNRLIEKTNEKFHQIEKEFSEVEGRIQDLEKYVEDTKIDLWSYNAELLVALENQHTIDLTDSEMNKLFERTRKQLRENAEDMGNGCFKIYHKCDNACIGSIRNGTYDHDVYRDEALNNRFQIKGVELKSGYKDWILWISFAISCFLLCVVLLGFIMWACQKGNIRCNICI

SEQ ID NO: 1170 - protein, 566 aa, Artificial Sequence
  derived and/or modified protein sequence (wt) from hemagglutinin__InfluenzaA__ABG88784
MKTIIALSYILCLVFAQKLPGNDNSTATLCLGHHAVPNGTLVKTITNDQIEVTNATELVQSSSTGRICDSPHRILDGKNCTLIDALLGDPHCDGFQNKEWDLFVERSKAYSNCYPYDVPDYASLRSLVASSGTLEFINEDFNWTGVAQDGKSYACKRGSVNSFFSRLNWLHKLEYKYPALNVTMPNNGKFDKLYIWGVHHPSTDSDQTSLYVRASGRVTVSTKRSQQTVIPNIGSRPWVRGLSSRISIYWTIVKPGDILLINSTGNLIAPRGYFKIRNGKSSIMRSDAPIGNCSSECITPNGSIPNDKPFQNVNRITYGACPRYVKQNTLKLATGMRNVPEKQTRGIFGAIAGFIENGWEGMVDGWYGFRHQNSEGTGQAADLKSTQAAIDQINGKLNRLIKKTNEKFHQIEKEFSEVEGRIQDLEKYVEDTKIDLWSYNAELLVALENQHTIDLTDSEMNKLFERTRKQLRENAEDMGNGCFKIYHKCDNACIGSIRNGTYDHDVYRDEALNNRFQIKGVELKSGYKDWILWISFAISCFLLCVVLLGFIMWACQKGNIRCNICI

SEQ ID NO: 1171 - protein, 566 aa, Artificial Sequence
  derived and/or modified protein sequence (wt) from hemagglutinin__InfluenzaA__ABG88806
MKTIIALSYILCLVFAQKLPGNDNSTATLCLGHHAVPNGTLVKTITNDQIEVTNATELVQSSSTGRICDSPHQILDGENCTLIDALLGDPHCDGFQNKEWDLFVERSKAYSNCYPYDVPDYVSLRSLVASSGTLEFNNESFNWTGVAQNGTSSACKRRSDKSFFSRLNWLHQLKYKYPALNVTVPNNEKFDKLYIWGVHHPGTDSDQISLYAQASGRVTVSTKRSQQTVIPNIGSRPWVRGVSSRISIYWTIVKPGDILLINSTGNLIAPRGYFKIRSGKSSIMRSDAPIGKCNSECITPNGSIPNDKPFQNVNRITYGACPRYVKQNTLKLATGMRNVPEKQTRGIFGAIAGFIENGWEGMMDGWYGFRHQNSEGTGQAADLKSTQAAINQINGKLNRLIEKTNEKFHQIEKEFSEVEGRIQDLEKYVEDTKIDLWSYNAELLVALENQHTIDLTDSEMNKLFERTKKQLRENAEDMGNGCFKIYHKCDNACIGSIRNGTYDHDVYRDEALNNRFQIKGVELKSGYKDWILWISFAISCFLLCIVLLGFIMWACQKGNIRCNICI

SEQ ID NO: 1172 - protein, 567 aa, Artificial Sequence
  derived and/or modified protein sequence (wt) from hemagglutinin__InfluenzaA__ABI16504
MEKIVLLLAIVSLVKSDQICIGYHANNSTEQVDTIMEKNVTVTHAQDILEKTHNGKLCDLDGVKPLILRDCSVAGWLLGNPMCDEFINVPEWSYIVEKANPANDLCYPGNFNDYEELKHLLSRINHFEKIQIISKSSWSDHEASSGVSSACPYQGTPSFFRNVVWLIKKNNTYPTIKRSYNNTNQEDLLILWGIHHSNNAAEQTKLYQNPTTYISVGTSTLNLRLVPKIATRSKVNGQSGRMDFFWTILKPNDAINFESNGNFIAPEYAYKIVKKGDSAIMKSEVEYGNCNTKCQTPIGAINSSMPFHNIHPLTIGECPKYVKSNKLVLATGLRNSPLRERRRKRGLFGAIAGFIEGGWQGMVDGWYGYHHSNEQGSGYAADKESTQKAIDGVTNKVNSIIDKMNTQFEAVGREFNNLERRIENLNKKMEDGFLDVWTYNAELLVLMENERTLDFHDSNVKNLYDKVRLQLRDNAKELGNGCFEFYHKCDNECMESVRNGTYDYPQYSEEARLKREEISGVKLESIGTYQILSIYSTVASSLALAIMVAGLSLWMCSNGSLQCRICI

SEQ ID NO: 1173 - protein, 566 aa, Artificial Sequence; identical to SEQ ID NO: 633
  derived and/or modified protein sequence (wt) from hemagglutinin__InfluenzaA__ABI20793

SEQ ID NO: 1174 - protein, 566 aa, Artificial Sequence
  derived and/or modified protein sequence (wt) from hemagglutinin__InfluenzaA__ABI20837
MKAKLLVLLCAFTATYADTICIGYHANNSTDTVDTVLEKNVTVTHSVNLLEDSHNGKLCRLKGTAPLQLGNCSVAGWILGNPECESLFSKESWSYIAETPNPENGTCYPGYFADYEELREQLSSVSSFERFEIFPKESSWPNHTVTKGVTASCSHNGKSSFYKNLLWLTEKNGLYPNLSKSYVNNKEKEVLVLWGVHHPSNIGDQRAIYHTENAYVSVVSSHYSRRFTPEIAKRPKVRDQEGRINYYWTLLEPGDTIIFEANGNLIAPWYAFALSRGFGSGIITSNASMGECDAKCQTPQGAINSSLPFQNVHPVTIGECPKYVRSTKLRMVTGLRNIPSIQSRGLFGAIAGFIEGGWTGMIDGWYGYHHQNEQGSGYAADQKSTQNAINGITNKVNSVIEKMNTQFTAVGKEFNKLERRMENLNKKVDDGFLDIWTYNAELLVLLENERTLDFHDSNVKNLYEKVKTQLKNNAKEIGNGCFEFYHKCNNECMESVKNGTYDYPKYSEESKLNREKIDGVKLESMGVYQILAIYSTVASSLVLLVSLGAISFWMCSNGSLQCRICI

SEQ ID NO: 1175 - protein, 566 aa, Artificial Sequence
  derived and/or modified protein sequence (wt) from hemagglutinin__InfluenzaA__ABI20848
MKAKLLVLLCAFTATYADTICIGYHANNSTDTVDTVLEKNVTVTHSVNLLEDSHNGKLCRLKGTAPLQLGNCSVAGWILGNPECESLFSKESWSYIAETPNPENGTCYPGYFADYEELKEQLSSVSSFERFEIFPKESSWPNHTVTKGVTASCSHNGKSSFYKNLLWLTEKNGLYPNLSKSYVNNKEKEVLVLWGVHHPSNIGDQRAIYHTENAHVSVVSSHYSRRFTPEIAKRPKVRDQEGRINYYWTLLEPGDTIIFEANGNLIAPWYAFALSRGFGSGIITSNASMGECDAKCQTPQGAINSSLPFQNVHPVTIGECPKYVRSTKLRMVTGLRNIPSIQSRGLFGAIAGFIEGGWTGMIDGWYGYHHQNEQGSGYAADKKSTQNAIDGITNKVNSVIEKMNTQFTAVGKEFNKLERRMENLNKKVDDGFLDIWTYNAELLVLLENERTLDFHDSNVKNLYEKVKNQLKNNAKEIGNGCFEFYHKCNNECMESVKNGTYDYPKYSEESKLKREKIDGVKLESMGVYQILAIYSTVASSLVLLVSLGAISFWMCSNGSLQCRICI

SEQ ID NO: 1176 - protein, 566 aa, Artificial Sequence; identical to SEQ ID NO: 921
  derived and/or modified protein sequence (wt) from hemagglutinin__InfluenzaA__ABI20859

SEQ ID NO: 1177 - protein, 566 aa, Artificial Sequence
  derived and/or modified protein sequence (wt) from hemagglutinin__InfluenzaA__ABI20870
MKAKLLVLLCAFTATYADTICIGYHANNSTDTVDTVLEKNVTVTHSVNLLEDSHNGKLCRLKGIAPLQLGNCSVAGWILGNPECESLFSKESWSYIAETPNPENGTCYPGNFADYEELREQLSSVSSFERFEIFPKESSWPNHTVTKGVTVSCSHNGKSSFYRNLLWLTEKNGLYPNLSKSYVNNKEKEVLVLWGVHHPSNMRDQRAIYHTENAYVSVVSSHYSRRFTPEIAKRPKVRDQEGRINYYWTLLEPGDTIIFEANGNLIAPRYAFALSRGFGSGIITSNASMDECDAKCQTPQGAINSSLPFQNVHPVTIGECPKYVRSTKLRMVTGLRNIPSIQSRGLFGAIAGFIEGGWTGMIDGWYGYHHQNEQGSGYAADQKSTQNAINGITNKVNSVIEKMNTQFTAVGKEFNKLERRMENLNKKVDDGFLDIWTYNAELLVLLENERTLDFHDSNVKNLYEKVKSQLKNNAKEIGNGCFEFYHKCNNECMESVKNGTYDYPKYSEESKLNREKIDGVKLESMGVYQILAIYSTVASSLVLLVSLGAISFWMCSNGSLQCRICI

SEQ ID NO: 1178 - protein, 566 aa, Artificial Sequence; identical to SEQ ID NO: 989
  derived and/or modified protein sequence (wt) from hemagglutinin__InfluenzaA__ABI20881

SEQ ID NO: 1179 - protein, 566 aa, Artificial Sequence
  derived and/or modified protein sequence (wt) from hemagglutinin__InfluenzaA__ABI20892
MKTIIALSYILCLVFAQKLPGNDNSTATLCLGHHAVPNGTLVKTITNDQIEVTNATELVQSSSTGRICDSPHRILDGKNCTLIDALLGDPHCDGFQNKEWDLFVERSKAYSNCYPYDVPDYASLRSLVASSGTLEFTKEGFNWTGVAQDGKSYACKRGSVNSFFSRLNWLHKLEYKYPALNVTMPNNDKFDKLYIWGVHHPSTDSDQTSLYVQASGRVTVSTKRSQQTVIPNIGSRPWVRGISSRISIHWTIVKPGDILLITSTGNLIAPRGYFKIRNGKSSIMRSDAPIGNCNSECITPNGSIPNDKPFQNVNRITYGACPRYVKQNTLKLATGMRNVPEKQTRGIFGAIAGFIENGWEGMVDGWYGFRHQNSEGTGQAADLKSTQAAIDQINGKLNRLIEKTNEKFHQIEKEFSEVEGRIQDLEKYVEDTKIDLWSYNAELLVALENQHTIDLTDSEMNKLFERTRKQLRENAEDMGNGCFKIYHKCDNACIGSIRNGTYDHDVYRDEALNNRFQIKGVELKSGYKDWILWISFAISCFLLCVVLLGFIMWACQKGNIRCNICI

SEQ ID NO: 1180 - protein, 566 aa, Artificial Sequence
  derived and/or modified protein sequence (wt) from hemagglutinin__InfluenzaA__ABI20903
MKTIIALSYILCLVFAQKLPGNDNSTATLCLGHHAVPNGTLVKTITNDQIEVTNATELVQNSPTGRICDSPHRILDGKNCTLIDALLGDPHCDGFQNKEWDLFVERSKAYSNCYPYDVPDYASLRSLVASSGTLEFTNENFNWTGVAQDGKSYACKRGSVNSFFSRLNWLHKLEYKYPALNVTMPNNGKFDKLYIWGVHHPSTDSDQTSLYVRASGKVTVSTKRSQQTVIPDIGYRPWVRGLSSRISIYWTIVKPGDILLIHSTGNLIAPRGYFKIRNGKSSIMRSDAPIGNCSSECITPNGSIPNDKPFQNVNRITYGACPRYVKQNTLKLATGMRNVPEKQTRGIFGAIAGFIENGWEGMVDGWYGFRHQNSEGTGQAADLKSTQAAIDQINGKLNRLVEKTNEKFHQIEKEFSEVEGRIQDLEKYVEDTKIDLWSYNAELLVALENQHTIDLTDSEMNKLFERTRKQLRENAEDMGNGCFKIYHKCDNACIGSIRNGTYDHDVYRDEALNNRFQIKGVELKSGYKDWILWISFAISCFLLCVVLLGFIMWACQKGNIRCNICI

SEQ ID NO: 1181 - protein, 566 aa, Artificial Sequence
  derived and/or modified protein sequence (wt) from hemagglutinin__InfluenzaA__ABI20914
MKTIIALSYILCLVFAQKLPGNDNSTATLCLGHHAVPNGTLVKTITNDQIEVTNATELVQSSSTGRICDSPHRILDGKNCTLIDALLGDPHCDGFQNKEWDLFVERSKAYSNCYPYDVPDYASLRSLVASSGTLEFINEDFNWTGVAQDGKSYACKRGSVNSFFSRLNWLHKLEYKYPALNVTMPNNGKFDKLYIWGVHHPSTDSDQTSLYVRASGRVTVSTKRSQQTVIPNIGFRPWVRGLSSRISIYWTIVKPGDILLINSTGNLIAPRGYFKIRNGKSSIMRSDAPIGNCSSECITPNGSIPNDKPFQNVNRITYGACPRYVKQNTLKLATGMRNVPEKQTRGIFGAIAGFIENGWEGMVDGWYGFRHQNSEGTGQAADLKSTQAAIDQINGKLNRLIEKTNEKFHQIEKEFSEVEGRIQDLEKYVEDTKIDLWSYNAGLLVALENQHTIDLTDSEMNKLFERTRKQLRENAEDMGNGCFKIYHKCDNACIGSIRNGTYDHDVYRDEALNNRFQIKGVELKSGYKDWILWISFAISCFLLCVVSLGFIMWACQKGNIRCNICI

SEQ ID NO: 1182 - protein, 566 aa, Artificial Sequence; identical to SEQ ID NO: 1066
  derived and/or modified protein sequence (wt) from hemagglutinin__InfluenzaA__ABI20925

SEQ ID NO: 1183 - protein, 566 aa, Artificial Sequence; identical to SEQ ID NO: 1066
  derived and/or modified protein sequence (wt) from hemagglutinin__InfluenzaA__ABI20936

SEQ ID NO: 1184 - protein, 566 aa, Artificial Sequence
  derived and/or modified protein sequence (wt) from hemagglutinin__InfluenzaA__ABI20947
MKTIIALSYILCLVFAQKLPGNDNSTATLCLGHHAVPNGTLVKTITNDQIEVTNATELVQSSSTGRICDSPHRILDGKNCTLIDALLGDPHCDGFQNKEWDLFVERSKAYSNCYPYDVPDYASLRSLVASSGTLEFINEDFNWTGVAQDGKSYACKRGSVNSFFSRLNWLHKLEYKYPALNVTMPNNGKFDKLYIWGVHHPSTDSDQTSLYVRASGRVTVSTKRSQQTVIPNIGFRPWVRGLSSRISIYWTIVKPGDILLINSTGNLIAPRGYFKIRNGKSSIMRSDAPIGNCSSECITPNGSIPNDKPFQNVNRITYGACPRYVKQNTLKLATGMRNVPEKQTRGIFGAIAGFIENGWEGMVDGWYGFRHQNSEGTGQAADLKSTQAAIDQINGKLNRLIEKTNEKFHQIEQEFSEVEGRIQDLEKYVEDTKIDLWSYNAGLLVALENQHTIDLTDSEMNKLFERTRKQLRENAEDMGNGCFKIYHKCDNACIGSIRNGTYDHDVYRDEALNNRFQIKGVELKSGYKDWILWISFAISCFLLCVVLLGFIMWACQKGNIRCNICI

SEQ ID NO: 1185 - protein, 566 aa, Artificial Sequence
  derived and/or modified protein sequence (wt) from hemagglutinin__InfluenzaA__ABI20958
MKTIIALSYILCLVFAQKLPGNDNSTATLCLGHHAVPNGTLVKTITNDQIEVTNATELVQSSSTGRICDSPHRILDGKNCTLIDALLGDPHCDGFQNKEWDLFVERSKAYSNCYPYDVPDYASLRSLVASSGTLEFINEDFNWTGVAQDGKSYACKRGSVNSFFSRLNWLYKLEYKYPALNVTMPNNGKFDKLYIWGVHHPSTDSDQTSLYVRASGRVTVSTKRSQQTVIPNIGFRPWVRGLSSRISIYWTIVKPGDILLINSTGNLIAPRGYFKIRNGKSSIMRSDAPIGNCSSECITPNGSIPNDKPFQNVNRITYGACPRYVKQNTLKLATGMRNVPEKQTRGIFGAIAGFIENGWEGMVDGWYGFRHQNSEGTGQAADLKSTQAAIDQINGKLNRLIEKTNEKFHQIEKEFSEVEGRIQDLEKYVEDTKIDLWSYNAGLLVALENQHTIDLTDSEMNKLFERTRKQLRENAEDMGNGCFKIYHKCDNACIGSIRNGTYDHDVYRDEALNNRFQIKGVELKSGYKDWILWISFAISCFLLCVVLLGFIMWACQKGNIRCNICI

SEQ ID NO: 1186 - protein, 566 aa, Artificial Sequence
  derived and/or modified protein sequence (wt) from hemagglutinin__InfluenzaA__ABI20969
MKTIIALSYILCLVFAQKLPVNDNSTATLCLGHHAVPNGTLVKTITNDHIEVTNATELVQSSSTGRICDSPHQILDGENCTLIDALLGDPHCDGFQNKEWNLFVERSTAYSNCYPYDVPDYASLRSLVASSGTLEFNNESFNWTGVAQNGTSSACKRRSIKSFFSRLNWLHQLKYKYPALNVTMPNNEKFDKLYIWGVHHPSTDSDQISLYAQASGRVTVSTKRSQQTVIPNIGSRPWVRGVSSRISIYWTIVKPGDILLINSTGNLIAPRGYFKIRSGKSSIMRSNAPIGKCNSECITPNGSIPNDKPFQNVNRITYGACPRYVKQNTLKLATGMRNVPEKQTRGIFGAIAGFIENGWEGMVDGWYGFRHQNSEGTGQAADLKSTQAAINQINGKLNRLIEKTNEKFHQIEKEFSEVEGRIQDLEKYVEDTKIDLWSYNAELLVALENQHTIDLTDSEMNKLFERTRKQLRENAEDMGNGCFKIYHKCDNACIGSIRNGTYDHDVYRDEALNNRFQIKGVELKSGYKDWILWISFAISCFLLCVVLLGFIMWACQKGNIRCNICI

SEQ ID NO: 1187 - protein, 566 aa, Artificial Sequence
  derived and/or modified protein sequence (wt) from hemagglutinin__InfluenzaA__ABI20980
MKTIIALSYILCLVFAQKLPVNDNSTATLCLGHHAVPNGTLVKTITNDHIEVTNATELVQSSSTGRICDSPHQILDGENCTLIDALLGDPHCDGFQNKEWDLFVERSTAYSNCYPYDVPDYASLRSLVASSGTLEFNNESFNWTGVDQNGTSSACKRRSTKSFFSRLNWLHQLKYKYPALNVTMPNNEKFDKLYIWGVHHPSTDSDQISLYAQASGRVTVSTKRSQQTVTPNIGSRPWVRGVSSRISIYWTIVKPGDILLINSTGNLIAPRGYFKIRSGKSSIMRSNALIGKCNSECITPNGSIPNDKPFQNVNRITYGACPRYVKQNTLKLATGMRNVPEKQTRGIFGAIAGFIENGWEGMVDGWYGFRHQNSEGTGQAADLKSTQAAINQINGKLNRLIEKTNEKFHQIEKEFSEVEGRIQDLEKYVEDTKIDLWSYNAEILVALENQHTIDLTDSEMNKLFERTRKQLRENAEDMGNGCFKIYHKCDNACIGSIRNGTYDHDVYRDEALNNRFQIKGVELKSGYKDWILWISFAISCFLLCVVLLGFIMWACQKGNIRCNICI

SEQ ID NO: 1188 - protein, 566 aa, Artificial Sequence
  derived and/or modified protein sequence (wt) from hemagglutinin__InfluenzaA__ABI20991
MKTIIALSYILCLVFAQKLPGNDNSTATLCLGHHAVPNGTLVKTITNDQIEVTNATELVQSSSTGGICDSPHQILDGENCTLIDALLGDPHCDGFQNKEWDLFVERSKAYSNCYPYDVPDYASLRSLVASSGTLEFNNESFNWTGVAQNGTSSACKRRSNKSFFSRLNWLHQLKYKYPALNVTMPNNEKFDKLYIWGVHHPSTDSDQISLYAQAPGRVTVSTKRSQQTVIPNIGSRPWVRGVSSRISIYWTIVKPGDILLINCTGNLIAPRGYFKIRSGKSSIMRSDASIGKCNSECITPNGSIPNDKPFQNVNRITYGACPRYVKQNTLKLATGMRNVPEKQTRGIFGAIAGFIENGWEGMVDGWYGFRHQNSEGTGQAADLKSTQAAINQINGKLNRLIEKTNEKFHQIEKEFSEVEGRIQDLEKYVEDTKIDLWSYNAELLVALENQHTIDLTDSEINKLFERTKKQLRENAEDMGNGCFKIYHKCDNACIGSIRNGTYDHDVYRDEALNNRFQIKGVELKSGYKDWILWISFAISCFLLCVVLLGFIMWACQKGNIRCNICI

SEQ ID NO: 1189 - protein, 566 aa, Artificial Sequence; identical to SEQ ID NO: 710
  derived and/or modified protein sequence (wt) from hemagglutinin__InfluenzaA__ABI21002

SEQ ID NO: 1190 - protein, 566 aa, Artificial Sequence; identical to SEQ ID NO: 1154
  derived and/or modified protein sequence (wt) from hemagglutinin__InfluenzaA__ABI21013

SEQ ID NO: 1191 - protein, 566 aa, Artificial Sequence; identical to SEQ ID NO: 640
  derived and/or modified protein sequence (wt) from hemagglutinin__InfluenzaA__ABI21024

SEQ ID NO: 1192 - protein, 566 aa, Artificial Sequence; identical to SEQ ID NO: 516
  derived and/or modified protein sequence (wt) from hemagglutinin__InfluenzaA__ABI21035

SEQ ID NO: 1193 - protein, 566 aa, Artificial Sequence
  derived and/or modified protein sequence (wt) from hemagglutinin__InfluenzaA__ABI21046
MKTIIALSYILCLVFAQKLPGNDNSTATLCLGHHAVPNGTIVKTITNDQIEVTNATELVQSSSTGGICDSPHQILDGENCTLIDALLGDPQCDGFQNKKWDLFVERSKAYSNCYPYDVPDHASLRSLVASSGTLEFNNESFDWTGVTQNGTSSACKRRSNKSFFSRLNWLTHLKYKYPALNVTMPNNEKFDKLYIWGVHHPGTDNDQISLYAQASGRITVSTKRSQQTVIPNIGSRPRVRDVSSRISIYWTIVKPGDILLINSTGNLIAPRGYFKIRSGKSSIMRSDAPIGKCNSECITPNGSIPNDKPFQNVNRITYGACPRYVKQNTLKLATGMRNVPEKQTRGIFGAIAGFIENGWEGMVDGWYGFRHQNSEGTGQAADLKSTQAAINQINGKLNRLIGKTNEKFHQIEKEFSEVEGRIQDLEKYVEDTKIDLWSYNAELLVALENQHTIDLTDSEMNKLFERTKKQLRENAEDMGNGCFKIYHKCDNACIGSIRNGTYDHDVYRDEALNNRFQIKGVELKSGYKDWILWISFAISCFLLCVALLGFIMWACQKGNIRCNICI

SEQ ID NO: 1194 - protein, 566 aa, Artificial Sequence
  derived and/or modified protein sequence (wt) from hemagglutinin__InfluenzaA__ABI21057
MKTIIALSYILCLVFAQKLPGNDNSTATLCLGHHAVPNGTIVKTITNDQIEVTNATELVQNSSTGGICDSPHQILDGENCTLIDALLGDPQCDGFQNKKWDLFVERSKAYSNCYPYDVPDHASLRSLVASSGTLEFNNESFDWTGVTQNGTSSACKRRSNKSFFSRLNWLTHLKYKYPALNVTMPNNEKFDKLYIWGVHHPGTDSDQISLYAQASGRITVSTKRSQQTVIPNIGSRPRVRDVSSRISIYWTIVKPGDILLINSTGNLIAPRGYFKIRSGKSSIMRSDAPIGKCNSECITPNGSIPNDKPFQNVNRITYGACPRYVKQNTLKLATGMRNVPEKQTRGIFGAIAGFIENGWEGMVDGWYGFRHQNSEGTGQAADLKSTQAAINQINGKLNRLIGKTNEKFHQIEKEFSEVEGRIQDLEKYVEDTKIDLWSYNAELLVALENQHTIDLTDSEMNKLFERTKKQLRENAEDMGNGCFKIYHKCDNACIGSIRNGTYDHDVYRDEALNNRFQIKGVELKSGYKDWILWISFAISCFLLCVALLGFIMWACQKGNIRCNICI

SEQ ID NO: 1195 - protein, 566 aa, Artificial Sequence; identical to SEQ ID NO: 243
  derived and/or modified protein sequence (wt) from hemagglutinin__InfluenzaA__ABI21068

SEQ ID NO: 1196 - protein, 566 aa, Artificial Sequence; identical to SEQ ID NO: 282
  derived and/or modified protein sequence (wt) from hemagglutinin__InfluenzaA__ABI21079

SEQ ID NO: 1197 - protein, 566 aa, Artificial Sequence; identical to SEQ ID NO: 1113
  derived and/or modified protein sequence (wt) from hemagglutinin__InfluenzaA__ABI21090

SEQ ID NO: 1198 - protein, 566 aa, Artificial Sequence; identical to SEQ ID NO: 1113
  derived and/or modified protein sequence (wt) from hemagglutinin__InfluenzaA__ABI21101

SEQ ID NO: 1199 - protein, 566 aa, Artificial Sequence
  derived and/or modified protein sequence (wt) from hemagglutinin__InfluenzaA__ABI21123
MKTIIALSYILCLVFAQKLPGNDNSTATLCLGHHAVPNGTIVKTITNDQIEVTNATELVQSSSTGGICDSPHQILDGENCTLIDALLGDPQCDGFQNKKWDLFVERSKAYSNCYPYDVPDYASLRSLVASSGTLEFNNESFNWTGVTQNGTSSACKRRSNNSFFSRLNWLTHLKFKYPALNVTMPNNEKFDKLYIWGVHHPGTNNDQISLYAQASGRITVSTKRSQQTVIPNIGSRPRVRDIPSRISIYWTIVKPGDILLINSTGNLIAPRGYFKIRSGKSSIMRSDAPIGKCNSECITPNGSIPNDKPFQNVNRITYGACPRYVKQNTLKLATGMRNVPEKQTRGIFGAIAGFIENGWEGMVDGWYGFRHQNSEGIGQAADLKSTQAAINQINGKLNRLIGKTNEKFHQIEKEFSEVEGRIQDLEKHVEDTKIDLWSYNAELLVALENQHTIDLTDSEMNKLFERTKKQLRENAEDMGNGCFKIYHKCDNACIGSIRNGTYDHDVYRDEALNNRFQIKGVELKSGYKDWILWISFAISCFLLCVALLGFIMWACQKGNIRCNICI

SEQ ID NO: 1200 - protein, 566 aa, Artificial Sequence
  derived and/or modified protein sequence (wt) from hemagglutinin__InfluenzaA__ABI21134
MKTIIALSYILCLVFAQKLPGNDNSTATLCLGHHAVPNGTVVKTITNDQIEVTNATELVQSSSTGGICDSPHQILDGENCTLMDALLGDPQCDGFQNKKWDLFVERSKAYSNCYPYDVPDYASLRSLVASSGTLEFNNESFNWTGVTQNGTSSACKRRSNNSFFSRLNWLTHLKFKYPALNVTMPNNEKFDKLYIWGVHHPGTDNDQISLYAQASGRITVSTKRSQQTVIPNIGSRSRVRDIPSRISIYWTIVKPGDILLINSTGNLIAPRGYFKIRSGKSSIMRSDAPIGKCNSECITPNGSIPNDKPFQNVNRITYGACPRYVKQNTLKLATGMRNVPEKQTRGIFGAIAGFIENGWEGMVDGWYGFRHQNSEGTGQAADLKSTQAAINQINGKLNRLIGKTNEKFHQIEKEFSEVEGRIQDLEKYVEDTKIDLWSYNAELLVALENQHTIDLTDSEMNKLFERTKKQLRENAEDMGNGCFKIYHKCDNACIGSIRNGTYDHDVYRDEALNNRFQIKGVELKSGYKDWILWISFAISCFLLCVALLGFIMWACQKGNIRCNICI

SEQ ID NO: 1201 - protein, 566 aa, Artificial Sequence; identical to SEQ ID NO: 282
  derived and/or modified protein sequence (wt) from hemagglutinin__InfluenzaA__ABI21156

SEQ ID NO: 1202 - protein, 566 aa, Artificial Sequence
  derived and/or modified protein sequence (wt) from hemagglutinin__InfluenzaA__ABI21167
MKTIIALGYILCLVFAQKLPGNDNSTATLCLGHHAVPNGTIVKTITNDQIEVTNATELVQSSSTGGICDSPHQILDGENCTLIDALLGDPQCDGFQNKKWDLFVERSKAYSNCYPYDVPDYASLRSLVASSGTLEFNNESFNWTGVTQNGTSSACKRRSNNSFFSRLNWLTHLKFKYPALNVTMPNNEKFDKLYIWGVHHPGTNNDQISLYAQASGRITVSTKRSQQTVIPNIGSRPRVRDIPSRISIYWTIVKPGDILLINSTGNLIAPRGYFKIRSGKSSIMRSDAPIGKCNSECITPNGSIPNDKPFQNVNRITYGACPRYVKQNTLKLATGMRNVPEKQTRGIFGAIAGFIENGWEGMVDGWYGFRHQNSEGIGQAADLKSTQAAINQINGKLNRLIGKTNEKFHQIEKEFSEVEGRIQDLEKYVEDTKIDLWSYNAELLVALENQHTIDLTDSEMNKLFERTKKQLRENAEDMGNGCFKIYHKCDNACIGSIRNGTYDHEVYRDEALNNRFQIKGVELKSGYKDWILWISFAISCFLLCVALLGFIMWACQKGNIRCNICI

SEQ ID NO: 1203 - protein, 566 aa, Artificial Sequence
  derived and/or modified protein sequence (wt) from hemagglutinin__InfluenzaA__ABI21178
MKTIIALSYILCLVFAQKLPGNDNSTATLCLGHHAVPNGTIVKTITNDQIEVTNATELVQSSSTGGICDSPHQILDGENCTLIDALLGDPQCDGFQNKKWDLFVERSKAYSSCYPYDVPDYASLRSLVASSGTLEFNNESFNWTGVTQNGTSSACKRRSNNSFFSRLNWLTHLKFKYPALNVTMPNNEKFDKLYIWGVHHPGTNNDQISLYAQASGRITVSTKRSQQTVIPNIGSRPRVRDIPSRISIYWTIVKPGDILLINSTGNLIAPRGYFKIRSGKSSIMRSDAPIGKCNSECITPNGSIPNDKPFQNVNRITYGACPRYVKQNTLKLATGMRNVPEKQTRGIFGAIAGFIENGWEGMVDGWYGFRHQNSEGIGQAADLKSTQAAINQINGKLNRLIGKTNEKFHQIEKEFSEVEGRIQDLEKYVEDTKIDLWSYNAELLVALENQHTIDLTDSEMNKLFERTKKQLRENAEDMGNGCFKIYHKCDNACIGSIRNGTYDHDVYRDEALNNRFQIKGVELKSGYKDWILWISFAISCFLLCVALLGFIMWACQKGNIRCNICI

SEQ ID NO: 1204 - protein, 565 aa, Artificial Sequence
  derived and/or modified protein sequence (wt) from hemagglutinin__InfluenzaA__ABI21200
MKVKLLVLLCTFTATYADTICIGYHANNSTDTVDTVLEKNVTVTHSVNLLEDSHNGKLCLLKGIAPLQLGNCSVAGWILGNPECELLISKESWSYIVETPNPENGTCYPGYFADYEELREQLSSVSSFERFEIFPKESSWPNHTVTGVSASCSHNGKSSFYRNLLWLTGKNGLYPNLSKSYANNKEKEVLVLWGVHHPPNIGDQRALYHTENAYVSVVSSHYSRRFTPEIAKRPKVRDQEGRINYYWTLLEPGDTIIFEANGNLIAPRFAFALSRGFGSGIITSNAPMDECDAKCQTPQGAINSSLPFQNVHPVTIGECPKYVRSAKLRMVTGLRNIPSIQSRGLFGAIAGFIEGGWTGMVDGWYGYHHQNEQGSGYAADQKSTQNAINGITNKVNSVIEKMNTQFTAVGKEFNKLERRMENLNKKVDDGFLDIWTYNAELLVLLENERTLDFHDSNVKNLYEKVKSQLKNNAKEIGNGCFEFYHKCNDECMESVKNGTYDYPKYSEESKLNRERIDGVKLESMGVYQILAIYSTVASSLVLLVSLGAISFWMCSNGSLQCRICI

SEQ ID NO: 1205 - protein, 565 aa, Artificial Sequence; identical to SEQ ID NO: 1204
  derived and/or modified protein sequence (wt) from hemagglutinin__InfluenzaA__ABI21211

SEQ ID NO: 1206 - protein, 565 aa, Artificial Sequence
  derived and/or modified protein sequence (wt) from hemagglutinin__InfluenzaA__ABI21233
MKVKLLVLLCTFTATYADTICIGYHANNSTDTVDTVLEKNVTVTHSVNLLEDSHNGKLCLLKGIAPLQLGNCSVAGWILGNPECELLISKESWSYIVETPNPENGTCYPGYFADYEELREQLNSVSSFERFEIFPKESSWPNHTVTGVSASCSHNGKSSFYRNLLWLTGKNGLYPNLSKSYANNKEKEVLVLWGVHHPPNIGDQRALYHTENAYVSVVSSHYSRRFTPEIAKRPKVRDQEGRINYYWTLLEPGDTIIFEANGNLIAPRFAFALSRGFGSGIITSNAPMDECDAKCQTPQGAINSSLPFQNVHPVTIGECPKYVRSAKLRMVTGLRNIPSIQSRGLFGAIAGFIEGGWTGMVDGWYGYHHQNEQGSGYAADQKSTQNAINGITNKVNSVIEKMNTQFTAVGKEFNKLERRMENLNKKVDDGFLDIWTYNAELLVLLENERTLDFHDSNVKNLYEKVKSQLKNNAKEIGNGCFEFYHKCNDECMESVKNGTYDYPKYSEESKLNRERIDGVKLESMGVYQILAIYSTVASSLVLLVSLGAISFWMCSNGSLQCRICI

SEQ ID NO: 1207 - protein, 566 aa, Artificial Sequence
  derived and/or modified protein sequence (wt) from hemagglutinin__InfluenzaA__ABI21244
MKTIIALSYILCLVFAQKLPGNDNSTATLCLGHHAVPNGTLVKTITNDQIEVTNATELVQSSSTGRICDSPHRILDGKNCTLIDALLGDPHCDGFQNKEWDLFVERSKAYSNCYPYDVPDYASLRSLVASSGTLKFINEDFNWTGVAQDGKSYACKRGSVNSFFSRLNWLHKLEYKYPALNVTMPNNGKFDKLYIWGVHHPSTDSDQTSLYVRASGRVTVSTKRSQQTVIPNIGSRPWVRGLSSRISIYWTIVKPGDILLINSTGNLIAPRGYFKIRSGKSSIMRSDAPIGNCSSECITPNGSIPNDKPFQNVNRITYGACPRYVKQNTLKLATGMRNVPEKQTRGIFGAIAGFIENGWEGMVDGWYGFRHQNSEGTGQAADLKSTQAAIDQINGKLNRLIEKTNEKFHQIEKEFSEVEGRIQDLEKYVEDTKIDLWSYNAELLVALENQHTIDLTDSEMNKLFERTRKQLRENAEDMGNGCFKIYHKCDNACIGSIRNGTYDHDVYRDEALNNRFQIKGVELKSGYKDWILWISFAISCFLLCVVLLGFIMWACQKGNIRCNICI

SEQ ID NO: 1208 - protein, 566 aa, Artificial Sequence; identical to SEQ ID NO: 1053
  derived and/or modified protein sequence (wt) from hemagglutinin__InfluenzaA__ABI21255

SEQ ID NO: 1209 - protein, 566 aa, Artificial Sequence; identical to SEQ ID NO: 1053
  derived and/or modified protein sequence (wt) from hemagglutinin__InfluenzaA__ABI21266

SEQ ID NO: 1210 - protein, 566 aa, Artificial Sequence; identical to SEQ ID NO: 1053
  derived and/or modified protein sequence (wt) from hemagglutinin__InfluenzaA__ABI21277

SEQ ID NO: 1211 - protein, 566 aa, Artificial Sequence
  derived and/or modified protein sequence (wt) from hemagglutinin__InfluenzaA__ABI21299
MKTIIALSYILCLVFAQKLPGNDNSTATLCLGHHAVPNGTLVKTITNDQIEVTNATELVQSSSTGRICDSPHRILDGKNCTLIDALLGDPHCDGFQNKEWDLFVERSKAYSNCYPYDVPDYASLRSLVASSGTLEFINEDFNWTGVAQDGKSYACKRGSVNSFFSRLNWLHKLEYKYPALNVTMPNNDKFDKLYIWGVHHPSTDSDQTSLYVRASGRVTVSTKRSQQTVIPNIGSRPWVRGLSSRISIYWTIVKPGDILLINSTGNLIAPRGYFKIRNGKSSIMRSDAPIGNCSSECITPNGSIPNDKPFQNVNRITYGACPRYVKQNTLKLATGMRNVPEKQTRGIFGAIAGFIENGWEGMVDGWYGFRHQNSEGTGQAADLKSTQAAIDQINGKLNRLIEKTNEKFHQIEKEFSEVEGRIQDLEKYVEDTKIDLWSYNAELLVALENQHTIDLTDSEMNKLFERTRKQLRENAEDMGNGCFKIYHKCDNACIGSIRNGTYDHDVYRDEALNNRFQIKGVELKSGYKDWILWISFAISCFLLCVVLLGFIMWACQKGNIRCNICI

SEQ ID NO: 1212 - protein, 566 aa, Artificial Sequence; identical to SEQ ID NO: 1053
  derived and/or modified protein sequence (wt) from hemagglutinin__InfluenzaA__ABI21310

SEQ ID NO: 1213 - protein, 566 aa, Artificial Sequence
  derived and/or modified protein sequence (wt) from hemagglutinin__InfluenzaA__ABI21321
MKTIIALSYILCLVFAQKLPGNDNSTATLCLGHHAVPNGTLVKTITNDQIEVTNATELVQSSSTGRICDSPHRILDGKNCTLIDALLGDPHCDGFQNKEWDLFVERSKAYSNCYPYDVPDYASLRSLVASSGTLEFINEDFNWTGVAQDGKSYACKRGSVNSFFSRLNWLHKLEYKYPALNVTMPNNGKFDKLYIWGVHHPSTDSDQTSLYVRASGRVTVSTKRSQQTVIPNIGSRPWVRGLSSRISIYWTIVKPGDILLINSTGNLIAPRGYFKIRNGKSSIMRSDAPIGNCSSECITPNGSIPNDKPFQNVNRITYGACPRYVKQNTLKLATGMRNVPEKQTRGIFGAIAGFIENGWEGMVDGWYGFRHQNSEGTGQAADLKSTQAAIDQINGKLNRLIEKTNEKFHQIEKEFSEVEGRIQDLEKYVEDTKIDLWSYNAELLVALENQHTIDLTDSEMNKLFEKTRKQLRENAEDMGNGCFKIYHKCDNACIGSIRNGTYDHDVYRDEALNNRFQIKGVELKSGYKDWILWISFAISCFLLCVVLLGFIMWACQKGNIRCNICI

SEQ ID NO: 1214 - protein, 566 aa, Artificial Sequence
  derived and/or modified protein sequence (wt) from hemagglutinin__InfluenzaA__ABI21332
MKTIIALSYILCLVFAQKLPGNDNSTATLCLGHHAVPNGTLVKTITNDQIEVTNATELVQSSSTGRICDSPHRILDGKNCTLIDALLGDPHCDGFQNKEWDLFVERSKAYSNCYPYDVPDYASLRSLVASSGTLEFINEDFNWTGVAQDGKSYACKRGSVNSFFSRLNWLHKLEYKYPALNVTMPNNGKFDKLYIWGVHHPSTDSDQTSLYVQASGRVTVSTKRSQQTVIPNIGSRPWVRGLSSRISIYWTIVKPGDILLINSTGNLIAPRGYFKIRNGKSSIMRSDAPIGNCSSECITPNGSIPNDKPFQNVNRITYGACPRYVKQNTLKLATGMRNVPEKQTRGIFGAIAGFIENGWEGMVDGWYGFRHQNSEGTGQAADLKSTQAAIDQINGKLNRLIEKTNEKFHQIEKEFSEVEGRIQDLEKYVEDTKIDLWSYNAELLVALENQHTIDLTDSEMNKLFERTRKQLRENAEDMGNGCFKIYHKCDNACIGSIRNGTYDHDVYRDEALNNRFQIKGVELKSGYKDWILWISFAISCFLLCVVLLGFIMWACQKGNIRCNICI

SEQ ID NO: 1215 - protein, 566 aa, Artificial Sequence; identical to SEQ ID NO: 1053
  derived and/or modified protein sequence (wt) from hemagglutinin__InfluenzaA__ABI21343

SEQ ID NO: 1216 - protein, 566 aa, Artificial Sequence
  derived and/or modified protein sequence (wt) from hemagglutinin__InfluenzaA__ABI21354
MKTIIALSYISCLVFAQKLPGNDNSTATLCLGHHAVPNGTLVKTITNDQIEVTNATELVQSSSTGRICDSPHRILDGKNCTLIDALLGDPHCDGFQNKEWDLFVERSKAYSNCYPYDVPDYASLRSLVASSGTLEFINEDFNWTGVAQDGKSYACKRGSVNSFFSRLNWLHKLEYKYPALNVTMPNNGKFDKLYIWGVHHPSTDSDQTSLYVRASGRVTVSTKRSQQTVIPNIGSRPWVRGLSSRISIYWTIVKPGDILLINSTGNLIAPRGYFKIRNGKSSIMRSDAPIGNCSSECITPNGSIPNDKPFQNVNRITYGACPRYVKQNTLKLATGMRNVPEKQTRGIFGAIAGFIENGWEGMVDGWYGFRHQNSEGTGQAADLKSTQAAIDQINGKLNRLIEKTNEKFHQIEKEFSEVEGRIQDLEKYVEDTKIDLWSYNAELLVALENQHTIDLTDSEMNKLFERTRKQLRENAEDMGNGCFKIYHKCDNACIGSIRNGTYDHDVYRDEALNNRFQIKGVELKSGYKDWILWISFAISCFLLCVVLLGFIMWACQKGNIRCNICI

SEQ ID NO: 1217 - protein, 566 aa, Artificial Sequence
  derived and/or modified protein sequence (wt) from hemagglutinin__InfluenzaA__ABI21365
MKTIIALSYILCLVFAQKLPGNDNSTATLCLGHHAVPNGTLVKTITNDQIEVTNATELVQSSSTGRICDSPHRILDGKNCTLIDALLGDPHCDGFQNKEWDLFVERSKAYSNCYPYDVPDYASLRSLVASSGTLEFINEDFNWTGVAQDGKSYACKRGSVNSFFSRLNWLHKLEYKYPALNVTMPNNGKFDKLYIWGVHHPSTDSDQTSLYVRASGRVTVSTKRSQQTVIPNIGSRPWVRGLSSRISIYWTIVKPGDILLINSTGNLIAPRGYFKIRNGKSSIMRSDAPIGNCSSECITPNGSIPNDKPFQNVNRITYGACPRYVKQNTLKLATGMRNVPEKQTRGIFGAIAGFIENGWEGMVDGWYGFRHQNSEGTGQAADLKSTQAAIDQINGKLNRLIEKTNEKFHQIEKEFSEVEGRIQDLEKYVEDTKIDLWSYNAELLVALENQHTIDLTDSEMDKLFERTRKQLRENAEDMGNGCFKIYHKCDNACIGSIRNGTYDHDVYRDEALNNRFQIKGVELKSGYKDWILWISFAISCFLLCVVLLGFIMWACQKGNIRCNICI

SEQ ID NO: 1218 - protein, 566 aa, Artificial Sequence
  derived and/or modified protein sequence (wt) from hemagglutinin__InfluenzaA__ABI21376
MKTIIALSYILCLVFAQKLPGNDNSTATLCLGHHAVPNGTLVKTITNDQIEVTNATELVQSSSTGRICDSPHRILDGKNCTLIDALLGDPHCDGFQNKEWDLFVERSKAYSNCYPYDVPDYASLRSLVASSGTLEFINEDFNWTGVAQDGKSYSCKRGSVNSFFSRLNWLHKLEYKYPALNVTMPNNDKFDKLYIWGVHHPSTDSDQTSLYVRASGRVTVSTKRSQQTVIPNIGSRPWVRGLSSRISIYWTIVKPGDILLINSTGNLIAPRGYFKIRNGKSSIMRSDAPIGNCSSECITPNGSIPNDKPFQNVNRITYGACPRYVKQNTLKLATGMRNVPEKQTRGIFGAIAGFIENGWEGMVDGWYGFRHQNSEGTGQAADLKSTQAAIDQINGKLNRLIEKTNEKFHQIEKEFSEVEGRIQDLEKYVEDTKIDLWSYNAELLVALENQHTIDLTDSEMNKLFERTRKQLRENAEDMGNGCFKIYHKCDNACIGSIRNGTYDHDVYRDEALNNRFQIKGVELKSGYKDWILWISFAISCFLLCVVLLGFIMWACQKGNIRCNICI

SEQ ID NO: 1219 - protein, 566 aa, Artificial Sequence; identical to SEQ ID NO: 1053
  derived and/or modified protein sequence (wt) from hemagglutinin__InfluenzaA__ABI21387

SEQ ID NO: 1220 - protein, 566 aa, Artificial Sequence
  derived and/or modified protein sequence (wt) from hemagglutinin__InfluenzaA__ABI21398
MKTIIALSYILCLVFAQKLPGNDNSTATLCLGHHAVPNGTLVKTITNDQIEVTNATELVQSSSTGRICDSPHRILDGKNCTLIDALLGDPHCDGFQNKEWDLFVERSKAYSNCYPYDVPDYASLRSLVASSGTLEFVNEDFNWTGVAQDGKSYACKRGSVNSFFSRLNWLHKLEYKYPALNVTMPNNGKFDKLYIWGVHHPSTDSDQTSLYVRASGRVTVSTKRSQQTVIPNIGSRPWVRGLSSRISIYWTIVKPGDILLINSTGNLIAPRGYFKIRNGKSSIMRSDAPIGNCSSECITPNGSIPNDKPFQNVNRITYGACPRYVKQNTLKLATGMRNVPEKQTRGIFGAIAGFIENGWEGMVDGWYGFRHQNSEGTGQAADLKSTQAAIDQINGKLNRLIEKTNEKFHQIEKEFSEVEGRIQDLEKYVEDTKIDLWSYNAELLVALENQHTIDLTDSEMNKLFERTRKQLRENAEDMGNGCFKIYHKCDNACIGSIRNGTYDHDVYRDEALNNRFQIKGVELKSGYKDWILWISFAISCFLLCVVLLGFIMWACQKGNIRCNICI

SEQ ID NO: 1221 - protein, 566 aa, Artificial Sequence; identical to SEQ ID NO: 1053
  derived and/or modified protein sequence (wt) from hemagglutinin__InfluenzaA__ABI21409

SEQ ID NO: 1222 - protein, 566 aa, Artificial Sequence
  derived and/or modified protein sequence (wt) from hemagglutinin__InfluenzaA__ABI21420
MKTIIALSYILCLVFTQKLPGNDNSTATLCLGHHAVPNGTLVKTITNDQIEVTNATELVQSSSTGRICDSPHRILDGKNCTLIDALLGDPHCDGFQNKEWDLFVERSKAYSNCYPYDVPDYASLRSLVASSGTLEFINEDFNWTGVAQDGGSYSCKRGSVNSFFSRLNWLHKLEYKYPALNVTMPNNGKFDKLYIWGVHHPSTDSDQTSLYVRASGRVTVSTKRSQQTVIPNIGSRPWVRGLSSRISIYWTIVKPGDILLINSTGNLIAPRGYFKIRNGKSSIMRSDAPIGNCSSECITPNGSIPNDKPFQNVNRITYGACPRYVKQNTLKLATGMRNVPEKQTRGIFGAIAGFIENGWEGMVDGWYGFRHQNSEGTGQAADLKSTQAAIDQINGKLNRLIEKTNEKFHQIEKEFSEVEGRIQDLEKYVEDTKIDLWSYNAELLVALENQHTIDLTDSEMNKLFERTRKQLRENAEDMGNGCFKIYHKCDNACIGSIRNGTYDHDVYRDEALNNRFQIKSVELKSGYKDWILWISFAISCFLLCVVLLGFIMWACQKGNIRCNICI

SEQ ID NO: 1223 - protein, 566 aa, Artificial Sequence; identical to SEQ ID NO: 1053
  derived and/or modified protein sequence (wt) from hemagglutinin__InfluenzaA__ABI21431

SEQ ID NO: 1224 - protein, 566 aa, Artificial Sequence; identical to SEQ ID NO: 1053
  derived and/or modified protein sequence (wt) from hemagglutinin__InfluenzaA__ABI21442

SEQ ID NO: 1225 - protein, 566 aa, Artificial Sequence; identical to SEQ ID NO: 1053
  derived and/or modified protein sequence (wt) from hemagglutinin__InfluenzaA__ABI21453

SEQ ID NO: 1226 - protein, 566 aa, Artificial Sequence; identical to SEQ ID NO: 1053
  derived and/or modified protein sequence (wt) from hemagglutinin__InfluenzaA__ABI21464

SEQ ID NO: 1227 - protein, 566 aa, Artificial Sequence; identical to SEQ ID NO: 1053
  derived and/or modified protein sequence (wt) from hemagglutinin__InfluenzaA__ABI21475

SEQ ID NO: 1228 - protein, 566 aa, Artificial Sequence
  derived and/or modified protein sequence (wt) from hemagglutinin__InfluenzaA__ABI21486
MKTIIALSYILCLVFAQKLPGNDNSTATLCLGHHAVPNGTLVKTITNDQIEVTNATELVQSSSTGRICDSPHRILDGKNCTLIDALLGDPHCDGFQNKEWDLFVERSKAYSNCYPYDVPDYASLRSLVASSGTLEFINEDFNWTGVAQDGKSYACKRGSVNSFFSRLNWLHKLEYKYPALNVTMPNNGKFDKLYIWGVHHPSTDSDQTSLYVRASGRVTVSTKRSQQTVIPNIGSRPWVRGLSSRISIYWTIVKPGDILLINSTGNLIAPRGYFKIRNGKSSIMRSDAPIGNCSSECITPNGSIPNDKPFQNVNRITYGACPRYVKQNTLKLATGMRNVPEKQTRGIFGAIAGFIENGWEGMVDGWYGFRHQNSEGTGQAADLKSTQEAIDQINGKLNRLIEKTNEKFHQIEKEFSEVEGRIQDLEKYVEDTKIDLWSYNAELLVALENQHTIDLTDSEMNKLFERTRKQLRENAEDMGNGCFKIYHKCDNACIGSIRNGTYDHDVYRDEALNNRFQIKGVELKSGYKDWILWISFAISCFLLCVVLLGFIMWACQKGNIRCNICI

SEQ ID NO: 1229 - protein, 566 aa, Artificial Sequence; identical to SEQ ID NO: 1053
  derived and/or modified protein sequence (wt) from hemagglutinin__InfluenzaA__ABI21497

SEQ ID NO: 1230 - protein, 565 aa, Artificial Sequence
  derived and/or modified protein sequence (wt) from hemagglutinin__InfluenzaA__ABI21530
MKAKLLVLLCTFTATYADTICIGYHANNSTDTVDTVLEKNVTVTHSVNLLEDSHNGKLCLLKGIAPLQLGNCSVAGWILGNPECESLISKESWSYIVETPNPENGTCYPGYFADYEELREQLSSVSSFERFEIFPKESSWPNHTVTGVSASCSHNGKSSFYRNLLWLTEKNGLYPNLSKSYVNNKEKEVLVLWGVHHPSNIGVQRAIYRTENAYVSVVSSHYSRRFTPEIAKRPKVRDQEGRINYYWTLLEPGDTIIFEANGNLIAPWYAFALSRGFESGIITSNAPMNECDAKCQTPQGAINSSLPFQNVHPVTIGECPKYVRSAKLRMVTGLRNIPSIQSRGLFGAIAGFIEGGWTGMIDGWYGYHHQNEQGSGYAADQKSTQNAINGITNKVNSVIEKMNTQFTAVGKEFNKLERRMENLNKKVDDGFLDIWTYNAELLVLLENERTLDFHDSNVKNLYEKVKSQLKNNAKEIGNGCFEFYHKCNNECMESVKNGTYDYPKYSEESKLNREKIDGVKLESMGVYQILAIYSTVASSLVLLVSLGAISFWMCSNGSLQCRICI

SEQ ID NO: 1231 - protein, 565 aa, Artificial Sequence
  derived and/or modified protein sequence (wt) from hemagglutinin__InfluenzaA__ABI21552
MKAKLLVLLCTFTATYADTICIGYHANNSTDTVDTVLEKNVTVTHSVNLLEDSHNGKLCLLKGIAPLQLGNCSVAGWILGNPECESLISKESWSYIVETPNPENGTCYPGYFADYEELREQLSSVSSFERFEIFPKESSWPNHTVTGVSASCSHNGKSSFYRNLLWLTEKNGLYPNLSKSYVNNKEKEVLVLWGVHHPSNIGVQRAIYHTENAYVSVVSSHYSRRFTPEIAKRPKVRDQEGRINYYWTLLEPGDTIIFEANGNLIAPWYAFALSRGFESGIITSNAPMDECDAKCQTPQGAINSSLPFQNVHPVTIGECPKYVRSAKLRMVTGLRNIPSIQSRGLFGAIAGFIEGGWTGMIDGWYGYHHQNEQGSGYAADQKSTQNAINGITNKVNSVIEKMNTQFTAVGKEFNKLERRMENLNKKVDDGFLDIWTYNAELLVLLENERTLDFHDSNVKNLYEKVKSQLKNNAKEIGNGCFEFYHKCNNECMESVKNGTYDYPKYSEESKLNREKIDGVKLESMGVYQILAIYSTVASSLVLLVSLGAISFWMCSNGSLQCRICI

SEQ ID NO: 1232 - protein, 565 aa, Artificial Sequence
  derived and/or modified protein sequence (wt) from hemagglutinin__InfluenzaA__ABI21563
MKAKLLVLLCTFTATYADTICIGYHANNSTDTVDTVLEKNVTVTHSVNLLEDSHNGKLCLLKGIAPLQLGNCSVAGWILGNPECESLISKESWSYIVETPNPENGTCYPGYFADYEELREQLSSVSSFERFEIFPKESSWPNHTVTGVSASCSHNGKSSFYRNLLWLTEKNGLYPNLSKSYVNNKEKEVLVLWGVHHPSNIGVQRAIYHTENAYVSVVSSHYSRRFTPEIAKRPKVRGQEGRINYYWTLLEPGDTIIFEANGNLIAPWYAFALSRGFESGIITSNAPMNECDAKCQTPQGAINSSLPFQNVHPVTIGECPKYVRSAKLRMVTGLRNIPSIQSRGLFGAIAGFIEGGWTGMIDGWYGYHHQNEQGSGYAADQKSTQNAINGITNKVNSVIEKMNTQFTAVGKEFNKLERRMENLNKKVDDGFLDIWTYNAELLVLLENERTLDFHDSNVKNLYEKVKSQLKNNAKEIGNGCFEFYHKCNNECMESVKNGTYDYPKYSEESKLNREKIDGVKLESMGVYQILAIYSTVASSLVLLVSLGAISFWMCSNGSLQCRICI

SEQ ID NO: 1233 - protein, 565 aa, Artificial Sequence; identical to SEQ ID NO: 1232
  derived and/or modified protein sequence (wt) from hemagglutinin__InfluenzaA__ABI21574

SEQ ID NO: 1234 - protein, 566 aa, Artificial Sequence
  derived and/or modified protein sequence (wt) from hemagglutinin__InfluenzaA__ABI21736
MKTIIALSYILCLVFAQKLPGNDNSTATLCLGHHAVPNGTLVKTITNDQIEVTNATELVQSSSTGGICDSPHQILDGENCTLIDALLGDPHCDGFQNKEWDLFVERSKAYSNCYPYDVPDYASLRSLVASSGTLEFNNESFNWTGVAQNGTSSACKRRSNKSFFSRLNWLHQLKYKYPALNVTMPNNEKFDKLYIWGVHHPSTDSDQISLYAQAPGRVTVSTKRSQQTVIPNIGSRPWVRGVSSRISIYWTIVKPGDILLINCTGNLIAPRGYFKIRSGKSSIMRSDASIGKCNSECITPNGSIPNDKPFQNVNRITYGACPRYVKQNTLKLATGMRNVPEKQTRGIFGAIAGFIENGWEGMVDGWYGFRHQNSEGTGQAADLKSTQAAINQINGKLNRLIEKTNEKFHQIEKEFSEVEGRIQDLEKYVEDTKIDLWSYNAELLVALENQHTIDLTDSEMNKLFERTKKQLRENAEDVGNGCFKIYHKCDNACIGSIRNGTYDHDVYRDEALNNRFQIKGVELKSGYKDWILWISFAISCFLLCVVLLGFIMWACQKGNIRCNICI

SEQ ID NO: 1235 - protein, 566 aa, Artificial Sequence
  derived and/or modified protein sequence (wt) from hemagglutinin__InfluenzaA__ABI22159
MKTIIALSYILCLVFAQKLPGNDNSTATLCLGHHAVPNGTIVKTITNDQIEVTNATELVQSSSTGEICDSPHQILDGENCTLIDALLGDPQCDGFQNKKWDLFVERSNAYSNCYPYDVPDYASLRSLVASSGTLEFNNESFNWTGVTQNGTSSACKRRSNNSFFSRLNWLTHLKFKYPALNVTMPNNEKFDKLYIWGVHHPGTDNDQIFLYAQASGRITVSTKRSQQTVIPNIGSRPRVRNIPSRISIYWTIVKPGDILLINSTGNLIAPRGYFKIRSGKSSIMRSDAPIGKCNSECITPNGSIPNDKPFQNVNRITYGACPRYVKQNTLKLATGMRNVPEKQTRGIFGAIAGFIENGWEGMVDGWYGFRHQNSEGIGQAADLKSTQAAINQINGKLNRLIGKTNEKFHQIEKEFSEVEGRIQDLEKYVEDTKIDLWSYNAELLVALENQHTIDLTDSEMNKLFERTKKQLRENAEDMGNGCFKIYHKCDNACIGSIRNGTYDHDVYRDEALNNRFQIKGVELKSGYKDWILWISFAISCFLLCVALLGFIMWACQKGNIRCNICI

SEQ ID NO: 1236 - protein, 568 aa, Artificial Sequence
  derived and/or modified protein sequence (wt) from hemagglutinin__InfluenzaA__ABI23979
MEKIVLLLAIISLVKSDQICIGYHANNSTEQVDTIMEKNVTVTHAQDILEKTHNGKLCDLDGVKPLILRDCSVAGWLLGNPMCDEFLNVPEWSYIVEKINPANDLCYPGNFNDYEELKHLLSRINHFEKIQIIPKSSWSDHEASSGVSSACPYQGRSSFFRNVVWLIKKDNAYPTIKRSYNNTNQEDLLVLWGIHHPNDAAEQTRLYQNPTTYISVGTSTLNQRLVPKIATRSKVNGQSGRMEFFWTILKPNDAINFESNGNFIAPENAYKIVKKGDSTIMKSELEYGNCNTKCQTPIGAINSSMPFHNIHPLTIGECPKYVKSNRLVLATGLRNSPQGERRRKKRGLFGAIAGFIEGGWQGMVDGWYGYHHSNEQGSGYAADKESTQKAIDGVTNKVNSIIDKMNTQFEAVGREFNNLERRIENLNKKMEDGFLDVWTYNAELLVLMENERTLDFHDSNVKNLYDKVRLQLRDNAKELGNGCFEFYHRCDNECMESVRNGTYDYPQYSEESRLKREEISGVKLESIGTYQILSIYSTVASSLALAIMVAGLSLWMCSNGSLQCRICI

SEQ ID NO: 1237 - protein, 566 aa, Artificial Sequence; identical to SEQ ID NO: 282
  derived and/or modified protein sequence (wt) from hemagglutinin__InfluenzaA__ABI26646

SEQ ID NO: 1238 - protein, 566 aa, Artificial Sequence; identical to SEQ ID NO: 911
  derived and/or modified protein sequence (wt) from hemagglutinin__InfluenzaA__ABI30367

SEQ ID NO: 1239 - protein, 566 aa, Artificial Sequence; identical to SEQ ID NO: 921
  derived and/or modified protein sequence (wt) from hemagglutinin__InfluenzaA__ABI30378

SEQ ID NO: 1240 - protein, 566 aa, Artificial Sequence; identical to SEQ ID NO: 650
  derived and/or modified protein sequence (wt) from hemagglutinin__InfluenzaA__ABI30400

SEQ ID NO: 1241 - protein, 566 aa, Artificial Sequence
  derived and/or modified protein sequence (wt) from hemagglutinin__InfluenzaA__ABI30411
MKTIIALSYILCLVFAQKLPGNDNSTATLCLGHHAVPNGTLVKTITNDQIEVTNATELVQSSSTGGICDSPHQILDGENCTLIDALLGDPHCDGFQNKEWDLFVERSKAYSNCYPYDVPDYASLRSLVASSGTLEFNNESFNWTGVAQNGTSSACKRRSNKSFFSRLNWLHQLKYKYPALNVTMPNNEKFDKLYIWGVHHPSTDSDQISLYAQAPGRVTVSTKRSQQTVIPNIGSRPWVRGVSSRISIYWTIVKPGDILLINCTGNLIAPRGYFKIRSGKSSIMRSDASIGKCNSECITPNGSIPNDKPFQNVNRITYGACPRYVKQNTLKLATGMRNVPEKQTRGIFGAIAGFIENGWEGMVDGWYGFRHQNSEGTGQAADLKSTQAAINQINGKLNRLIEKTNEKFHQIEKEFSEVEGRIQDLEKYVEDTKIDLWSYNAELLVALENQHTIDLTDSEMDKLFERTKKQLRENAEDMGNGCFKIYHKCDNACIGSIRNGTYDHDVYRDEALNNRFQIKGVELKSGYKDWILWISFAISCFLLCVVLLGFIMWACQKGNIRCNICI

SEQ ID NO: 1242 - protein, 566 aa, Artificial Sequence; identical to SEQ ID NO: 591
  derived and/or modified protein sequence (wt) from hemagglutinin__InfluenzaA__ABI30422

SEQ ID NO: 1243 - protein, 566 aa, Artificial Sequence; identical to SEQ ID NO: 282
  derived and/or modified protein sequence (wt) from hemagglutinin__InfluenzaA__ABI30433

SEQ ID NO: 1244 - protein, 566 aa, Artificial Sequence; identical to SEQ ID NO: 591
  derived and/or modified protein sequence (wt) from hemagglutinin__InfluenzaA__ABI30444

SEQ ID NO: 1245 - protein, 566 aa, Artificial Sequence; identical to SEQ ID NO: 282
  derived and/or modified protein sequence (wt) from hemagglutinin__InfluenzaA__ABI30455

SEQ ID NO: 1246 - protein, 566 aa, Artificial Sequence; identical to SEQ ID NO: 282
  derived and/or modified protein sequence (wt) from hemagglutinin__InfluenzaA__ABI30466

SEQ ID NO: 1247 - protein, 566 aa, Artificial Sequence; identical to SEQ ID NO: 282
  derived and/or modified protein sequence (wt) from hemagglutinin__InfluenzaA__ABI30477

SEQ ID NO: 1248 - protein, 566 aa, Artificial Sequence; identical to SEQ ID NO: 282
  derived and/or modified protein sequence (wt) from hemagglutinin__InfluenzaA__ABI30488

SEQ ID NO: 1249 - protein, 566 aa, Artificial Sequence; identical to SEQ ID NO: 282
  derived and/or modified protein sequence (wt) from hemagglutinin__InfluenzaA__ABI30499

SEQ ID NO: 1250 - protein, 566 aa, Artificial Sequence; identical to SEQ ID NO: 243
  derived and/or modified protein sequence (wt) from hemagglutinin__InfluenzaA__ABI30510

SEQ ID NO: 1251 - protein, 566 aa, Artificial Sequence
  derived and/or modified protein sequence (wt) from hemagglutinin__InfluenzaA__ABI30521
MKTIIALSYILCLVFAQKLPGNDNSTATLCLGHHAVPNGTIVKTITNDQIEVTNATELVQSSSTGGICDSPHQILDGENCTLIDALLGDPQCDGFQNKKWDLFVERSKAYSNCYPYDVPDYASLRSLVASSGTLEFNNESFNWTGVTQNGTSSACKRRSNNSFFSRLNWLTHLKFKYPALNVTMPNNEKFDKLYIWGVHHPGTNNDQISLYAQASGRITVSTKRSQQTVIPNIGSRPRVRDIPSRISIYWTIVKPGDILLINSTGNLIAPRGYFKIRSGKSSIMRSDASIGKCNSECITPNGSIPNDKPFQNVNRITYGACPRYVKQNTLKLATGMRNVPEKQTRGIFGAIAGFIENGWEGMVDGWYGFRHQNSEGIGQAADLKSTQAAINQINGKLNRLIGKTNEKFHQIEKEFSEVEGRIQDLEKYVEDTKIDLWSYNAELLVALENQHTIDLTDSEMNKLFERTKKQLRENAEDMGNGCFKIYHKCDNACIGSIRNGTYDHDVYRDEALNNRFQIKGVELKSGYKDWILWISFAISCFLLCVALLGFIMWACQKGNIRCNICI

SEQ ID NO: 1252 - protein, 566 aa, Artificial Sequence; identical to SEQ ID NO: 282
  derived and/or modified protein sequence (wt) from hemagglutinin__InfluenzaA__ABI30532

SEQ ID NO: 1253 - protein, 566 aa, Artificial Sequence; identical to SEQ ID NO: 1113
  derived and/or modified protein sequence (wt) from hemagglutinin__InfluenzaA__ABI30543

SEQ ID NO: 1254 - protein, 566 aa, Artificial Sequence; identical to SEQ ID NO: 282
  derived and/or modified protein sequence (wt) from hemagglutinin__InfluenzaA__ABI30554

SEQ ID NO: 1255 - protein, 565 aa, Artificial Sequence; identical to SEQ ID NO: 1204
  derived and/or modified protein sequence (wt) from hemagglutinin__InfluenzaA__ABI30565

SEQ ID NO: 1256 - protein, 566 aa, Artificial Sequence; identical to SEQ ID NO: 633
  derived and/or modified protein sequence (wt) from hemagglutinin__InfluenzaA__ABI30587

SEQ ID NO: 1257 - protein, 566 aa, Artificial Sequence
  derived and/or modified protein sequence (wt) from hemagglutinin__InfluenzaA__ABI30609
MKTIIALSYILCLVFAQKLPGNDNSTATLCLGHHAVPNGTIVKTIMNDQIEVTNATELVQSSSTGGICDSPHQILDGENCTLIDALLGDPQCDGFQNKKWDLFVERSKAYSNCYPYDVPDYASLRSLVASSGTLEFNNESFNWTGVTQNGTSSACKRRSNNSFFSRLNWLTHLKFKYPALNVTMPNNEKFDKLYIWGVHHPGTDNDQIFLYAQASGRITVSTKRSQQTVIPNIGSRPRVRNIPSRISIYWTIVKPGDILLINSTGNLIAPRGYFKIRSGKSSIMRSDAPIGKCNSECITPNGSIPNDKPFQNVNRITYGACPRYVKQNTLKLATGMRNVPEKQTRGIFGAIAGFIENGWEGMVDGWYGFRHQNSEGTGQAADLKSTQAAINQINGKLNRLIGKTNEKFHQIEKEFSEVEGRIQDLEKYVEDTKIDLWSYNAELLVALENQHTIDLTDSEMNKLFERTKKQLRENAEDMGNGCFKIYHKCDNACIGSIRNGTYDHDVYRDEALNNRFQIKGVELKSGYKDWILWISFAISCFLLCVALLGFIMWACQKGNIRCNICI

SEQ ID NO: 1258 - protein, 566 aa, Artificial Sequence
  derived and/or modified protein sequence (wt) from hemagglutinin__InfluenzaA__ABI30620
MKTIIALSYILCLVFAQKLPGNDNSTATLCLGHHAVPNGTIVKTITNDQIEVTNATELVQSSSTGGICDSPHQILDGENCTLIDALLGDPQCDGFQNKKWDLFIERSKAYSNCYPYDVPDYASLRSLVASSGTLEFNNESFNWTGVTQNGTSSACKRRSNNSFFSRLNWLTHLKFKYPALNVTMPNNEKFDKLYIWGVHHPGTDNDQISLYAQASGRITVSTKRSQQTVIPNIGSRPRVRDIPSRISIYWTIVKPGDILLINSTGNLIAPRGYFKIRSGKSSIMRSDAPIGKCNSECITPNGSIPNDKPFQNVNRITYGACPRYVKQNTLKLATGMRNVPEKQTRGIFGAIAGFIENGWEGMVDGWYGFRHQNSEGIGQAADLKSTQAAINQINGKLNRLIGKTNEKFHQIEKEFSEVEGRIQDLEKYVEDTKVDLWSYNAELLVALENQHTIDLTDSEMNKLFERTKKQLRENAEDMGNGCFKIYHKCDNACIGSIRNGTYDHDVYRDEALNNRFQIKGVELKSGYKDWILWISFAISCFLLCVALLGFIMWACQKGNIRCNICI

SEQ ID NO: 1259 - protein, 566 aa, Artificial Sequence; identical to SEQ ID NO: 633
  derived and/or modified protein sequence (wt) from hemagglutinin__InfluenzaA__ABI30733

SEQ ID NO: 1260 - protein, 566 aa, Artificial Sequence; identical to SEQ ID NO: 633
  derived and/or modified protein sequence (wt) from hemagglutinin__InfluenzaA__ABI30744

SEQ ID NO: 1261 - protein, 566 aa, Artificial Sequence; identical to SEQ ID NO: 633
  derived and/or modified protein sequence (wt) from hemagglutinin__InfluenzaA__ABI30755

SEQ ID NO: 1262 - protein, 566 aa, Artificial Sequence; identical to SEQ ID NO: 633
  derived and/or modified protein sequence (wt) from hemagglutinin__InfluenzaA__ABI30766

SEQ ID NO: 1263 - protein, 566 aa, Artificial Sequence; identical to SEQ ID NO: 633
  derived and/or modified protein sequence (wt) from hemagglutinin__InfluenzaA__ABI30777

SEQ ID NO: 1264 - protein, 566 aa, Artificial Sequence
  derived and/or modified protein sequence (wt) from hemagglutinin__InfluenzaA__ABI30788
MKTIIALSYILCLVFAQKLSGNDNSTATLCLGHHAVPNGTIVKTITNDQIEVTNATELVQSSSTGGICDSPHQILDGENCTLIDALLGDPQCDGFQNKKWDLFVERSKAYSNCYPYDVPDYASLRSLIASSGTLEFNNESFNWTGVTQNGTSSACKRRSNSSFFSRLNWLTHLKFKYPALNVTMPNNEEFDKLYIWGVHHPGTYNDQISLYAQASGRITVSTKRSQQTVIPNIGSRPRVRDIPSRISIYWTIVKPGDILLINSTGNLIAPRGYFKIRSGKSSIMRSDAPIGKCNSECITPNGSIPNDKPFQNVNRITYGACPRYVKQNTLKLATGMRNVPEKQTRGIFGAIAGFIENGWEGMVDGWYGFRHQNSEGIGQAADLKSTQAAIDQINGKLNRLIGKTNEKFHQIEKEFSEVEGRIQDLEKYVEDTKIDLWSYNAELLVALENQHTIDLTDSEMNKLFERTKKQLRENAEDMGNGCFKIYHKCDNACIGSIRNGTYDHDVYRDEALNNRFQIKGVELKSGYKDWILWISFAISCFLLCVALLGFIMWACQKGNIRCNICI

SEQ ID NO: 1265 - protein, 566 aa, Artificial Sequence; identical to SEQ ID NO: 633
  derived and/or modified protein sequence (wt) from hemagglutinin__InfluenzaA__ABI30799

SEQ ID NO: 1266 - protein, 566 aa, Artificial Sequence
  derived and/or modified protein sequence (wt) from hemagglutinin__InfluenzaA__ABI30810
MKTIIALSYILCLVFAQKLPGNDNSTATLCLGHHAVPNGTIVKTITNDQIEVTNATELVQSSSTGGICDSPHQILDGENCTLIDALLGDPQCDGFQNKKWDLFVERSKAYSNCYPYDVPDYASLRSLIASSGTLEFNNESFNWTGVTQNGTSSACKRRSNSSFFSRLNWLTHLKFKYPALNVTMPNNEEFDKLYIWGVHHPGTYNDQISLYAQASGRITVSTKRSQQTVIPNIGSRPRVRDIPSRISIYWTIVKPGDILLINSTGNLIAPRGYFKIRSGKSSIMRSDAPIGKCNSECITPNGSIPNDKPFQNVNRITYGACPRYVKQNTLKLATGMRNVPEKQTRGIFGAIAGFIENGWEGMVDGWYGFRHQNSEGIGQAADLKSTQAAIDQINGKLNRLIGKTNEKFHQIEKEFSEVEGRIQDLEKYVEDTKIDLWSYNAELLVALENQHTIDLTDSEMNKLFERTKKQLRENAEDMGNGCFKIYHKCDNACIGSIKNGTYDHDVYRDEALNNRFQIKGVELKSGYKDWILWISFAISCFLLCVALLGFIMWACQKGNIRCNICI

SEQ ID NO: 1267 - protein, 566 aa, Artificial Sequence
  derived and/or modified protein sequence (wt) from hemagglutinin__InfluenzaA__ABI30821
MKTIIALSYILCLVFAQKLPGNDNSTATLCLGHHAVPNGTIVKTITNDQIEVTNATELVQSSSTGGICDSPHQILDGENCTLIDALLGDPQCDGFQNKKWDLFVERSKAYSNCYPYDVPDYASLRSLIASSGTLEFNNESFNWTGVTQNGTSSACKRRSNSSFFSRLNWLTHLKFKYPALNVAMPNNEEFDKLYIWGVHHPGTYNDQISLYAQASGRITVSTKRSQQTVIPNIGSRPRVRDIPSRISIYWTIVKPGDILLINSTGNLIAPRGYFKIRSGKSSIMRSDAPIGKCNSECITPNGSIPNDKPFQNVNRITYGACPRYVKQNTLKLATGMRNVPEKQTRGIFGAIAGFIENGWEGMVDGWYGFRHQNSEGIGQAADLKSTQAAIDQINGKLNRLIGKTNEKFHQIEKEFSEVEGRIQDLEKYVEDTKIDLWSYNAELLVALENQHTIDLTDSEMNKLFERTKKQLRENAEDMGNGCFKIYHKCDNACIGSIRNGTYDHDVYRDEALNNRFQIKGVELKSGYKDWILWISFAISCFLLCVALLGFIMWACQKGNIRCNICI

SEQ ID NO: 1268 - protein, 566 aa, Artificial Sequence; identical to SEQ ID NO: 633
  derived and/or modified protein sequence (wt) from hemagglutinin__InfluenzaA__ABI30832

SEQ ID NO: 1269 - protein, 566 aa, Artificial Sequence
  derived and/or modified protein sequence (wt) from hemagglutinin__InfluenzaA__ABI30843
MKTIIALSYILCLVFAQKLPGNDNSTATLCLGHHAVPNGTIVKTITNDQIEVTNATELVQSSSTGGICDSPHQILDGENCTLIDALLGDPQCDGFQNKKWDLFVERSKAYSNCYPYDVPDYASLRSLIASSGTLEFNNESFNWTGVTQNGTSSACKRRSNSSFFSRLNWLTHLKFKYPALNVTMPNNEEFDKLYIWGVHHPGTYNDQISLYAQASGRITVSTKRSQQTVIPNIGSRPRVRDIPSRISIYWTIVKPGDILLINSTGNLIAPRGYFKIRSGKSSIMRSDAPIGKCNSECITPNGSIPNDKPFQNVNRITYGACPRYVKQNTLKLATGMRNVPEKQTRGIFGAIAGFIENGWEGMVDGWYGFRHQNSEGIGQAADLKSTQAAIDQINGKLNRLIGKTNEKFHQIEKEFSEVEGRIQDLEKYVEDTKIDLWSYNAELLVALENQHTIDLTDSEMNKLFERTRKQLRENAEDMGNGCFKIYHKCDNACIGSIRNGTYDHDVYRDEALNNRFQIKGVELKSGYKDWILWISFAISCFLLCVALLGFIMWACQKGNIRCNICI

SEQ ID NO: 1270 - protein, 566 aa, Artificial Sequence; identical to SEQ ID NO: 1213
  derived and/or modified protein sequence (wt) from hemagglutinin__InfluenzaA__ABI30865

SEQ ID NO: 1271 - protein, 568 aa, Artificial Sequence
  derived and/or modified protein sequence (wt) from hemagglutinin__InfluenzaA__ABI36155
MEKIVLLLATVSLVKSDQICIGYHANNSTEQVDTIMEKNVTVTHAQDILEKTHNGKLCDLDGVKPLILRDCSVAGWLLGNPMCDEFINVPEWSYIVEKANPANGLCYPGNFNDYEELKHLLSRINHFEKLQIIPKSSWSDHEASLGVSSACPYLGRSSFFRNVVWLIKKNNTYPTIKRSYNNTNQEDLLVLWGIHHPNDAAEQTRLYQNPTTYISVGTSTLNQRLVPKIATRSKVNGQSGRMEFFWTILKPNDAINFESNGNFIAPEYAYKIVKKGDSAIMKSELEYGDCNTKCQTPMGAINSSMPLHNIHPLTIGECPKYVKSNRLVLATGLRNSPQRERRRKKRGLFGAIAGFIEGGWQGMVDGWYGYHHSNEQGSGYAADKESTQKAIDGVTNKVNSIIDKMNTQFEAVGREFNNLERRIENLNKKMEDGFLDVWTYNAELLVLMENERTLDFHDSNVKNLYDKVRLQLRDNAKELGNGCFEFYHKCDNECMESIRNGTYNYPQYSEEARLKREEISGVKLESIGIYQILSIYSTVASSLALAIMMAGLSLWMCSNGSLQCRVCI

SEQ ID NO: 1272 - protein, 568 aa, Artificial Sequence
  derived and/or modified protein sequence (wt) from hemagglutinin__InfluenzaA__ABI36166
MEKIVLLLATVSLVKSDQICIGYHANNSTEQVDTIMEKNVTVTHAQDILEKTHNGKLCDLDGVKPLILRDCSVAGWLLGNPMCDEFINVPEWSYIVEKANPANGLCYPGNFNDYEELKHLLSRINHFEKLQIIPKSSWSDHEASLGVSSACPYLGRSSFFRNVVWLIKKNNTYPTIKRSYNNTNQEDLLVLWGIHHPNDAAEQTRLYQNPTTYISVGTSTLNQRLVPKIATRSKVNGQSGRMEFFWTILKPNDAINFESNGNFIAPEYAYKIVKKGDSAIMKSELEYGDCNTKCQTPMGAINSSMPFHNIHPLTIGECPKYVKSNRLVLATGLRNSPQRERRRKKRGLFGAIAGFIEGGWQGMVDGWYGYHHSNEQGSGYAADKESTQKAIDGVTNKVNSIIDKMNTQFEAVGREFNNLERRIENLNKKMEDGFLDVWTYNAELLVLMENERTLDFHDSNVKNLYDKVRLQLRDNAKELGNGCFEFYHKCDNECMESIRNGTYNYPQYSEEARLKREEISGVKLESIGIYQILSIYSTVASSLALAIMMAGLSLWMCSNGSLQCRVCI

SEQ ID NO: 1273 - protein, 568 aa, Artificial Sequence; identical to SEQ ID NO: 1272
  derived and/or modified protein sequence (wt) from hemagglutinin__InfluenzaA__ABI36177

SEQ ID NO: 1274 - protein, 568 aa, Artificial Sequence
  derived and/or modified protein sequence (wt) from hemagglutinin__InfluenzaA__ABI36406
MEKIVLLLATVSLVKSDQICIGYHANNSTEQVDTIMEKNVTVTHAQDILEKTHNGKLCDLDGVKPLILRDCSVAGWLLGNPMCDEFINVPEWSYIVEKANPANGLCYPGNFNDYEELKHLLSRINHFEKLQIIPKSSWSDHEASLGVSSACPYLGRSSFFRNVVWLIKKNNTYPTIKRSYNNTNQEDLLVLWGLHHPNDAAEQTRLYQNPTTYISVGTSTLNQRLVPKIATRSKVNGQSGRMEFFWTILKPNDAINFESNGNFIAPEYAYKIVKKGDSAIMKSELEYGDCNTKCQTPMGAINSSMPFHNIHPLTIGECPKYVKSNRLVLATGLRNSPQRERRRKKRGLFGAIAGFIEGGWQGMVDGWYGYHHSNEQGSGYAADKESTQKAIDGVTNKVNSIIDKMNTQFEAVGREFNNLERRIENLNKKMEDGFLDVWTYNAELLVLMENERTLDFHDSNVKNLYDKVRLQLRDNAKELGNGCFEFYHKCDNECMESIRNGTYNYPQYSEEARLKREEISGVKLESIGIYQILSIYSTVASSLALAIMMAGLSLWMCSNGSLQCRVCI

SEQ ID NO: 1275 - protein, 568 aa, Artificial Sequence
  derived and/or modified protein sequence (wt) from hemagglutinin__InfluenzaA__ABI36450
MEKIVLLLAIVSLVKSDQICIGYHANNSTEQVDTIMEKNVTVTHAQDILGKTHNGKLCDLDGVKPLILRDCSVAGWLLGNPMCDEFINVPEWSYIVEKANPTNDLCYPGSFNDYEELKHLLSRINHFEKIQIIPKSSWSDHEASSGVSSACPYLGSPSFFRNVVWLIKKNSTYPTIKTSYNNTNQEDLLVLWGIHHSNDAAEQTRLYQNPTTYISIGTSTLNQRLVPKIATRSKVNGQSGRMEFFWTILKPNDAINFESNGNFIAPEYAYKIVKKGDSAIMKSELEYGNCNTKCQTPMGAINSSMPFHNIHPLTIGECPKYVKSNRLVLATGLRNSPQRESRRKKRGLFGAIAGFIEGGWQGMVDGWYGYHHSNEQGSGYAADKESTQKAIDGVTNKVNSIIDKMNTQFEAVGREFNNLERRIENLNKKMEDGFLDVWTYNAELLVLMENERTLDFHDSNVKNLYDKVRLQLRDNAKELGNGCFEFYHKCDNECMESIRNGTYNYPQYSEEARLKREEISGVKLESIGTYQILSIYSTVASSLALAIMIAGLSLWMCSNGSLQCRICI

SEQ ID NO: 1276 - protein, 568 aa, Artificial Sequence
  derived and/or modified protein sequence (wt) from hemagglutinin__InfluenzaA__ABI49396
MEKIVLLLAIVSLVKSDQICIGYHANNSTEQVDTIMEKNVTVTHAQDILGKTHNGKLCDLDGVKPLILRDCSVAGWLLGNPMCDEFINVPEWSYIVEKANPTNDLCYPGSFNDYEELKHLLSRINHFEKIQIIPKSSWSDHEASSGVSSACPYLGSPSFFRNVVWLIKKNSTYPTIKKSYNNTNQEDLLVLWGIHHPNDAAEQTRLYQNPTTYISIGTSTLNQRLVPKIATRSKVNGQSGRMEFFWAILKPNDAINFESNGNFIAPEYAYKIVKKGDSAIMKSELEYGNCNTKCQTPMGAINSSMPFHNIHPLTIGECPKYVKSNRLVLATGLRNSPQRESRRKKRGLFGAIAGFIEGGWQGMVDGWYGYHHSNEQGSGYAADKESTQKAIDGVTNKVNSIIDKMNTQFEAVGREFNNLERRIENLNKKMEDGFLDVWTYNAELLVLMENERTLDFHDSNVKNLYDKVRLQLRDNAKELGNGCFEFYHKCDNECMESIRNGTYNYPQYSEEARLKREEISGVKLESIGTYQILSIYSTVASSLALAIMIAGLSLWMCSNGSLQCRICI

SEQ ID NO: 1277 - protein, 567 aa, Artificial Sequence
  derived and/or modified protein sequence (wt) from hemagglutinin__InfluenzaA__ABI85000
MNTQILAFIACMLIGTKGDKICLGHHAVANGTKVNTLTERGIEVVNATETVETVNIKKICTQGKRPTDLGQCGLLGTLIGPPQCDQFLEFDANLIIERREGTDVCYPGKFTNEESLRQILRGSGGIDKESMGFTYSGIRTNGATSACRRSGSSFYAEMKWLLSNSDNAAFPQMTKSYRNPRNKPALIIWGVHHSGSATEQTKLYGSGNKLITVGSSKYQQSFTPSPGARPQVNGQSGRIDFHWLLLDPNDTVTFTFNGAFIAPDRASFFRGESLGVQSDVPLDSGCEGDCFHSGGTIVSSLPFQNINPRTVGKCPRYVKQTSLLLATGMRNVPENPKQAYQKRMTRGLFGAIAGFIENGWEGLIDGWYGFRHQNAQGEGTAADYKSTQSAIDQITGKLNRLIDKTNQQFELIDNEFSEIEQQIGNVINWTRDSMTEVWSYNAELLVAMENQHTIDLADSEMNKLYERVRKQLRENAEEDGTGCFEIFHKCDDQCMESIRNNTYDHTQYRTESLQNRIQIDPVKLSSGYKDIILWFSFGASCFLLLAIAMGLVFICIKNGNMRCTICI

SEQ ID NO: 1278 - protein, 566 aa, Artificial Sequence; identical to SEQ ID NO: 830
  derived and/or modified protein sequence (wt) from hemagglutinin__InfluenzaA__ABI92291

SEQ ID NO: 1279 - protein, 566 aa, Artificial Sequence
  derived and/or modified protein sequence (wt) from hemagglutinin__InfluenzaA__ABI92302
MKAKLLVLLCALSATDADTICIGYHANNSTDTVDTVLEKNVTVTHSVNLLEDSHNGKLCRLKGIAPLQLGKCSIAGWILGNPECESLFSKKSWSYIAETPNSENGTCYPGYFADYEELREQLSSVSSFERFEIFPKESSWPKHNVTRGVTASCSHKGKSSFYRNLLWLTEKNGSYPNLSKSYVNNKEKEVLVLWGVHHPSNIEDQKTIYRKENAYVSVVSSHYNRRFTPEIAKRPKVRDQEGRINYYWTLLEPGDTIIFEANGNLIAPWYAFALSRGFGSGIITSNASMDECDAKCQTPQGAINSSLPFQNVHPVTIGECPKYVRSTKLRMVTGLRNIPSIQSRGLFGAIAGFIEGGWTGMIDGWYGYHHQNEQGSGYAADQKSTQNAINGITNKVNSVIEKMNIQFTAVGKEFNKLEKRMENLNKKVDDGFLDIWTYNAELLVLLENERTLDFHDSNVKNLYEKVKSQLKNNAKEIGNGCFEFYHKCNNECMESVKNGTYDYPKYSEESKLNREKIDGVKLESMGVYQILAIYSTVASSLVLLVSLGAISFWMCSNGSLQCRICI

SEQ ID NO: 1280 - protein, 566 aa, Artificial Sequence
  derived and/or modified protein sequence (wt) from hemagglutinin__InfluenzaA__ABI92313
MKAKLLVLLCAFTATYADTICIGYHANNSTDTVDTVLEKNVTVTHSVNLLEDSHNGKLCRLKGTAPLQLGNCSVAGWILGNPECESLFSKESWSYIAETPNPENGTCYPGYFADYEELREQLSSISSFERFEIFPKESSWPNHTVTKGVTASCSHNGKSSFYKNLLWLTEKNGLYPNLSKSYVNNKEKEVLVLWGVHHPSNIGDQRAIYHTENAYVSVVSSHYSRRFTPEITKRPKVRDQEGRINYYWTLLEPGDTIIFEANGNLIAPWYAFALSRGFGSGIITSNASMGECDAKCQTPQGAINSSLPFQNVHPVTIGECPKYVRSTKLRMVTGLRNIPSIQSRGLFGAIAGFIEGGWTGMIDGWYGYHHQNEQGSGYAADQKSTQNAIDGITNKVNSVIEKMNTQFTAVGKEFNKLERRMENLNKKVDDGFLDIWTYNAELLVLLENERTLDFHDSNVKNLYEKVKNQLKNNAKEIGNGCFEFYHKCNNECMESVKNGTYDYPKYSEESKLNREKIDGVKLESMGVYHILAIYSTVASSLVLLVSLGAISFWMCSNGSLQCRICI

SEQ ID NO: 1281 - protein, 566 aa, Artificial Sequence
  derived and/or modified protein sequence (wt) from hemagglutinin__InfluenzaA__ABI92324
MKTIIALSYILCLVFAQKLPGNDNSTATLCLGHHAVPNGTLVKTITNDQIEVTNATELVQSSSTGRICDSPHRILDGKNCTLIDALLGDPHCDGFQNKEWDLFVERSKAYSNCYPYDVPDYASLRSLVASSGTLEFINEDFNWTGVAQDGKSYACKRGSVNSFFSRLNWLHKLEYKYPALNVTMPNNGKFDKLYIWGVHHPSTDSDQTSLYVRASGKVTVSTKRSQQTVIPNIGFRPWVRGLSSRISIYWTIVKPGDILLINSTGNLIAPRGYFKIRNGKSSIMRSDAPIGNCSSECITPNGSIPNDKPFQNVNRITYGACPRYVKQNTLKLATGMRNVPEKQTRGIFGAIAGFIENGWEGMVDGWYGFRHQNSEGTGQAADLKSTQAAIDQINGKLNRLIEKTNEKFHQIEKEFSEVEGRIQDLEKYVEDTKIDLWSYNAGLLVALENQHTIDLTDSEMNKLFERTRKQLRENAEDMGNGCFKIYHKCDNACIGSIRNGTYDHDVYRDEALNNRFQIKGVELKSGYKDWILWISFAISCFLLCVVLLGFIMWACQKGNIRCNICI

SEQ ID NO: 1282 - protein, 566 aa, Artificial Sequence
  derived and/or modified protein sequence (wt) from hemagglutinin__InfluenzaA__ABI92335
MKTIIALSYILCLVFAQKLPGNDNSTATLCLGHHAVPNGTLVKTITNDQIEVTNATELVQSSSTSRICDSPHQILDGENCTLIDALLGDPHCDGFQNKEWDLFVERSKAYSNCYPYDVPDYVSLRSLVASSGTLEFNNESFNWTGVAQNGTSSACKRRSDKSFFSRLNWLHQLKYKYPALNVTMPNNEKFDKLYIWGVHHPGTDSDQISLYAQASGRVTVSTKRSQQTVIPNIGSRPWVRGVSSRISIYWTIVKPGDILLINSTGNLIAPRGYFKIRSGKSSIMRSDAPIGKCNSECITPNGSIPNDKPFQNVNRITYGACPRYVKQNTLKLATGMRNVPEKQTRGIFGAIAGFIENGWEGMMDGWYGFRHQNSEGTGQAADLKSTQAAINQINGKLNRLIEKTNEKFHQIEKEFSEVEGRIQDLEKYVEDTKIDLWSYNAELLVALENQHTIDLTDSEMNKLFERTKKQLRENAEDMGNGCFKIYHKCDNACMGSIRNGTYDHDVYRDEALNNRFQIKGVELKSGYKDWILWISFAISCFLLCIVLMGFIMWACQKGNIRCNICI

SEQ ID NO: 1283 - protein, 566 aa, Artificial Sequence
  derived and/or modified protein sequence (wt) from hemagglutinin__InfluenzaA__ABI92346
MKTIIALSYILCLVFAQKLPGNDNSTATLCLGHHAVPNGTLVKTITNDQIEVTNATELVQSSSTGRICDSPHQILDGENCTLIDALLGDPHCDGFQNKEWDLFVERSKAYSNCYPYDVPDYVSLRSLVASSGTLEFNNESFNWTGVAQNGTSSACKRRSDKSFFSRLNWLHQLKYKYPALNVTMPNNEKFDKLYIWGVHHPGTDSDQISLYAQASGRVTVSTKRSQQTVIPNIGSRPWVRGVSSRISIYWTIVKPGDILLINSTGNLIAPRGYFKIRSGKSSIMRSDAPIGKCNSECITPNGSIPNDKPFQNVNRITYGACPRYVKQNTLKLATGMRNVPEKQTRGIFGAIAGFIENGWEGMMDGWYGFRHQNSEGTGQAADLKSTQAAINQINGKLNRLIEKTNEKFHQIEKEFSEVEGRIQDLEKYVEDTKIDLWSYNAELLVALENQHTIDLTDSEMNKLFERTKKQLRENAEDMGNGCFKIYHKCDNACIGSIRNGTYDHDVYRDEALNNRFHIKGVELKSGYKDWVLWISFAISCFLLCIVLLGFIMWACQKGNIRCNICI

SEQ ID NO: 1284 - protein, 566 aa, Artificial Sequence; identical to SEQ ID NO: 282
  derived and/or modified protein sequence (wt) from hemagglutinin__InfluenzaA__ABI92357

SEQ ID NO: 1285 - protein, 566 aa, Artificial Sequence; identical to SEQ ID NO: 282
  derived and/or modified protein sequence (wt) from hemagglutinin__InfluenzaA__ABI92368

SEQ ID NO: 1286 - protein, 565 aa, Artificial Sequence; identical to SEQ ID NO: 1204
  derived and/or modified protein sequence (wt) from hemagglutinin__InfluenzaA__ABI92379

SEQ ID NO: 1287 - protein, 566 aa, Artificial Sequence
  derived and/or modified protein sequence (wt) from hemagglutinin__InfluenzaA__ABI92390
MKTIIAFSYILCLVFAQKLPGNDNSTATLCLGHHAVPNGTIVKTITNDQIEVTNATELVQSSSTGGICDSPHQILDGENCTLIDALLGDPQCDGFQNKKWDLFVERSKAYSNCYPYDVPDYASLRSLVASSGTLEFNNESFNWTGVTQNGTSSACKRRSNNSFFSRLNWLTHLKFKYPALNVTMPNNEKFDKLYIWGVHHPGTDNDQTSLYAQASGRITVSTKRSQQTVTPNIGSRPRVRDIPSRISIYWTIVKPGDILLINSTGNLIAPRGYFKIRSGKSSIMRSDAPIGKCNSECITPNGSIPNDKPFQNVNRITYGACPRYVKQNTLKLATGMRNVPEKQTRGIFGAIAGFIENGWEGMVDGWYGFRHQNSEGTGQAADLKSTQAAINQINGKLNRLIGKTNEKFHQIEKEFSEVEGRIQDLEKYVEDTKIDLWSYNAELLVALENQHTIDLTDSEMNKLFERTKKQLRENAEDMGNGCFKIYHKCDNACIGSIRNGTYDHDVYRDEALNNRFQIKGVELKSGYKDWILWISFAISCFLLCVALLGFIMWACQKGNIRCNICI

SEQ ID NO: 1288 - protein, 566 aa, Artificial Sequence; identical to SEQ ID NO: 282
  derived and/or modified protein sequence (wt) from hemagglutinin__InfluenzaA__ABI92401

SEQ ID NO: 1289 - protein, 566 aa, Artificial Sequence
  derived and/or modified protein sequence (wt) from hemagglutinin__InfluenzaA__ABI92412
MKTIIALSYILCLVFAQKLPGNDNSTATLCLGHHAVPNGTLVKTITNDQIEVTNATELVQSSSTGGICDSPHQILDGENCTLIDALLGDPQCDGFQNKKWDLFVERSKAYSNCYPYDVPDYASLRSLIASSGTLEFNNESFNWTGVTQNGTSSACKRRSNSSFFSRLNWLTHLKFKYPALNVTMPNNEEFDKLYIWGVHHPGTYNDQISLYAQASGRITVSTKRSQQTVIPNIGSRPRVRDIPSRISIYWTIVKPGDILLINSTGNLIAPRGYFKIRSGKSSIMRSDAPIGKCNSECITPNGSIPNDKPFQNINRITYGACPRYVKQNTLKLATGMRNVPEKQTRGIFGAIAGFIENGWEGMVDGWYGFRHQNSEGIGQAADLKSTQAAIDQINGKLNRLIGKTNEKFHQIEKEFSEVEGRIQDLEKYVEDTKIDLWSYNAELLVALENQHTIDLTDSEMNKLFERTKKQLRENAEDMGNGCFKIYHKCDNACIGSIRNGTYDHDVYRDEALNNRFQIKGVELKSGYKDWILWISFAISCFLLCVALLGFIMWACQKGNIRCNICI

SEQ ID NO: 1290 - protein, 566 aa, Artificial Sequence
  derived and/or modified protein sequence (wt) from hemagglutinin__InfluenzaA__ABI92423
MKTIIALSYILCLVFAQKLPGNDNSTATLCLGHHAVPNGTIVKTITNDQIEVTNATELVQSSSTGGICDSPHQILDGENCTLIDALLGDPQCDGFQNKKWDLFVERSKAYSNCYPYDVPDYASLRSLIASSGTLEFNNESFNWTGVTQNGTSSACKRRSNSSFFSRLNWLTHLKFKYPALNVTMPNNEEFDKLYIWGVHHPGTYNDQISLYAQASGRITVSTKRSQQTVIPNIGSRPRVRDIPSRISIYWTIVKPGDILLINSTGNLIAPRGYFKIRSGKSSIMRSDAPIGKCNSECITPNGSIPNDKPFQNVNRITYGACPRYVKQNTLKLATGMRNVPDKQTRGIFGAIAGFIENGWEGMVDGWYGFRHQNSEGIGQAADLKSTQAAIDQINGKLNRLIGKTNEKFHQIEKEFSEVEGRIQDLEKYVEDTKIDLWSYNAELLVALENQHTIDLTDSEMNKLFERTKKQLRENAEDMGNGCFKIYHKCDNACIGSIRNGTYDHDVYRDEALNNRFQIKGVELKSGYKDWILWISFAISCFLLCVALLGFIMWACQKGNIRCNICI

SEQ ID NO: 1291 - protein, 566 aa, Artificial Sequence; identical to SEQ ID NO: 633
  derived and/or modified protein sequence (wt) from hemagglutinin__InfluenzaA__ABI92434

SEQ ID NO: 1292 - protein, 566 aa, Artificial Sequence
  derived and/or modified protein sequence (wt) from hemagglutinin__InfluenzaA__ABI92445
MKTIIALSYILCLVFTQKLPGNDNSTATLCLGHHAVPNGTIVKTITNDQIEVTNATELVQSSSTGGICDSPHQILDGENCTLIDALLGDPQCDGFQNKKWDLFVERSKAYSNCYPYDVPDYASLRSLIASSGTLEFNNESFNWTGVNQNGTSSACKRRSNSSFFSRLNWLTHLKFKYPALNVTMPNNEEFDKLYIWGVHHPGTYNDQISLYAQASGRITVSTKRSQQTVIPNIGSRPRVRDIPSRISIYWTIVKPGDILLINSTGNLIAPRGYFKIRSGKSSIMRSDAPIGKCNSECITPNGSIPNDKPFQNVNRITYGACPRYVKQNTLKLATGMRNVPEKQTRGIFGAIAGFIENGWEGMVDGWYGFRHQNSEGIGQAADLKSTQAAIDQINGKLNRLIGKTNEKFHQIEKEFSEVEGRIQDLEKYVEDTKIDLWSYNAELLVALENQHTIDLTDSEMNKLFERTKKQLRENAEDMGNGCFKIYHKCDNTCIGSIRNGTYDHDVYRDEALNNRFQIKGVELKSGYKDWILWISFAISCFLLCVALLGFIMWACQKGNIRCNICI

SEQ ID NO: 1293 - protein, 566 aa, Artificial Sequence; identical to SEQ ID NO: 633
  derived and/or modified protein sequence (wt) from hemagglutinin__InfluenzaA__ABI92456

SEQ ID NO: 1294 - protein, 566 aa, Artificial Sequence; identical to SEQ ID NO: 1241
  derived and/or modified protein sequence (wt) from hemagglutinin__InfluenzaA__ABI92467

SEQ ID NO: 1295 - protein, 566 aa, Artificial Sequence; identical to SEQ ID NO: 650
  derived and/or modified protein sequence (wt) from hemagglutinin__InfluenzaA__ABI92478

SEQ ID NO: 1296 - protein, 566 aa, Artificial Sequence; identical to SEQ ID NO: 1241
  derived and/or modified protein sequence (wt) from hemagglutinin__InfluenzaA__ABI92489

SEQ ID NO: 1297 - protein, 566 aa, Artificial Sequence
  derived and/or modified protein sequence (wt) from hemagglutinin__InfluenzaA__ABI92500
MKTIIALSYILCLVFAQKLPGNDNSTATLCLGHHAVPNGTLVKTITNDQIEVTNATELVQSSSTGGICDSPHQILDGENCTLIDALLGDPHCDGFQNKEWDLFVERSKAYSNCYPYDVPDYASLRSLVASSGTLEFNNESFNWTGVAQNGTSSACKRRSNKSFFSRLNWLHQLKYKYPALNVTMPNNEKFDKLYIWGVHHPSTDSDQISLYAQAPGRVTVSTKRSQQTVIPNIGSRPWVRGVSSRISIYWTIVKPGDILLINCTGNLIAPRGYFKIRSGKSSIMRSDASIGKCNSECITPNGSIPNDKPFQNVNRITYGACPRYVKQNTLKLATGMRNVPEKQTRGIFGAIAGFIENGWEGMVDGWYGFRHQNSEGTGQAADLKSTQAVINQINGKLNRLIEKTNEKFHQIEKEFSEVEGRIQDLEKYVEDTKIDLWSYNAELLVALENQHTIDLTDSEMNKLFERTKKQLRENAEDMGNGCFKIYHKCDNACIGSIRNGTYDHDVYRDEALNNRFQIKGVELKSGYKDWILWISFAISCFLLCVVLLGFIMWACQKGNIRCNICI

SEQ ID NO: 1298 - protein, 566 aa, Artificial Sequence
  derived and/or modified protein sequence (wt) from hemagglutinin__InfluenzaA__ABI92511
MKTIIALSYILCLVFAQKLPGNDNSTATLCLGHHAVPNGTLVKTITNDQIEVTNATELVQNSSTGIICDSPHQILDGENCTLIDALLGDPHCDGFQNKEWDLFVERSKAYSNCYPYDVPDYASLRSLVASSGTLEFNNESFNWTGVAQNGTSSACKRRSDKSFFSRLNWLHQLKYKYPALNVTMPNTEKFDKLYIWGVHHPSTDSDQISLYAQASGRVTVSTKRSQQTVIPNIGSRPWVRGVSSRVSIYWTIVKPGDILLINSTGNLIAPRGYFKIRSGKSSIMRSDASIGKCNSKCITPNGSIPNDKPFQNVNRITYGACPRYVKQNTLKLATGMRNVPEKQTRGIFGAIAGFIENGWEGMVDGWYGFRHQNSEGTGQAADLKSTQAAINQINGKLNRLIEKTNEKFHQIEKEFSEVEGRIQDLEKYVEDTKIDLWSYNAELLVALENQHTIDLTDSEMNKLFERTKKQLRENAEDMGNGCFKIYHKCDNTCIGSIRNGTYDHDVYRDEALNNRFQIKGVELKSGYKDWILWISFAISCFLLCVVLLGFIMWACQKGNIRCNICI

SEQ ID NO: 1299 - protein, 566 aa, Artificial Sequence
  derived and/or modified protein sequence (wt) from hemagglutinin__InfluenzaA__ABI92522
MKTIIALSYILCLVFAQKLPGNDNSTATLCLGHHAVPNGTLVKTITNDQIEVTNATELVQSSSTGRICDSPHQILDGENCTLIDALLGDPHCDGFQNKEWDLFVERSKAYSNCYPYDVPDYVSLRSLVASSGTLEFNNESFNWTGVAQNGTSSACKRRSNKSFFSRLNWLHQLKYKYPALNVTMPNNEKFDKLYIWGVHHPGTDSDQISLYAQASGRVTVSTKRSQQTVIPNIGSRPWVRGVSSRISIYWTIVKPGDILLINSTGNLIAPRGYFKIRSGKSSIMKSDAPIGKCNSECITPNGSIPNDKPFQNVNRITYGACPRYVKQNTLKLATGMRNVPEKQTRGIFGAIAGFIENGWEGMMDGWYGFRHQNSEGTGQAADLKSTQAAINQINGKLNRLIEKTNEKFHQIEKEFSEVEGRIQDLEKYVEDTKIDLWSYNAELLVALENQHTIDLTDSEMNKLFERTKKQLRENAEDMGNGCFKIYHKCDNACIGSIRNGTYDHDVYRDEALNNRFQIKGVELKSGYKDWILWISFAISCFLLCIVLLGFIMWACQKGNIRCNICI

SEQ ID NO: 1300 - protein, 566 aa, Artificial Sequence
  derived and/or modified protein sequence (wt) from hemagglutinin__InfluenzaA__ABI92533
MKTIIALSYILCLVFAQKLPGNDNSRATLCLGHHAVPNGTLVKTITNDQIEVTNATELVQSSSTGRICDSPHQILDGENCTLIDALLGDPHCDGFQNKEWDLFVERSKAYSNCYPYDVPDYVSLRSLVASSGTLEFNNESFNWTGVAQNGTSSACKRRSDKSFFSRLNWLHQLKYKYPALNVTMPNNEKFDKLYIWGVHHPGTDSDQISLYAQASGRVTVSTKRSQQTVIPNIGSRPWVRGVSSRISIYWTIVKPGDILLINSTGNLIAPRGYFKIRSGKSSIMRSDAPIGKCNSECITPNGSIPNDKPFQNVNRITYGPCPRYVKQNTLKLATGMRNVPEKQTRGIFGAIAGFIENGWEGMMDGWYGFRHQNSEGTGQAADLKSTQAAINQINGKLNRLIEKTNEKFHQIEKEFSEVEGRIQDLEKYVEDTKIDLWSYNAELLVALENQHTIDLTDSEMNKLFERTKKQLRENAEDMGNGCFKIYHKCDNACIGSIRNGTYDHDVYRDEALNNRFQIKGVELKSGYKDWILWISFAISCFLLCIVLLGFIMWACQKGNIRCNICI

SEQ ID NO: 1301 - protein, 566 aa, Artificial Sequence; identical to SEQ ID NO: 1300
  derived and/or modified protein sequence (wt) from hemagglutinin__InfluenzaA__ABI92544

SEQ ID NO: 1302 - protein, 566 aa, Artificial Sequence
  derived and/or modified protein sequence (wt) from hemagglutinin__InfluenzaA__ABI92577
MKTIIALSYILCLVFAQKLPGNDNSTATLCLGHHAVPNGTLVKTITNDQIEVTNATELVQSSSTGRICDSPHQILDGENCTLIDALLGDPHCDGFQNKEWDLFVERSRAYSNCYPYDVPDYVSLRSLVASSGTLEFNNESFNWTGVAQNGTSSACKRRSDKSFFSRLNWLHQLKYKYPALNVTMPNNEKFDKLYIWGVHHPGTDSDQISLYAQASGRVTVSTKRSQQTVIPNIGSRPWVRGVSSKISIYWTIVKPGDILLINSTGNLIAPRGYFKIRSGKSSIMRSDAPIGKCNSECITPNGSIPNDKPFQNVNRITYGPCPRYVKQNTLKLATGMRNVPEKQTRGIFGAIAGFIENGWEGMMDGWYGFRHQNSEGTGQAADLKSTQAAINQINGKLNRLIEKTNEKFHQIEKEFSEVEGRIQDLEKYVEDTKIDLWSYNAELLVALENQHTIDLTDSEMNKLFERTKKQLRENAEDMGNGCFKIYHKCDNACIGSIRNGTYDHDVYRDEALNNRFQIKGVELKSGYKDWILWISFAISCFLLCIVLLGFIMWACQKGNIRCNICI

SEQ ID NO: 1303 - protein, 566 aa, Artificial Sequence; identical to SEQ ID NO: 1039
  derived and/or modified protein sequence (wt) from hemagglutinin__InfluenzaA__ABI92588

SEQ ID NO: 1304 - protein, 566 aa, Artificial Sequence
  derived and/or modified protein sequence (wt) from hemagglutinin__InfluenzaA__ABI92599
MKTIIALSYILCLVFAQKLPGNDNSTATLCLGHHAVPNGTLVKTITNDQIEVTNATELVQSSSTGRICNSPHQILDGENCTLIDALLGDPHCDGFQNKEWDLFVERSKAYSNCYPYDVPDYVSLRSLVASSGTLEFNNESFNWTGVAQNGTSSACKRRSDKSFFSRLNWLHQLKYKYPALNVTMPNNEKFDKLYIWGVHHPGTDSDQISLYAQASGRVTVSTKRSQQTVIPNIGSRPWVRGVSSRISIYWTIVKPGDILLINSTGNLIAPRGYFKIRSGKSSIMRSDAPIGKCNSECITPNGSIPNDKPFQNVNRITYGACPRYVKQKTLKLATGMRNVPEKQTRGIFGAIAGFIENGWEGMMDGWYGFRHQNSEGTGQAADLKSTQAAINQINGKLNRLIEKTNEKFHQIEKEFSEVEGRIQDLEKYVEDTKIDLWSYNAELLVALENQHTIDLTDSEMNKLFERTKKQLRENAEDMGNGCFKIYHKCDNACIGSIRNGTYDHDVYRDEALNNRFQIKGVELKSGYKDWILWISFAISCFLLCIVLLGFIMWACQKGNIRCNICI

SEQ ID NO: 1305 - protein, 566 aa, Artificial Sequence
  derived and/or modified protein sequence (wt) from hemagglutinin__InfluenzaA__ABI92610
MKTIIALSYILCLVFAQKLPGNDNSTATLCLGHHAVPNGTLVKTITNDQIEVTNATELVQSSSTGRICDSPHQILDGENCTLIDALLGDPHCDGFQNKEWDLFVERSKAYSNCYPYDVPDYVSLRSLVASSGTLEFNNESFNWTGVAQNGTSSACKRRSDKSFFSRLNWLHQLKYKYPALNVTMPNNEKFDKLYIWGVHHPGTDSDQISLYAQASGRVTVSTKRSQQTVIPNIGSRPWVRGVSSRISIYWTIVKPGDILLINSTGNLIAPRGYFKIRSGKSSIMRSDAPIGKCNSECITPNGSIPNDKPFQNVNRITYGACPRYVKQNTLKLATGMRNVPEKQTRGIFGAIAGFIENGWEGMMDGWYGFRHQNSEGTGQAADLKSTQAAINQINGKLNRLIEKTNEKFHQIEKEFSEVEGRIQDLEKYVEDTKIDLWSYNAELLVALENQHTIDLTDSEMNKLFERTKKQLRENAEDMGNGCFKIYHKCDNACIGSIRNGTYDHDVYRDEALNNRFQIKGVELKSGYKDWILWISFAISCFLLCIVLLGFIMWACQKGNIRCNICI

SEQ ID NO: 1306 - protein, 566 aa, Artificial Sequence
  derived and/or modified protein sequence (wt) from hemagglutinin__InfluenzaA__ABI92621
MKTIIALSYILCLVFAQKLPGNDNSMATLCLGHHAVPNGTLVKTITNDQIEVTNATELVQSSSTGRICNSPHQILDGENCTLIDALLGDPHCEGFQNKEWDLFVERSKAYSNCYPYDVPDYVSLRSLVASSGTLEFNNESFNWTGVAQNGTSSACKRRSDKSFFSRLNWLHQLKYKYPALNVTMPNNEKFDKLYIWGVHHPGTDSDQISLYAQASGRVTVSTKRSQQTVIPNIGSRPWVRGVSSKISIYWTIVKPGDILLINSTGNLIAPRGYFKIRSGKSSIMRSDAPIDKCNSECITPNGSIPNDKPFQNVNRITYGLCPRYVKQNTLKLATGMRNVPEKQTRGIFGAIAGFIENGWEGMMDGWYGFRHQNSEGTGQAADLKSTQAAINQINGKLNRLIEKTNEKFHQIEKEFSEVEGRIQDLEKYVEDTKIDLWSYNAELLVALENQHTIDLTDSEMNKLFERTKKQLRENAEDMGNGCFKIYHKCDNACIGSIRNGTYDHDVYRDEALNNRFQIKGVELKSGYKDWILWISFAISCFLLCIVLLGFIMWACQKGNIRCNICI

SEQ ID NO: 1307 - protein, 566 aa, Artificial Sequence; identical to SEQ ID NO: 562
  derived and/or modified protein sequence (wt) from hemagglutinin__InfluenzaA__ABI92632

SEQ ID NO: 1308 - protein, 566 aa, Artificial Sequence
  derived and/or modified protein sequence (wt) from hemagglutinin__InfluenzaA__ABI92643
MKTIIALSYILCLVFAQKLPGNDNSTATLCLGHHAVPNGTIVKTITNDQIEVTNATELVQSSSTGGICDSPHQILDGENCTLIDALLGDPQCDGFQNKKWDLFVERSKAYSNCYPYDVPDYASLRSLVASSGTLEFNNESFDWTGVTQNGTSSACKRRSNKSFFSRLNWLTHLKYKYPALNVTIPNNEKFDKLYIWGVHHPGTDSDQISLYAQASGRITVSTKRSQQTVIPNIGSRPRVRDVSSRISIYWTIVKPGDILLINSTGNLIAPRGYFKIRSGKSSIMRSDAPIGKCNSECITPNGSIPNDKPFQNVNRITYGACPRYVKQNTLKLATGMRNVPEKQTRGIFGAIAGFIENGWEGMVDGWYGFRHQNSEGTGQAADLKSTQAAINQINGKLNRLIGKTNEKFHQIEKEFSEVEGRIQDLEKYVEDTKIDLWSYNAELLVALENQHTIDLTDSEMNKLFERTKRQLRENAEDMGNGCFKIYHKCDNACIGSIRNGTYDHDVYRDEALNNRFQIKGVELKSGYKDWILWISFAISCFLLCVALLGFIMWACQKGNIRCNICI

SEQ ID NO: 1309 - protein, 566 aa, Artificial Sequence
  derived and/or modified protein sequence (wt) from hemagglutinin__InfluenzaA__ABI92665
MKTIIALSYILCLVFAQKLPGNDNSTATLCLGHHAVPNGTIVKTITNDQIEVTNATELVQSSSTGGICDSPHQILDGENCTLIDALLGDPQCDGFQNKKWDLFVERSKAYSNCYPYDVPDYASLRSLVASSGTLEFNNESFDWTGVTQNGTSSACKRGSNKSFFSRLNWLTHLKYKYPALNVTMPNNEKFDKLYIWGVHHPGTDSDQISLYAQASGRITVSTKRSQQTVIPNIGSRPRVRDVSSRISIYWTIVKPGDILLINSTGNLIAPRGYFKIRSGKSSIMRSDAPIGKCNSECITPNGSIPNDKPFQNVNRITYGACPRYVKQNTLKLATGMRNVPEKQTRGIFGAIAGFIENGWEGMVDGWYGFRHQNSEGTGQAADLKSTQAAINQINGKLNRLIGKTNEKFHQIEKEFSEVEGRIQDLEKYVEDTKIDLWSYNAELLVALENQHTIDLTDSEMNKLFERTKRQLRENAEDMGNGCFKIYHKCDNACIGSIRNGTYDHDVYRNEALNNRFQIKGVELKSGYKDWILWISFAISCFLLCVALLGFIMWACQKGNIRCNICI

SEQ ID NO: 1310 - protein, 566 aa, Artificial Sequence
  derived and/or modified protein sequence (wt) from hemagglutinin__InfluenzaA__ABI92676
MKTIIALSYILCLVFAQKLPGNDNSTATLCLGHHAVPNGTIVKTITNDQIEVTNATELVQSSSTGGICDSPHQILDGENCTLIDALLGDPQCDGFQNKKWDLFVERSKAYSNCYPYDVPDHASLRSLVASSGTLEFNNESFDWTGVTQNGTSSACKRRSNKSFFSRLNWLTHLKYKYPALNVTMPNNEKFDKLYIWGVHHPGTDSDQISLYAQASGRITVSTKRSQQTVIPNIGSRPRVRDVSSRISIYWTIVKPGDILLINSTGNLIAPRGYFKIRNGKSSIMRSDAPIGKCNSECITPNGSIPNDKPFQNVNRITYGACPRYVKQNTLKLATGMRNVPEKQTRGIFGAIAGFIENGWEGMVDGWYGFRHQNSEGTGQAADLKSTQAAINQINGKLNRLIGKTNEKFHQIEKEFSEVEGRIQDLEKYVEDTKIDLWSYNAELLVALENQHTIDLTDSEMNKLFERTKKQLRENAEDMGNGCFKIYHKCDNACIGSIRNGTYDHDVYRDEALNNRFQIKGVELKSGYKDWILWISFAISCFLLCVALLGFIMWACQKGNIRCNICI

SEQ ID NO: 1311 - protein, 566 aa, Artificial Sequence
  derived and/or modified protein sequence (wt) from hemagglutinin__InfluenzaA__ABI92687
MKTIIALSYILCLVFAQKLPGNDNSTATLCLGHHAVPNGTIVKTITNDQIEVTNATELVQSSSTGGICDSPHQILDGENCTLIDALLGDPQCDGFQNKKWDLFVERSKAYSNCYPYDVPDYASLRSLVASSGTLEFNNESFDWTGVTQNGTSSACKRGSNKSFFSRLNWLTHLKYKYPALNVTMPNNEKFDKLYIWGVHHPGTDSDQISLYAQASGRITVSTKRSQQTVIPNIGSRPRVRDVSSRISIYWTIVKPGDILLINSTGNLIAPRGYFKIRSGKSSIMRSDAPIGKCNSECITPNGSIPNDKPFQNVNRITYGACPRYVKQNTLKLATGMRNVPEKQTRGIFGAIAGFIENGWEGMVDGWYGFRHQNSEGTGQAADLKSTQAAINQINGKLNRLIGKTNEKFHQIEKEFSEVEGRIQDLEKYVEDTKIDLWSYNAELLVALENQHTIDLTDSEMNKLFERTKRQLRENAEDMGNGCFKIYHKCDNACIGSIRNGTYDHDVYRDEALNNRFQIKGVELKSGYKDWILWISFAISCFLLCVALLGFIMWACQKGNIRCNICI

SEQ ID NO: 1312 - protein, 566 aa, Artificial Sequence; identical to SEQ ID NO: 1311
  derived and/or modified protein sequence (wt) from hemagglutinin__InfluenzaA__ABI92698

SEQ ID NO: 1313 - protein, 566 aa, Artificial Sequence; identical to SEQ ID NO: 516
  derived and/or modified protein sequence (wt) from hemagglutinin__InfluenzaA__ABI92709

SEQ ID NO: 1314 - protein, 566 aa, Artificial Sequence
  derived and/or modified protein sequence (wt) from hemagglutinin__InfluenzaA__ABI92720
MKTIIALSYILCLVFAQKLPGNDNSTATLCLGHHAVPNGTIVKTITNDQIEVTNATELVQSSSTGGICDSPHQILDGENCTLIDALLGDPQCDGFQNKKWDLFVERSKAYSNCYPYDVPDHASLRSLVASSGTLEFNNESFDWTGVTQNGTSSACKRRSNKSFFSRLNWLTHLKYKYPALNVTMPNNEKFDKLYIWGVHHPGTESDQISLYAQASGRITVSTKRSQQTVIPNIGSRPRVRDVSSRISIYWTIVKPGDILLINSTGNLIAPRGYFKIRSGKSSIMRSDAPIGKCNSECITPNGSIPNDKPFQNVNRITYGACPRYVKQNTLKLATGMRNVPEKQTRGIFGAIAGFIENGWEGMVDGWYGFRHQNSEGTGQAADLKSTQAAINQINGKLNRLIGKTNEKFHQIEKEFSEVEGRIQDLEKYVEDTKIDLWSYNAELLVALENQHTIDLTDSEMNKLFERTKKQLRENAEDMGNGCFKIYHKCDNACIGSIRNGTYDHDVYRDEALNNRFQIKGVELKSGYKDWILWISFAISCFLLCVALLGFIMWACQKGNIRCNICI

SEQ ID NO: 1315 - protein, 566 aa, Artificial Sequence
  derived and/or modified protein sequence (wt) from hemagglutinin__InfluenzaA__ABI92731
MKTIIALSYILCLVFAQKLPGNDNSTATLCLGHHAVPNGTIVKTITNDQIEVTNATELVQSSSTGGICDSPHQILDGENCTLIDALLGDPQCDGFQNKKWDLFVERSKAYSNCYPYDVPDYASLRSLVASSGTLEFNNESFDWTGVTQNGTSSACKRRSNKSFFSRLNWLTHLKYKYPALNVTMPNNEKFDKLYIWGVHHPGTDSDQISLYAQASGRITVSTKRSQQTVIPNIGSRPRVRDVSSRISIYWTIVKPGDILLINSTGNLIAPRGYFKIRSGKSSIMRSDAPIGKCNSECITPNGSIPNDKPFQNVNRITYGACPRYVKQNTLKLATGMRNVPEKQTRGIFGAIAGFIENGWEGMVDGWYGFRHQNSEGTGQAADLKSTQAAINQINGKLNRLIGKTNEKFHQIEKEFSEVEGRIQDLEKYVEDTKIDLWSYNAELLVALENQHTIDLTDSEMNKLFERTKRQLRENAEDMGNGCFKIYHKCDNACIGSIRNGTYDHDVYRDEALNNRFQIKGVELKSGYKDWILWISFAISCFLLCVALLGFIMWACQKGNIRCNICI

SEQ ID NO: 1316 - protein, 566 aa, Artificial Sequence
  derived and/or modified protein sequence (wt) from hemagglutinin__InfluenzaA__ABI92742
MKTIIALSYILCLVFSQKLPGNDNSTATLCLGHHAVPNGTIVKTITNDQIEVTNATELVQSSSTGGICDSPHQILDGENCTLIDALLGDPQCDGFQNKKWDLFVERSKAYSNCYPYDVPDHASLRSLVASSGTLEFNNESFDWTGVTQNGTSSACKRRSNKSFFSRLNWLTHLKYKYPALNVTMPNNEKFDKLYIWGVHHPGTDSDQISLYAQASGRITVSTKRSQQTVIPNIGSRPRVRDVSSRISIYWTIVKPGDILLINSTGNLIAPRGYFKIRSGKSSIMRSDAPIGKCNSECITPNGSIPNDKPFQNVNRITYGACPRYVKQNTLKLATGMRNVPEKQTRGIFGAIAGFIENGWEGMVDGWYGFRHQNSEGTGQAADLKSTQAAINQINGKLNRLIGKTNEKFHQIEKEFSEVEGRIQDLEKYVEDTKIDLWSYNAELLVALENQHTIDLTDSEMNKLFERTKKQLRENAEDMGNGCFKIYHKCDNACIGSIRNGTYDHDVYRDEALNNRFQIKGVELKSGYKDWILWISFAISCFLLCVALLGFIMWACQKGNIRCNICI

SEQ ID NO: 1317 - protein, 566 aa, Artificial Sequence
  derived and/or modified protein sequence (wt) from hemagglutinin__InfluenzaA__ABI92753
MKTIIALSYILCLVFAQKLPGNDNSTATLCLGHHAVPNGTIVKTITNDQIEVTNATELVQSSSTGGICDSPHQILDGENCTLIDALLGDPQCDGFQNKKWDLFVERSKAYSNCYPYDVPDYAYLRSLVASSGTLEFNNESFDWTGVTQNGTSSACKRRSNKSFFSRLNWLTHLKYKYPALNVTMPNNEKFDKLYIWGVHHPGTDSDQISLYAQASGRITVSTKRSQQTVIPNIGSRPRVRDVSSRISIYWTIVKPGDILLINSTGNLIAPRGYFKIRSGKSSIMRSDAPIGKCNSECITPNGSIPNDKPFQNVNRITYGACPRYVKQNTLKLATGMRNVPEKQTRGIFGAIAGFIENGWEGMVDGWYGFRHQNSEGTGQAADLKSTQAAINQINGKLNRLIGKTNEKFHQIEKEFSEVEGRIQDLEKYVEDTKIDLWSYNAELLVALENQHTIDLTDSEMNKLFERTKRQLRENAEDMGNGCFKIYHKCDNACIGSIRNGTYDHDVYRDEALNNRFQIKGVELKSGYKDWILWISFAISCFLLCVALLGFIMWACQKGNIRCNICI

SEQ ID NO: 1318 - protein, 566 aa, Artificial Sequence
  derived and/or modified protein sequence (wt) from hemagglutinin__InfluenzaA__ABI92764
MKTIIALSYILCLVFAQKLPGNDNSTATLCLGHHAVPNGTIVKTITNDQIEVTNATELVQSSSTGEICDSPHQILDGENCTLIDALLGDPQCDGFQNKKWDLFVERSKAYSNCYPYDVPDYASLRSLVASSGTLEFNNESFDWTGVTQNGTSSACKRGSNKSFFSRLNWLTHLKYKYPALNVTMPNNEKFDKLYIWGVHHPGTDSDQISLYAQASGRITVSTKRSQQTVIPNIGSRPRVRDVSSRISIYWTIVKPGDILLINSTGNLIAPRGYFKIRSGKSSIMRSDAPIGKCNSECITPNGSIPNDKPFQNVNRITYGACPRYVKQNTLKLATGMRNVPEKQTRGIFGAIAGFIENGWEGMVDGWYGFRHQNSEGTGQAADLKSTQAAINQINGKLNRLIGKTNEKFHQIEKEFSEVEGRIQDLEKYVEDTKIDLWSYNAELLVALENQHTIDLTDSEMNKLFERTKRQLRENAEDMGNGCFKIYHKCDNACIGSIRNGTYDHDVYRDEALNNRFQIKGVELKSGYKDWILWISFAISCFLLCVALLGFIMWACQKGNIRCNICI

SEQ ID NO: 1319 - protein, 566 aa, Artificial Sequence; identical to SEQ ID NO: 1311
  derived and/or modified protein sequence (wt) from hemagglutinin__InfluenzaA__ABI92775

SEQ ID NO: 1320 - protein, 566 aa, Artificial Sequence; identical to SEQ ID NO: 243
  derived and/or modified protein sequence (wt) from hemagglutinin__InfluenzaA__ABI92786

SEQ ID NO: 1321 - protein, 566 aa, Artificial Sequence
  derived and/or modified protein sequence (wt) from hemagglutinin__InfluenzaA__ABI92797
MKTIIALSYILCLVFAQKLPGNDNSTATLCLGHHAVPNGTIVKTITNDQIEVTNATELVQSSSTGGICDSPHQILDGENCTLIDALLGDPQCDGFQNKKWDLFVERSKAYSNCYPYDVPDYASLRSLVASSGTLEFNNESFNWTGVTQNGTSSACKRRSNNSFFSRLNWLTHLKFKYPALNVTMPNNEKFDKLYIWGVHHPGTDNDQISLYAQASGRITVSTKRSQQTVISNIGSRPRVRDIPSRISIYWTIVKPGDILLINSTGNLIAPRGYFKIRSGKSSIMRSDAPIGKCNSECITPNGSIPNDKPFQNVNRITYGACPRYVKQNTLKLATGMRNVPEKQTRGIFGAIAGFIENGWEGMVDGWYGFRHQNSEGIGQAADLKSTQAAINQINGKLNRLIGKTNEKFHQIEKEFSEVEGRIQDLEKYVEDTKIDLWSYNAELLVALENQHTIDLTDSEMNKLFERTKKQLRENAEDMGNGCFKIYHKCDNACIGSIRNGTYDHDVYRDEALNNRFQIKGVELKSGYKDWILWISFAISCFLLCVALLGFIMWACQKGNIRCNICI

SEQ ID NO: 1322 - protein, 566 aa, Artificial Sequence; identical to SEQ ID NO: 243
  derived and/or modified protein sequence (wt) from hemagglutinin__InfluenzaA__ABI92808

SEQ ID NO: 1323 - protein, 566 aa, Artificial Sequence; identical to SEQ ID NO: 243
  derived and/or modified protein sequence (wt) from hemagglutinin__InfluenzaA__ABI92819

SEQ ID NO: 1324 - protein, 566 aa, Artificial Sequence; identical to SEQ ID NO: 243
  derived and/or modified protein sequence (wt) from hemagglutinin__InfluenzaA__ABI92841

SEQ ID NO: 1325 - protein, 566 aa, Artificial Sequence
  derived and/or modified protein sequence (wt) from hemagglutinin__InfluenzaA__ABI92852
MKTIIALSYILCLVFAQKLPGNDNSTATLCLGHHAVPNGTIVKTITNDQIEVTNATELVQSSSTGGICDSPHQILDGENCTLIDALLGDPQCDGFQNKKWDLFVERSKAYSNCYPYDVPDYASLRSLVASSGTLEFNNESFNWTGVTQNGTSSACKRRSNNSFFSRLNWLTHLKFKYPALNVTMPNNEKFDKLYIWGVHHPGTDNDQISLYAQASGRITVSTKRSQQTVIPNIGYRPRVRDIPSRISIYWTIVKPGDILLINSTGNLIAPRGYFKIRSGKSSIMRSDAPIGKCNSECITPNGSIPNDKPFQNVNRITYGACPRYVKQNTLKLATGMRNVPEKQTRGIFGAIAGFIENGWEGMVDGWYGFRHQNSEGIGQAADLKSTQAAINQINGKLNRLIGKTNEKFHQIEKEFSEVEGRIQDLEKYVEDTKIDLWSYNAELLVALENQHTIDLTDSEMNKLFERTKKQLRENAEDMGNGCFKIYHKCDNACIGSIRNGTYDHDVYRDEALNNRFQIKGVELKSGYKDWILWISFAISCFLLCVALLGFIMWACQKGNIRCNICI

SEQ ID NO: 1326 - protein, 566 aa, Artificial Sequence
  derived and/or modified protein sequence (wt) from hemagglutinin__InfluenzaA__ABI92863
MKTIIALSYILCLVFAQKLPGNDNSTATLCLGHHAVPNGTIVKTITNDQIEVTNATELVQSSSTGGICDSPHQILDGENCTLIDALLGDPQCDGFQNKKWDLFVERSKAHSNCYPYDVPDYASLRSLIASSGTLEFNNESFNWTGVTQNGTSSACKRRSNQSFFSRLNWLTHLKFKYPALNVTMPNNEKFDKLYIWGVHHPGTDSDQISLYAQAPGRITVSTKRSQQTVIPNIGSRPRVRDISSRISIYWTIVKPGDILLINSTGNLIAPRGYFKIRSGKSSIMKSDAPIGRCNSECITPNGSIPNDKPFQNVNRITYGACPRYVKQNTLKLATGMRNVPEKQTRGIFGAIAGFIENGWEGMVDGWYGFRHQNSEGTGQAADLKSTQAAINQINGKLNRLIGKTNEKFHQIEKEFSEVEGRIQDLEKYVEDTKIDLWSYNAELLVALENQHTIDLTDSEMNKLFERTKKQLRENAEDMGNGCFKIYHKCDNACIGSIRNGTYDHDVYRDEALNNRFQIKGVELKSGYKDWILWISFAISCLLLCVALLGFIMWACQKGNIRCNICI

SEQ ID NO: 1327 - protein, 566 aa, Artificial Sequence; identical to SEQ ID NO: 243
  derived and/or modified protein sequence (wt) from hemagglutinin__InfluenzaA__ABI92874

SEQ ID NO: 1328 - protein, 566 aa, Artificial Sequence; identical to SEQ ID NO: 243
  derived and/or modified protein sequence (wt) from hemagglutinin__InfluenzaA__ABI92885

SEQ ID NO: 1329 - protein, 566 aa, Artificial Sequence
  derived and/or modified protein sequence (wt) from hemagglutinin__InfluenzaA__ABI92907
MKTIIALSYILCLVFAQKLPGNDNSTATLCLGHHAVPNGTIVKTITNDQIEVTNATELVQSSSTGGICDSPYQILDGENCTLIDALLGDPQCDGFQNKKWDLFVERSKAYSNCYPYDVPDYVSLRSLVASSGTLEFNNESFNWTGVTQNGTSSACKRRSNNSFFSRLNWLTHLKFKYPALNVTMPNNEKFDKLYIWGVHHPGTDNDQISLYAQASGRITVSTKRSQQTVIPNIGSRPRVRDIPSRISIYWTIVKPGDILLINSTGNLIAPRGYFKIRSGKSSIMRSDAPIGKCNSECITPNGSIPNDKPFQNVNRITYGACPRYVKQNTLKLATGMRNVPEKQTRGIFGAIAGFIENGWEGMVDGWYGFRHQNSEGIGQAADLKSTQAAINQINGKLNRLIGKTNEKFHQIEKEFSEVEGRIQDLEKYVEDTKIDLWSYNAELLVALENQHTIDLTDSEMNKLFERTKKQLRENAEDMGNGCFKIYHKCDNACIGSIRNGTYDHDVYRDEALNNRFQIKGVELKSGYKDWILWISFAISCFLLCVALLGFIMWACQKGNIRCNICI

SEQ ID NO: 1330 - protein, 566 aa, Artificial Sequence; identical to SEQ ID NO: 243
  derived and/or modified protein sequence (wt) from hemagglutinin__InfluenzaA__ABI92918

SEQ ID NO: 1331 - protein, 566 aa, Artificial Sequence; identical to SEQ ID NO: 1329
  derived and/or modified protein sequence (wt) from hemagglutinin__InfluenzaA__ABI92929

SEQ ID NO: 1332 - protein, 566 aa, Artificial Sequence
  derived and/or modified protein sequence (wt) from hemagglutinin__InfluenzaA__ABI92940
MKTIIAFNYILCLVFAQKLPGNDNSTATLCLGHHAVPNGTIVKTITNDQIEVTNATELVQSSSTGGICDSPHQILDGENCTLIDALLGDPQCDGFQNKKWDLFVERSKAYSNCYPYDVPDYASLRSLVASSGTLEFNNEIFNWTGVTQNGTSSACKRRSNNSFFSRLNWLTHLKFKYPALNVTMPNNEKFDKLYIWGVHHPGTDNDQISLYAQASGRITVSTKRSQQTVIPNIGSRPRVRDIPSRISIYWTIVKPGDILLINSTGNLIAPRGYFKIRSGKSSIMRSDAPIGKCNSECITPNGSIPNDKPFQNVNRITYGACPRYVKQNTLKLATGMRNVPEKQTRGIFGAIAGFIENGWEGMVDGWYGFRHQNSEGTGQAADLKSTQAAINQINGKLNRLIGKTNEKFHQIEKEFSEVEGRIQDLEKYVEDTKIDLWSYNAELLVALENQHTIDLTDSEMNKLFERTKKQLRENAEDMGNGCFKIYHKCDNACIGSIRNGTYDHDVYRDEALNNRFQIKGVELKSGYKDWILWISFAISCFLLCVALLGFIMWACQKGNIRCNICI

SEQ ID NO: 1333 - protein, 566 aa, Artificial Sequence
  derived and/or modified protein sequence (wt) from hemagglutinin__InfluenzaA__ABI92951
MKTIIALSYILCLVFAQKLPGNDNSTATLCLGHHAVPNGTIVKTITNDQIEVTNATELVQSSSTGGICDSPHQILDGENCTLIDALLGDPQCDGFQNKKWDLFVERSKAYSNCYPYDVPDYASLRSLIASSGTLEFNNESFNWTGVTQNGTSSACKRRSNSSFFSRLNWLTHLKFKYPALNVTMPNNEEFDKLYIWGVHHPGTYNDQISLYAQASGRITVSTKRSQQTVIPNIGSRPRVRDIPSRISIYWTIVKPGDILLINSTGNLIAPRGYFKIRSGKSSIMRSDAPIGKCNSECITPNGSIPNDKPFQNVNRITYGACPRYVKQNTLKLATGMRNVPEKQTRGIFGAIAGFIENGWEGMVDGWYGFRHQNSEGIGQAADLKSTQAAIDQINGKLNRLIGKTNEKFHQIEKEFSEVEGRIQDLEKYVEDTKIDLWSYNAELLVALENQHTIDLTDSEMNKLFERTKKQLRENAEDMGNGCFKIYHKCDNSCIGSIRNGTYDHDVYRDEALNNRFQIKGVELKSGYKDWILWISFAISCFLLCVALLGFIMWACQKGNIRCNICI

SEQ ID NO: 1334 - protein, 566 aa, Artificial Sequence
  derived and/or modified protein sequence (wt) from hemagglutinin__InfluenzaA__ABI92962
MKTIIALSYILCLVFAQKLPGNDNSTATLCLGHHAVPNGTIVKTITNDQIEVTNATELVQSSSTGGICDSPHQILDGENCTLIDALLGDPQCDGFQNKKWDLFVERNKAYSNCYPYDVPDYASLRSLIASSGTLEFNNESFNWTGVTQNGTSSACKRRSNSSFFSRLNWLTHLKFKYPALNVTMPNNEEFDKLYIWGVHHPGTYNDQISLYAQASGRITVSTKRSQQTVIPNIGSRPRVRDIPSRISIYWTIVKPGDILLINSTGNLIAPRGYFKIRSGKSSIMRSDAPIGKCNSECITPNGSIPNDKPFQNVNRITYGACPRYVKQNTLKLATGMRNVPEKQTRGIFGAIAGFIENGWEGMVDGWYGFRHQNSEGIGQAADLKSTQAAIDQINGKLNRLIGKTNEKFHQIEKEFSEVEGRIQDLEKYVEDTKIDLWSYNAELLVALENQHTIDLTDSEMNKLFERTKKQLRENAEDMGNGCFKIYHKCDNACIGSIRNGTYDHDVYRDEALNNRFQIKGVELKSGYKDWILWISFAISCFLLCVALLGFIMWACQKGNIRCNICI

SEQ ID NO: 1335 - protein, 566 aa, Artificial Sequence; identical to SEQ ID NO: 633
  derived and/or modified protein sequence (wt) from hemagglutinin__InfluenzaA__ABI92973

SEQ ID NO: 1336 - protein, 566 aa, Artificial Sequence; identical to SEQ ID NO: 633
  derived and/or modified protein sequence (wt) from hemagglutinin__InfluenzaA__ABI92984

SEQ ID NO: 1337 - protein, 566 aa, Artificial Sequence
  derived and/or modified protein sequence (wt) from hemagglutinin__InfluenzaA__ABI92995
MKTIIALSYILCLVFAQKLPGNDNSTATLCLGHHAVPNGTIVKTITNDQIEVTNATELVQSSSTGGICDSPHQILDGENCTLIDALLGDPQCDGFQNKKWDLFVERSKAYSNCYPYDVPDYASLRSLIASSGTLEFNNESFNWTGVTQNGTSSACKRRSNSSFFSRLNWLTHLKFKYPALNVTMPNNEEFDKLYIWGVHHPGTYNDQISLYAQASGRITVSTKRSQQTVIPNIGSRPRIRDIPSRISIYWTIVKPGDILLINSTGNLIAPRGYFKIRSGKSSIMRSDAPIGKCNSECITPNGSIPNDKPFQNVNRITYGACPKYVKQNTLKLATGMRNVPEKQTRGIFGAIAGFIENGWEGMVDGWYGFRHQNSEGIGQAADLKSTQAAIDQINGKLNRLIGKTNEKFHQIEKEFSEVEGRIQDLEKYVEDTKIDLWSYNAELLVALENQHTIDLTDSEMNKLFERTKKQLRENAEDMGNGCFKIYHKCDNACIGSIRNGTYDHDVYRDEALNNRFQIKGVELKSGYKDWILWISFAISCFLLCVALLGFIMWACQKGNIRCNICI

SEQ ID NO: 1338 - protein, 566 aa, Artificial Sequence; identical to SEQ ID NO: 633
  derived and/or modified protein sequence (wt) from hemagglutinin__InfluenzaA__ABI93006

SEQ ID NO: 1339 - protein, 566 aa, Artificial Sequence; identical to SEQ ID NO: 633
  derived and/or modified protein sequence (wt) from hemagglutinin__InfluenzaA__ABI93017

SEQ ID NO: 1340 - protein, 565 aa, Artificial Sequence; identical to SEQ ID NO: 1232
  derived and/or modified protein sequence (wt) from hemagglutinin__InfluenzaA__ABI93028

SEQ ID NO: 1341 - protein, 566 aa, Artificial Sequence; identical to SEQ ID NO: 966
  derived and/or modified protein sequence (wt) from hemagglutinin__InfluenzaA__ABI93039

SEQ ID NO: 1342 - protein, 566 aa, Artificial Sequence
  derived and/or modified protein sequence (wt) from hemagglutinin__InfluenzaA__ABI93061
MKTIIALSYILCLVFAQKLPGNDNSTATLCLGHHAVPNGTLVKTITNDQIEVTNATELVQSSSTGRICDSPHQILDGENCTLIDALLGDPHCDGFQNKEWDLFVERSKAYSNCYPYDVPDYASLRSLVASSGTLEFNNESFNWTGVAQNGTSSACKRRSNKSFFSRLNWLHQLKYKYPALNVTMPNNEKFDKLYIWGVHHPSTDSDQISLYAQASGRVTVSTKRSQQTVIPNIGSRPWVRGVSSRISIYWTIVKPGDILLINSTGNLIAPRGYFKIRSGKSSIMRSDASIGKCNSECITPNGSIPNDKPFQNVNRITYGACPRYVKQNTLKLATGMRNVPEKQTRGIFGAIAGFIENGWEGMVDGWYGFRHQNSEGTGQAADLKSTQAAINQINGKLNRLIEKTNEKFHQIEKEFSEVEGRIQDLEKYVEDTKIDLWSYNAELLVALENQHTIDLTDSEMNKLFERTKKQLRENAEDMGNGCFKIYHKCDNACIGSIRNGTYDHDVYRDEALNNRFQIKGVELKSGYKDWILWISFAISCFLLCVVLLGFIMWACQKGNIRCNICI

SEQ ID NO: 1343 - protein, 566 aa, Artificial Sequence; identical to SEQ ID NO: 650
  derived and/or modified protein sequence (wt) from hemagglutinin__InfluenzaA__ABI93072

SEQ ID NO: 1344 - protein, 566 aa, Artificial Sequence; identical to SEQ ID NO: 650
  derived and/or modified protein sequence (wt) from hemagglutinin__InfluenzaA__ABI93083

SEQ ID NO: 1345 - protein, 566 aa, Artificial Sequence; identical to SEQ ID NO: 650
  derived and/or modified protein sequence (wt) from hemagglutinin__InfluenzaA__ABI93094

SEQ ID NO: 1346 - protein, 566 aa, Artificial Sequence; identical to SEQ ID NO: 650
  derived and/or modified protein sequence (wt) from hemagglutinin__InfluenzaA__ABI93105

SEQ ID NO: 1347 - protein, 566 aa, Artificial Sequence
  derived and/or modified protein sequence (wt) from hemagglutinin__InfluenzaA__ABI93116
MKTIIALSYILCLVFAQKLPGNDNSTATLCLGHHAVPNGTLVKTITNDQIEVTNATELVQSSSTGGICDSPHQILDGENCTLIDALLGDPHCDGFQNKEWDLFVERSKAYSNCYPYDVPDYASLRSLVASSGTLEFNNESFNWTGVAQNGTSSACKRRSNKSFFSRLNWLHQLKYKYPALNVTMPNNEKFDKLYIWGVHHPSTDSDQISLYAQAPGRVTVSTKRSQQTVIPNIGSRPWVRGVSSRISIYWTIVKPGDILLINCTGNLIAPRGYFKMRSGKSSIMRSDASIGKCNSECITPNGSIPNDKPFQNVNRITYGACPRYVKQNTLKLATGMRNVPEKQTRGIFGAIAGFIENGWEGMVDGWYGFRHQNSEGTGQAADLKSTQAAINQINGKLNRLIEKTNEKFHQIEKEFSEVEGRIQDLEKYVEDTKIDLWSYNAELLVALENQHTIDLTDSEMNKLFERTKKQLRENAEDMGNGCFKIYHKCDNACIGSIRNGTYDHGVYRDEALNNRFQIKGVELKSGYKDWILWISFAISCFLLCVVLLGFIMWACQKGNIRCNICI

SEQ ID NO: 1348 - protein, 562 aa, Artificial Sequence
  derived and/or modified protein sequence (wt) from hemagglutinin__InfluenzaA__ABI94581
MNTQILVFALVASIPTNADKICLGHHAVSNGTKVNTLTERGVEVVNATETVERTNVPRICSKGKRTVDLGQCGLLGTITGPPQCDQFLEFSADLIIERREGSDVCYPGKFVNEEALRQILRESGGIDKETMGFTYSGIRTNGTTSACRRSGSSFYAEMKWLLSNTDNAAFPQMTKSYKNTRKDPALIIWGIHHSGSTTEQTKLYGSGNKLITVGSSNYQQSFVPSPGARPQVNGQSGRIDFHWLILNPNDTVTFSFNGAFIAPDRASFLRGKSMGIQSEVQVDANCEGDCYHSGGTIISNLPFQNINSRAVGKCPRYVKQESLLLATGMKNVPEIPKRRRRGLFGAIAGFIENGWEGLIDGWYGFRHQNAQGEGTAADYKSTQSAIDQITGKLNRLIEKTNQQFELIDNEFTEVEKQIGNVINWTRDSMTEVWSYNAELLVAMENQHTIDLADSEMNKLYERVKRQLRENAEEDGTGCFEIFHKCDDDCMASIRNNTYDHSKYREEAIQNRIQIDPVKLSSGYKDVILWFSFGASCFILLAIAMGLVFICVKNGNMRCTICI

SEQ ID NO: 1349 - protein, 566 aa, Artificial Sequence; identical to SEQ ID NO: 766
  derived and/or modified protein sequence (wt) from hemagglutinin__InfluenzaA__ABI95228

SEQ ID NO: 1350 - protein, 566 aa, Artificial Sequence
  derived and/or modified protein sequence (wt) from hemagglutinin__InfluenzaA__ABI95239
MKTIIALSYILCLVFAQKLPGNDNSTATLCLGHHAVPNGTIVKTITNDQIEVTNATELVQSSSTGGICDSPHQILDGENCTLIDALLGDPQCDGFQNKKWDLFVERSKAYSNCYPYDVPDYASLRSLVASSGTLEFNNESFNWTGVTQNGTSSACKRRSNNSFFSRLNWLTHLKFKYPALNVTMPNNEKFDKLYIWGVHHPGTDNDQISLYAQASGRITVSTKRSQQTVIPNIGSRPRVRDIPSRISIYWTIVKPGDILLINSTGNLIAPRGYFKIRSGKSSIMRSDAPIGKCNSECITPNGSIPNDKPFQNVNRITYGACPRYVKQNTLKLATGMRNVPEKQTRGIFGAIAGFIENGWEGMVNGWYGFRHQNSEGIGQAADLKSTQAAINQINGKLNRLIGKTNEKFHQIEKEFSEVEGRIQDLEKYVEDTKIDLWSYNAELLVALENQHTIDLTDSEMNKLFERTKKQLRENAEDMGNGCFKIYHKCDNACIGSIRNGTYDHDVYRDEALNNRFQIKGVELKSGYKDWILWISFAISCFLLCVALLGFIMWACQKGNIRCNICI

SEQ ID NO: 1351 - protein, 565 aa, Artificial Sequence
  derived and/or modified protein sequence (wt) from hemagglutinin__InfluenzaA__ABI95250
MKAKLLVLLCTFTATYADTICVGYHANNSTDTVDTVLEKNVTVTHSVNLLEDSHNGKLCLLKGIAPLQLGNCSVAGWILGNPECESLISKESWSYIVETPNPENGTCYPGYFADYEELREQLSSVSSFERFEIFPKESSWPNHTVTGVSASCSHNGKSSFYRNLLWLTEKNGLYPNLSKSYVNNKEKEVLVLWGVHHPSNIGDQRAIYHTENAYVSVVSSHYSRRFTPEIAKRPKVRGQEGRINYYWTLLEPGDTIIFEANGNLIAPWYAFALSRGFGSGIITSNAPMNECDAKCQTPQGAINSSLPFQNVHPVTIGECPKYVRSAKLRMVTGLRNIPSIQSRGLFGAIAGFIEGGWTGMIDGWYGYHHQNEQGSGYAADQKSTQNAINGITNKVNSVIEKMNTQFTAVGKEFNKLERRMENLNKKVDDGFLDIWTYNAELLVLLENERTLDFHDSNVKNLYEKVKSQLKNNAKEIGNGCFEFYHKCNNECMESVKNGTYDYPKYSEESKLNREKIDGVKLESMGVYQILAIYSTVASSLVLLVSLGAISFWMCSNGSLQCRICI

SEQ ID NO: 1352 - protein, 565 aa, Artificial Sequence
  derived and/or modified protein sequence (wt) from hemagglutinin__InfluenzaA__ABI95261
MKAKLLVLLCTFTATYADTICIGYHANNSTDTVDTVLEKNVTVTHSVNLLEDSHNGKLCLLKGIAPLQLGNCSVAGWILGNPECESLISKESWSYIVETPNPENGTCYPGYFADYEELREQLSSVSSFERFEIFPKESSWPNHTVTGVSASCSHNGKSSFYRNLLWLTEKNGLYPNLSKSYVNNKEKEVLVLWGVHHPSNIGVQRAIYHTENAYVSVVSSHYSRRFTPEIAKRPKVRDQEGRINYYWTLLEPGDTIIFEANGNLIAPWYAFALSRGFESGIITSNAPMNECDAKCQTPQGAINSSLPFQNVHPVTIGECPKYVRSAKLRMVTGLRNIPSIQSRGLFGAIAGFIEGGWTGMIDGWYGYHHQNEQGSGYAADQKSTQNAINGITNKVNSVIEKMNTQFTAVGKEFNKLERRMENLNKKVDDGFLDIWTYNAELLVLLENERTLDFHDSNVKNLYEKVKSQLKNNAKEIGNGCFEFYHKCNNECMESVKNGTYDYPKYSEESKLNREKIDGVKLESMGVYQILAIYSTVASSLVLLVSLGAISFWMCSNGSLQCRICI

SEQ ID NO: 1353 - protein, 565 aa, Artificial Sequence; identical to SEQ ID NO: 1232
  derived and/or modified protein sequence (wt) from hemagglutinin__InfluenzaA__ABI95272

SEQ ID NO: 1354 - protein, 565 aa, Artificial Sequence; identical to SEQ ID NO: 1232
  derived and/or modified protein sequence (wt) from hemagglutinin__InfluenzaA__ABI95283

SEQ ID NO: 1355 - protein, 565 aa, Artificial Sequence; identical to SEQ ID NO: 296
  derived and/or modified protein sequence (wt) from hemagglutinin__InfluenzaA__ABI95294

SEQ ID NO: 1356 - protein, 565 aa, Artificial Sequence
  derived and/or modified protein sequence (wt) from hemagglutinin__InfluenzaA__ABI96104
MKVKLLILLCTFTATYADTICIGYHANNSTDTVDTVLEKNVTVTHSVNLLEDSHNGKLCLLKGIAPLQLGNCSVAGWILGNPECELLISKESWSYIVETPNPENGACYPGYFADYEELREQLSSVSSFERFEIFPKESSWPNHTVTGVSASCSHNGKSSFYRNLLWLTGKNGLYPNLIKSYANNKEKEVLILWGVHHPPNIGDQRTLYHTENAYVSVVSSHYSRRFTPEITKRPKVRDQEGRINYYWTLLEPGDTIIFEANGNLIAPWYAFALSRGFGSGIITSNAPMDECDAKCQTPQGAINSSLPFQNVHPVTIGECPKYVRSAKLRMVTGLRNIPSIQSRGLFGAIAGFIEGGWTGMVDGWYGYHHQNEQGSGYAADQKSTQNAINGITNKVNSVIEKMNTQFTAVGKEFNKLERRMENLNKKVDDGFLDIWTYNAELLVLLENERTLDFHDSNVKNLYEKVKSQLKNNAKEIGNGCFEFYHKCNNECMESVKNGTYDYPKYSEESKLNREKIDGVKLDSMGVYQILAIYSTVASSLVLLVSLGAISFWMCSNGSLQCRICI

SEQ ID NO: 1357 - protein, 566 aa, Artificial Sequence; identical to SEQ ID NO: 650
  derived and/or modified protein sequence (wt) from hemagglutinin__InfluenzaA__ABJ09107

SEQ ID NO: 1358 - protein, 566 aa, Artificial Sequence
  derived and/or modified protein sequence (wt) from hemagglutinin__InfluenzaA__ABJ09140
MKTIIALSYILCLVFAQKLPGNDNSTATLCLGHHAVPNGTLVKTITNDQIEVTNATELVQSSSTGRICDSPHRILDGKNCTLIDALLGDPHCDGFQNKEWDLFVERSKAYSNCYPYDVPDYASLRSLVASSGTLEFINEDFNWTGVAQDGKSYSCKRGSVNSFFSRLNWLHKLEYKYPALNVTMPNNGKFDKLYIWGVHHPSTDSDQTSLYVRASGRVTVSTKRSQQTVIPNIGFRPWVRGLSSRISIYWTIVKPGDILLINSTGNLIAPRGYFKIRNGKSSIMRSDAPIGNCSSECITPNGSIPNDKPFQNVNRITYGACPRYVKQNTLKLATGMRNVPEKQTRGIFGAIAGFIENGWEGMVDGWYGFRHQNSEGTGQAADLKSTQAAIDQINGKLNRLIEKTNEKFHQIEKEFSEVEGRIQDLEKYVEDTKIDLWSYNAGLLVALENQHTIDLTDSEMNKLFERTRKQLRENAEDMGNGCFKIYHKCDNACIGSIRNGTYDHDVYRDEALNNRFQIKGVELKSGYKDWILWISFAISCFLLCVVLLGFIMWACQKGNIRCNICI

SEQ ID NO: 1359 - protein, 565 aa, Artificial Sequence
  derived and/or modified protein sequence (wt) from hemagglutinin__InfluenzaA__ABJ09151
MKAKLLVLLCTFTATYADTICIGYHANNSTDTVDTVLEKNVTVTHSVNLLEDSHNGKLCLLKGIAPLQLGNCSVAGWILGNPECELLISKESWSYIVETPNPENGTCYPGYFADYEELREQLSSVSSFERFEIFPKGSSWPNHTVTGVSASCSHNGKSSFYRNLLWLTGKNGLYPNLSMSYVNNKGKEVLVLWGVHHPPNIGDQRALYHTENAYVSVVSSHYSRRFTPEIAKRPKVRDQEGRINYYWTLLEPGDTIIFEANGNLIAPWYAFALSRGFGSGIITSNAPMGECDAKCQTPQGAINSSLPFQNVHPVTIGECPKYVRSAKLRMVTGLRNIPSIQSRGLFGAIAGFIEGGWTGMVDGWYGYHHQNEQGSGYAADQKSTQNAINGITNKVNSVIEKMNTQFTAVGKEFNKLERRMENLNKKVDDGFLDIWTYNAELLVLLENERTLDFHDSNVKNLYEKVKSQLKNNAKEIGNGCFEFYHKCNNECMESVKNGTYDYPKYSKESKLNREKIDGVKLESMGVYQILAIYSTVASSLVLLVSLGAISFWMCSNGSLQCRICI

SEQ ID NO: 1360 - protein, 566 aa, Artificial Sequence
  derived and/or modified protein sequence (wt) from hemagglutinin__InfluenzaA__ABJ09162
MKTIIALSYILCLVFAQKLPGNDNSTATLCLGHHAVPNGTIVKTITNDQIEVTNATELVQSSSTGGICDSPHQILDGENCTLIDALLGDPQCDGFQNKKWDLFVERSKAYSNCYPYDVPDYASLRSLVASSGTLEFNNESFNWTGVTQNGTSSACKRRSNNSFFSRLNWLTHLKFKYPALNVTMPNNEKFDKLYIWGVHHPGTNNDQISLYAQASGRITVSTKRSQQTVIPNIGSRPRVRDIPSRISIYWTIVKPGDILLINSTGNLIAPRGYFKIRSGKSSIMRSDAPIGKCNSECITPNGSIPNDKPFQNVNRITYGACPRYVKQNTLKLATGMRNVPEKQTRGIFGAIAGFIENGWEGMVDGWYGFRHQNSEGIGQAADLKSTQAAINQINGKLNRLIGKTNEKFHQIEKEFSEVEGRIQDLEKYVEDTKIDLWSYNAEILVALENQHTIDLTDSEMNKLFERTKKQLRENAEDMGNGCFKIYHKCDNACIGSIRNGTYDHDVYRDEALNNRFQIKGVELKSGYKDWILWISFAISCFLLCVALLGFIMWACQKGNIRCNICI

SEQ ID NO: 1361 - protein, 566 aa, Artificial Sequence; identical to SEQ ID NO: 243
  derived and/or modified protein sequence (wt) from hemagglutinin__InfluenzaA__ABJ09173

SEQ ID NO: 1362 - protein, 565 aa, Artificial Sequence
  derived and/or modified protein sequence (wt) from hemagglutinin__InfluenzaA__ABJ09184
MKVKLLVLLCTFTATYADTICIGYHANNSTDTVDTVLEKNVTVTHSVNLLEDSHNGKLCLLKGIAPLQLGNCSVAGWILGNPECELLISKESWSYIVETPNPENGTCYPGYFADYEELREQLSSVSSFERFEIFPKESSWPNHTVTGVSASCSHNGKSSFYRNLLWLTGKNGLYPNLSKSYANNKEKEVLVLWGVHHPPNIGDQRALYHTENAYVSVVSSHYSRRFTPEIAKRPKVRDQEGRINYYWTLLEAGDTIIFEANGNLIAPRFAFALSRGFGSGIITSNAPMDECDAKCQTPQGAINSSLPFQNVHPVTIGECPKYVRSAKLRMATGLRNIPSIQSRGLFGAIAGFIEGGWTGMVDGWYGYHHQNEQGSGYAADQKSTQNAINGITNKVNSVIEKMNTQFTAVGKEFSKLERRMENLNKKVDDGFLDIWTYNAELLVLLENERTLDFHDSNVKNLYEKVKSQLKNNAKEIGNGCFEFYHKCNDECMESVKNGTYDYPKYSEESKLNREKIDGVKLESMGVYQILAIYSTVASSLVLLVSLGAISFWMCSNGSLQCRICI

SEQ ID NO: 1363 - protein, 566 aa, Artificial Sequence; identical to SEQ ID NO: 633
  derived and/or modified protein sequence (wt) from hemagglutinin__InfluenzaA__ABJ09195

SEQ ID NO: 1364 - protein, 566 aa, Artificial Sequence; identical to SEQ ID NO: 633
  derived and/or modified protein sequence (wt) from hemagglutinin__InfluenzaA__ABJ09206

SEQ ID NO: 1365 - protein, 566 aa, Artificial Sequence; identical to SEQ ID NO: 1213
  derived and/or modified protein sequence (wt) from hemagglutinin__InfluenzaA__ABJ09217

SEQ ID NO: 1366 - protein, 566 aa, Artificial Sequence; identical to SEQ ID NO: 650
  derived and/or modified protein sequence (wt) from hemagglutinin__InfluenzaA__ABJ09228

SEQ ID NO: 1367 - protein, 566 aa, Artificial Sequence
  derived and/or modified protein sequence (wt) from hemagglutinin__InfluenzaA__ABJ09239
MKTIIALSYILCLVFAQKLPGNDNSTATLCLGHHAVPNGTLVKTITNDQIEVTNATELVQSSSTGGICDSPHQILDGENCTLIDALLGDPHCDGFQNKEWDLFVERSKAYSNCYPYDVPDYASLRSLVASSGTMEFNNESFNWTGVAQNGTSSACKRRSNKSFFSRLNWLHQLKYKYPALNVTMPNNEKFDKLYIWGVHHPSTDSDQISLYAQAPGRVTVSTKRSQQTVIPNIGSRPWVRGVSSRISIYWTIVKPGDILLINCTGNLIAPRGYFKIRSGKSSIMRSDASIGKCNSECITPNGSIPNDKPFQNVNRITYGACPRYVKQNTLKLATGMRNVPEKQTRGIFGAIAGFIENGWEGMVDGWYGFRHQNSEGTGQAADLKSTQAAINQINGKLNRLIEKTNEKFHQIEKEFSEVEGRIQDLEKYVEDTKIDLWSYNAELLVALENQHTIDLTDSEMNKLFERTKKQLRENAEDMGNGCFKIYHKCDNACIGSIRNGTYDHDVYRDEALNNRFQIKGVELKSGYKDWILWISFAISCFLLCVVLLGFIMWACQKGNIRCNICI

SEQ ID NO: 1368 - protein, 566 aa, Artificial Sequence
  derived and/or modified protein sequence (wt) from hemagglutinin__InfluenzaA__ABJ09250
MKTIIALSYILCLVFAQKLPGNDNSTATLCLGHHAVPNGTLVKTITNDQIEVTNATELVQSSSTGRICDSPHQILDGENCTLIDALLGDPHCDGFQNKEWDLFVERSKAYSNCYPYDVPDYASLRSLVASSGTLEFNNESFNWTGVAQNGTSSACKRRSNKSFFSRLNWLHQLKYKYPALNVTMPNNEKFDKLYIWGIHHPSTDSDQISLYAQASGRVTVSTKRSQQTVIPNIGSRPWVRGVSSRISIYWTIVKPGDILLINSTGNLIAPRGYFKIRSGKSSIMRSDAPIGKCNSECITPNGSIPNDKPFQNVNRITYGACPRYVKQNTLKLATGMRNVPEKQTRGIFGAIAGFIENGWEGMVDGWYGFRHQNSEGTGQAADLKSTQAAINQINGKLNRLIEKTNEKFHQIEKEFSEVEGRIQDLEKYVEDTKIDLWSYNAELLVALENQHTIDLTDSEMNKLFERTKKQLRENAEDMGNGCFKIYHKCDNACIGSIRNETYDHDVYRDEALNNRFQIKGVELKSGYKDWILWISFAISCFLLCVVLLGFIMWACQKGNIRCNICI

SEQ ID NO: 1369 - protein, 566 aa, Artificial Sequence
  derived and/or modified protein sequence (wt) from hemagglutinin__InfluenzaA__ABJ09261
MKTIIALSYILCLVFAQKLPGNDNSTATLCLGHHAVPNGTLVKTITNDQIEVTNATELVQSSSTGKICDSPHQILDGENCTLIDALLGDPHCDGFQNKEWDLFVERSKAYSNCYPYDVPDYASLRSLVASSGTLEFNNESFNWTGVAQNGTSSACKRRSIKSFFSRLNWLHQLKYKYPALNVTMPNNEKFDKLYIWGVHHPSTDSDQTSLYAQASGRVTVSTKRSQQTVIPNIGSRPWVRGVSSRISIYWTIVKPGDILLINSTGNLIAPRGYFKIRSGKSSIMRSDAPIGKCNSECITPNGSIPNDKPFQNVNRITYGACPRYVKQNTLKLATGMRNVPEKQTRGIFGAIAGFIENGWEGMVDGWYGFRHQNSEGTGQAADLKSTQAAINQINGKLNRLIEKTNEKYHQIEKEFSEVEGRIQDLEKYVEDTKIDLWSYNAELLVALENQHTIDLTDSEMNKLFERTRKQLRENAEDMGNGCFKIYHKCDNACIGSIRNGTYDHDVYRDEALNNRFQIKGVELKSGYKDWILWISFAISCFLLCVVLLGFIMWACQKGNIRCNICI

SEQ ID NO: 1370 - protein, 566 aa, Artificial Sequence
  derived and/or modified protein sequence (wt) from hemagglutinin__InfluenzaA__ABJ09272
MKTIIALSYILCLVFAQKLPGNDNSTATLCLGHHAVPNGTLVKTITNDQIEVTNATELVQSSSTGRICNSPHQILDGENCTLIDALLGDPHCDGFQNKEWDLFVERRKAYSNCYPYDVPDYASLRSLVASSGTLEFNNESFNWTGVAQNGTSSACKRRSIKSFFSRLNWLHQLKYKYPALNVTMPNNEKFDKLYIWGVHHPSTDSDQISLYAQASGRVTVSTKRSQQTVIPNIGSRPWVRGVSSRISIYWTIVKPGDILLINSTGNLIAPRGYFKIRSGKSSIMRSDAPIGKCNSECITPNGSIPNDKPFQNVNRITYGACPRYVKQNTLKLATGMRNVPEKQTRGIFGAIAGFIENGWEGMVDGWYGFRHQNSEGTGQAADLKSTQAAINQINGKLNRLIEKTNEKFHQIEKEFSEVEGRIQDLEKDVEDTKIDLWSYNAELLVALENQHTIDLTDSEMNKLFERTKKQLRENAEDMGNGCFKIYHKCDNACIGSIRNGTYDHDVYRDEALNNRFQIKGVELKSGYKDWILWISFAISCFLLCVVLLGFIMWACQKGNIRCNICI

SEQ ID NO: 1371 - protein, 566 aa, Artificial Sequence; identical to SEQ ID NO: 72
  derived and/or modified protein sequence (wt) from hemagglutinin__InfluenzaA__ABJ09294

SEQ ID NO: 1372 - protein, 566 aa, Artificial Sequence
  derived and/or modified protein sequence (wt) from hemagglutinin__InfluenzaA__ABJ09305
MKTIIALSYILCLVFAQKLPGNDNSTATLCLGHHAVPNGTLVKTITNDQIEVTNATELVQSSSTGRICDSPHQILDGENCTLIDALLGDPHCDGFQNKEWDLFVERSKAYSNCYPYDVPDYASLRSLVASSGTLEFNNESFNWTGVAQNGTSSACKRRSNKSFFSRLNWLHQLKYKYPALNVTMPNNEKFDKLYIWGVHHPSTDSDQISLYAQASGRVTVSTKRSQQTVIPNIGSRPWVRGVSSRISIYWTIVKPGDILLINSTGNLIAPRGYFKIRSGKSSIMRSDAPIGKCNSECITPNGSIPNDKPFQNVNRITYGACPRYVKQNTLKLATGMRNVPEKQTRGIFGAIAGFIENGWEGMVDGWYGFRHQNSEGTGQAADLKSTQAAINQINGKLNRLIEKTNEKFHQIEKEFSEVEGRIQDLEKYVEDTKIDLWSYNAELLVALENQHTIDLTDSEMNKLFERTKKQLRENAEDMGNGCFKIYHKCDNACIGSIRNETYDHDVYRDEALNNRFQIKGVELKSGYKDWILWISFAISCFLLCVVLLGFIMWACQKGNIRCNICI

SEQ ID NO: 1373 - protein, 566 aa, Artificial Sequence
  derived and/or modified protein sequence (wt) from hemagglutinin__InfluenzaA__ABJ09316
MKTIIALSYILCLVFAQKLPGNDNSTATLCLGHHAVPNGTLVKTITNDQIEVTNATELVQSSSTGRICDSPHQILDGENCTLIDALLGDPHCDGFQNKEWDLFVERSKAYSNCYPYDVPDYASLRSLVASSGTLEFNNESFNWTGVAQNGTSSACKRRSNKSFFSRLNWLHQLKYKYPALNVTMPNNEKFDKLYIWGVHHPSTDSDQISLYAQASGRVTVSTKRSQQTVIPNIGSRHWVRGVSSRISIYWTIVKPGDILLINSTGNLIAPRGYFKIRSGKSSIMRSDASIGKCNSECITPNGSIPNDKPFQNVNRITYGACPRYVKQNTLKLATGMRNVPEKQTRGIFGAIAGFIENGWEGMVDGWYGFRHQNSEGTGQAADLKSTQAAINQINGKLNRLIEKTNEKFHQIEKEFSEVEGRIQDLEKYVEDTKIDLWSYNAELLVALENQHTIDLTDSEMNKLFERTKKQLRENAEDMGNGCFKIYHKCDNACIGSIRNGTYDHDVYRDEALNNRFQIKGVELKSGYKDWILWISFAISCFLLCVVLLGFIMWACQKGNIRCNICI

SEQ ID NO: 1374 - protein, 566 aa, Artificial Sequence; identical to SEQ ID NO: 650
  derived and/or modified protein sequence (wt) from hemagglutinin__InfluenzaA__ABJ09338

SEQ ID NO: 1375 - protein, 566 aa, Artificial Sequence
  derived and/or modified protein sequence (wt) from hemagglutinin__InfluenzaA__ABJ09349
MKTIIALSYILCLVFAQKLPGNDNSTATLCLGHHAVPNGTLVKTITNDQIEVTNATELIQSSSTGGICDSPHQILDGENCTLIDALLGDPHCDGFQNKEWDLFVERSKAYSNCYPYDVPDYASLRSLVASSGTLEFNNESFNWTGVAQNGTSSACKRRSNKSFFSRLNWLHQLKYKYPALNVTMPNNEKFDKLYIWGVHHPSTDSDQISLYAQAPGRVTVSTKRSQQTVIPNIGSRPWVRGVSSRISIYWTIVKPGDILLINCTGNLIAPRGYFKIRSGKSSIMRSDASIGKCNSECITPNGSIPNDKPFQNVNRITYGACPRYVKQNTLKLATGMRNVPEKQTRGIFGAIAGFIENGWEGMVDGWYGFRHQNSEGTGQAADLKSTQAAINQINGKLNRLIEKTNEKFHQIEKEFSEVEGRIQDLEKYVEDTKIDLWSYNAELLVALENQHTIDLTDSEMNKLFERTKKQLRENAEDMGNGCFKIYHKCDNACIGSIRNGTYDHDVYRDEALNNRFQIKGVELKSGYKDWILWISFAISCFLLCVVLLGFIMWACQKGNIRCNICI

SEQ ID NO: 1376 - protein, 566 aa, Artificial Sequence; identical to SEQ ID NO: 650
  derived and/or modified protein sequence (wt) from hemagglutinin__InfluenzaA__ABJ09360

SEQ ID NO: 1377 - protein, 566 aa, Artificial Sequence
  derived and/or modified protein sequence (wt) from hemagglutinin__InfluenzaA__ABJ09371
MKTIIALSYILCLVFAQKLPGNDNSTATLCLGHHAVPNGTIVKTITNDQIEVTNATELVQSSSTGGICDSPHQILDGENCTLIDALLGDPQCDGFQNKKWDLFVERSKAYSNCYPYDVPDYASLRSLIASSGTLEFNNESFNWTGVTQNGTSSACKRRSNSSFFSRLNWLTHLKFKYPALNVTMPNNEEFDKLYIWGVHHPGTYNDQISLYAQASGRITVSTKRSQQTVIPNIGSRLRVRDIPSRISIYWTIVKPGDILLINSTGNLIAPRGYFKIRSGKSSIMRSDAPIGKCNSECITPNGSIPNDKPFQNVNRITYGACPRYVKQNTLKLATGMRNVPEKQTRGIFGAIAGFIENGWEGMVDGWYGFRHQNSEGIGQAADLKSTQAAIDQINGKLNRLIGKTNEKFHQIEKEFSEVEGRIQDLEKYVEDTKIDLWSYNAELLVALENQHTIDLTDSEMNKLFERTKKQLRENAEDMGNGCFKIYHKCDNACIGSIRNGTYDHDVYRDEALNNRFQIKGVELKSGYKDWILWISFAISCFLLCVALLGFIMWACQKGNIRCNICI

SEQ ID NO: 1378 - protein, 566 aa, Artificial Sequence; identical to SEQ ID NO: 633
  derived and/or modified protein sequence (wt) from hemagglutinin__InfluenzaA__ABJ09382

SEQ ID NO: 1379 - protein, 566 aa, Artificial Sequence
  derived and/or modified protein sequence (wt) from hemagglutinin__InfluenzaA__ABJ16587
MKTIIALSYISCLVFAQKLPGNDNSTATLCLGHHAVPNGTLVKTITNDQIEVTNATELVQSSSTGRICDSPHQILDGENCTLIDALLGDPHCDGFQNKEWDLFVERSKAYSNCYPYDVPDYASLRSLVASSGTLEFNNESFNWTGVAQNGTSSACKRRSIKSFFSRLNWLHQLKYRYPALNVTMPNNDKFDKLYIWGVHHPSTDSDQTSLYAQASGRVTVSTKRSQQTVIPNIGSRPWVRGVSSRISIYWTIVKPGDILLINSTGNLIAPRGYFKIRSGKSSIMRSDAPIGKCNSECITPNGSIPNDKPFQNVNRITYGACPRYVKQNTLKLATGMRNVPEKQTRGIFGAIAGFIENGWEGMMDGWYGFRHQNSEGTGQAADLKSTQAAINQINGKLNRLIEKTNEKFHQIEKEFSEVEGRIQDLEKYVEDTKIDLWSYNAELLVALENQHTIDLTDSEMNKLFERTRKQLRENAEDMGNGCFKIYHKCDNACIGSIRNGTYDHDVYRDEALNNRFQIKGVELKSGYKDWILWISFAISCFLLCVVLLGFIMWACQKGNIRCNICI

SEQ ID NO: 1380 - protein, 566 aa, Artificial Sequence
  derived and/or modified protein sequence (wt) from hemagglutinin__InfluenzaA__ABJ16598
MKTIIALSYILCLVFAQKLPGNDNSTATLCLGHHAVPNGTLVKTITNDQIEVTNATELVQSSSTGRICNSPHQILDGENCTLIDALLGDPHCDGFQNKEWDLFVERSKAYSNCYPYDVPDYASLRSLVASSGTLEFNNESFNWTGVAQNGTSSACKRRSIKSFFSRLNWLHQLKYKYPALNVTMPNNEKFDKLYIWGVHHPSTDSDQISLYAQASGRVTVSTKRSQQTVIPNIGSRPWVRGVSSRISIYWTIVKPGDILLINSTGNLIAPRGYFKIRSGKSSIMRSDAPIGKCNSECITPNGSIPNDKPFQNVNRITYGACPRYVKQNTLKLATGMRNVPEKQTRGIFGAIAGFIENGWEGMVDGWYGFRHQNSEGTGQAADLKSTQAAINQINGKLNRLIEKTNEKFHQIEKEFSEVEGRIQDLEKYVEDTKIDLWSYNAELLVALENQHTIDLTDSEMNKLFERTKKQLRENAEDMGNGCFKIYHKCDNACIGSIRNGTYDHDVYRDEALNNRFQIKGVELKSGYKDWILWISFAISCFLLCVVLLGFIMWACQKGNIRCNICI

SEQ ID NO: 1381 - protein, 566 aa, Artificial Sequence
  derived and/or modified protein sequence (wt) from hemagglutinin__InfluenzaA__ABJ16620
MKTIIALSYILCLVFAQKLPGNDNSTATLCLGHHAVPNGTLVKTITNDQIEVTNATELVQSSSTGRICNSPHQILDGENCTLIDALLGDPHCDGFQNKEWDLFVERNKAYSNCYPYDVPDYASLRSLVASSGTLEFNNESFNWTGVAQNGTSSACKRRSIKSFFSRLNWLHQLKYKYPALNVTMPNNEKFDKLYIWGVHHPSTDSDQISLYAQASGRVTVSTKRSQQTVIPNIGSRPWVRGVSSRISIYWTIVKPGDILLINSTGNLIAPRGYFKIRSGKSSIMRSDAPIGKCNSECITPNGSIPNDKPFQNVNRITYGACPRYVKQNTLKLATGMRNVPEKQTRGIFGAIAGFIENGWEGMVDGWYGFRHQNSEGTGQAADLKSTQAAINQINGKLNRLIEKTNKKFHQIEKEFSEVEGRIQDLEKYVEDTKIDLWSYNAELLVALENQHTIDLTDSEMNKLFERTKKQLRENAEDMGNGCFKIYHKCDNACIGSIRNGTYDHDVYRDEALNNRFQIKGVELKSGYKDWILWISFAISCFLLCVVLLGFIMWACQKGNIRCNICI

SEQ ID NO: 1382 - protein, 566 aa, Artificial Sequence
  derived and/or modified protein sequence (wt) from hemagglutinin__InfluenzaA__ABJ16631
MKTIIALSYILCLVFAQKLPGNDNSTATLCLGHHAVPNGTIVKTITNDQIEVTNATELVQSSSTGGICDSPHQILDGENCTLIDALLGDPQCDGFQNKKWDLFVERSKAYSNCYPYDVPDYASLRSLIASSGTLEFNNESFNWTGVTQNGTSSACKRRSNSSFFSRLNWLTHLKFKYPALNVTMPNNEEFDKLYIWGVHHPGTYNDQISLYAQASGRITVSTKRSQQTVIPNIGSRPRVRDIPSRISIYWTIVKPGDILLINSTGNLIAPRGYFKIRSGKSSIMRSDAPIGKCNSECITPNGSIPNDKPFQNVNRITYGACPRYVKQNTLKLATGMRNVPEKQTRGIFGAIAGFIENGWEGMVDGWYGFRHQNSEGIGQAADLKSTQAAIDQINGKLNRLIGKTNEKFHQIEKEFSEVEGRIQDLEKYVEDTKIDLWSYNAELLVALENQHTIDLTDSEMNKLFEKTKKQLRENAEDMGNGCFKIYHKCDNACIGSIRNGTYDHDVYRDEALNNRFQIKGVELKSGYKDWILWISFAISCFLLCVALLGFIMWACQKGNIRCNICI

SEQ ID NO: 1383 - protein, 565 aa, Artificial Sequence
  derived and/or modified protein sequence (wt) from hemagglutinin__InfluenzaA__ABJ16664
MKVKLLVLLCTFTATYADTICIGYHANNSTDTVDTVLEKNVTVTHSVNLLEDSHNGKLCLLKGIAPLQLGNCSVAGWILGNPECELLISKESWSYIVETPNPENGTCYPGHFADYEELREQLSSVSSFERFEIFPKESSWPNHTVTGVSASCSHNGKSSFYRNLLWLTGKNGLYPNLSKSYANNKEKEVLVLWGVHHPPNIGDQRALYHTENAYVSVVSSHYSRRFTPEIAKRPKVRDQEGRINYYWTLLEPGDTIIFEANGNLIAPRFAFALSRGFGSGIITSNAPMDECDAKCQTPQGAINSSLPFQNVHPVTIGECPKYVRSAKLRMVTGLRNIPSIQSRGLFGAIAGFIEGGWTGMVDGWYGYHHQNEQGSGYAADQKSTQNAINGITNKVNSVIEKMNTQFTAVGKEFNKLERRMENLNKKVDDGFLDIWTYNAELLVLLENERTLDFHDSNVKNLYEKVKSQLKNNAKEIGNGCFEFYHKCNDECMESVKNGTYDYPKYSEESKLNRERIDGVKLESMGVYQILAIYSTVASSLVLLVSLGAISFWMCSNGSLQCRICI

SEQ ID NO: 1384 - protein, 565 aa, Artificial Sequence; identical to SEQ ID NO: 1204
  derived and/or modified protein sequence (wt) from hemagglutinin__InfluenzaA__ABJ16675

SEQ ID NO: 1385 - protein, 565 aa, Artificial Sequence
  derived and/or modified protein sequence (wt) from hemagglutinin__InfluenzaA__ABJ16686
MKVKLLVLLCTFTATYADTICIGYHANNSTDTVDTVLEKNVTVTHSVNLLEDSHNGKLCLLKGIAPLQLGNCSVAGWILGNPECELLISKESWSYIVETPNPENGTCYPGYFADYEELREQLSSVSSFERFEIFPKESSWPNHTVTGVSASCSHNGKSSFYRNLLWLTGKNGLYPNLSKSYANNKEKEVLVLWGVHHPPNIGDQRALYHTENAYVSVVSSHYSRRFTPEIAKRPKVRDQEGRINYYWTLLEPGDTIIFEANGNLIAPRFAFALSRGFGSGIITSNAPMDECDAKCQTPQGAINSSLPFQNVHPVTIGECPKYVRSAKLRMATGLRNIPSIQSRGLFGAIAGFIEGGWTGMVDGWYGYHHQNEQGSGYAADQKSTQNAINGITNKVNSVIEKMNTQFTAVGKEFSKLERRMENLNKKVDDGFLDIWTYNAELLVLLENERTLDFHDSNVKNLYEKVKSQLKNNAKEIGNGCFEFYHKCNDECMESVKNGTYDYPKYSEESKLNREKIDGVKLESMGVYQILAIYSTVASSLVLLVSLGAISFWMCSNGSLQCRICI

SEQ ID NO: 1386 - protein, 566 aa, Artificial Sequence
  derived and/or modified protein sequence (wt) from hemagglutinin__InfluenzaA__ABJ16697
MKTIIALSYILCLVFAQKLPGNDNSTATLCLGHHAVPNGTLVKTITNDQIEVTNATELVQSSSTGGICDSPHQILDGENCTLIDALLGDPHCDGFQNKEWDLFVERSKAYSNCYPYDVPDYASLRSLVASSGTLEFNNESFNWTGVAQNGTSSACKRRSNKSFFSRLNWLHQLKYKYPALNVTMPNNEKFDKLYIWGVHHPSTDSDQISLYAQAPGRVTVSTKRSQQTVIPNIGSRPWVRGVSSRISIYWTIVKPGDILLINCTGNLIAPRGYFKIRSGKSSIMRSDASIGKCNSECITPNGSIPNDKPFQNVNRITYGACPRYVKQNTLKLATGMRNVPEKQTRGIFGAIAGFIENGWEGMVDGWYGFRHQNSEGTGQAADLKSTQAAINQINGKLNRLIEKTNEKFHQIEKEFSEVEGRIQDLEKYVEDTKIDLWSYNAELLVALENQHTIDLTDSEMNKLFERTKKQLRENAEDMGNGCFKIYHKCDNACIGSIRNGTYDHDVYRDEALNNRFQIKGVELKSGYKDWILWISFAISCFLLCAVLLGFIMWACQKGNIRCNICI

SEQ ID NO: 1387 - protein, 566 aa, Artificial Sequence
  derived and/or modified protein sequence (wt) from hemagglutinin__InfluenzaA__ABJ16730
MKAKLLVLLCAFTATYADTICIGYHANNSTDTVDTVLEKNVTVTHSVNLLEDSHNGKLCRLKGTAPLQLGNCSIAGWILGNPECESLFSKESWSYIAETPNPKNGTCYPGYFADYEELREQLSSVSSFERFEIFPKDSSWPNHTVTKGVTASCSHNGKSSFYKNLLWLTEKNGLYPNLSKSYVNKKGKEVLVLWGVHHPSNMGDQRAIYHKENAYVSVLSSHYSRRFTPEIARRPKVRDQEGRINYYWTLLEPGDTIIFEANGNLIAPWYAFALSRGFGSGIIISNASMGECDAKCQTPQGAINSSLPFQNVHPVTIGECPKYVRSTKLRMVTGLRNVPSIQSRGLFGAIAGFIEGGWTGMIDGWYGYHHQNEQGSGYAADQKSTQNAINGITNKVNSIIEKMNTQFTAVGKEFNKLERRMENLNKKVDDGFLDIWTYNAELLVLLENERTLDFHDSNVKNLYEKVKNQLKNNAKEIGNGCFEFYHKCNNECMESVKNGTYDYPKYSKESKLNREKIDGVKLESMGVYQILAIYSTVASSLVLLVSLGAISFWMCSNGSLQCRICI

SEQ ID NO: 1388 - protein, 566 aa, Artificial Sequence
  derived and/or modified protein sequence (wt) from hemagglutinin__InfluenzaA__ABJ16741
MKTIIALSYILCLVFAQKLPGNDNSTATLCLGHHAVPNGTLVKTITNDQIEVTNATELVQSSSTGGICDSPHQILDGENCTLIDALLGDPHCDGFQNKEWDLFVERSKAYSNCYPYDVPDYASLRSLVASSGTLEFNNESFNWTGVAQNGTSSACKRRSNKGFFSRLNWLHQLKYKYPALNVTMPNNEKFDKLYIWGVHHPSTDSDQISLYAQAPGRVTVSTKRSQQTVIPNIGSRPWVRGVSSIISIYWTIVKPGDILLINCTGNLIAPRGYFKIRSGKSSIMRSDASIGKCNSECITPNGSIPNDKPFQNVNRITYGACPRYVKQNTLKLATGMRNVPEKQTRGIFGAIAGFIENGWEGMVDGWYGFRHQNSEGTGQAADLKSTQAAINQINGKLNRLIGKTNEKFHQIEKEFSEVEGRIQDLEKYVEDTKIDLWSYNAELLVALENQHTIDLTDSEMNKLFERTKKQLRENAEDMGNGCFKIYHKCDNACIGSIRNGTYDHDVYRDEALNNRFQIKGVELKSGYKDWILWISFAISCFLLCVVLLGFIMWACQKGNIRCNICI

SEQ ID NO: 1389 - protein, 566 aa, Artificial Sequence
  derived and/or modified protein sequence (wt) from hemagglutinin__InfluenzaA__ABJ16752
MKTIIALSYILCLVFAQKLPGNDNSTATLCLGHHAVPNGTLVKTITNDQIEVTNATELVQSSSTGGICDSPHQILDGENCTLIDALLGDPHCDGFQNKEWDLFVERSKAYSNCYPYDVPDYASLRSLVASSGTLEFNNESFNWTGVAQNGTSSACKRRSNKSFFSRLNWLHQLKYKYPALNVTMPNNEKFDKLYIWGVHHPSTDSDQISLYAQAPGRVTVSTKRSQQTVIPNIGSRPWVRGVSSGISIYWTIVKPGDILLINCTGNLIAPRGYFKIRSGKSSIMRSDASIGKCNSECITPNGSIPNDKPFQNVNRITYGACPRYVKQNTLKLATGMRNVPEKQTRGIFGAIAGFIENGWEGMVDGWYGFRHQNSEGTGQAADLKSTQAAINQINGKLNRLIEKTNEKFHQIEKEFSEVEGRIQDLEKYVEDTKIDLWSYNAELLVALENQHTIDLTDSEMNKLFERTKKQLRENAEDMGNGCFKIYHKCDNACIGSIRNGTYDHDVYRDEALNNRFQIKGVELKSGYKDWILWISFAISCFLLCVVLLGFIMWACQKGNIRCNICI

SEQ ID NO: 1390 - protein, 566 aa, Artificial Sequence
  derived and/or modified protein sequence (wt) from hemagglutinin__InfluenzaA__ABJ16763
MKTIIALSYILCLVFAQKLPGNDNSTATLCLGHHAVPNGTLVKTITNDQIEVTNATELVQSSSTGGICDSPHQILDGENCTLIDALLGDPHCDGFQNKEWDLFVERSKAYSNCYPYDVPDYASLRSLVASSGTLEFNNESFNWTGVAQNGTSSACKRRSNKSFFSRLNWLHQLKYKYPALNVTMPNNEKFDKLYIWGVHHPSTDSDQISLYAQAPGRVTVSTKRSQQTVIPNIGSRHWVRGVSSRISIYWTIVKPGDILLINCTGNLIAPRGYFKIRSGKSSIMRSDASIGKCNSECITPNGSIPNDKPFQNVNRITYGACPRYVKQNTLKLATGMRNVPEKQTRGIFGAIAGFIENGWEGMVDGWYGFRHQNSEGTGQAADLKSTQAAINQINGKLNRLIEKTNEKFHQIEKEFSEVEGRIQDLEKYVEDTKIDLWSYNAELLVALENQHTIDLTDSEMNKLFERTKKQLRENAEDMGNGCFKIYHKCDNACIGSIRNGTYDHDVYRDEALNNRFQIKGVELKSGYKDWILWISFAISCFLLCVVLLGFIMWACQKGNIRCNICI

SEQ ID NO: 1391 - protein, 566 aa, Artificial Sequence
  derived and/or modified protein sequence (wt) from hemagglutinin__InfluenzaA__ABJ16774
MKTIIALSYILCLVFAQKLPVNDNSTATLCLGHHAVPNGTLVKTITNDHIEVTNATELVQSSPTGRICDSPHQILDGENCTLIDALLGDPHCDGFQNKEWDLFVERSTAYSNCYPYDVPDYASLRSLVASSGTLEFNNESFNWTGVAQNGTSSACKRRSIKSFFSRLNWLHQLKYKYPALNVTMPNNEKFDKLYIWGVHHPSTDSDQISLYAQASGRVTVSTKRSQQTVIPNIGSGPWVRGVSSRISIYWTIVKPGDILLINSTGNLIAPRGYFKIRNGKSSIMRSNTPIGKCNSECITPNGSIPNDKPFQNVNRITYGACPRYVKQNTLKLATGMRNVPEKQTRGIFGAIAGFIENGWEGMVDGWYGFRHQNSEGTGQAADLKSTQAAINQINGKLNRLIEKTNEKFHQIEKEFSEVEGRIQDLEKYVEDTKIDLWSYNAELLVALENQHTIDLTDSEMNKLFERTRKQLRENAEDMGNGCFKIYHKCDNACIGSIRNGTYDHDVYRDEALNNRFQIKGVELKSGYKDWILWISFAISCFLLCVVLLGFIMWACQKGNIRCNICI

SEQ ID NO: 1392 - protein, 566 aa, Artificial Sequence
  derived and/or modified protein sequence (wt) from hemagglutinin__InfluenzaA__ABJ16785
MKTIIALSYILCLVFAQKLPGNDNSTATLCLGHHAVPNGTLVKTITNDQIEVTNATELVQSSSTGGICDSPHQILDGENCTLIDALLGDPHCDGFQNKEWDLFVERSKAYSNCYPYDVPDYASLRSLVASSGTLEFNNESFNWTGVAQNGTSYACKRRSNKSFFSRLNWLHQLKYKYPALNVTMPNNEKFDKLYIWGVHHPSTDSDQISLYAQAPGRVTVSTKRSQQTVIPNIGSRPWVRGVSSRISIYWTIVKPGDILLINCTGNLIAPRGYFKIRSGKSSIMRSDASIGKCNSECITPNGSIPNDKPFQNVNRITYGACPRYVKQNTLKLATGMRNVPEKQTRGIFGAIAGFIENGWEGMVDGWYGFRHQNSEGTGQAADLKSTQAAINQINGKLNRLIEKTNEKFHQIEKEFSEVEGRIQDLEKYVEDTKIDLWSYNAELLVALENQHTIDLTDSEMNKLFERTKKQLRENAEDMGNGCFKIYHKCDNACIGSIRNGTYDHDVYRDEALNNRFQIKGVELKSGYKDWILWISFAISCFLLCVVLLGFIMWACQKGNIRCNICI

SEQ ID NO: 1393 - protein, 566 aa, Artificial Sequence; identical to SEQ ID NO: 910
  derived and/or modified protein sequence (wt) from hemagglutinin__InfluenzaA__ABJ53438

SEQ ID NO: 1394 - protein, 565 aa, Artificial Sequence; identical to SEQ ID NO: 742
  derived and/or modified protein sequence (wt) from hemagglutinin__InfluenzaA__ABJ53449

SEQ ID NO: 1395 - protein, 566 aa, Artificial Sequence
  derived and/or modified protein sequence (wt) from hemagglutinin__InfluenzaA__ABJ53471
MKTIIALSYILCLVFAQKIPGNDNSTATLCLGHHAVPNGTIVKTITNDQIEVTNATELVQSSSTGGICDSPHQILDGENCTLIDALLGDPQCDGFQNKKWDLFVERSKAYSNCYPYDVPDYASLRSLVASSGTLEFNNESFNWTGVTQNGTSSACKRGSNNSFFSRLNWLTHLKFKYPALNVTMPNNEKFDKLYIWGVHHPGTDNDQIFLYAQASGRITVSTKRSQQTVIPNIGSRPRVRNIPSRISIYWTIVKPGDILLINSTGNLIAPRGYFKIRSGKSSIMRSDAPIGKCNSECITPNGSIPNDKPFQNVNRITYGACPRYVKQNTLKLATGMRNVPEKQTRGIFGAIAGFIENGWEGMVDGWYGFRHQNSEGIGQAADLKSTQAAINQINGKLNRLIGKTNEKFHQIEKEFSEVEGRIQDLEKYVEDTKIDLWSYNAELLVALENQHTIDLTDSEMNKLFERTKKQLRENAEDMGNGCFKIYHKCDNACIGSIRNGTYDHDVYRDEALNNRFQIKGVELKSGYKDWILWISFAISCFLLCVALLGFIMWACQKGNIRCNICI

SEQ ID NO: 1396 - protein, 566 aa, Artificial Sequence
  derived and/or modified protein sequence (wt) from hemagglutinin__InfluenzaA__ABJ53482
MKTIIALSYILCLVFAQKLPGNDNSTATLCLGHHAVPNGTIVRTITNDQIEVTNATELVQSSSTGEICDSPHQILDGENCTLIDALLGDPQCDGFQNKKWDLFVERSKAYSNCYPYDVPDYASLRSLVASSGTLEFNNESFNWTGVTQNGTSSACKRRSNNSFFSRLNWLTHLKFKYPALNVTMPNNEKFDKLYIWGVHHPGTDNDQIFLYAQASGRITVSTKRSQQTVIPNIGSRPRVRNIPSRISIYWTIVKPGDILLINSTGNLIAPRGYFKIRSGKSSIMRSDAPIGKCNSECITPNGSIPNDKPFQNVNRITYGACPRYVKQNTLKLATGMRNVPEKQTRGIFGAIAGFIENGWEGMVDGWYGFRHQNSEGIGQAADLKSTQAAINQINGKLNRLIGKTNEKFHQIEKEFSEVEGRIQDLEKYVEDTKIDLWSYNAELLVALENQHTIDLTDSEMNKLFERTKKQLRENAEDMGNGCFKIYHKCDNACIGSIRNGTYDHDVYRDEALNNRFQIKGVELKSGYKDWILWISFAISCFLLCVALLGFIMWACQKGNIRCNICI

SEQ ID NO: 1397 - protein, 565 aa, Artificial Sequence; identical to SEQ ID NO: 1232
  derived and/or modified protein sequence (wt) from hemagglutinin__InfluenzaA__ABJ53493

SEQ ID NO: 1398 - protein, 565 aa, Artificial Sequence
  derived and/or modified protein sequence (wt) from hemagglutinin__InfluenzaA__ABJ53504
MKAKLLVLLCTFTATYADTICIGYHANNSTDTVDTVLEKNVTVTHSVNLLEDSHNGKLCLLKGIAPLQLGNCSVAGWILGNPECESLISKESWSYIVETPNPENGTCYPGYFADYEELREQLSSVSSFERFEIFPKESSWPNHTVTGVSASCSHNGKSSFYRNLLWLTEKNGLYPNLSKSYVNNKEKEVLVLWGVHHPSNIGVQRAIYHTENAYVSVVSSHYSRRFTPEIAKRPKVRDQEGRINYYWTLLEPGDTIIFEANGNLIAPWYAFALSRGFESGIITSNAPMNECDAKCQTPLGAINSSLPFQNVHPVTIGECPKYVRSAKLRMVTGLRNIPSIQSRGLFGAIAGFIEGGWTGMIDGWYGYHHQNEQGSGYAADQKSTQNAINGITNKVNSVIEKMNTQFTAVGKEFNKLERRMENLNKKVDDGFLDIWTYNAELLVLLENERTLDFHDSNVKNLYEKVKSQLKNNAKEIGNGCFEFYHKCNNECMESVKNGTYDYPKYSEESKLNREKIDGVKLESMGVYQILAIYSTVASSLVLLVSLGAISFWMCSNGSLQCRICI

SEQ ID NO: 1399 - protein, 566 aa, Artificial Sequence; identical to SEQ ID NO: 1387
  derived and/or modified protein sequence (wt) from hemagglutinin__InfluenzaA__ABJ53515

SEQ ID NO: 1400 - protein, 566 aa, Artificial Sequence
  derived and/or modified protein sequence (wt) from hemagglutinin__InfluenzaA__ABK39962
MKTIIALSYILCLVFAQKLPGNDNSTATLCLGHHAVPNGTLVKTITNDQIEVTNATELVQSSSTGRICDSPHQILDGENCTLIDALLGDPHCDGFQNKEWDLFVERSKAYSNCYPYDVPDYVSLRSLVASSGTLEFNNESFNWTGVAQNGTSSACKRRSDKSFFSRLNWLHQLKYKYPALNVTMPNNEKFDKLYIWGVHHPGTDSDQISLYAQASGRVTVSTKRSQQTVIPNIGSRPWVRGVSSRISIYWTIVKPGDILLINSTGNLIAPRGYFKIRSGKSSIMRSDAPIGKCNSECITPNGSIPNDKPFQNVNRITYGACPRYVKQKTLKLATGMRNVPEKQTRGIFGAIAGFIENGWEGMMDGWYGFRHQNSEGTGQAADLKSTQAAINQINGKLNRLIEKTNEKFHQIEKEFSEVEGRIQDLEKYVEDTKIDLWSYNAELLVALENQHTIDLTDSEMNKLFERTKKQLRENAEDMGNGCFKIYHKCDNACIGSIRNGTYDHDVYRDEALNNRFQIKGVELKSGYKDWILWISFAISCFLLCIVLLGFIMWACQKGNIRCNICI

SEQ ID NO: 1401 - protein, 566 aa, Artificial Sequence; identical to SEQ ID NO: 630
  derived and/or modified protein sequence (wt) from hemagglutinin__InfluenzaA__ABK39973

SEQ ID NO: 1402 - protein, 566 aa, Artificial Sequence
  derived and/or modified protein sequence (wt) from hemagglutinin__InfluenzaA__ABK39984
MKTIIALSYILCLVFAQKLPGNDNSRATLCLGHHAVPNGTIVKTITNDQIEVTNATELVQSSSTGGICDSPHQILDGENCTLIDALLGDPQCDGFQNKKWDLFVERSKAYSNCYPYDVPDYASLRSLVASSGTLEFNNESFNWTGVTQNGTSSACKRRSNNSFFSRLNWLTHLKFKYPALNVTMPNNEKFDKLYIWGVHHPGTDNDQIFLYAQASGRITVSTKRSQQTVIPNIGSRPRVRNIPSRISIYWTIVKPGDILLINSTGNLIAPRGYFKIRSGKSSIMRSDAPIGKCNSECITPNGSIPNDKPFQNVNRITYGACPRYVKQNTLKLATGMRNVPEKQTRGIFGAIAGFIENGWEGMVDGWYGFRHQNSEGIGQAADLKSTQAAIDQINGKLNRLIGKTNEKFHQIEKEFSEVEGRIQDLEKYVEDTKIDLWSYNAELLVALENQHTIDLTDSEMNKLFERTKKQLRENAEDMGNGCFKIYHKCDNACIGSIRNGTYDHDVYRDEALNNRFQIKGVELKSGYKDWILWISFAISCFLLCVALLGFIMWACQKGNIRCNICI

SEQ ID NO: 1403 - protein, 565 aa, Artificial Sequence
  derived and/or modified protein sequence (wt) from hemagglutinin__InfluenzaA__ABK39995
MKVKLLILLCTFTATYADTICIGYHANNSTDTVDTVLEKNVTVTHSVNLLEDSHNGKLCLLKGIAPLQLGNCSVAGWILGNPECELLISKESWSYIVETPNPENGACYPGYFADYEELREQLSSVYSFERFEIFPKESSWPNHTVTGVSASCSHNGKSSFYRNLLWLTGKNGLYPNLSKSYANNKEKEVLILWGVHHPPNIGNQRTLYHTENAYVSVVSSHYSRRFTPEITKRPKVRDQEGRINYYWTLLEPGDTIIFEANGNLIAPWYAFALSRGFGSGIITSNAPMDECDAKCQTPQGAINSSLPFQNVHPVTIGECPKYVRSAKLRMVTGLRNIPSIQSRGLFGAIAGFIEGGWTGMVDGWYGYHHQNEQGSGYAADQKSTQNAINGITNKVNSVIEKMNTQFTAVGKEFNKLERRMENLNKKVDDGFLDIWTYNAELLVLLENERTLDFHDSNVKNLYEKVKSQLKNNAKEIGNGCFEFYHKCNNECMESVKNGTYDYPKYSEESKLNREKIDGVKLDSMGVYQILAIYSTVASSLVLLVSLGAISFWMCSNGSLQCRICI

SEQ ID NO: 1404 - protein, 566 aa, Artificial Sequence
  derived and/or modified protein sequence (wt) from hemagglutinin__InfluenzaA__ABK40017
MKTIIALSYILCLVFAQKLPGNDNSTATLCLGHHAVPNGTIVKTITNDQIEVTNATELVQSSSTGGICDSPHQILDGENCTLIDALLGDPQCDGFQNKKWDLFVERSKAYSNCYPYDVPDYASLRSLVASSGTLEFNNESFNWTGVTQNGTSSACKRRSNNSFFSRLNWLTHLKFKYPALNVTMPNNKKFDKLYIWGVHHPGTDNDQISLYAQASGRITVSTKRSQQTVIPNIGSRPRVRDIPSRISIYWTIVKPGDILLINSTGNLIAPRGYFKIRSGKSSIMRSDAPIGKCNSECITPNGSIPNDKPFQNVNRITYGACPRYVKQNTLKLATGMRNVPEKQTRGIFGAIAGFIENGWEGMVDGWYGFRHQNSEGIGQAADLKSTQAAINQINGKLNRLIGKTNEKFHQIEKEFSEVEGRIQDLEKYVEDTKIDLWSYNAELLVALENQHTIDLTDSEMNKLFERTKKQLRENAEDMGNGCFKIYHKCDNACIGSIRNGTYDHDVYRDEALNNRFQIKGVELKSGYKDWILWISFAISCFLLCVALLGFIMWACQKGNIRCNICI

SEQ ID NO: 1405 - protein, 566 aa, Artificial Sequence
  derived and/or modified protein sequence (wt) from hemagglutinin__InfluenzaA__ABK40028
MKAKLLVLLCAFTATYADTICIGYHANNSTDTVDTVLEKNVTVTHSVNLLEDSHNGKLCRLKGTAPLQLGNCSIAGWILGNPECESLFSKESWSYIAETPNPKNGTCYPGYFADYEELREQLSSVSSFERFEIFPKDSSWPNHTVTKGVTASCSHNGKSSFYKNLLWLTEKNGLYPNLSKSYVNKKGKEVLVLWGVHHPSNMGDQRAIYHKENAYVTVLSSHYSRRFTPEIARRPKVRDQEGRINYYWTLLEPGDTIIFEANGNLIAPWYAFALSRGFGSGIIISNASMGECDAKCQTPQGAINSSLPFQNVHPVTIGECPKYVRSTKLRMVTGLRNVPSIQSRGLFGAIAGFIEGGWTGMIDGWYGYHHQNEQGSGYAADQKSTQNAINGITNKVNSIIEKMNTQFTAVGKEFNKLERRMENLNKKVDDGFLDIWTYNAELLVLLENERTLDFHDSNVKNLYEKVKNQLKNNAKEIGNGCFEFYHKCNNECMESVKNGTYDYPKYSKESKLNREKIDGVKLESMGVYQILAIYSTVASSLVLLVSLGAISFWMCSNGSLQCRICI

SEQ ID NO: 1406 - protein, 566 aa, Artificial Sequence; identical to SEQ ID NO: 1387
  derived and/or modified protein sequence (wt) from hemagglutinin__InfluenzaA__ABK40039

SEQ ID NO: 1407 - protein, 566 aa, Artificial Sequence; identical to SEQ ID NO: 1387
  derived and/or modified protein sequence (wt) from hemagglutinin__InfluenzaA__ABK40050

SEQ ID NO: 1408 - protein, 566 aa, Artificial Sequence; identical to SEQ ID NO: 650
  derived and/or modified protein sequence (wt) from hemagglutinin__InfluenzaA__ABK40061

SEQ ID NO: 1409 - protein, 566 aa, Artificial Sequence; identical to SEQ ID NO: 650
  derived and/or modified protein sequence (wt) from hemagglutinin__InfluenzaA__ABK40075

SEQ ID NO: 1410 - protein, 566 aa, Artificial Sequence; identical to SEQ ID NO: 921
  derived and/or modified protein sequence (wt) from hemagglutinin__InfluenzaA__ABK40510

SEQ ID NO: 1411 - protein, 566 aa, Artificial Sequence; identical to SEQ ID NO: 921
  derived and/or modified protein sequence (wt) from hemagglutinin__InfluenzaA__ABK40534

SEQ ID NO: 1412 - protein, 566 aa, Artificial Sequence
  derived and/or modified protein sequence (wt) from hemagglutinin__InfluenzaA__ABK40546
MKAKLLVLLCALSATDADTICIGYHANNSTDTVDTVLEKNVTVTHSVNLLEDNHNGKLCKLKGIAPLQLGKCSIAGWILGNPECESLFSNKSWSYIAETPNSENGTCYPGYFADYEELREQLSSVSSFERFEIFPKESSWPKHNVTKGVTASCSHKGKSSFYRNLLWLTEKNGSYPNLSKSYVNNKEKEVLVLWGVHHPSNIEDQKTIYRKENAYVSVVSSHYNRRFTPEIAKRPKVRNQEGRINYYWTLLEPGDTIIFEANGNLIAPWYAFALSRGFGSGIITSNASMDECDAKCQTPQGAINSSLPFQNVHPVTIGECPKYVRSTKLRMVTGLRNIPSIQSRGLFGAIAGFIEGGWTGMIDGWYGYHHQNEQGSGYAADQKSTQNAINGITNKVNSIIEKMNTQFTAVGKEFNKLEKRMENLNKKVDDGFLDIWTYNAELLVLLENERTLDFHDSNVKNLYEKVKSQLKNNAKEIGNGCFEFYHKCNNECMESVKNGTYDYPKYSEESKLNREKIDGVKLESMGVYQILAIYSTVASSLVLLVSLGAISFWMCSNGSLQCRICI

SEQ ID NO: 1413 - protein, 566 aa, Artificial Sequence; identical to SEQ ID NO: 921
  derived and/or modified protein sequence (wt) from hemagglutinin__InfluenzaA__ABK40557

SEQ ID NO: 1414 - protein, 566 aa, Artificial Sequence; identical to SEQ ID NO: 921
  derived and/or modified protein sequence (wt) from hemagglutinin__InfluenzaA__ABK40568

SEQ ID NO: 1415 - protein, 566 aa, Artificial Sequence; identical to SEQ ID NO: 921
  derived and/or modified protein sequence (wt) from hemagglutinin__InfluenzaA__ABK40579

SEQ ID NO: 1416 - protein, 566 aa, Artificial Sequence
  derived and/or modified protein sequence (wt) from hemagglutinin__InfluenzaA__ABK40590
MKAKLLVLLCALSATDADTICIGYHANNSTDTVDTVLEKNVTVTHSVNLLEDNHNGKLCKLKGIAPLQLGKCSIAGWILGNPECESLFSKKSWSYIAETPNSENGTCYPGYFADYEELREQLSSVSSFERFEIFPKESSWPKHNVTKGVTASCSHKGKSSFYRNLLWLTEKNGSYPNLSKSYVNNKEKEVLVLWGVHHPSNIEDQKTIYRKENAYVSVVSSHYNRRFTPEIAKRPKVRNQEGRINYYWTLLEPGDTIIFEANGNLIAPWYAFALSRGFGSGIITSNASMDECDAKCQTPQGAINSSLPFQNVHPVTIGECPKYVRSTKLRMVTGLRNIPSIQSRGLFGAIAGFIEGGWTGMIDGWYGYHHQNEQGSGYAADQKSTQNAINGITNKVNSIIEKMNTQFTAVGKEFNKLEKRMENLNKKVDDGFLDIWTYNAELLVLLENERTLDFHDSNVKNLYEKVKNQLKNNAKEIGNGCFEFYHKCNNECMESVKNGTYDYPKYSEESKLNREKIDGVKLESMGVYQILAIYSTVASSLVLLVSLGAISFWMCSNGSLQCRICI

SEQ ID NO: 1417 - protein, 566 aa, Artificial Sequence; identical to SEQ ID NO: 921
  derived and/or modified protein sequence (wt) from hemagglutinin__InfluenzaA__ABK40601

SEQ ID NO: 1418 - protein, 566 aa, Artificial Sequence; identical to SEQ ID NO: 650
  derived and/or modified protein sequence (wt) from hemagglutinin__InfluenzaA__ABK40612

SEQ ID NO: 1419 - protein, 566 aa, Artificial Sequence
  derived and/or modified protein sequence (wt) from hemagglutinin__InfluenzaA__ABK40623
MKTIIALSYILCLVFAQKLPVNDNSTATLCLGHHAVPNGTLVKTITNDHIEVTNATELVQSSSTGRICDSPHQILDGENCTLIDALLGDPHCDGFQNKEWDLFVERSTAYSNCYPYDVPDYASLRSLVASSGTLEFNNESFNWTGVAQNGTSSACKRRSIKSFFSRLNWLHQLKYKYPALNVTMPNNEKFDKLYIWGVHHPSTDSDQISLYAQASGRVTVSTKRSQQTVIPNIGSRPWVRGVSSRISIYWTIVKPGDILLINSTGNLIAPRGYFKIRSGKSSIMRSNAPIGKCNSECITPNGSIPNDKPFQNVNRIAYGACPRYVKQNTLKLATGMRNVPEKQTRGIFGAIAGFIENGWEGMVDGWYGFRHLNSEGTGQAADLKSTQAAINQINGKLNRLIEKTNEKFHQIEKEFSEVEGRIQDLEKYVKDTKIDLWSYNAELLVALENQHTIDLTDSEMNKLFERTRKQLRENAEDVGNGCFKIYHKCDNACIGSIRNGTYDHDVYRDEALNNRFQIKGVELKSGYKDWILWISFAISCFLLCVVLLGFIMWACQKGNIRCNICI

SEQ ID NO: 1420 - protein, 566 aa, Artificial Sequence; identical to SEQ ID NO: 984
  derived and/or modified protein sequence (wt) from hemagglutinin__InfluenzaA__ABK40645

SEQ ID NO: 1421 - protein, 566 aa, Artificial Sequence
  derived and/or modified protein sequence (wt) from hemagglutinin__InfluenzaA__ABK40656
MKTIIALSYILCLVFAQKLPGNDNSTATLCLGHHAVPNGTLVKTITNDQIEVTNATELVQSSPTGRICDSPHRILDGKNCTLIDALLGDPHCDGFQNKEWDLFVERSKAYSNCYPYDVPDYASLRSLVASSGTLEFTNENFNWTGVAQDGKSYSCKRGSVNSFFSRLNWLHKLEYKYPALNVTMPNNGKFDKLYIWGVHHPSTDSDQTSLYVRASGKVTVSTKRSQQTVIPDIGYRPWVRGLSSRISIYWTIVKPGDILLINSTGNLIAPRGYFKIRNGKSSIMRSDAPIGNCSSECITPNGSIPNDKPFQNVNRITYGTCPRYVKQNTLKLATGMRNVPEKQTRGIFGAIAGFIENGWEGMVDGWYGFRHQNSEGTGQAADLKSTQAAIDQINGKLNRLVEKTNEKFHQIEKEFSEVEGRIQDLEKYVEDTKIDLWSYNAELLVALENQHTIDLTDSEMNKLFERTRKQLRENAEDMGNGCFKIYHKCDNACIGSIRNGTYDHDVYRDEALNNRFQIKGVELKSGYKDWILWISFAISCFLLCVVLLGFIMWACQKGNIRCNICI

SEQ ID NO: 1422 - protein, 566 aa, Artificial Sequence
  derived and/or modified protein sequence (wt) from hemagglutinin__InfluenzaA__ABK40667
MKTIIALSYILCLVFAQKLPGNDNSTATLCLGHHAVPNGTLVKTITNDQIEVTNATELVQSSSTGRICDSPHRILDGKNCTLIDALLGDPHCDGFQNKEWDLFVERSKAYSNCYPYDVPDYASLRSLVASSGTLEFTNEGFNWTGVAQDGKSYACKRGSVNSFFSRLNWLHKLEYKYPALNVTMPNNDKFDKLYIWGVHHPSTDSDQTSLYVQASGRVTVSTKRSQQTVIPNIGSRPWVRGISSRISIYWTIVKPGDILLINSTGNLIAPRGYFKLRNGKSSIMRSDAPIDNCNSECITPNGSIPNDKPFQNVNRITYGACPRYVKQNTLKLATGMRNVPEKQTRGIFGAIAGFIENGWEGMVDGWYGFRHQNSEGTGQAADLKSTQAAIDQINGKLNRLTEKTNEKFHQIEKEFSEVEGRIQDLEKYVEDTKIDLWSYNAELLVALENQHTIDLTDSEMNKLFERTRKQLRENAEDMGNGCFKIYHKCDNACIGSIRNGTYNHDVYRDEALNNRFQIKGVELKSGYKDWILWISFAISCFLLCVVLLGFIMWACQKGNIRCNICI

SEQ ID NO: 1423 - protein, 566 aa, Artificial Sequence; identical to SEQ ID NO: 1066
  derived and/or modified protein sequence (wt) from hemagglutinin__InfluenzaA__ABK40678

SEQ ID NO: 1424 - protein, 565 aa, Artificial Sequence
  derived and/or modified protein sequence (wt) from hemagglutinin__InfluenzaA__ABK40689
MKVKLLVLLCTFTATYADTICIGYHANNSTDTVDTVLEKNVTVTHSVNLLEDSHNGKLCLLKGIAPLQLGNCSVAGWILGNPECELLISKESWSYIVETPNPENGTCYPGYFADYEELREQLSSVSSFERFEIFPKESSWPNHTVTGVSASCSHNGKSSFYRNLLWLTGKNGLYPNLSKSYANNKEKEVLVLWGVHHPPNIGNQRALYHTENAYVSVVSSHYSRRFTPEIAKRPKVRDQEGRINYYWTLLEPGDTIIFEANGNLIAPRFAFALSRGFGSGIITSNAPMDECDAKCQTPQGAINSSLPFQNVHPVTIGECPKYVRSAKLRMATGLRNIPSIQSRGLFGAIAGFIEGGWTGMVDGWYGYHHQNEQGSGYAADQKSTQNAINGITNKVNSVIEKMNTQFTAVGKEFSKLERRMENLNKKVDDGFLDIWTYNAELLVLLENERTLDFHDSNVKNLYEKVKSQLKNNAKEIGNGCFEFYHKCNDECMESVKNGTYDYPKYSEESKLNREKIDGVKLESMGVYQILAIYSTVASSLVLLVSLGAISFWMCSNGSLQCRICI

SEQ ID NO: 1425 - protein, 566 aa, Artificial Sequence; identical to SEQ ID NO: 650
  derived and/or modified protein sequence (wt) from hemagglutinin__InfluenzaA__ABK40700

SEQ ID NO: 1426 - protein, 566 aa, Artificial Sequence; identical to SEQ ID NO: 650
  derived and/or modified protein sequence (wt) from hemagglutinin__InfluenzaA__ABK40711

SEQ ID NO: 1427 - protein, 566 aa, Artificial Sequence
  derived and/or modified protein sequence (wt) from hemagglutinin__InfluenzaA__ABK40722
MKTIIALSYILCLVFAQKLPGNDNSTATLCLGHHAVPNGTLVKTITNDQIEVTNATELVQSSSTGGICDSPHQILDGENCTLIDALLGDPHCDGFQNKEWDLFVERSKAYSNCYPYDVPDYASLRSLVASSGTLEFNNESFNWTGVAQNGTSSACKRRSNKSFFSRLNWLHQLKYKYPALNVTMPNNEKFDKLYIWGVHHPSTDNDQISLYAQAPGRVTVSTKRSQQTVIPNIGSRPWVRGVSSRISIYWTIVKPGDILLINCTGNLIAPRGYFKIRSGKSSIMRSDASIGKCNSECITPNGSIPNDKPFQNVNRITYGACPRYVKQNTLKLATGMRNVPEKQTRGIFGAIAGFIENGWEGMVDGWYGFRHQNSEGTGQAADLKSTQAAINQINGKLNRLIEKTNEKFHQIEKEFSEVEGRIQDLEKYVEDTKIDLWSYNAELLVALENQHTIDLTDSEMNKLFERTKKQLRENAEDMGNGCFKIYHKCDNACIGSIRNGTYDHDVYRDEALNNRFQIKGVELKSGYKDWILWISFAISCFLLCVVLLGFIMWACQKGNIRCNICI

SEQ ID NO: 1428 - protein, 566 aa, Artificial Sequence; identical to SEQ ID NO: 650
  derived and/or modified protein sequence (wt) from hemagglutinin__InfluenzaA__ABK40733

SEQ ID NO: 1429 - protein, 566 aa, Artificial Sequence; identical to SEQ ID NO: 1305
  derived and/or modified protein sequence (wt) from hemagglutinin__InfluenzaA__ABK40744

SEQ ID NO: 1430 - protein, 566 aa, Artificial Sequence; identical to SEQ ID NO: 915
  derived and/or modified protein sequence (wt) from hemagglutinin__InfluenzaA__ABK79948

SEQ ID NO: 1431 - protein, 565 aa, Artificial Sequence; identical to SEQ ID NO: 1204
  derived and/or modified protein sequence (wt) from hemagglutinin__InfluenzaA__ABK79959

SEQ ID NO: 1432 - protein, 566 aa, Artificial Sequence
  derived and/or modified protein sequence (wt) from hemagglutinin__InfluenzaA__ABK79970
MKAKLLVLLCAFTATYADTICIGYHANNSTDTVDTVLEKNVTVTHSVNLLEDSHNGKLCRLKGTAPLQLGNCSIAGWILGNPECESLFSKKSWSYIAETPNPKNGTCYPGYFADYEELREQLSSVSSFERFEIFPKDSSWPNHTVTKGVTASCSHNGKSSFYKNLLWLTEKNGLYPNLSKSYVNKKGKEVLVLWGVHHPSNMGDQRAIYHKENAYVSVLSSHYSRRFTPEIARRPKVRDQEGRINYYWTLLEPGDTIIFEANGNLIAPWYAFALSRGFGSGIIISNASMGECDAKCQTPQGAINSSLPFQNVHPVTIGECPKYVRSTKLRMVTGLRNVPSIQSRGLFGAIAGFIEGGWTGMIDGWYGYHHQNEQGSGYAADQKSTQNAINGITNKVNSIIEKMNTQFTAVGKEFNKLERRMENLNKKVDDGFLDIWTYNAELLVLLENERTLDFHDSNVKNLYEKVKNQLKNNAKEIGNGCFEFYHKCNNECMESVKNGTYDYPKYSKESKLNREKIDGVKLESMGVYQILAIYSTVASSLVLLVSLGAISFWMCSNGSLQCRICI

SEQ ID NO: 1433 - protein, 566 aa, Artificial Sequence
  derived and/or modified protein sequence (wt) from hemagglutinin__InfluenzaA__ABK79981
MKTIIALSYILCLVFTQKLPGNDNSTATLCLGHHAVPNGTLVKTITNDQIEVTNATELVQSSSTGGICDSPHQILDGENCTLIDALLGDPHCDGFQNKEWDLFVERSKAYSNCYPYDVPDYASLRSLVASSGTLEFNNESFNWTGVAQNGTSSACKRRSNKSFFSRLNWLHQLKYKYPALNVTMPNNEKFDKLYIWGVHHPSTDSDQISLYAQAPGRVTVSTKRSQQTVIPNIGSRPWVRGVSSRISIYWTIVKPGDILLINCTGNLIAPRGYFKIRSGKSSIMRSDASIGKCNSECITPNGSIPNDKPFQNVNRITYGACPRYVKQNTLKLATGMRNVPEKQTRGIFGAIAGFIENGWEGMVDGWYGFRHQNSEGTGQAADLKSTQAAINQINGKLNRLIEKTNEKFHQIEKEFSEVEGRIQDLEKYVEDTKIDLWSYNAELLVALENQHTIDLTDSEMNKLFERTKKQLRENAEDMGNGCFKIYHKCDNACIGSIRNGTYDHDVYRDEALNNRFQIKGVELKSGYKDWILWISFAISCFLLCVVLLGFIMWACQKGNIRCNICI

SEQ ID NO: 1434 - protein, 566 aa, Artificial Sequence; identical to SEQ ID NO: 650
  derived and/or modified protein sequence (wt) from hemagglutinin__InfluenzaA__ABK79992

SEQ ID NO: 1435 - protein, 566 aa, Artificial Sequence; identical to SEQ ID NO: 921
  derived and/or modified protein sequence (wt) from hemagglutinin__InfluenzaA__ABK80025

SEQ ID NO: 1436 - protein, 566 aa, Artificial Sequence; identical to SEQ ID NO: 921
  derived and/or modified protein sequence (wt) from hemagglutinin__InfluenzaA__ABK80036

SEQ ID NO: 1437 - protein, 566 aa, Artificial Sequence; identical to SEQ ID NO: 921
  derived and/or modified protein sequence (wt) from hemagglutinin__InfluenzaA__ABK80047

SEQ ID NO: 1438 - protein, 566 aa, Artificial Sequence; identical to SEQ ID NO: 766
  derived and/or modified protein sequence (wt) from hemagglutinin__InfluenzaA__ABK80058

SEQ ID NO: 1439 - protein, 566 aa, Artificial Sequence
  derived and/or modified protein sequence (wt) from hemagglutinin__InfluenzaA__ABK80069
MKTIIALSYILCLVFAQKLPVNDNSTATLCLGHHAVPNGTLVKTITNDHIEVTNATELVQSSSTGRICDSPHQILDGENCTLIDALLGDPHCDGFQNKEWDLFVERSTAYSNCYPYDVPDYASLRSLVASSGTLEFNNESFNWTGVAQNGTSSACKRRSIKSFFSRLNWLHQLKYKYPALNVTMPNNEKFDKLYIWGVHHPSTDSDQISLYAQASGRVTVSTKRSQQTVIPNIGSRPWIRGVSSRISIYWTIVKPGDILLINSTGNLIAPRGYFKIRSGKSSIMRSNAPIGKCNSECITPNGSIPNDKPFQNVNRIAYGACPRYVKQNTLKLATGMRNVPEKQTRGIFGAIAGFIENGWEGMVDGWYGFRHLNSEGTGQAADLKSTQAAINQINGKLNRLIEKTNEKFHQIEKEFSEVEGRIQDLEKYVEDTKIDLWSYNAELLVALENQHTIDLTDSEMNKLFERTRKQLRENAEDVGNGCFKIYHKCDNACIGSIRNGTYDHDVYRDEALNNRFQIKGVELKSGYKDWILWISFAISCFLLCVVLLGFIMWACQKGNIRCNICI

SEQ ID NO: 1440 - protein, 566 aa, Artificial Sequence
  derived and/or modified protein sequence (wt) from hemagglutinin__InfluenzaA__ABK80080
MKTIIALSYILCLVFAQKLPVNDNSTATLCLGHHAVPNGTLVKTITNDHIEVTNATELVQSSSTGRICDSPHQILDGENCTLIDALLGDPHCDGFQNKEWDLFVERSTAYSNCYPYDVPDYASLRSLVASSGTLEFNNESFNWTGVAQNGTSSACKRRSIKSFFSRLNWLHQLKYKYPALNVTMPNNEKFDKLYIWGVHHPSTDSDQISLYAQASGRVTVSTKRSQQTVIPNIGSRPWVRGVSSRISIYWTIVKPGDILLINSTGNLIAPRGYFKIRSGKSSIMRSNAPIGKCNSECITPNGSIPNDKPFQNVNRITYGACPRYVKQNTLKLATGMRNVPEKQTRGIFGAIAGFIENGWEGMVDGWYGFRHQNSEGTGQAADLKSTQAAINQINGKLNRLIEKTNEKFHQIEKEFSEVEGRIQDLEKYVEDTKIDLWSYNAELLVALENQHTIDLTDSEMNKLFERTRKQLRENAEDMGNGCLKIYHKCDNACIGSIRNGTYDHDVYRDEALNNRFQIKGVELKSGYKDWILWISFAISCFLLCVVLLGFIMWACQKGNIRCNICI

SEQ ID NO: 1441 - protein, 566 aa, Artificial Sequence; identical to SEQ ID NO: 650
  derived and/or modified protein sequence (wt) from hemagglutinin__InfluenzaA__ABK80091

SEQ ID NO: 1442 - protein, 566 aa, Artificial Sequence; identical to SEQ ID NO: 650
  derived and/or modified protein sequence (wt) from hemagglutinin__InfluenzaA__ABK80102

SEQ ID NO: 1443 - protein, 566 aa, Artificial Sequence; identical to SEQ ID NO: 51
  derived and/or modified protein sequence (wt) from hemagglutinin__InfluenzaA__ABK80113

SEQ ID NO: 1444 - protein, 566 aa, Artificial Sequence
  derived and/or modified protein sequence (wt) from hemagglutinin__InfluenzaA__ABK80124
MKTIIALSYILCLVFAQKLPGNDNSTATLCLGHHAVPNGTLVKTITNDQIEVTNATELVQSSSTGRICDSPHQILDGENCTLIDALLGDPHCDGFQNKEWDLFVERSKAYSNCYPYDVPDYVSLRSLVASSGTLEFNNESFNWTGVAQNGTSSACKRRSDKSFFSRLNWLHQLKYKYPALNVTMPNNEKFDKLYIWGVHHPGTDSDQISLYAQASGRVTVSTKRSQQTVIPNIGSRPWVRGVSSRISIYWTIVKPGDILLINSTGNLIAPRGYFKIRSGKSSIMRSDAPIGKCNSECITPNGSIPNDKPFQNVNRITYGPCPRYVKQNTLKLATGMRNVPEKQTRGIFGAIAGFIENGWEGMMDGWYGFRHQNSEGTGQAADLKSTQAAINQINGKLNRLIEKTNEKFHQIEKEFSEVEGRIQDLEKYVEDTKIDLWSYNAELLVALENQHTIDLTDSEMNKLFERTKKQLRENAEDMGNGCFKIYHKCDNACIGSIRNGTYDHDVYRDEALNNRFQIKGVELKSGYKNWILWISFAISCFLLCIVLLGFIMWACQKGNIRCNICI

SEQ ID NO: 1445 - protein, 566 aa, Artificial Sequence; identical to SEQ ID NO: 51
  derived and/or modified protein sequence (wt) from hemagglutinin__InfluenzaA__ABK80135

SEQ ID NO: 1446 - protein, 566 aa, Artificial Sequence; identical to SEQ ID NO: 51
  derived and/or modified protein sequence (wt) from hemagglutinin__InfluenzaA__ABK80146

SEQ ID NO: 1447 - protein, 566 aa, Artificial Sequence; identical to SEQ ID NO: 51
  derived and/or modified protein sequence (wt) from hemagglutinin__InfluenzaA__ABK80157

SEQ ID NO: 1448 - protein, 566 aa, Artificial Sequence; identical to SEQ ID NO: 562
  derived and/or modified protein sequence (wt) from hemagglutinin__InfluenzaA__ABK80168

SEQ ID NO: 1449 - protein, 566 aa, Artificial Sequence
  derived and/or modified protein sequence (wt) from hemagglutinin__InfluenzaA__ABK80179
MKTIIALSYILCLVFAQKLPGNDNSTATLCLGHHAVPNGTLVKTITNDQIEVTNATELVQSSSTGRICDSPHQILDGENCTLIDALLGDPHCDGFQNKEWDLFVERSKAYSNCYPYDVPDYVSLRSLVASSGTLEFNNESFNWTGVAQNGTSSACKRRSDKSFFSRLNWLHQLKYKYPALNVTMPNNEKFDKLYIWGVHHPGTDSDQISLYAQASGRVTVSTKRSQQTVIPNIGSRPWVRGVSSRISIYWTIVKPGDILLINSTGNLIAPRGYFKIRSGKSSIMRSDAPIGKCNSECITPNGSVPNDKPFQNVNRITYGACPRYVKQNTLKLATGMRNVPEKQTRGIFGAIAGFIENGWEGMMDGWYGFRHQNSEGTGQAADLKSTQAAINQINGKLNRLIEKTNEKFHQIEKEFSEVEGRIQDLEKYVEDTKIDLWSYNAELLVALENQHTIDLTDSEMNKLFERTKKQLRENAEDMGNGCFKIYHKCDNACIGSIRNGTYDHDVYRDEALNNRLQIKGVELKSGYKDWILWISFAISCFLLCIVLLGFIMWACQKGNIRCNICI

SEQ ID NO: 1450 - protein, 566 aa, Artificial Sequence; identical to SEQ ID NO: 562
  derived and/or modified protein sequence (wt) from hemagglutinin__InfluenzaA__ABK80190

SEQ ID NO: 1451 - protein, 566 aa, Artificial Sequence; identical to SEQ ID NO: 1305
  derived and/or modified protein sequence (wt) from hemagglutinin__InfluenzaA__ABK80201

SEQ ID NO: 1452 - protein, 566 aa, Artificial Sequence
  derived and/or modified protein sequence (wt) from hemagglutinin__InfluenzaA__ABK80212
MKTIIALSYILCLVFAQKLPGNDNSTATLCLGHHAVPNGTIVKTITNDQIEVTNATELVQSSSTGGICDSPHQILDGENCTLIDALLGDPQCDGFQNKKWDLFVERSKAYSNCYPYDVPDYASLRSLVASSGTLEFNNESFDWTGVTQNGTSSACKRRSNKSFFSRLNWLTHLKYKYPALNVTMPNNEKFDKLYIWGVHHPGTDSDQISLYAQASGRITVSTKRSQQTVIPNIGSRPRVRDVSSRISIYWTIVKPGDILLINSTGNLIAPRGYFKIRSGKSSIMRSDAPIGKCNSECITPNGSIPNDKPFQNVNRITYGACPRYVKQNTLKLATGMRNVPEKQTRGIFGAIAGFIENGWEGMVDGWYGFRHQNSEGTGQAADLKSTQAAINQINGKLNRLIGKTNEKFHQIEKEFSEVEGRIQDLEKYVEDTKIDLWSYNAELLVALENQHTIDLTDSEMNKLFERTKKQLRENAEDMGNGCFKIYHKCDNACIGSIRNGTYDHDVYRDEALNNRFQIKGVELKSGYKNWILWISFAISCFLLCVALLGFIMWACQKGNIRCNICI

SEQ ID NO: 1453 - protein, 566 aa, Artificial Sequence; identical to SEQ ID NO: 516
  derived and/or modified protein sequence (wt) from hemagglutinin__InfluenzaA__ABK80223

SEQ ID NO: 1454 - protein, 566 aa, Artificial Sequence
  derived and/or modified protein sequence (wt) from hemagglutinin__InfluenzaA__ABK80234
MRTIIALSYILCLVFAQKLPGNDNSTATLCLGHHAVPNGTIVKTITNDQIEVTNATELVQSSSTGGICDSPHQILDGENCTLIDALLGDPQCDGFQNKKWDLFVERSKAYSNCYPYDVPDHASLRSLVASSGTLEFNNESFDWTGVTQNGTSSACKRRSNKSFFSRLNWLTHLKYKYPALNVTMPNNEKFDKLYIWGVHHPGTDSDQISLYAQASGRITVSTKRSQQTVIPNIGSRPRVRDVSSRISIYWTIVKPGDILLINSTGNLIAPRGYFKIRSGKSSIMRSDAPIGKCNSECITPNGSIPNDKPFQNVNRITYGACPRYVKQNTLKLATGMRNVPEKQTRGIFGAIAGFIENGWEGMVDGWYGFRHQNSEGTGQAADLKSTQAAINQINGKLNRLIGKTNEKFHQIEKEFSEVEGRIQDLEKYVEDTKIDLWSYNAELLVALENQHTIDLTDSEMNKLFERTKKQLRENAEDMGNGCFKIYHKCDNACIGSIRNGTYDHDVYRDEALNNRFQIKGVELKSGYKDWILWISFAISCFLLCVALLGFIMWACQKGNIRCNICI

SEQ ID NO: 1455 - protein, 566 aa, Artificial Sequence
  derived and/or modified protein sequence (wt) from hemagglutinin__InfluenzaA__ABK80245
MKTIIALSYILCLVFAQKLPGNDNSTATLCLGHHAVPNGTIVKTITNDQIEVTNATELVQSSSTGGICDSPHQILDGENCTLIDALLGDPQCDGFQNKKWDLFVERSKAHSNCYPYDVPDYASLRSLIASSGTLEFNNESFNWTGVTQNGTSSACKRRSNQSFFSRLNWLTHLKFKYPALNVTMPNNEKFDKLYIWGVHHPGTDSDQISLYAQAPGRITVSTKRSQQTVIPNIGSRPRVRDISSRISIYWTIVKPGDILLINSTGNLIAPRGYFKIRSGKSSIMKSDAPIGKCNSECITPNGSIPNDKPFQNVNRITYGACPRYVKQNTLKLATGMRNVPEKQTRGIFGAIAGFIENGWEGMVDGWYGFRHQNSEGTGQAADLKSTQAAINQINGKLNRLIGKTNEKFHQIEKEFSEVEGRIQDLEKYVEDTKIDLWSYNAELLVALENQHTIDLTDSEMNKLFERTKKQLRENAEDMGNGCFKIYHKCDNACIGSIRNGTYDHDVYRDEALNNRFQIKGVELKSGYKDWILWISFAISCLLLCVALLGFIMWACQKGNIRCNICI

SEQ ID NO: 1456 - protein, 566 aa, Artificial Sequence; identical to SEQ ID NO: 1455
  derived and/or modified protein sequence (wt) from hemagglutinin__InfluenzaA__ABK80256

SEQ ID NO: 1457 - protein, 566 aa, Artificial Sequence; identical to SEQ ID NO: 612
  derived and/or modified protein sequence (wt) from hemagglutinin__InfluenzaA__ABK80267

SEQ ID NO: 1458 - protein, 566 aa, Artificial Sequence; identical to SEQ ID NO: 633
  derived and/or modified protein sequence (wt) from hemagglutinin__InfluenzaA__ABK80278

SEQ ID NO: 1459 - protein, 566 aa, Artificial Sequence
  derived and/or modified protein sequence (wt) from hemagglutinin__InfluenzaA__ABK80289
MKTIIALSYILCLVFAQKLPGNDNSTATLCLGHHAVPNGTIVKTITNDQIEVTNATELVQSSSTGGICDSPHQILDGENCTLIDALLGDPQCDGFQNKKWDLFVERSKAYSNCYPYDVPDYASLRSLVASSGTLEFNNESFNWTGVTQNGTSSACKRRSNNSFFSRLNWLTHLKFKYPALNVTMPNNEKFDKLYIWGVHHPGTDNDQIFLYAQASGRITVSTKRSQQTVIPNIGSRPRVRNIPSRISIYWTIVKPGDILLINSTGNLIAPRGYFKIRSGKSSIMRSDAPIGKCNSECITPNGSIPNDKPFQNVNRITYGACPRYVKQNTLKLATGMRNVPEKQTRGIFGAIAGFIENGWEGMVDGWYGFRHQNSEGTGQAADLKSTQAAINQINGKLNRLIGKTNEKFHQIEKEFSEVEGRIQDLEKYVEDTKIDLWSYNAELLVALENQHTIDLTDSEMNKLFERTKKQLRENAEDMGNGCFKIYHKCDNACIGSIRNGTYDHDVYRDEALNNRFQIKGVELKSGYKDWILWISFAISCFLLCVALLGFIMWACQKGNIRCNICI

SEQ ID NO: 1460 - protein, 566 aa, Artificial Sequence; identical to SEQ ID NO: 51
  derived and/or modified protein sequence (wt) from hemagglutinin__InfluenzaA__ABK80300

SEQ ID NO: 1461 - protein, 566 aa, Artificial Sequence; identical to SEQ ID NO: 51
  derived and/or modified protein sequence (wt) from hemagglutinin__InfluenzaA__ABK80311

SEQ ID NO: 1462 - protein, 568 aa, Artificial Sequence
  derived and/or modified protein sequence (wt) from hemagglutinin__InfluenzaA__ABL07019
MEKIVLLLSIVSLVKSDQICIGYHANNSTEQVDTIMEKNVTVTHAQDILEKTHNGKLCDLDGVKPLILRDCSVAGWLLGNPMCDEFINVPEWSYIVEKANPTNDLCYPGSFNDYEELKHLLSRINHFEKIQIIPKSSWSDHEASSGVSSACPYLGSPSFFRNVVWLTKKNSTYPTIKKSYNNTNQEDLLVLWGIHHPNNEAEQTRLYQNPTTYISIGTSTLNQRLVPKIATRSKVNGQSGRMEFFWTILKPNDAINFESNGNFIAPEYAYKIVKKGDSAIMKSELEYSNCNTKCQTPMGAINSSMPFHNIHPLTIGECPKYVKSNRLVLATGLRNSPQRESRRKKRGLFGAIAGFIEGGWQGMVDGWYGYHHSNEQGSGYAADKESTQKAIDGVTNKVNSIIDKMNTQFEAVGREFNNLERRIENLNKKMEDGFLDVWTYNAELLVLMENERTLDFHDSNVKNLYDKVRLQLRDNAKELGNGCFEFYHKCDNECMESIRNGTYNYPQYSEEARLKREEISGVKLESIGTYQILSIYSTVASSLALAIMIAGLSLWMCSNGSLQCRICI

SEQ ID NO: 1463 - protein, 568 aa, Artificial Sequence
  derived and/or modified protein sequence (wt) from hemagglutinin__InfluenzaA__ABL07030
MEKIVLLLAIVSLVKSDQICIGYHANNSTEQVDTIMEKNVTVTHAQDILEKTHNGKLCDLDGVKPLILRDCSVAGWLLGNPMCDEFINVPEWSYIVEKANPTNDLCYPGSFNDYEELKHLLSRINHFEKIQIIPKSSWSDHEASSGVSSACPYLGSPSFFRNVVWLIKKNSTYPTIKKSYNNTNQEDLLVLWGIHHPNDAAEQTRLYQNPTTYISIGTSTLNQRLVPKIATRSKVNGQSGRMEFFWAILKPNDAINFESNGNFIAPEYAYKIVKKGDSAIMKSELEYGNCNTKCQTPMGAINSSMPFHNIHPLTIGECPKYVKSNRLVLATGLRNSPQRESRRKKRGLFGAIAGFIEGGWQGMVDGWYGYHHSNEQGSGYAADKESTQKAIDGVTNKVNSIIDKMNTQFEAVGREFNNLERRIENLNKKMEDGFLDVWTYNAELLVLMENERTLDFHDSNVKNLYDKVRLQLRDNAKELGNGCFEFYHKCDNECMESIRNGTYNYPQYSEEARLKREEISGVKLESIGTYQILSIYSTVASSLALAIMIAGLSLWMCSNGSLQCRICI

SEQ ID NO: 1464 - protein, 568 aa, Artificial Sequence
  derived and/or modified protein sequence (wt) from hemagglutinin__InfluenzaA__ABL10088
MEKIVLLFAIVSLVKSDQICIGYHANNSTEQVDTIMEKNVTVTHAQDILEKTHNGKLCDLDGVKPLILRDCSVAGWLLGNPMCDEFINVPEWSYIVEKANPVNDLCYPGDFNDYEELKHLLSRINHFEKIQIIPKSSWSSHEASLGVSSACPYQGKSSFFRNVVWLIKKNSTYPTIKRSYNNTNQEDLLVLWGIHHPNDAAEQTKLYQNPTTYISVGTSTLNQRLVPRIATRSEVNGQSGRMEFFWTILKPNDAINFESNGNFVAPEYAYKIVKKGDSTIMKSELEYGNCNTKCQTPMGAINSSMPFHNIHPLTIGECPKYVKSNRLVLATGLRNSPQRERRRKKRGLFGAIAGFIEGGWQGMVDGWYGYHHSNEQGSGYAANKESTQKAIDGVTNKVNSIIDKMNTQFEAVGREFNNLERRIENLNKKMEDGFLDVWTYNAELLVLMENERTLDFHDSNVKNLYDKVRLQLRDNAKELGNGCFEFYHKCDNECMESVRNGTYDYPQYSEEARLKREEISGVKLESIGIYQILSIYSTVASSLALAIMVAGLSLWMCSNGSLQCRICI

SEQ ID NO: 1465 - protein, 568 aa, Artificial Sequence
  derived and/or modified protein sequence (wt) from hemagglutinin__InfluenzaA__ABL31766
MEKIVLLLAIVSFVKSDQICIGYHANNSTEQVDTIMEKNVTVTHAQDILEKTHNGKLCDLDGVKPLILRDCSVAGWLLGNPMCDEFINVPEWSYIVEKANPTNDLCYPGSFNDYEELKHLLSRINHFEKIQIIPKSSWSDHEASSGVSSACPYLGSPSFFRNVVWLIKKNSTYPTIKKSYNNTNQEDLLVLWGIHHPNDAAEQTRLYQNPTTYISIGTSTLNQRLVPKIATRSKVNGQSGRMEFFWAILKPNDAINFESNGNFIAPEYAYKIVKKGDSAIMKSELEYGNCNTKCQTPMGAINSSMPFHNIHPLTIGECPKYVKSNRLVLATGLRNSPQRESRRKKRGLFGAIAGFIEGGWQGMVDGWYGYHHSNEQGSGYAADKESTQKAIDGVTNKVNSIIDKMNTQFEAVGREFNNLERRIENLNKKMEDGFLDVWTYNAELLVLMENERTLDFHDSNVKNLYDKVRLQLRDNAKELGNGCFEFYHKCDNECMESIRNGTYNYPQYSEEARLKREEISGVKLESIGTYQILSIYSTVASSLALAIMIAGLSLWMCSNGSLQCRICI

SEQ ID NO: 1466 - protein, 568 aa, Artificial Sequence
  derived and/or modified protein sequence (wt) from hemagglutinin__InfluenzaA__ABL31780
MEKIVLLLSIVSLVKSDQICIGYHANNSTEQVDTIMEKNVTVTHAQDILEKTHNGKLCDLDGVKPLILRDCSVAGWLLGNPMCDEFINVPEWSYIVEKANPTNDLCYPGSFNDYEELKHLLSRINHFEKIQIIPKGSWSDHEASSGVSSACPYLRSPSFFRNVVWLIKKNSTYPTIKKSYNNTNQEDLLVLWGIHHPNNEAEQTRLYQNPTTYISIGTSTLNQRLVPKIATRSKVNGQSGRMEFFWTILKPNDAINFESNGNFIAPEYAYKIVKKGDSAIMKSELEYGNCNTKCQTPMGAINSSMPFHNIHPLTIGECPKYVKSNRLVLATGLRNSPQRESRRKKRGLFGAIAGFIEGGWQGMVDGWYGYHHSNEQGSGYAADKESTQKAIDGVTNKVNSIIDKMNTQFEAVGREFNNLERRIENLNKKMEDGFLDVWTYNAELLVLMENERTLDFHDSNVKNLYDKVRLQLRDNAKELGNGCFEFYHKCDNECMESIRNGTYNYPQYSEEARLKREEISGVKLESIGTYQILSIYSTVASSLALAIMIAGLSLWMCSNGSLQCRICI

SEQ ID NO: 1467 - protein, 566 aa, Artificial Sequence
  derived and/or modified protein sequence (wt) from hemagglutinin__InfluenzaA__ABL67165
MKTIIALSYILCLVFAQKLPGNDNSTATLCLGHHAVPNGTIVKTITNDQIEVTNATELVQSSSTSGICDSPHQILDGENCTLIDALLGDPQCDGFQNKKWDLFVERSKAYSNCYPYDVPDHASLRSLVASSGTLEFNNESFDWTGVTQNGTSSACKRRSNKSFFSRLNWLTHLKYKYPALNVTMPNNEKFDKLYIWGVHHPGTDSDQISLYAQASGRITVSTKRSQQTVIPNIGSRPRVRDVSSRISIYWTIVKPGDILLINSTGNLIAPRGYFKIRSGKSSIMRSDAPIGKCNSECITPNGSIPNDKPFQNVNRITYGACPRYVKQNTLKLATGMRNVPEKKTRGIFGAIAGFIENGWEGMVDGWYGFRHQNSEGTGQAADLKSTQAAINQINGKLNRLIGKTNEKFHQIEKEFSEVEGRIQDLEKYVEDTKIDLWSYNAELLVALENQHTIDLTDSEMNKLFERTKKQLRENAEDMGNGCFKIYHKCDNACIGSIRNGTYDHDVYRDEALNNRFQIKGVELKSGYKDWILWISFAISCFLLCVALLGFIMWACQKGNIRCNICI

SEQ ID NO: 1468 - protein, 566 aa, Artificial Sequence
  derived and/or modified protein sequence (wt) from hemagglutinin__InfluenzaA__ABL67176
MKTIIALSYILCLVFTQKLPGNDNSTATLCLGHHAVPNGTLVKTITNDQIEVTNATELVQSSSTGGICDSPHQILDGENCTLIDALLGDPHCDGFQNKEWDLFVERSRAYSNCYPYDVPDYASLRSLVASSGTLEFNNESFNWTGVAQNGTSSACKRRSNKSFFSRLNWLHQLKYKYPALNVTMPNNEKFDKLYIWGVHHPSTDSDQISLYAQAPGRVTVSTKRSQQTVIPNIGSRPWVRGVSSRISIYWTIVKPGDILLINCTGNLIAPRGYFKIRSGKSSIMRSDASIGKCNSECITPNGSIPNDKPFQNVNRITYGACPRYVKQNTLKLATGMRNVPEKQTRGIFGAIAGFIENGWEGMVDGWYGFRHQNSEGTGQAADLKSTQAAINQINGKLNRLIEKTNEKFHQIEKEFSEVEGRIQDLEKYVEDTKIDLWSYNAELLVALENQHTIDLTDSEMNKLFERTKKQLRENAEDMGNGCFKIYHKCDNACIGSIRNGTYDHDVYRDEALNNRFQIKGVELKSGYKDWILWISFAISCFLLCVVLLGFIMWACQKGNIRCNICI

SEQ ID NO: 1469 - protein, 566 aa, Artificial Sequence; identical to SEQ ID NO: 1432
  derived and/or modified protein sequence (wt) from hemagglutinin__InfluenzaA__ABL67187

SEQ ID NO: 1470 - protein, 566 aa, Artificial Sequence; identical to SEQ ID NO: 1387
  derived and/or modified protein sequence (wt) from hemagglutinin__InfluenzaA__ABL67209

SEQ ID NO: 1471 - protein, 566 aa, Artificial Sequence; identical to SEQ ID NO: 921
  derived and/or modified protein sequence (wt) from hemagglutinin__InfluenzaA__ABL67253

SEQ ID NO: 1472 - protein, 566 aa, Artificial Sequence
  derived and/or modified protein sequence (wt) from hemagglutinin__InfluenzaA__ABL67264
MKAKLLVLLCALSATDADTICIGYHANNSTDTVDTVLEKNVTVTHSVNLLEDNHNGKLCKLKGIAPLQLGKCSIAGWILGNPECESLFSKKSWSYIAETPNSENGTCYPGYFADYEELREQLSSVSSFERFEIFPKESSWPKHNVTKGVTASCSHKGKSSFYRNLLWLTEKNGSYPNLSKSYVNNKEKEVLVLWGVHHPSNIEDQKTIYRKENAYVSVVSSHYNRRFTPEIAKRPKVRNQEGRINYYWTLLEPGDTIIFEANGNLIAPWYAFALSRGFGSGIITSNASMDECDAKCQTPQGAINSSFPFQNVHPVTIGECPKYVRSTKLRMVTGLRNIPSIQSRGLFGAIAGFIEGGWTGMIDGWYGYHHQNEQGSGYAADQKSTQNAINGITNKVNSIIEKMNTQFTAVGKEFNKLEKRMENLNKKVDDGFLDIWTYNAELLVLLENERTLDFHDSNVKNLYEKVKSQLKNNAKEIGNGCFEFYHKCNNECMESVKNGTYDYPKYSEESKLNREKIDGVKLESMGVYQILAIYSTVASSLVLLVSLGAISFWMCSNGSLQCRICI

SEQ ID NO: 1473 - protein, 566 aa, Artificial Sequence
  derived and/or modified protein sequence (wt) from hemagglutinin__InfluenzaA__ABL67275
MKTIIALSYILCLVFAQKLPVNDNSTATLCLGHHAVPNGTLVKTITNDHIEVTNATELVQSSSTGRICDSPHQILDGENCTLIDALLGDPHCDGFQNKEWDLFVERSTAYSNCYPYDVPDYASLRSLVASSGTLEFNNESFNWTGVAQNGTSSACKRRSIKSFFSRLNWLHQLKYKYPALNVTMPNNEKFDKLYIWGVHHPSTDSDQISLYAQASGRVTVSTKRSQQTVIPNIGSRPWVRGVSSRISIYWTIVKPGDILLINSTGNLIAPRGYFKIRSGKSSIMRSNAPIGKCNSECITPNGSIPNDKPFQNVNRITYGACPRYVKQNTLKLATGMRNVPEKQTRGIFGAIAGFIENGWEGMVDGWYGFRHQNSEGTGQAADLKSTQAAINQINGKLNRLIEKTNEKFHQIEKEFSEVEGRIQDLEKYVEDTKIDLWSYNAELLVALENQHTIDLTDSEMNKLFERTRKQLRENAEDVGNGCFKIYHKCDNACIGSIRNGTYDHDVYRDEALNNRFQIKGVKLKSGYKDWILWISFAISCFLLCVVLLGFIMWACQKGNIRCNICI

SEQ ID NO: 1474 - protein, 566 aa, Artificial Sequence
  derived and/or modified protein sequence (wt) from hemagglutinin__InfluenzaA__ABL67286
MKTIIALSYILCLVFAQKLPGNDNSTATLCLGHHAVPNGTLVKTITNDQIEVTNATELVQSSSTGRICDSPHQILDGENCTLIDALLGDPHCDGFQNKEWDLFVERSKAYSNCYPYDVPDYVSLRSLVASSGTLEFNNESFNWTGVAQNGTSSACKRRSDKSFFSRLNWLHQLKYKYPALNVTMPNNEKFDKLYIWGVHHPGTDSDQISLYAQASGRVTVSTKRSQQTVIPNIGSRPWVRGVSSRISIYWTIVKSGDILLINSTGNLIAPRGYFKIRSGKSSIMRSDAPIGKCNSECITPNGSIPNDKPFQNVNRITYGPCPRYVKQNTLKLATGMRNVPEKQTRGIFGAIAGFIENGWEGMMDGWYGFRHQNSEGTGQAADLKSTQAAINQINGKLNRLIEKTNEKFHQIEKEFSEVEGRIQDLEKYVEDTKIDLWSYNAELLVALENQHTIDLTDSEMNKLFERTKKQLRENAEDMGNGCFKIYHKCDNACIGSIRNGTYDHDVYRDEALNNRFQIKGVELKSGYKDWILWISFAISCFLLCIVLLGFIMWACQKGNIRCNICI

SEQ ID NO: 1475 - protein, 566 aa, Artificial Sequence; identical to SEQ ID NO: 1005
  derived and/or modified protein sequence (wt) from hemagglutinin__InfluenzaA__ABL67297

SEQ ID NO: 1476 - protein, 566 aa, Artificial Sequence
  derived and/or modified protein sequence (wt) from hemagglutinin__InfluenzaA__ABL67308
MKTIIALSYILCLVFAQKLPGNDNSMATLCLGHHAVPNGTLVKTITNDQIEVTNATELVQSSSTGRICDSPHQILDGENCTLIDALLGDPHCDGFQNKEWDLFVERSKAYSSCYPYDVPDYVSLRSLVASSGTLEFNNESFNWTGVAQNGTSSACKRRSDKSFFSRLNWLHQLKYKYPALNVTMPNNEKFDKLYIWGVHHPGTDSDQISLYAQASGRVTVSTKRSQQTVIPNIGSRPWVRGVSSRISIYWTIVKPGDILLINSTGNLIAPRGYFKIRSGKSSIMRSDAPIDKCNSECITPNGSIPNDKPFQNVNRITYGLCPRYVKQNTLKLATGMRNVPEKQTRGIFGAIAGFIENGWEGMMDGWYGFRHQNSEGTGQAADLKSTQAAINQINGKLNRLIEKTNEKFHQIEKEFSEVEGRIQDLEKYVEDTKIDLWSYNAELLVALENQHTIDLTDSEMNKLFERTKKQLRENAEDMGNGCFKIYHKCDNACIGSIRNGTYDHDVYRDEALNNRFQIKGVELKSGYKDWILWISFAISCFLLCIVLLGFIMWACQKGNVRCNICI

SEQ ID NO: 1477 - protein, 566 aa, Artificial Sequence; identical to SEQ ID NO: 562
  derived and/or modified protein sequence (wt) from hemagglutinin__InfluenzaA__ABL67319

SEQ ID NO: 1478 - protein, 566 aa, Artificial Sequence; identical to SEQ ID NO: 1305
  derived and/or modified protein sequence (wt) from hemagglutinin__InfluenzaA__ABL67330

SEQ ID NO: 1479 - protein, 566 aa, Artificial Sequence; identical to SEQ ID NO: 516
  derived and/or modified protein sequence (wt) from hemagglutinin__InfluenzaA__ABL67341

SEQ ID NO: 1480 - protein, 566 aa, Artificial Sequence; identical to SEQ ID NO: 516
  derived and/or modified protein sequence (wt) from hemagglutinin__InfluenzaA__ABL67352

SEQ ID NO: 1481 - protein, 566 aa, Artificial Sequence; identical to SEQ ID NO: 32
  derived and/or modified protein sequence (wt) from hemagglutinin__InfluenzaA__ABL67363

SEQ ID NO: 1482 - protein, 566 aa, Artificial Sequence
  derived and/or modified protein sequence (wt) from hemagglutinin__InfluenzaA__ABL67374
MKTIIALSYILCLVFAQKLPGNDNSTATLCLGHHAVPNGTIVKTITNDQIEVTNATELVQSSSTGGICDSPHQILDGENCTLIDALLGDPQCDGFQNKKWDLFVERSKAHSNCYPYDVPDYASLRSLIASSGTLEFNNESFNWTGVTQNGTSSACKRRSNQSFFSRLNWLTHLKFKYPALNVTMPNNEKFDKLYIWGVHHPGTDSDQISLYAQAPGRITVSTKRSQQTVIPNIGSRPRVRDISSRISIYWTIVKPGDILLINSTGNLIAPRGYFKMRSGKSSIMKSDAPIGKCNSECITPNGSIPNDKPFQNVNRITYGACPRYVKQNTLKLATGMRNVPEKQTRGIFGAIAGFIENGWEGMVDGWYGFRHQNSEGTGQAADLKSTQAAINQINGKLNRLIGKTNEKFHQIEKEFSEVEGRIQDLEKYVEDTKIDLWSYNAELLVALENQHTIDLTDSEMNKLFERTKKQLRENAEDMGDGCFKIYHKCDNACIGSIRNGTYDHDVYRDEALNNRFQIKGVELKSGYKDWILWISFAISCLLLCVALLGFIMWACQKGNIRCNICI

SEQ ID NO: 1483 - protein, 566 aa, Artificial Sequence; identical to SEQ ID NO: 282
  derived and/or modified protein sequence (wt) from hemagglutinin__InfluenzaA__ABL67385

SEQ ID NO: 1484 - protein, 566 aa, Artificial Sequence; identical to SEQ ID NO: 612
  derived and/or modified protein sequence (wt) from hemagglutinin__InfluenzaA__ABL67396

SEQ ID NO: 1485 - protein, 566 aa, Artificial Sequence; identical to SEQ ID NO: 630
  derived and/or modified protein sequence (wt) from hemagglutinin__InfluenzaA__ABL67407

SEQ ID NO: 1486 - protein, 566 aa, Artificial Sequence
  derived and/or modified protein sequence (wt) from hemagglutinin__InfluenzaA__ABL67418
MKTIIALSYILCLVFAQKLPGNDNSTATLCLGHHAVPNGTIVKTITNDQIEVTNATELVQSSSTGGICNSPHQILDGENCTLIDALLGDPQCDGFQNKKWDLFVERSKAYSNCYPYDVPDYASLRSLVASSGTLEFNNESFNWTGVTQNGTSSACKRRSNNSFFSRLNWLTHLKFKYPALNVTMPNNEKFDKLYIWGVHHPGTDNDQIFLYAQASGRITVSTKRSQQTVIPNIGSRPRVRNIPSRISIYWTIVKPGDILLINSTGNLIAPRGYFKIRSGKSSIMRSDAPIGKCNSECITPNGSIPNDKPFQNVNRITYGACPRYVKQNTLKLATGMRNVPEKQTRGIFGAIAGFIENGWEGMVDGWYGFRHQNSEGIGQAADLKSTQAAINQINGKLNRLIGKTNEKFHQIEKEFSEVEGRIQDLEKYVEDTKIDLWSYNAELLVALENQHTIDLTDSEMNKLFERTKKQLRENAEDMGNGCFKIYHKCDNACIGSIRNGTYDHDVYRDEALNNRFQIKGVELKSGYKDWILWISFAISCFLLCVALLGFIMWACQKGNIRCNICI

SEQ ID NO: 1487 - protein, 568 aa, Artificial Sequence; identical to SEQ ID NO: 28
  derived and/or modified protein sequence (wt) from hemagglutinin__InfluenzaA__ABL67781

SEQ ID NO: 1488 - protein, 568 aa, Artificial Sequence
  derived and/or modified protein sequence (wt) from hemagglutinin__InfluenzaA__ABL67794
MEKIVLLFAIVSLVKSDQICIGYHANNSTEQVDTIMEKNVTVTHAQDILEKTHNGKLCDLDGVKPLILRDCSVAGWLLGNPMCDEFINVPEWSYIVEKANPVNDLCYPGDFNDYEELKHLLSRINHFEKIQIIPKSSWSSHEASLGVSSACPYQGKSSFFRNVVWLIKKNSTYPTIKRSYNNTNQEDLLVLWGIHHPNDAAEQTKLYQNPTTYISVGTSTLNQRLVPRIATRSKVNGQSGRMEFFWTILKPNDAINFESNGNFIAPEYAYKIVKKGDSTIMKSELEYGNCNTKCQTPMGAINSSMPFHNIHPLTIGECPKYVKSNRLVLATGLRNSPQREKRRKKRGLFGAIAGFIEGGWQGMVDGWYGYHHSNEQGSGYAADKESTQKAIDGVTNKVNSIIDKMNTQFEAVGREFNNLERRIENLNKKMEDGFLDVWTYNAELLVLMENERTLDFHDSNVKNLYDKVRLQLRDNAKELGNGCFEFYHKCDNECMESVRNGTYDYPQYSEEARLKREEISGVKLESIGIYQILSIYSTVASSLALAIMVAGLSLWMCSNGSLQCRICI

SEQ ID NO: 1489 - protein, 568 aa, Artificial Sequence
  derived and/or modified protein sequence (wt) from hemagglutinin__InfluenzaA__ABL67816
MEKIVLLFAIVSLVKSDQICIGYHANNSTEQVDTIMEKNVTVTHAQDILEKTHNGKLCDLDGVKPLILRDCSVAGWLLGNPMCDEFINVPEWSYIVEKANPVNDLCYPGDFNDYEELKHLLSRINHFEKIQIIPKSSWSSHEASLGVSSACPYQGKSSFFRNVVWLIKKNSTYPTIKRSYNNTNQEDLLVLWGIHHPNDAAEQTKLYQNPTTYISVGTSTLNQRLVPRIATRSKVNGQSGRMEFFWTILKPNDAINFESNGNFIAPEYAYKIVKKGDSTIMKSELEYGNCNTKCQTPMGAINSSMPFHNIHPLTIGECPKYVKSNRLVLATGLRNSPQRERRRKKRGLFGAIAGFIEGGWQGMVDGWYGYHHSNEQGSGYAADKESTQKAIDGVTNKVNSIINKMNTQFEAVGREFNNLERRIENLNKKMEDGFLDVWTYNAELLVLMENERTLDFHDSNVKNLYDKVRLQLRDNAKELGNGCFEFYHKCDNECMESVRNGTYDYPQYSEEARLKREEISGVKLESIGIYQILSIYSTVASSLALAIMVAGLSLWMCSNGSLQCRICI

SEQ ID NO: 1490 - protein, 568 aa, Artificial Sequence
  derived and/or modified protein sequence (wt) from hemagglutinin__InfluenzaA__ABL67827
MEKIVLLFAIVSLVKSDHICIGYHANNSTEQVDTIMEKNVTVTHAQDILEKTHNGKLCDLDGVKPLILRDCSVAGWLLGNPMCDEFINVPEWSYIVEKANPVNDLCYPGDFNDYEELKHLLSRINHFEKIQIIPKSSWSSHEASLGVSSACPYQGKSSFFRNVVWLIKKNSTYPTIKRSYNNTNQEDLLVLWGIHHPNDAAEQTKLYQNPTTYISVGTSTLNQRLVPRIATRSKVNGQSGRMEFFWTILKPNDAINFESNGNFIAPEYAYEIVKKGDSTIMKSELEYGNCNTKCQTPMGAINSSMPFHNIHPLTIGECPKYVKSNRLVLATGLRNSPQIERRRKKRGLFGAIAGFLEGGWQGMVDGWYGYHHSNEQGSGYAADKESTQKAIDGVTNKVNSIINKMNTQFEAVGREFNNLERRIENLNKKMEDGFLDVWTYNAELLVLMENERTLDFHDSNVKNLYDKVRLQLRDNAKELGNGCFEFYHKCDNECMESVRNGTYDYPQYSEEARLKREEISGVKLESIGIYQILSIYSTVASSLALAIMVAGLSLWMCSNGSLQCRICI

SEQ ID NO: 1491 - protein, 566 aa, Artificial Sequence
  derived and/or modified protein sequence (wt) from hemagglutinin__InfluenzaA__ABM22015
MKTIIALSYILCLVFAQKLPGNDNSTATLCLGHHAVPNGTIVKTITNDQIEVTNATELVQSSSTGGICDSPHQILDGENCTLIDALLGDPQCDGFQNKKWDLFVERSKAYSNCYPYDVPDYASLRSLVASSGTLEFNNESFNWTGVTQNGTSSACKRRSNNSFFSRLNWLTHLKFKYPALNVTMPNNEKFDKLYIWGVHHPGTDNDQIFLYAQASGRITVSTKRSQQTVIPNIGSRPRVRNIPSRISIYWTIVKPGDILLINSTGNLIAPRGYFKIRSGKSSIMRSDAPIGKCNSECITPNGSIPNDKPFQNVNRITYGACPRYVKQNTLKLATGMRNVPEKQTRGIFGAIAGFIENGWEGMVDGWYGFRHQNSEGIGQAADLKSTQAAINQINGKLNRLIGKTNEKFHQIEKEFSEVEGRIQDLEKYVEDTKIDLWSYNAELLVALENQHTIDLTDSEMNKLFERTKKQLRENAEDMGNGCFKIYHKCDNACIGSIRNGTYDHDVYRDEALNNRFQIKGVELKSGYKDWILWISFAISCFLLCVALLGFIMWACQKGNIRCDICI

SEQ ID NO: 1492 - protein, 566 aa, Artificial Sequence
  derived and/or modified protein sequence (wt) from hemagglutinin__InfluenzaA__ABM22026
MKAKLLVLLCAFTATYADTICIGYHANNSTDTVDTVLEKNVTVTHSVNLLEDSHNGKLCRLKGTAPLQLGNCSIAGWILGNPECESLFSKESWSYIAETPNPKNGTCYPGYFADYEELREQLSSVSSFKRFEIFPKDSSWPNHTVTKGVTASCSHNGKSSFYKNLLWLTEKNGLYPNLSKSYVNKKGKEVLVLWGVHHPSNMGDQRAIYHKENAYVSVLSSHYSRRFTPEIARRPKVRDQEGRINYYWTLLEPGDTIIFEANGNLIAPWYAFALSRGFGSGIIISNASMGECDAKCQTPQGAINSSLPFQNVHPVTIGECPKYVRSTKLRMVTGLRNVPSIQSRGLFGAIAGFIEGGWTGMIDGWYGYHHQNEQGSGYAADQKSTQNAINGITNKVNSIIEKMNTQFTAVGKEFNKLERRMENLNKKVDDGFLDIWTYNAELLVLLENERTLDFHDSNVKNLYEKVKNQLKNNAKEIGNGCFEFYHKCNNECMESVKNGTYDYPKYSKESKLNREKIDGVKLESMGVYQILAIYSTVASSLVLLVSLGAISFWMCSNGSLQCRICI

SEQ ID NO: 1493 - protein, 566 aa, Artificial Sequence; identical to SEQ ID NO: 633
  derived and/or modified protein sequence (wt) from hemagglutinin__InfluenzaA__ABM22037

SEQ ID NO: 1494 - protein, 566 aa, Artificial Sequence; identical to SEQ ID NO: 51
  derived and/or modified protein sequence (wt) from hemagglutinin__InfluenzaA__ABM22059

SEQ ID NO: 1495 - protein, 566 aa, Artificial Sequence; identical to SEQ ID NO: 1305
  derived and/or modified protein sequence (wt) from hemagglutinin__InfluenzaA__ABM22070

SEQ ID NO: 1496 - protein, 566 aa, Artificial Sequence
  derived and/or modified protein sequence (wt) from hemagglutinin__InfluenzaA__ABM22081
MKTIIALSYILCLVFAQKLPGNDNSTATLCLGHHAVPNGTIVKTITNDQIEVTNATELVQSSSTGGICDSPHQILDGENCTLIDALLGDPQCDGFQNKKWDLFVERSKAYSNCYPYDVPDHASLRSLVASSGTLEFNNESFDWTGVTQNGTSSACKRRSNKSFFSRLNWLTHLKYKYPALNVTMPNNEKFDKLYIWGVHHPGTDSDQISLYAQASGRITVSTKRSQQTVIPNIGSRPRVRDVSSRISIYWTIVKPGDILLINSTGNLIAPRGYFKIRSGKSSIMRSDAPIGKCNSECITPNGSIPNDKPFQNVNRITYGACPRYVKQNTLKLATGMRNIPEKQTRGIFGAIAGFIENGWEGMVDGWYGFRHQNSEGTGQAADLKSTQAAINQINGKLNRLIGKTNEKFHQIEKEFSEVEGRIQDLEKYVEDTKIDLWSYNAELLVALENQHTIDLTDSEMNKLFERTKKQLRENAEDMGNGCFKIYHKCDNACIGSIRNGTYDHDVYRDEALNNRFQIKGVELKSGYKDWILWISFAISCFLLCVALLGFIMWACQKGNIRCNICI

SEQ ID NO: 1497 - protein, 566 aa, Artificial Sequence
  derived and/or modified protein sequence (wt) from hemagglutinin__InfluenzaA__ABM22092
MKTIIALSYILCLVFAQKLPGNDNSTATLCLGHHAVPNGTIVKTITNDQIEVTNATELVQSSSTGEICDSPHQILDGENCTLIDALLGDPQCDGFQNKKWDLFVERSKAYSNCYPYDVPDHASLRSLVASSGTLEFNNESFDWAGVTQNGTSSACKRRSNKSFFSRLNWLTHLKYKYPALNVTMPNNEKFDKLYIWGVHHPGTDSDQISLYAQASGRITVSTKRSQQTVIPNIGSRPRVRDVSSRISIYWTIVKPGDILLINSTGNLIAPRGYFKIRSGKSSIMRSDAPIGKCNSECITPNGSIPNDKPFQNVNRITYGACPRYVKQNTLKLATGMRNVPEKQTRGIFGAIAGFIENGWEGMVDGWYGFRHQNSEGTGQAADLKSTQAAINQINGKLNRLIGKTNEKFHQIEKEFSEVEGRIQDLEKYVEDTKIDLWSYNAELLVALENQHTIDLTDSEMNKLFERTKKQLRENAEDMGNGCFKIYHKCDNACIGSIRNGTYDHDVYRDEALNNRFQIKGVELKSGYKDWILWISFAISCFLLCVALLGFIMWACQKGNIRCNICI

SEQ ID NO: 1498 - protein, 566 aa, Artificial Sequence; identical to SEQ ID NO: 1310
  derived and/or modified protein sequence (wt) from hemagglutinin__InfluenzaA__ABM22103

SEQ ID NO: 1499 - protein, 566 aa, Artificial Sequence; identical to SEQ ID NO: 516
  derived and/or modified protein sequence (wt) from hemagglutinin__InfluenzaA__ABM22114

SEQ ID NO: 1500 - protein, 566 aa, Artificial Sequence; identical to SEQ ID NO: 1455
  derived and/or modified protein sequence (wt) from hemagglutinin__InfluenzaA__ABM22125

SEQ ID NO: 1501 - protein, 566 aa, Artificial Sequence
  derived and/or modified protein sequence (wt) from hemagglutinin__InfluenzaA__ABM22136
MKTIIALSYILCLVFAQKLPGNDNSTATLCLGHHAVPNGTIVKTITNDQIEVTNATELVQSSSTGGICDSPHQILDGENCTLIDALLGDPQCDGFQNKKWDLFVERSKAYSNCYPYDVPDYASLRSLVASSGTLEFNNESFNWTGVTQNGTSSACKRRSNNSFFSRLNWLTHLKFKYPALNVTMPNNEKFDKLYIWGVHHPGTDNDQIFLYAQASGRITVSTKRSQQTVIPNIGSRPRVRNIPSRISIYWTIVKPGDILLINSTGNLIAPRGYFKIRSGKSSIMRSDAPIGKCNSECITPNGSIPNDKPFQNVNRITYGACPRYVKQNTLKLAIGMRNVPEKQTRGIFGAIAGFIENGWEGMVDGWYGFRHQNSEGIGQAADLKSTQAAINQINGKLNRLIGKTNEKFHQIEKEFSEVEGRIQDLEKYVEDTKIDLWSYNAELLVALENQHTIDLTDSEMNKLFERTKKQLRENAEDMGNGCFKIYHKCDNACIGSIRNGTYDHDVYRDEALNNRFQIKGVELKSGYKDWILWISFAISCFLLCVALLGFIMWACQKGNIRCNICI

SEQ ID NO: 1502 - protein, 566 aa, Artificial Sequence; identical to SEQ ID NO: 633
  derived and/or modified protein sequence (wt) from hemagglutinin__InfluenzaA__ABM22147

SEQ ID NO: 1503 - protein, 566 aa, Artificial Sequence; identical to SEQ ID NO: 921
  derived and/or modified protein sequence (wt) from hemagglutinin__InfluenzaA__ABM22158

SEQ ID NO: 1504 - protein, 566 aa, Artificial Sequence; identical to SEQ ID NO: 921
  derived and/or modified protein sequence (wt) from hemagglutinin__InfluenzaA__ABM22169

SEQ ID NO: 1505 - protein, 566 aa, Artificial Sequence; identical to SEQ ID NO: 921
  derived and/or modified protein sequence (wt) from hemagglutinin__InfluenzaA__ABM22180

SEQ ID NO: 1506 - protein, 566 aa, Artificial Sequence; identical to SEQ ID NO: 921
  derived and/or modified protein sequence (wt) from hemagglutinin__InfluenzaA__ABM22191

SEQ ID NO: 1507 - protein, 566 aa, Artificial Sequence; identical to SEQ ID NO: 921
  derived and/or modified protein sequence (wt) from hemagglutinin__InfluenzaA__ABM22202

SEQ ID NO: 1508 - protein, 566 aa, Artificial Sequence; identical to SEQ ID NO: 921
  derived and/or modified protein sequence (wt) from hemagglutinin__InfluenzaA__ABM22213

SEQ ID NO: 1509 - protein, 566 aa, Artificial Sequence; identical to SEQ ID NO: 921
  derived and/or modified protein sequence (wt) from hemagglutinin__InfluenzaA__ABM22224

SEQ ID NO: 1510 - protein, 566 aa, Artificial Sequence; identical to SEQ ID NO: 921
  derived and/or modified protein sequence (wt) from hemagglutinin__InfluenzaA__ABM22235

SEQ ID NO: 1511 - protein, 566 aa, Artificial Sequence
  derived and/or modified protein sequence (wt) from hemagglutinin__InfluenzaA__ABM22268
MKVKLLVLLCAFTATYADTICIGYHANNSTDTVDTVLEKNVTVTHSVNLLEDSHNGKLCRLKGTAPLQLGNCSVAGWILGNPECESLFSKESWSYIAETPNPENGTCYPGYFADYEELREQLSSVSSFERFEIFPKESSWPNHTVTKGVTASCSHNGKSSFYKNLLWLTEKNGLYPNLSKSYVNNKEKEVLVLWGVHHPSNIGDQRAIYHTENAYVSVVSSHYSRRFTPEIAKRPKVRDQEGRINYYWTLLEPGDTIIFEANGNLIAPWYAFALSRGFGSGIITSNASMGECDAKCQTPQGAINSSLPFQNVHPVTIGECPKYVRSTKLRMVTGLRNIPSIQSRGLFGAIAGFIEGGWTGMIDGWYGYHHQNEQGSGYAADQKSTQNAIDGITNKVNSVIEKMNTQFTAVGKEFNKLERRMENLNKKVDDGFLDIWTYNAELLVLLENERTLDFHDSNVKNLYEKVKNQLKNNAKEIGNGCFEFYHKCNNECMESVKNGTYDYPKYSEESKLNREKIDGVKLESMGVYQILAIYSTVASSLVLLVSLGAISFWMCSNGSLQCRICI

SEQ ID NO: 1512 - protein, 566 aa, Artificial Sequence
  derived and/or modified protein sequence (wt) from hemagglutinin__InfluenzaA__ABM22279
MKAKLLVLLCAFTATYADTICIGYHANNSTDTVDTVLEKNVTVTHSVNLLEDRHNGKLCRLKGTAPLQLGNCSVAGWILGNPECESLFSKESWSYIAETPNPENGTCYPGYFADYEELREQLSSVSSFERFEIFPKESSWPNHTVTKGVTASCSHNGKSSFYKNLLWLTEKNGLYPNLSKSYVNNKEKEVLVLWGVHHPSNIGDQRAIYHTENAYVSVVSSHYSRRFTPEIAKRPKVRDQEGRINYYWTLLEPGDTIIFEANGNLIAPWYAFALSRGFGSGIITSNASMGDCDAKCQTPQGAINSSLPFQNVHPVTIGGCPKYVRSTKLRMVTGLRNIPSIQSRGLFGAIAGFIEGGWTGMIDGWYGYHHQNEQGSGYAADKKSTQNAIDGITNKVNSVIEKMNTQFTAVGKEFNKLERRMENLNKKVDDGFLDIWTYNAELLVLLENERTLDYHDSNVKNLYEKVKNQLKNNAKEIGNGCFEFYHKCNNECMESVKNGTYDYPKYSEESKLKREKIDGVKLESMGVYQILAIYSTVASSLVLLVSLGAISFWMCSNGSLQCRICI

SEQ ID NO: 1513 - protein, 566 aa, Artificial Sequence
  derived and/or modified protein sequence (wt) from hemagglutinin__InfluenzaA__ABM22290
MKAKLLVLLCAFTATYADTICIGYHANNSTDTVDTVLEKNVTVTHSVNLLENSHNGKLCRLKGTAPLQLGNCSVAGWILGNPECESLFSKESWSYIAETPNPENGTCYPGYFADYEELREQLSSVSSFERFEIFPKESSWPNHTVTKGVTASCSHNGKSSFYKNLLWLTEKNGLYPNLSKSYVNNKEKEVLVLWGVHHPSNIGDQRAIYHTENAYVSVVSSHYSRRFTPEIAKRPKVRDQEGRINYYWTLLEPGDTIIFEANGNLIAPWYAFALSRGFGSGIITSNASMGECDAKCQTPQGAINSSLPFQNVHPVTIGECPKYVRSTKLRMVTGLRNIPSIQSRGLFGAIAGFIEGGWTGMIDGWYGYHHQNEQGSGYAADQKSTQNAIDGITNKVNSVIEKMNTQFTAVGKEFNKLERRMENLNKKVDDGFLDIWTYNAELLVLLENERTLDFHDSNVKNLYEKVKNQLKNNAKEIGNGCFEFYHKCNNECMESVKNGTYDYPKYSEESKLNREKIDGVKLESMGVYQILAIYSTVASSLVLLVSLGAISFWMCSNGSLQCRICI

SEQ ID NO: 1514 - protein, 566 aa, Artificial Sequence; identical to SEQ ID NO: 255
  derived and/or modified protein sequence (wt) from hemagglutinin__InfluenzaA__ABM22301

SEQ ID NO: 1515 - protein, 566 aa, Artificial Sequence; identical to SEQ ID NO: 255
  derived and/or modified protein sequence (wt) from hemagglutinin__InfluenzaA__ABM22312

SEQ ID NO: 1516 - protein, 566 aa, Artificial Sequence; identical to SEQ ID NO: 255
  derived and/or modified protein sequence (wt) from hemagglutinin__InfluenzaA__ABM22323

SEQ ID NO: 1517 - protein, 566 aa, Artificial Sequence; identical to SEQ ID NO: 255
  derived and/or modified protein sequence (wt) from hemagglutinin__InfluenzaA__ABM22334

SEQ ID NO: 1518 - protein, 566 aa, Artificial Sequence; identical to SEQ ID NO: 256
  derived and/or modified protein sequence (wt) from hemagglutinin__InfluenzaA__ABM22345

SEQ ID NO: 1519 - protein, 566 aa, Artificial Sequence; identical to SEQ ID NO: 256
  derived and/or modified protein sequence (wt) from hemagglutinin__InfluenzaA__ABM22356

SEQ ID NO: 1520 - protein, 566 aa, Artificial Sequence; identical to SEQ ID NO: 256
  derived and/or modified protein sequence (wt) from hemagglutinin__InfluenzaA__ABM22367

SEQ ID NO: 1521 - protein, 565 aa, Artificial Sequence; identical to SEQ ID NO: 841
  derived and/or modified protein sequence (wt) from hemagglutinin__InfluenzaA__ABM66864

SEQ ID NO: 1522 - protein, 566 aa, Artificial Sequence; identical to SEQ ID NO: 921
  derived and/or modified protein sequence (wt) from hemagglutinin__InfluenzaA__ABM66886

SEQ ID NO: 1523 - protein, 566 aa, Artificial Sequence; identical to SEQ ID NO: 921
  derived and/or modified protein sequence (wt) from hemagglutinin__InfluenzaA__ABM66897

SEQ ID NO: 1524 - protein, 566 aa, Artificial Sequence; identical to SEQ ID NO: 921
  derived and/or modified protein sequence (wt) from hemagglutinin__InfluenzaA__ABM66908

SEQ ID NO: 1525 - protein, 566 aa, Artificial Sequence; identical to SEQ ID NO: 256
  derived and/or modified protein sequence (wt) from hemagglutinin__InfluenzaA__ABM66919

SEQ ID NO: 1526 - protein, 566 aa, Artificial Sequence; identical to SEQ ID NO: 256
  derived and/or modified protein sequence (wt) from hemagglutinin__InfluenzaA__ABM66930

SEQ ID NO: 1527 - protein, 566 aa, Artificial Sequence; identical to SEQ ID NO: 256
  derived and/or modified protein sequence (wt) from hemagglutinin__InfluenzaA__ABM66941

SEQ ID NO: 1528 - protein, 566 aa, Artificial Sequence; identical to SEQ ID NO: 256
  derived and/or modified protein sequence (wt) from hemagglutinin__InfluenzaA__ABM66952

SEQ ID NO: 1529 - protein, 566 aa, Artificial Sequence; identical to SEQ ID NO: 256
  derived and/or modified protein sequence (wt) from hemagglutinin__InfluenzaA__ABM66963

SEQ ID NO: 1530 - protein, 566 aa, Artificial Sequence; identical to SEQ ID NO: 256
  derived and/or modified protein sequence (wt) from hemagglutinin__InfluenzaA__ABM66974

SEQ ID NO: 1531 - protein, 566 aa, Artificial Sequence; identical to SEQ ID NO: 256
  derived and/or modified protein sequence (wt) from hemagglutinin__InfluenzaA__ABM66985

SEQ ID NO: 1532 - protein, 566 aa, Artificial Sequence; identical to SEQ ID NO: 256
  derived and/or modified protein sequence (wt) from hemagglutinin__InfluenzaA__ABM66996

SEQ ID NO: 1533 - protein, 566 aa, Artificial Sequence; identical to SEQ ID NO: 256
  derived and/or modified protein sequence (wt) from hemagglutinin__InfluenzaA__ABM67007

SEQ ID NO: 1534 - protein, 566 aa, Artificial Sequence; identical to SEQ ID NO: 256
  derived and/or modified protein sequence (wt) from hemagglutinin__InfluenzaA__ABM67018

SEQ ID NO: 1535 - protein, 566 aa, Artificial Sequence
  derived and/or modified protein sequence (wt) from hemagglutinin__InfluenzaA__ABM67029
MKTIIALSYIICLVFAQKLPGNDNSTATLCLGHHAVPNGTIVKTITNDQIEVTNATELVQSSSTGEICDSPHQILDGENCTLIDALLGDPQCDGFQNKKWDLFVERSKAYSNCYPYDVPDYASLRSLVASSGTLEFNNESFNWTGVTQNGTSSACKRRSNNSFFSRLNWLTHLKFKYPALNVTMPNNEKFDKLYIWGVHHPGTDNDQIFLYAQASGRITVSTKRSQQTVIPNIGSRPRVRDIPSRISIYWTIVKPGDILLINSTGNLIAPRGYFRIRSGKSSIMRSDAPIGKCNSECITPNGSIPNDKPFQNVNRITYGACPRYVKQNTLKLATGMRNVPEKQTRGIFGAIAGFIENGWEGMVDGWYGFRHQNSEGIGQAADLKSTQAAINQINGKLNRLIGKTNEKFHQIEKEFSEVEGRIQDLEKYVEDTKIDLWSYNAELLVALENQHTIDLTDSEMNKLFERTKKQLRENAEDMGNGCFKIYHKCDNACIGSIRNGTYDHDVYRDEALNNRFQIKGVELKSGYKDWILWISFAISCFLLCVALLGFIMWACQKGNIRCNICI

SEQ ID NO: 1536 - protein, 565 aa, Artificial Sequence; identical to SEQ ID NO: 299
  derived and/or modified protein sequence (wt) from hemagglutinin__InfluenzaA__ABM67051

SEQ ID NO: 1537 - protein, 568 aa, Artificial Sequence
  derived and/or modified protein sequence (wt) from hemagglutinin__InfluenzaA__ABM90467
MEKIVLLLSIVSLVKSDQICIGYHANNSTEQVDTIMEKNVTVTHAQDILEKTHNGKLCDLDGVKPLILRDCSVAGWLLGNPMCDEFINVPEWSYIVEKANPTNDLCYPGSFNDYEELKHLLSRINHFEKIQIIPKSSWSDHEASSGVSSACPYLGSPSFFRNVVWLIKKNSTYPTIKKSYNNTNQEDLLVLWGIHHPNNEAEQTRLYQNPTTYISIGTSTLNQRLVPKIATRSKVNGQSGRMEFFWTILKPNDAINFESNGNFIAPEYAYKIVKKGDSAIMKSELEYGNCNTKCQTPMGAINSSMPFHNIHPLTIGECPKYVKSNRLVLATGLRNSPQRESRRKKRGLFGAIAGFIEGGWQGMVDGWYGYHHSNEQGSGYAADKESTQKAIDGVTNKVNSIIDKMNTQFEAVGREFNNLERRIENLNKKMEDGFLDVWTYNAELLVLMENERTLDFHDSNVKNLYDKVRLQLRDNAKELGNGCFEFYHKCDNECMESIRNGTYNYPQYSEEARLKREEISGVKLESIGTYQILSIYSTVASSLALAIMIAGLSLWMCSNGSLQCRICI

SEQ ID NO: 1538 - protein, 568 aa, Artificial Sequence
  derived and/or modified protein sequence (wt) from hemagglutinin__InfluenzaA__ABM90511
MEKIVLLLSIVSLVKSDQICIGYHANNSTEQVDTIIEKNVTVTHAQDILEKTHNGKLCDLDGVKPLILKDCSVAGWLLGNPMCDEFINVPEWSYIVEKANPTNDLCYPGSFNDYEELKHLLSRINHFEKIQIIPKSSWSDHEASSGVSSACPYLGSPSFFRNVVWLIKKNSTYPTIKKSYNNTNQEDLLVLWGIHHPNNEEEQTRLYQNPTTYISIGTSTLNQRLVPKIATRSKVNGQSGRMEFFWTILKPNDAINFESNGNFIAPEYAYKIVKKGDSAIMKSELEYSNCNTKCQTPMGAINSSMPFHNIHPLTIGECPKYVKSSRLVLATGLRNSPQRESRRKKRGLFGAIAGFIEGGWQGMVDGWYGYHHSNEQGSGYAADKESTQKAIDGVTNKVNSIIDKMNTQFEAVGREFNNLERRIENLNKKMEDGFLDVWTYNAELLVLMENERTLDFHDSNVKNLYDKVRLQLRDNAKELGNGCFEFYHKCDNECMESIRNGTYNYPQYSEEARLKREEISGVKLESIGTYQILSIYSTVASSLALAIMIAGLSLWMCSNGSLQCRICI

SEQ ID NO: 1539 - protein, 568 aa, Artificial Sequence
  derived and/or modified protein sequence (wt) from hemagglutinin__InfluenzaA__ABM90533
MEKIVLLLSIVSLVKSDQICIGYHANNSTEQVDTIMEKNVTVTHAQDILEKTHNGKLCDLDGVKPLILKDCSVAGWLLGNPMCDEFINVPEWSYIVEKANPTNDLCYPGSFNDYEELKHLLSRINHFEKIQIIPKSSWSDHEASSGVSSACPYLGSPSFFRNVVWLIKKNSTYPTIKKSYNNTNQEDLLVLWGIHHPNNEEEQTRLYQNPTTYISIGTSTLNQRLVPKIATRSKVNGQSGRMEFFWTILKPNDAINFESNGNFIAPEYAYKIVKKGDSAIMKSELEYSNCNTKCQTPMGAINSSMPFHNIHPLTIGECPKYVKSSRLVLATGLRNSPQRESRRKKRGLFGAIAGFIEGGWQGMVDGWYGYHHSNEQGSGYAADKESTQKAIDGVTNKVNSIIDKMNTQFEAVGREFNNLERRIENLNKKMEDGFLDVWTYNAELLVLMENERTLDFHDSNVKNLYDKVRLQLRDNAKELGNGCFEFYHKCDNECMESIRNGTYNYPQYSEEARLKREEISGVKLESIGTYQILSIYSTVASSLALAIMIAGLSLWMCSNGSLQCRICI

SEQ ID NO: 1540 - protein, 568 aa, Artificial Sequence; identical to SEQ ID NO: 1539
  derived and/or modified protein sequence (wt) from hemagglutinin__InfluenzaA__ABM90544

SEQ ID NO: 1541 - protein, 566 aa, Artificial Sequence
  derived and/or modified protein sequence (wt) from hemagglutinin__InfluenzaA__ABN50900
MKAKLLVLLCALSATDADTICIGYHANNSTDTVDTVLEKNVTVTHSVNLLEDSHNGKLCRLKGIAPLQLGKCSIAGWILGNPECESLFSKKSWSYIAETPNSENGTCYPGYFADYEELREQLSSVSSFERFEIFPKESSWPKHNVTRGVTASCSHKGKSSFYRNLLWLTEKNGSYPNLSKSYVNNKEKEVLVLWGVHHPSNIEDQKTIYRKENAYVSVVSSHYNRRFTPEIAKRPKVRGQEGRINYYWTLLEPGDTIIFEANGNLIAPWYAFALSRGFGSGIITSNASMDECDAKCQTPQGAINSSLPFQNVHPVTIGECPKYVRSTKLRMVTGLRNIPSIQSRGLFGAIAGFIEGGWTGMIDGWYGYHHQNEQGSGYAADQKSTQNAINGITNKVNSVIEKMNTQFTAVGKEFNKLEKRMENLNKKVDDGFLDIWTYNAELLVLLENERTLDFHDSNVKNLYEKVKSQLKNNAKEIGNGCFEFYHKCNNECMESVKNGTYDYPKYSEESKLNREKIDGVKLESMGVYQILAIYSTVASSLVLLVSLGAISFWMCSNGSLQCRICI

SEQ ID NO: 1542 - protein, 566 aa, Artificial Sequence; identical to SEQ ID NO: 921
  derived and/or modified protein sequence (wt) from hemagglutinin__InfluenzaA__ABN50917

SEQ ID NO: 1543 - protein, 566 aa, Artificial Sequence
  derived and/or modified protein sequence (wt) from hemagglutinin__InfluenzaA__ABN50928
MKAKLLILLCAFTATDADTICIGYHANNSTDTVDTVLEKNVTVTHSVNLLEDSHNGKLCRLKGIAPLQLGNCSIAGWILGNPECESLFSKKSWSYIAETPNSENGTCYPGYFADYEELREQLSSVSSFERFEIFPKESSWPNHTVTKGVTASCSHKGKSSFYRNLLWLTEKNGSYPNLSKSYVNNKEKEVLVLWGVHHPSNIGDQRAIYHTENAYVSVVSSHYNRRFTPEIAKRPKVRGQEGRINYYWTLLEPGDTIIFEANGNLIAPWYAFALSRGFGSGIITSNASMDECDAKCQTPQGAINSSLPFQNVHPVTIGECPKYVRSTKLRMVTGLRNIPSIQSRGLFGAIAGFIEGGWTGMIDGWYGYHHQNEQGSGYAADQKSTQNAINGITNKVNSVIEKMNTQFTAVGKEFNKLERRMENLNKKVDDGFLDIWTYNAELLVLLENERTLDFHDSNVKNLYEKVKSQLKNNAKEIGNGCFEFYHKCNNECMESVKNGTYDYPKYSEESKLNREKIDGVKLESMGVYQILAIYSTVASSLVLLVSLGAISFWMCSNGSLQCRICI

SEQ ID NO: 1544 - protein, 566 aa, Artificial Sequence
  derived and/or modified protein sequence (wt) from hemagglutinin__InfluenzaA__ABN50940
MKAKLLVLLCAFTATDADTICIGYHANNSTDTVDTVLEKNVTVTHSVNLLEDSHNGKLCRLKGIAPLQLGNCSIAGWILGNPECESLFSKKSWSYIAETPNSENGTCYPGYFSDYEELREQLSSVSSFERFEIFPKESSWPNHTVTKGVTASCSHKGKSSFYRNLLWLTEKNGSYPNLSKSYVNNKEKEVLVLWGVHHPSNIGDQRAIYHTENAYVSVVSSHYNRRFTPEIAKRPKVRDQEGRINYYWTLLEPEDTIIFEANGNLIAPWYAFALSRGFGSGIITSNASMDECDAKCQTPQGAINSSLPFQNVHPVTIGECPKYVRSTKLRMVTGLRNIPSIQSRGLFGAIAGFIEGGWTGMIDGWYGYHHQNEQGSGYAADQKSTQNAINGITNKVNSVIEKMNTQFTAVGKEFNKLERRMENLNKKVDDGFLDIWTYNAELLVLLENERTLDFHDSNVKNLYEKVKSQLKNNAKEIGNGCFEFYHKCNNECMESVKNGTYDYPKYSEESKLNREKIDGVKLESMGVYQILAIYSTVASSLVLLVSLGAISFWMCSNGSLQCRICI

SEQ ID NO: 1545 - protein, 566 aa, Artificial Sequence; identical to SEQ ID NO: 1511
  derived and/or modified protein sequence (wt) from hemagglutinin__InfluenzaA__ABN50951

SEQ ID NO: 1546 - protein, 566 aa, Artificial Sequence
  derived and/or modified protein sequence (wt) from hemagglutinin__InfluenzaA__ABN50962
MKAKLLVLLCAFTATYADTICIGYHANNSTDTVDTVLEKNVTVTHSVNLLEDSHNGKLCRLKGTAPLQLGNCSVAGWILGNPECESLFSKESWSYIAETPNPENGTCYPGYFADYEELREQLSSVSSFERFEIFPKESSWPNHTVTKGVTASCSHNGKSSFYKNLLWLTEKNGLYPNLSKSYVNNKEKEVLVLWGVHHPSNIGDQRAIYHTENAYVSVVSSHYSRRFTPEIAKRPKVRDQEGRINYYWTLLEPGDTIIFEANGNLIAPWYAFALSRGFGSGIITSNASMGECDAKCQTPQGAINSSLPFQNVHPVTIGECPKYVRSTKLRMVTGLRNIPSIQSRGLFGAIAGFIEGGWTGMIDGWYGYHHQNEQGSGYAADKKSTQNAIDGITNKVNSVIEKMNTQFTAVGKEFNKLERRMENLNKKVDDGFLDIWTYNAELLVLLENERTLDFHDSNVKNLYEKVKNQLKNNAKEIGNGCFEFYHKCNNECMESVKNGTYDYPKYSEESKLKREKIDGVKLESMGVYQILAIYSTVASSLVLLVSLGAISFWMCSNGSLQCRICI

SEQ ID NO: 1547 - protein, 566 aa, Artificial Sequence; identical to SEQ ID NO: 910
  derived and/or modified protein sequence (wt) from hemagglutinin__InfluenzaA__ABN50973

SEQ ID NO: 1548 - protein, 566 aa, Artificial Sequence; identical to SEQ ID NO: 255
  derived and/or modified protein sequence (wt) from hemagglutinin__InfluenzaA__ABN50984

SEQ ID NO: 1549 - protein, 566 aa, Artificial Sequence; identical to SEQ ID NO: 256
  derived and/or modified protein sequence (wt) from hemagglutinin__InfluenzaA__ABN50995

SEQ ID NO: 1550 - protein, 566 aa, Artificial Sequence
  derived and/or modified protein sequence (wt) from hemagglutinin__InfluenzaA__ABN51043
MKTIIALSYILCLVFAQKLPGNDNSTATLCLGHHAVPNGTIVKTITNDQIEVTNATELVQSSSTGEICDSPHQILDGENCTLIDALLGDPQCDGFQNKKWDLFVERSKAYSNCYPYDVPDYASLRSLVASSGTLEFNNESFNWTGVTQNGTSSACKRRSNNSFFSRLNWLTHLKFKYPALNVTMPNNEKFDKLYIWGVHHPGTDNDQIFLYAQASGRITVSTKRSQQTVIPNIGSRPRVRDIPSRISIYWTIVKPGDILLINSTGNLIAPRGYFKIRSGKSSIMRSDAPIGKCNSECITPNGSIPNDKPFQNVNRITYGACPRYVKQNTLKLATGMRNVPEKQTRGIFGAIAGFIENGWEGMVDGWYGFRHQNSEGIGQAADLKSTQAAINQINGKLNRLIGKTNEKFHQIEKEFSEVEGRIQDLEKYVEDTKIDLWSYNAELLVALENQHTIDLTDSEMNKLFERTKKQLRENAEDMGNGCFKIYHKCDNACIGSIRNGTYDHDVYRDEALNNRFQIKGVELKSGYKDWILWISFAISCFLLCVVLLGFIMWACQKGNIRCNICI

SEQ ID NO: 1551 - protein, 566 aa, Artificial Sequence; identical to SEQ ID NO: 1396
  derived and/or modified protein sequence (wt) from hemagglutinin__InfluenzaA__ABN51054

SEQ ID NO: 1552 - protein, 566 aa, Artificial Sequence
  derived and/or modified protein sequence (wt) from hemagglutinin__InfluenzaA__ABN51066
MKAKLLVLLCAFTATYADTICIGYHANNSTDTVDTVLEKNVTVTHSVNLLEDSHNGKLCRLKGTAPLQLGNCSVAGWILGNPECESLFSKESWSYIAETPNPENGTCYPGYFADYEELREQLSSVSSFERFEIFPKKSSWPNHTVTKGVTASCSHNGKSSFYKNLLWLTEKNGLYPNLSKSYVNNKEKEVLVLWGVHHPSNIGDQRTIYHTENAYVSVVSSHYSRRFTPEIAKRPKVRDQEGRINYYWTLLEPGDTIIFEANGNLIAPWYAFALSRGFGSGIITSNASMGDCDAKCQTPQGAINSSLPFQNVHPVTIGECPKYVRSTKLRMVTGLRNIPSIQSRGLFGAIAGFIEGGWTGMIDGWYGYHHQNEQGSGYAADKKSTQNAIDGITNKVNSVIEKMNTQFTAVGKEFNKLERRMENLNKKVDDGFLDIWTYNAELLVLLENERTLDFHDSNVKNLYEKVKNQLKNNAKEIGNGCFEFYHKCNNECIESVKNGTYDYPKYSEESKLKREKIDGVKLESMGVYQILAIYSTVASSLVLLVSLGAIGFWMCSNGSLQCRICI

SEQ ID NO: 1553 - protein, 565 aa, Artificial Sequence; identical to SEQ ID NO: 296
  derived and/or modified protein sequence (wt) from hemagglutinin__InfluenzaA__ABN51077

SEQ ID NO: 1554 - protein, 565 aa, Artificial Sequence; identical to SEQ ID NO: 299
  derived and/or modified protein sequence (wt) from hemagglutinin__InfluenzaA__ABN51088

SEQ ID NO: 1555 - protein, 566 aa, Artificial Sequence
  derived and/or modified protein sequence (wt) from hemagglutinin__InfluenzaA__ABN51099
MKTIIALSYIFCLALGQDLPGNDNSTATLCLGHHAVPNGTLVKTITNDQIEVTNATELVQSSSTGKICNNPHRILDGIDCTLIDALLGDPHCDVFQNETWDLFVERSKAFSNCYPYDVPDYASLRSLVASSGTLEFITEGFTWTGVTQNGGSNACKRGPGSGFFSRLNWLTKSGSTYPVLNVTMPNNDNFDKLYIWGVHHPSTNQEQTSLYVQASGRVTVSTRRSQQTIIPNIGSRPWVRGLSSRISIYWTIVKPGDVLVINSNGNLIAPRGYFKMRTGKSSIMRSDAPIDTCISECITPNGSIPNDKPFQNVNKITYGACPKYVKQNTLKLATGMRNVPEKQTRGLFGAIAGFIENGWEGMIDGWYGFRHQNSEGTGQAADLKSTQAAIDQINGKLNRVIEKMNEKFHQIEKEFSEVEGRIQDLEKYVEDTKIDLWSYNAELLVALENQHTIDLTDSEMNKLFEKTRRQLRENAEDMGNGCFKIYHKCDNACIESIRNGTYDHDVYRDEALNNRFQIKGVELKSGYKDWILWISFAISCFLLCVVLLGFIMWACQRGNIRCNICI

SEQ ID NO: 1556 - protein, 566 aa, Artificial Sequence
  derived and/or modified protein sequence (wt) from hemagglutinin__InfluenzaA__ABN51110
MKTIIALSYIFCLALGQDLPGNDNSTATLCLGHHAVPNGTLVKTITDDQIEVTNATELVQSSSTGKICNNPHRILDGINCTLIDALLGDPHCDVFQDETWDLFVERSKAFSNCYPYDVPDYASLRSLVASSGTLEFITEGFTWTGVTQNGGSNACKRGPGSGFFSRLNWLTKSGSTYPVLNVTMPNNDNFDKLYIWGVHHPSTNQEQTSLYVQASGRVTVSTRRSQQTIIPNIGSRPWVRGLSSRISIYWTIVKPGDVLVINSNGNLIAPRGYFKMRTGKSSIMRSDAPIDTCISECITPNGSIPNDKPFQNVNKITYGACPKYVKQNTLKLATGMRNVPEKQTRGLFGAIAGFIENGWEGMIDGWYGFRHQNSEGTGQAADLKSTQAAIDQINGKLNRVIEKTNEKFHQIEKEFSEVEGRIQDLEKYVEDTKIDLWSYNAELLVALENQHTIDLTDSEMNKLFEKTRRQLRENAEDMGNGCFKIYHKCDNACIESIRNGTYDHDVYRDEALNNRFQIKGVELKSGYKDWILWISFAISCFLLCVVLLGFIMWACQRGNIRCNICI

SEQ ID NO: 1557 - protein, 566 aa, Artificial Sequence
  derived and/or modified protein sequence (wt) from hemagglutinin__InfluenzaA__ABN51121
MKTIIALSYIFCLALGQDLPGNDNSTATLCLGHHAVPNGTLVKTITDDQIEVTNATELVQSSSTGKICNNPHRILDGINCTLIDALLGDPHCDVFQDETWDLFVERSKAFSNCYPYDVPDYASLRSLVASSGTLEFITEGFTWTGVTQNGGSNACKRGPGSGFFSRLNWLTKSGSTYPVLNVTMPNNDNFDKLYIWGVHHPSTNQEQTSLYVQASGRVTVSTRRSQQTIIPNIGSRPWVRGLSSRISIYWTIVKPGDVLVINSNGNLIAPRGYFKMRTGKSSIMRSDAPIDTCISECITPNGSIPNDKPFQNVNKITYGTCPKYVKQNTLKLATGMRNVPEKQTRGLFGAIAGFIENGWEGMIDGWYGFRHQNSEGTGQAADLKSTQAAIDQINGKLNRVIEKTNEKFHQIEKEFSEVEGRIQDLEKYVEDTKIDLWSYNAELLVALENQHTIDLTDLEMNKLFEKTRRQLRENAEDMGNGCFKIYHKCDNACIESIRNGTYDHDVYRDEALNNRFQIKGVELKSGYKDWILWISFAISCFLLCVVLLGFIMWACQRGNIRCNICI

SEQ ID NO: 1558 - protein, 566 aa, Artificial Sequence
  derived and/or modified protein sequence (wt) from hemagglutinin__InfluenzaA__ABN51132
MKTIIALSYIFCLALGQDLPGNDNSTATLCLGHHAVPNGTLVKTITDDQIEVTNATELVQSSSTGKICNNPHRILDGINCTLIDALLGDPHCDVFQDETWDLFVERSKAFSNCYPYDVPDYASLRSLVASSGTLEFITEGFTWTGVTQNGGSNACKRGPGSGFFSRLNWLTKSGSTYPVLNVTMPNNDNFDKLYIWGVHHPSTNQEQTSLYVQASGRVTVSTRRSQQTIIPNIGSRPWVRGLSSRISIYWTIVKPGDVLVINSNGNLIAPRGYFKMRTGKSSIMRSDASIDTCISECITPNGSIPNDKPFQNVNKITYGACPKYVKQNTLKLATGMRNVPEKQTRGLFGAIAGFIENGWEGMIDGWYGFRHQNSEGTGQAADLKSTQAAIDQINGKLNRVIEKTNEKFHQIEKEFSEVEGRIQDLEKYVEDTKIDLWSYNAELLVALENQHTIDLTDSEMNKLFEKTRRQLRENAEDMGNGCFKIYHKCDNACIESIRNGTYDHDVYRDEALNNRFQIKGVELKSGYKDWILWISFAISCFLLCVVLLGFIMWACQRGNIRCNICI

SEQ ID NO: 1559 - protein, 565 aa, Artificial Sequence; identical to SEQ ID NO: 800
  derived and/or modified protein sequence (wt) from hemagglutinin__InfluenzaA__ABN51143

SEQ ID NO: 1560 - protein, 566 aa, Artificial Sequence
  derived and/or modified protein sequence (wt) from hemagglutinin__InfluenzaA__ABN51154
MKTIIALSYILCLVFTQKLPGNDNSTATLCLGHHAVPNGTLVKTITNDQIEVTNATELVQSSSTGRICDSPHQILDGENCTLIDALLGDPHCDGFQNKEWDLFVERSKAYSNCYPYDVPDYVSLRSLVASSGTLEFNNESFNWTGVAQNGTSSACKRRSDKSFFSRLNWLHQLKYKYPALNVTMPNNEKFDKLYIWGVHHPGTDSDQISLYAQASGRVTVSTKRSQQTVIPNIGSGPWVRGVSSRISIYWTIVKPGDILLINSTGNLIAPRGYFKIRSGKSSIMRSDAPIGKCNSECITPNGSIPNDKPFQNVNRITYGPCPRYVKQNTLKLATGMRNVPEKQTRGIFGAIAGFIENGWEGMMDGWYGFRHQNSEGTGQAADLKSTQAAINQINGKLNRLIEKTNEKFHQIEKEFSEVEGRIQDLEKYVEDTKIDLWSYNAELLVALENQHTIDLTDSEMNKLFERTKKQLRENAEDMGNGCFKIYHKCDNACIGSIRNGTYDHDVYRDEALNNRFQIKGVELKSGYKDWILWISFAISCFLLCIVLLGFIMWACQKGNIRCNICI

SEQ ID NO: 1561 - protein, 566 aa, Artificial Sequence
  derived and/or modified protein sequence (wt) from hemagglutinin__InfluenzaA__ABN59390
MKTIIALSYIICLVFAQKLPGNDNSTATLCLGHHAVPNGTIVKTITNDQIEVTNATELVQSSSTGEICDSPHQILDGENCTLIDALLGDPQCDGFQNKKWDLFVERSKAYSNCYPYDVPDYASLRSLVASSGTLEFNNESFNWTGVTQNGTSSACKRRSNNSFFSRLNWLTHLKFKYPALNVTMPNNEKFDKLYIWGVHHPGTDNDQIFLYAQASGRITVSTKRSQQTVIPNIGSRPRVRNIPSRISIYWTIVKPGDILLINSTGNLIAPRGYFRIRSGKSSIMRSDAPIGKCNSECITPNGSIPNDKPFQNVNRITYGACPRYVKQNTLKLATGMRNVPEKQTRGIFGAIAGFIENGWEGMVDGWYGFRHQNSEGIGQAADLKSTQAAINQINGKLNRLIGKTNEKFHQIEKEFSEVEGRIQDLEKYVEDTKIDLWSYNAELLVALENQHTIDLTDSEMNKLFERTKKQLRENAEDMGNGCFKIYHKCDNACIGSIRNGTYDHDVYRDEALNNRFQIKGVELKSGYKDWILWISFAISCFLLCVALLGFIMWACQKGNIRCNICI

SEQ ID NO: 1562 - protein, 566 aa, Artificial Sequence
  derived and/or modified protein sequence (wt) from hemagglutinin__InfluenzaA__ABN59401
MKAKLLVLLCALSATDADTICIGYHANNSTDTVDTVLEKNVTVTHSVNLLEDSHNGKLCRLKGIAPLQLGKCNIAGWILGNPECESLFSKKSWSYIAETPNSENGTCYPGYFADYEELREQLSSVSSFERFEIFPKERSWPKHNITRGVTAACSHKGKSSFYRNLLWLTEKNGSYPNLNKSYVNNKEKEVLVLWGVHHPSNIEDQKTLYRKENAYVSVVSSNYNRRFTPEIAERPKVRGQAGRINYYWTLLEPGDTIIFEANGNLIAPWHAFALSRGFGSGIITSNASMDECDTKCQTPQGAINSSLPFQNIHPVTIGECPKYVRSTKLRMVTGLRNIPSIQSRGLFGAIAGFIEGGWTGMIDGWYGYHHQNEQGSGYAADQKSTQNAINGITNKVNSVIEKMNTQFTAVGKEFNKLEKRMENLNKKVDDGFLDIWTYNAELLVLLENERTLDFHDSNVKNLYEKVKSQLKNNAKEIGNGCFEFYHKCNNECMESVKNGTYDYPKYSEESKLNREKIDGVKLESMGVYQILAIYSTVASSLVLLVSLGAISFWMCSNGSLQCRICI

SEQ ID NO: 1563 - protein, 565 aa, Artificial Sequence
  derived and/or modified protein sequence (wt) from hemagglutinin__InfluenzaA__ABN59412
MKANLLVLLCALAAADADTICIGYHANNSTDTVDTVLEKNVTVTHSVNLLEDSHNGKLCRLKGIAPLQLGKCNIAGWLLGNPECDPLLPVRSWSYIVETPNSENGICYPGDFIDYEELREQLSSVSSFERFEIFPKESSWPNHNTNGVTAACSHEGKSSFYRNLLWLTEKEGSYPKLKNSYVNKKGKEVLVLWGIHHPPNSKEQQNLYQNENAYVSVVTSNYNRRFTPEIAERPKVRDQAGRMNYYWTLLKPGDTIIFEANGNLIAPMYAFALSRGFGSGIITSNASMHECNTKCQTPLGAINSSLPYQNIHPVTIGECPKYVRSAKLRMVTGLRNIPSIQSRGLFGAIAGFIEGGWTGMIDGWYGYHHQNEQGSGYAADQKSTQNAINGITNKVNTVIEKMNIQFTAVGKEFNKLEKRMENLNKKVDDGFLDIWTYNAELLVLLENERTLEFHDSNVKNLYEKVKSQLKNNAKEIGNGCFEFYHKCDNECMESVRNGTYDYPKYSEESKLNREKVDGVKLESMGIYQILAIYSTVASSLVLLVSLGAISFWMCSNGSLQCRICI

SEQ ID NO: 1564 - protein, 566 aa, Artificial Sequence
  derived and/or modified protein sequence (wt) from hemagglutinin__InfluenzaA__ABN59423
MKAKLLVLLCALSATDADTICIGYHANNSTDTVDTVLEKNVTVTHSVNLLEDSHNGKLCRLKGIAPLQLGKCSIAGWILGNPECESLFSKKSWSYIAETPNSENGTCYPGYFADYEELREQLSSVSSFERFEIFPKERSWPKHNVTRGVTASCSHKGKSSFYRNLLWLTEKNGSYPNLSKSYVNNKEKEVLVLWGVHHPSNIENQKTIYRKENAYVSVVSSNYNRRFTPEIAERPKVRDQEGRINYYWTLLEPGDTIIFEANGNLIAPWYAFALSRGFGSGIITSNASMDECDTKCQTPQGAINSSLPFQNVHPVTIGECPKYVRSTKLRMVTGLRNIPSIQSRGLFGAIAGFIEGGWTGMIDGWYGYHHQNEQGSGYAADQKSTQNAINGITNKVNSVIEKMNTQFTAVGKEFNKLEKRMENLNKKVDDGFLDIWTYNAELLVLLENERTLDFHDSNVKNLYEKVKSQLKNNAKEIGNGCFEFYHKCNNECMESVKNGTYDYPKYSEESKLNREKIDGVKLESMGVYQILAIYSTVASSLVLLVSLGAISFWMCSNGSLQCRICI

SEQ ID NO: 1565 - protein, 566 aa, Artificial Sequence; identical to SEQ ID NO: 766
  derived and/or modified protein sequence (wt) from hemagglutinin__InfluenzaA__ABO32656

SEQ ID NO: 1566 - protein, 566 aa, Artificial Sequence
  derived and/or modified protein sequence (wt) from hemagglutinin__InfluenzaA__ABO32667
MKTIIALSYILCLVFAQKLPGNDNSTATLCLGHHAVPNGTLVKTITNDQIEVTNATELVQSSSTGGICDSPHQILDGENCTLIDALLGDPHCDGFQNKEWDLFVERSKAYSNCYPYDVPDYASLRSLVASSGTLEFNNESFNWTGVAQNGTSSACKRRSNKSFFSRLNWLHQLKYKYPALNVTMPNNEKFDKLYIWGVHHPSTDSDQISLYAQASGRVTVSTKRSQQTVIPNIGSRPWVRDVSSRISIYWTIVKPGDILLINSTGNLIAPRGYFKIRSGKSSIMRSDAPIGKCNSECITPNGSIPNDKPFQNVNRITYGACPRYVKQNTLKLATGMRNVPEKQTRGIFGAIAGFIENGWEGMVDGWYGFRHQNSEGTGQAADLKSTQAAINQINGKLNRLIGKTNEKFHQIEKEFSEVEGRIQDLEKYVEDTKIDLWSYNAELLVALENQHTIDLTDSEMNKLFERTKKQLRENAEDMGNGCFKIYHKCDNACIGSIRNGTYDHDVYRDEALNNRFQIKGVELKSGYKDWILWISFAISCFLLCVVLLGFIMWACQKGNIRCNICI

SEQ ID NO: 1567 - protein, 565 aa, Artificial Sequence
  derived and/or modified protein sequence (wt) from hemagglutinin__InfluenzaA__ABO32678
MKVKLLVLLCTFTATYADTICIGYHANNSTDTVDTVLEKNVTVTHSVNLLEDSHNGKLCLLKGIAPLQLGNCSVAGWILGNPECELLISKESWSYIVETPNPENGTCYPGYFADYEELREQLSSVSSFERFEIFPKESSWPNHTVTGVSASCSHNGKSSFYRNLLWLTGKNGLYPNLSKSYANNKEKEVLVLWGVHHPPNIGDQRALYHTENAYVSVVSSHYSRRFTPEIAKRPKVRDQEGRINYYWTLLEPGDTIIFEANGNLIAPRFAFALSRGFGSGIITSNAPMDECDAKCQTPQGAINSSLPFQNVHPVTIGECPKYVRSAKLRMATGLRNIPSIQSRGLFGAIAGFIEGGWTGMVDGWYGYHHQNEQGSGYAADQKSTQNAINGITNKVNSVIEKMNTQFTAVGKEFSKLERRMENLHKKVDDGFLDIWTYNAELLVLLENERTLDFHDSNVKNLYEKVKSQLKNNAKEIGNGCFEFYHKCNDECMESVKNGTYDYPKYSEESKLNREKIDGVKLESMGVYQILAIYSTVASSLVLLVSLGAISFWMCSNGSLQCRICI

SEQ ID NO: 1568 - protein, 566 aa, Artificial Sequence
  derived and/or modified protein sequence (wt) from hemagglutinin__InfluenzaA__ABO32692
MKTIIALSYILCLVFAQKLPGNDNSTATLCLGHHAVPNGTIVKTITNDQIEVTNATELVQSSSTGGICDSPHQILDGENCTLIDALLGDPQCDGFQNKKWDLFVERSKAYSNCYPYDVPDYASLRSLVASSGTLEFNNESFNWTGVTQNGTSSACKRRSNNSFFSRLNWLTHLKFKYPALNVTMPNNEKFDKLYIWGVHHPGTDNDQIFLYAQASGRITVSTKRSQQTVIPNIGSRPRVRNIPSRISIYWTIVKPGDILLINSTGNLIAPRGYFKIRSGKSSIMRSDAPIGKCNSECITPNGSIPNDKPFQNVNRITYGACPRYVKQNTLKLATGMRNVPEKQTRGIFGAIAGFIENGWEGMVDGWYGFRHQNSEGIGQAADLKSTQAAINQINGKLNRLIGKTNEKFHQIEKEFSEVEGRIQDLEKYVEDTKIDLWSYNAELLVALENQHTIDLTDSEMNKLFERTKKQLRENAEDMGNGCFKIYHKCDNACIGSIRNGTYDHDVYRDEALNNRFQIKGVELKSGYKDWILWISFAISCFLLCVVLLGFIMWACQKGNIRCNICI

SEQ ID NO: 1569 - protein, 566 aa, Artificial Sequence; identical to SEQ ID NO: 1433
  derived and/or modified protein sequence (wt) from hemagglutinin__InfluenzaA__ABO32751

SEQ ID NO: 1570 - protein, 566 aa, Artificial Sequence; identical to SEQ ID NO: 1433
  derived and/or modified protein sequence (wt) from hemagglutinin__InfluenzaA__ABO32762

SEQ ID NO: 1571 - protein, 566 aa, Artificial Sequence; identical to SEQ ID NO: 1455
  derived and/or modified protein sequence (wt) from hemagglutinin__InfluenzaA__ABO32775

SEQ ID NO: 1572 - protein, 566 aa, Artificial Sequence; identical to SEQ ID NO: 243
  derived and/or modified protein sequence (wt) from hemagglutinin__InfluenzaA__ABO32790

SEQ ID NO: 1573 - protein, 566 aa, Artificial Sequence
  derived and/or modified protein sequence (wt) from hemagglutinin__InfluenzaA__ABO32803
MKTIIALSYILCLVFAQKLPGNDNSTATLCLGHHAVPNGTIVKTITNDQIEVTNATELVQSSSTGGICDSPHQILDGENCTLIDALLGDPQCDGFQNKKWDLFVERSKAYSNCYPYDVPDYVSLRSLVASSGTLEFNNESFNWTGVTQNGTSSACKRRSNNSFFSRLNWLTHLKFKYPALNVTMPNNEKFDKLYIWGVHHPGTDNDQISLYAQASGRITVSTKRSQQTVIPNIGSRPRVRDIPSRISIYWTIVKPGDTLLINSTGNLIAPRGYFKIRSGKSSIMRSDAPIDKCNSECITPNGSIPNDKPFQNVNRITYGACPRYVKQNTLKLATGMRNVPEKQTRGIFGAIAGFIENGWEGMVDGWYGFRHQNSEGIGQAADLKSTQAAINQINGKLNRLIGKTNEKFHQIEKEFSEVEGRIQDLEKYVEDTKIDLWSYNAELLVALENQHTIDLTDSEMNKLFERTKKQLRENAEDMGNGCFKIYHKCDNACIGSIRNGTYDHDVYRDEALNNRFQIKGVELKSGYKDWILWISFAISCFLLCVALLGFIMWACQKGNIRCNICI

SEQ ID NO: 1574 - protein, 566 aa, Artificial Sequence; identical to SEQ ID NO: 633
  derived and/or modified protein sequence (wt) from hemagglutinin__InfluenzaA__ABO32816

SEQ ID NO: 1575 - protein, 566 aa, Artificial Sequence; identical to SEQ ID NO: 256
  derived and/or modified protein sequence (wt) from hemagglutinin__InfluenzaA__ABO32827

SEQ ID NO: 1576 - protein, 566 aa, Artificial Sequence
  derived and/or modified protein sequence (wt) from hemagglutinin__InfluenzaA__ABO32838
MKTIIALSYILCLVFAQKLPGNDNSTATLCLGHHAVPNGTIVKTITNDQIEVTNATELVQSSSTGGICDSPHQILDGENCTLIDALLGDPQCDGFQNKRWDLFVERSKAYSNCYPYDVPDYASLRSLVASSGTLEFNNESFNWTGVTQNGTSSACKRRSNNSFFSRLNWLTHLKFKYPALNVTMPNNEKFDKLYIWGVHHPGTDNDQIFLYAQASGRITVSTKRSQQTVIPNIGSRPRVRNIPSRISIYWTIVKPGDILLINSTGNLIAPRGYFKIRSGKSSIMRSDAPIGKCNSECITPNGSIPNDKPFQNVNRITYGACPRYVKQNTLKLATGMRNVPEKQTRGIFGAIAGFIENGWEGMVDGWYGFRHQNSEGIGQAADLKSTQAAINQINGKLNRLIGKTNEKFHQIEKEFSEVEGRIQDLEKYVEDTKIDLWSYNAELLVALENQHTIDLTDSEMNKLFERTKKQLRENAEDMGNGCFKIYHKCDNACIGSIRNGTYDHDVYRDEALNNRFQIKGVELKSGYKDWILWISFAISCFLLCVALLGFIMWACQKGNIRCNICI

SEQ ID NO: 1577 - protein, 566 aa, Artificial Sequence; identical to SEQ ID NO: 1576
  derived and/or modified protein sequence (wt) from hemagglutinin__InfluenzaA__ABO32849

SEQ ID NO: 1578 - protein, 566 aa, Artificial Sequence
  derived and/or modified protein sequence (wt) from hemagglutinin__InfluenzaA__ABO32860
MKTIIALSYILCLVFAQKLPGNDNSTATLCLGHHAVPNGTIVKTITNDQIEVTNATELVQSSSTGGICDSPHQILDGENCTLIDALLGDPQCDGFQNKRWDLFVERSKAYSNCYPYDVPDYASLRSLVASSGTLEFNNESFNWTGVTQNGTSSACKRRSNNSFFSRLNWLTHLKFKYPALNVTMPNNEKFDKLYIWGVHHPGTDNDQIFLYAQASGRITVSTKRSQQTVIPNIGSRPRVRDIPSRISIYWTIVKPGDILLINSTGNLIAPRGYFKIRSGKSSIMRSDAPIGKCNSECITPNGSIPNDKPFQNVNRITYGACPRYVKQNTLKLATGMRNVPEKQTRGIFGAIAGFIENGWEGMVDGWYGFRHQNSEGIGQAADLKSTQAAINQINGKLNRLIGKTNEKFHQIEKEFSEVEGRIQDLEKYVEDTKIDLWSYNAELLVALENQHTIDLTDSEMNKLFERTKKQLRENAEDMGNGCFKIYHKCDNACIGSIRNGTYDHDVYRDEALNNRFQIKGVELKSGYKDWILWISFAISCFLLCVALLGFIMWACQKGNIRCNICI

SEQ ID NO: 1579 - protein, 566 aa, Artificial Sequence; identical to SEQ ID NO: 1561
  derived and/or modified protein sequence (wt) from hemagglutinin__InfluenzaA__ABO32871

SEQ ID NO: 1580 - protein, 566 aa, Artificial Sequence
  derived and/or modified protein sequence (wt) from hemagglutinin__InfluenzaA__ABO32882
MKTIIALSYIICLVFAQKLPGNDNSTATLCLGHHAVPNGTIVKTITNDQIEVTNATELVQSSSTGEICDSPHQILDGENCTLIDALLGDPQCDGFQNKKWDLFVERSKAYSNCYPYDVPDYASLRSLVASSGTLEFNNESFNWTGVTQNGTSSACKRRSNNSFFSRLNWLTHLKFKYPALNVTMPNNEKFDKLYIWGVHHPGTDNDQIFPYAQASGRITVSTKRSQQTVIPNIGSRPRVRNIPSRISIYWTIVKPGDILLINSTGNLIAPRGYFRIRSGKSSIMRSDAPIGKCNSECITPNGSIPNDKPFQNVNRITYGACPRYVKQNTLKLATGMRNVPEKQTRGIFGAIAGFIENGWEGMVDGWYGFRHQNSEGIGQAADLKSTQAAINQINGKLNRLIGKTNEKFHQIEKEFSEVEGRIQDLEKYVEDTKIDLWSYNAELLVALENQHTIDLTDSEMNKLFERTKKQLRENAEDMGNGCFKIYHKCDNACIGSIRNGTYDHDVYRDEALNNRFQIKGVELKSGYKDWILWISFAISCFLLCVALLGFIMWACQKGNIRCNICI

SEQ ID NO: 1581 - protein, 566 aa, Artificial Sequence
  derived and/or modified protein sequence (wt) from hemagglutinin__InfluenzaA__ABO32893
MKTIIALSYILCLVFAQKLPGNDNSTATLCLGHHAVPNGTIVKTITNDQIEVTNATELVQSSSTGEICDSPHQILDGENCTLIDALLGDPQCDGFQNKKWDLFVERSKAYSNCYPYDVPDYASLRSLVASSGTLEFNNESFNWTGVTQNGTSSACKRRSNNSFFSRLNWLTHLKFKYPALNVTMPNNEKFDKLYIWGVHHPGTDNDQIFLYAQASGRITVSTKRSQQTVIPNIGSRPRVRNIPSRISIYWTIVKPGDILLINSTGNLIAPRGYFKIRSGKSSIMRSDAPIGKCNSECITPNGSIPNDKPFQNVNRITYGACPRYVKQNTLKLATGMRNVPEKQTRGIFGAIAGFIENGWEGMVDGWYGFRHQNSEGIGQAADLKSTQAAINQINGKLNRLIGKTNEKFHQIEKEFSEVEGRIQDLEKYVEDTKIDLWSYNAELLVALENQHTIDLTDSEMNKLFERTKKQLRENAEDMGNGCFKIYHKCDNACIGSIRNGTYDHDVYRDEALNNRFQIKGVELKSGYKDWILWISFAISCFLLCVVLLGFIMWACQKGNIRCNICI

SEQ ID NO: 1582 - protein, 566 aa, Artificial Sequence; identical to SEQ ID NO: 1581
  derived and/or modified protein sequence (wt) from hemagglutinin__InfluenzaA__ABO32904

SEQ ID NO: 1583 - protein, 566 aa, Artificial Sequence; identical to SEQ ID NO: 1396
  derived and/or modified protein sequence (wt) from hemagglutinin__InfluenzaA__ABO32915

SEQ ID NO: 1584 - protein, 566 aa, Artificial Sequence; identical to SEQ ID NO: 1396
  derived and/or modified protein sequence (wt) from hemagglutinin__InfluenzaA__ABO32926

SEQ ID NO: 1585 - protein, 566 aa, Artificial Sequence
  derived and/or modified protein sequence (wt) from hemagglutinin__InfluenzaA__ABO32937
MKTIIALSYILCLVFAQKLPGNDNSTATLCLGHHAVPNGTIVRTITNDQIEVTNATELVQSSSTGEICDSPHQILDGENCTLIDALLGDPQCDGFQNKKWDLFVERSKAYSNCYPYDVPDYASLRSLVASSGTLEFNNESFNWTGVTQNGTSSSCKRRSNNSFFSRLNWLTHLKFKYPALNVTMPNNEKFDKLYIWGVHHPGTDNDQIFLYAQASGRITVSTKRSQQTVIPNIGSRPRVRNIPSRISIYWTIVKPGDILLINSTGNLIAPRGYFKIRSGKSSIMRSDAPIGKCNSECITPNGSIPNDKPFQNVNRITYGACPRYVKQNTLKLATGMRNVPEKQTRGIFGAIAGFIENGWEGMVDGWYGFRHQNSEGIGQAADLKSTQAAINQINGKLNRLIGKTNEKFHQIEKEFSEVEGRIQDLEKYVEDTKIDLWSYNAELLVALENQHTIDLTDSEMNKLFERTKKQLRENAEDMGNGCFKIYHKCDNACIGSIRNGTYDHDVYRDEALNNRFQIKGVELKSGYKDWILWISFAISCFLLCVALLGFIMWACQKGNIRCNICI

SEQ ID NO: 1586 - protein, 565 aa, Artificial Sequence
  derived and/or modified protein sequence (wt) from hemagglutinin__InfluenzaA__ABO32948
MRAKLLVLLCTFTATYADTICIGYHANNSTDTVDTVLEKNVTVTHSVNLLEDSHNGKLCLLKGIAPLQLGNCSVAGWILGNPECELLISKESWSYIVETPNPENGTCYPGYFADYEELREQLSSVSSFERFEIFPKGSSWPNHTVTGVSASCSHNGKSSFYRNLLWLTGKNGLYPNLSMSYVNNKEKEVLVLWGVHHPPNIGDQRALYHTENAYVSVVSSHYSRRFTPEIAKRPKVRDQEGRINYYWTLLEPGDTIIFEANGNLIAPWYAFALSRGFGSGIITSNAPMDECDAKCQTPQGAINSSLPFQNVHPVTIGECPKYVRSAKLRMVTGLRNIPSIQSRGLFGAIAGFIEGGWTGMVDGWYGYHHQNEQGSGYAADQKSTQNAINGITNKVNSVIEKMNTQFTAVGKEFNKLERRMENLNKKVDDGFLDIWTYNAELLVLLENERTLDFHDSNVKNLYEKVKSQLKNNAKEIGNGCFEFYHKCNNECMESVKNGTYDYPKYSEESKLNREKIDGVKLESMGVYQILAIYSTVASSLVLLVSLGAISFWMCSNGSLQCRICI

SEQ ID NO: 1587 - protein, 565 aa, Artificial Sequence
  derived and/or modified protein sequence (wt) from hemagglutinin__InfluenzaA__ABO32959
MKAKLLVLLCTFTATYADTICIGYHANNSTDTVDTVLEKNVTVTHSVNLLEDSHNGKLCLLKGIAPLQLGNCSVAGWILGNPECELLISKESWSYIVETPNPENGTCYPGYFADYEELREQLSSVSSFERFEIFPKESSWPNHTVTGVSASCSHNGKSSFYRNLLWLTGKNGLYPNLSRSYVNNKEKEVLVLWGVHHPPNIGDQRALYHTENAYVSVVSSHYSRRFTPEIAKRPKVRDQEGRINYYWTLLEPGDTLIFEANGNLIAPWYAFALSRGFGSGIITSNAPMDECDAKCQTPQGAINSSLPFQNVHPVTIGECPKYVRSTKLRMVTGLRNIPSIQSRGLFGAIAGFIEGGWTGMVDGWYGYHHQNEQGSGYAADQKSTQNAINGITNKVNSVIEKMNTQFTAVGKEFNKLERRMENLNKKVDDGFLDIWTYNAELLVLLENERTLDFHDSNVKNLYEKVKSQLKNNAKEIGNGCFEFYHKCNNECMESVKNGTYDYPKYSEESKLNREKIDGVKLESMGVYQILAIYSTVASSLVLLVSLGAISFWMCSNGSLQCRICI

SEQ ID NO: 1588 - protein, 565 aa, Artificial Sequence; identical to SEQ ID NO: 1204
  derived and/or modified protein sequence (wt) from hemagglutinin__InfluenzaA__ABO32970

SEQ ID NO: 1589 - protein, 566 aa, Artificial Sequence
  derived and/or modified protein sequence (wt) from hemagglutinin__InfluenzaA__ABO32981
MKAKLLVLLCALSATDADTICIGYHANNSTDTVDTVLEKNVTVTHSVNLLEDSHNGKLCRLKGIAPLQLGKCSIAGWILGNPECESLFSKKSWSYIAETPNSENGTCYPGYFADYEELREQLSSVSSFERFEIFPKERSWPKHNVTRGVTASCSHKGKSSFYRNLLWLTEKNGSYPNLSKSYVNNKEKEVLVLWGVHHPSNIKDQKTIYRKENAYVSVVSSNYNRRFTPEIAERPKVRDQAGRINYYWTLLEPGDTIIFEANGNLIAPWYAFALSRGFGSGIITSNASMDECDTKCQTPQGAINSSLPFQNVHPVTIGECPKYVRSTKLRMVTGLRNIPSIQSRGLFGAIAGFIEGGWTGMIDGWYGYHHQNEQGSGYAADQKSTQNAINGITNKVNSVIEKMNTQFTAVGKEFNKLEKRMENLNKKVDDGFLDIWTYNAELLVLLENERTLDFHDSNVKNLYEKVKSQLKNNAKEIGNGCFEFYHKCNNECMESVKNGTYDYPKYSEESKLNREKIDGVKLESMGVYQILAIYSTVASSLVLLVSLGAISFWMCSNGSLQCRICI

SEQ ID NO: 1590 - protein, 566 aa, Artificial Sequence
  derived and/or modified protein sequence (wt) from hemagglutinin__InfluenzaA__ABO32992
MKAKLLVLLCALSATDADTICIGYHANNSTDTVDTVLEKNVTVTHSVNLLEDSHNGKLCRLKGIAPLQLGKCSIAGWILGNPECESLFSKKSWSYIAETPNSENGTCYPGYFADYEELREQLSSVSSFERFEIFPKERSWPKHDVTRGVTASCSHKGKSSFYRNLLWLTEKNGSYPNLSKSYVNNKEKEVLVLWGVHHPSNIEDQKTIYRKENAYVSVVSSNYNRRFTPEISERPKVRDQKGRINYYWTLLEPGDTIIFEANGNLIAPWYAFALSRGFGSGIITSNASMDECDTKCQTPQGAINSSLPFQNVHPVTIGECPKYVRSTKLRMVTGLRNIPSIQSRGLFGAIAGFIEGGWTGMIDGWYGYHHQNEQGSGYAADQKSTQNAINGITNKVNSVIEKMNTQFTAVGKEFNKLEKRMENLNKKVDDGFLDIWTYNAELLVLLENERTLDFHDSNVKNLYEKVKSQLKNNAKEIGNGCFEFYHKCNNECMESVKNGTYDYPKYSEESKLNREKIDGVKLESMGVYQILAIYSTVASSLVLLVSLGAISFWMCSNGSLQCRICI

SEQ ID NO: 1591 - protein, 566 aa, Artificial Sequence
  derived and/or modified protein sequence (wt) from hemagglutinin__InfluenzaA__ABO33006
MKAKILVLLCALSATDADTICIGYHANNSTDTVDTVLEKNVTVTHSVNLLEDSHNGKLCRLKGIAPLQLGKCSIAGWILGNPECESLFSKKSWSYIAETPNSENGTCYPGYFADYEELREQLSSVSSFERFEIFPKERSWPKHNVTRGVTASCSHKGKSSFYRNLLWLTEKNGSYPNLSKSYVNNKEKEVLVLWGVHHPSNIEDQKTIYRKENAYVSVVSSNYNRRFTPEISKRPKVRDQEGRINYYWTLLEPGDTIIFEANGNLIAPWYAFALSRGFGSGIITSNASMDECDTKCQTPQGAINSSLPFQNVHPVTIGECPKYVRSTKLRMVTGLRNIPSIQSRGLFGAIAGFIEGGWTGMIDGWYGYHHQNEQGSGYAADQKSTQNAINGITNKVNSVIEKMNTQFTAVGKEFNKLEKRMENLNKKVDDGFLDIWTYNAELLVLLENERTLDFHDSNVKNLYEKVKSQLKNNAKEIGNGCFEFYHKCNNECMESVKNGTYDYPKYSEESKLNREKIDGVKLESMGVYQILAIYSTVASSLVLLVSLGAISFWMCSNGSLQCRICI

SEQ ID NO: 1592 - protein, 566 aa, Artificial Sequence
  derived and/or modified protein sequence (wt) from hemagglutinin__InfluenzaA__ABO33025
MKAKLLVLLCALSATDADTICIGYHANNSTDTVDTVLEKNVTVTHSVNLLEDNHNGKLCKLKGIAPLQLGKCSIAGWILGNPECESLFSKKSWSYIAETPNSENGTCYPGYFADYEELREQLSSVSSFERFEIFPKESSWPNHNVTKGVTASCSHKGKSSFYRNLLWLTEKNGSYPNLSKSYVNNKEKEVLVLWGVHHPSNIKDQRTIYRKENAYVSVVSSHYNRRFTPEIAKRPKVRDQEGRINYYWTLLEPGDTIIFEANGNLIAPWYAFALSRGFGSGIITSNASMDECDAKCQTPQGAINSSLPFQNVHPVTIGECPKYVRSTKLRMVTGLRNIPSIQSRGLFGAIAGFIEGGWTGMIDGWYGYHHQNEQGSGYAADQKSTQSAINGITNKVNSIIEKMNTQFTAVGKEFNKLEKRMENLNKKVDDGFLDIWTYNAELLVLLENERTLDFHDSNVKNLYEKVKSQLKNNAKEIGNGCFEFYHKCNNECMESVKNGTYDYPKYSEESKLNREKIDGVKLESMGVYQILAIYSTVASSLVLLVSLGAISFWMCSNGSLQCRICI

SEQ ID NO: 1593 - protein, 566 aa, Artificial Sequence
  derived and/or modified protein sequence (wt) from hemagglutinin__InfluenzaA__ABO33036
MKTIIALSYILCLVFAQKLPGNDNSTATLCLGHHAVPNGTLVKTITNDQIEVTNATELVQSSSTGRICNSPHQILDGENCTLIDALLGDPHCDGFQNKEWDLFVERRKAYSNCYPYDVPDYASLRSLVASSGTLEFNNESFNWTGVAQNGTSSACKRRSIKSFFSRLNWLHQLKYKYPALNVTMPNNEKFDKLYIWGVHHPSTDSDQISLYAQASGRVTVSTKRSQQTVIPNIGSRPWVRGVSSRISIYWTIVKPGDILLINSTGNLIAPRGYFKIRSGKSSIMRSDAPIGKCNSECITPNGSIPNDKPFQNVNRITYGACPRYVKQNTLKLATGMRNVPEKQTRGIFGAIAGFIENGWEGMVDGWYGFRHQNSEGTGQAADLKSTQAAINQINGKLNRLIEKTNEKFHQIEKEFSEVEGRIQDLEKYVEDTKIDLWSYNAELLVALENQHTIDLTDSEMNKLFERTKKQLRENAEDMGNGCFKIYHKCDNACIGSIRNGTYDHDVYRDEALNNRFQIKGVELKSGYKDWILWISFAISCFLLCVVLLGFIMWACQKGNIRCNICI

SEQ ID NO: 1594 - protein, 566 aa, Artificial Sequence; identical to SEQ ID NO: 72
  derived and/or modified protein sequence (wt) from hemagglutinin__InfluenzaA__ABO33047

SEQ ID NO: 1595 - protein, 566 aa, Artificial Sequence; identical to SEQ ID NO: 650
  derived and/or modified protein sequence (wt) from hemagglutinin__InfluenzaA__ABO33058

SEQ ID NO: 1596 - protein, 566 aa, Artificial Sequence
  derived and/or modified protein sequence (wt) from hemagglutinin__InfluenzaA__ABO33069
MKTIIALSYIFCLVFAQNLPGNDNSTATLCLGHHAVPNGTLVKTITNDQIEVTNATELVQSSSTGRICDSPHRILDGKNCTLIDALLGDPHCDGFQNEKWDLFVERSKAFSNCYPYDVPDYASLRSLVASSGTLEFINEGFNWTGVTQNGGSYACKRGPDNSFFSRLNWLYESESKYPVLNVTMPNNDNFDKLYIWGVHHPSTDKEQTNLYVQASGRVTVSTKKSQQTIIPNVGSRPWVRGLSSRISIYWTIVKPGDILLINSNGNLIAPRGYFKIRTGKSSIMRSDAPIGTCSSECITPNGSIPNDKPFQNVNKITYGACPKYVKQNTLKLATGMRNVPEKQTRGIFGAIAGFIENGWEGMVDGWYGFRHQNSEGTGQAADLKSTQAAIDQINGKLNRVIEKTNEKFHQIEKEFSEVEGRIQDLEKYIEDTKIDLWSYNAELLVALENQHTIDLTDSKMNKLFEKTRRQLRENAEDMGNGCFKIYHKCDNACIGSIRNGTYDHDVYRDEALNNRFQIKGVELKSGYKDWILWISFAISCFLLCVVLLGFIMWACQKGNIRCNICI

SEQ ID NO: 1597 - protein, 566 aa, Artificial Sequence; identical to SEQ ID NO: 921
  derived and/or modified protein sequence (wt) from hemagglutinin__InfluenzaA__ABO37988

SEQ ID NO: 1598 - protein, 566 aa, Artificial Sequence
  derived and/or modified protein sequence (wt) from hemagglutinin__InfluenzaA__ABO38010
MKAKLLVLLCAFTATYADTICIGYHANNSTDTVDTVLEKNVTVTHSVNLLEDSHNGKLCRLKGTAPLQLGNCSVAGWILGNPECESLFSKESWSYIAETPNPENGTCYPGYFADYEELREQLSSVSSFERFEIFPKESSWPNHTVTKGVTASCSHNGKSSFYKNLLWLTEKNGLYPNLSKSYVNNKEKEVLVLWGVHHPSNIGDQRAIYHTENAYVSVVSSHYSRRFTPEIAKRPKVRDQEGRINYYWTLLEPGDTIIFEANGNLIAPWYAFALSRGVGSGIITSNASMGDCDAKCQTPQGAINSSLPFQNVHPVTIGECPKYVRSTKLRMVTGLRNIPSIQSRGLFGAIAGFIEGGWTGMIDGWYGYHHQNEQGSGYAADKKSTQNAIDGITNKVNSVIEKMNTQFTAVGKEFNKLERRMENLNKKVDDGFLDIWTYNAELLVLLENERTLDFHDSNVKNLYEKVKNQLKNNAKEIGNGCFEFYHKCNNECMESVKNGTYDYPKYSEESKLKREKIDGVKLESMGVYQILAIYSTVASSLVLLVSLGAISFWMCSNGSLQCRICI

SEQ ID NO: 1599 - protein, 565 aa, Artificial Sequence
  derived and/or modified protein sequence (wt) from hemagglutinin__InfluenzaA__ABO38021
MKAKLLVLLCTFTATYADTICIGYHANNSTDTVDTVLEKNVTVTHSVNLLEDSHNGKLCLLKGIAPLQLGNCSVAGWILGNPECELLIPKESWSYIVETPNPENGTCYPGYFADYEELREQLSSVSSFERFEIFPKESSWPNHTVTGVSASCSHNGKSSFYRNLLWLTGKNGLYPNLSKSYANNKEKEVLVLWGVHHPPNIGDQRALYHTENAYVSVVSSHYSRRFIPEMAKRPKVRDQEGRINYYWTLLEPGDTIIFEANGNLIAPWYAFALSRGFGSGIITSNAPMGECDAKCQTPQGAINSSLPFQNVHPVTIGECPKYVRSAKLRMVTGLRNIPSIQSRGLFGAIAGFIEGGWTGMVDGWYGYHHQNEQGSGYAADQKSTQNAINGITNKVNSVIEKMNTQFTAVGKEFNKLERRMENLNKKVDDGFLDIWTYNAELLVLLENERTLDFHDSNVKNLYEKVKSQLKNNAKEIGNGCFEFYHKCNNECMESVKNGTYDYPKYSEESKLNREKIDGVKLESMGVYQILAIYSTVASSLVLLVSLGAISFWMCSNGSLQCRICI

SEQ ID NO: 1600 - protein, 565 aa, Artificial Sequence
  derived and/or modified protein sequence (wt) from hemagglutinin__InfluenzaA__ABO38032
MKVKLLVLLCTFTATYADTICIGYHANNSTDTVDTVLEKNVTVTHSVNLLEDSHNGKLCLLKGIAPLQLGNCSVAGWILGNPECELLISKESWSYIVETPDPENGTCYPGYFADYEELREQLSSVSSFERFEIFPKESSWPNHTVTGVSASCSHNGKSSFYRNLLWLTGKNGLYPNLSKSYANNKEKEVLVLWGVHHPPNIGDQRALYHTENAYVSVVSSHYSRRFTPEIAKRPKVRDQEGRINYYWTLLEPGDTIIFEANGNLIAPRYAFALSRGFGSGIITSNAPMDECDAKCQTPKGAINSSLPFQNVHPVTIGECPKYVRSAKLRMVTGLRNIPSIQSRGLFGAIAGFIEGGWTGMVDGWYGYHHQNEQGSGYAADQKSTQNAINGITNKVNSVIEKMNTQFTAVGKEFNKLERRMENLNKKVDDGFLDIWTYNAELLVLLENERTLDFHDSNVKNLYEKVKSQLKNNAKEIGNGCFEFYHKCNNECMESVKNGTYDYPKYSEESKLNREKIDGVKLESMGIYQILAIYSTVASSLVLLVSLGAISFWMCSNGSLQCRICI

SEQ ID NO: 1601 - protein, 565 aa, Artificial Sequence; identical to SEQ ID NO: 800
  derived and/or modified protein sequence (wt) from hemagglutinin__InfluenzaA__ABO38043

SEQ ID NO: 1602 - protein, 566 aa, Artificial Sequence
  derived and/or modified protein sequence (wt) from hemagglutinin__InfluenzaA__ABO38054
MKARLLVLLCALAATDADTICIGYHANNSTDTVDTVLEKNVTVTHSVNLLEDSHNGKLCRLKGIAPLQLGKCNIAGWILGNPECESLLSERSWSYIVETPNSENGTCYPGDFIDYEELREQLSSVSSFERFEIFSKESSWPKHNTTRGVTAACSHAGKSSFYRNLLWLTEKDGSYPNLNNSYVNKKGKEVLVLWGVHHPSNIKDQQTLYQKENAYVSVVSSNYNRRFTPEIAERPKVRGQAGRMNYYWTLLKPGDTIMFEANGNLIAPWYAFALSRGFGSGIITSNASMHECDTKCQTPQGAINSSLPFQNIHPVTIGECPKYVRSTKLRMVTGLRNIPSIQSRGLFGAIAGFIEGGWTGMIDGWYGYHHQNEQGSGYAADQKSTQNAINGITNKVNSVIEKMNTQFTAVGKEFNNLEKRMENLNKKVDDGFLDIWTYNAELLVLLENERTLDFHDSNVKNLYEKVKNQLRNNAKEIGNGCFEFYHKCNNECMESVKNGTYDYPKYSEESKLNREKIDGVKLESMGVYQILAIYSTVASSLVLLVSLGAISFWMCSNGSLQCRICI

SEQ ID NO: 1603 - protein, 566 aa, Artificial Sequence
  derived and/or modified protein sequence (wt) from hemagglutinin__InfluenzaA__ABO38065
MKAKLLVLLCALSATDADTICIGYHANNSTDTVDTVLEKNVTVTHSVNLLEDSHNGKLCRLKGIAPLQLGKCSIAGWILGNPECESLFSKKSWSYIAETPNSENGTCYPGYFADYEELREQLSSVSSFERFEIFPKERSWPKHNITRGVTASCSHKGKSSFYRNLLWLTEKNGSYPNLSKSYVNNKEKEVLVLWGVHHPSNIEDQKTIYRKENAYVSVVSSNYNRRFTPEIAKRPKVRGQEGRINYYWTLLEPGDTIIFEANGNLIAPWYAFALSRGFGSGIITSNASMDECDTKCQTPQGAINSSLPFQNVHPVTIGECPKYVRSTKLRMVTGLRNIPSIQSRGLFGAIAGFIEGGWTGMIDGWYGYHHQNEQGSGYAADQKSTQNAINGITNKVNSVIEKMNTQFTAVGKEFNKLEKRMENLNKKVDDGFLDIWTYNAELLVLLENERTLDFHDSNVKNLYEKVKSQLKNNAKEIGNGCFEFYHKCNNECMESVKNGTYDYPKYSEESKLNREKIDGVKLESMGVYQILAIYSTVASSLVLLVSLGAISFWMCSNGSLQCRICI

SEQ ID NO: 1604 - protein, 566 aa, Artificial Sequence; identical to SEQ ID NO: 243
  derived and/or modified protein sequence (wt) from hemagglutinin__InfluenzaA__ABO38076

SEQ ID NO: 1605 - protein, 566 aa, Artificial Sequence
  derived and/or modified protein sequence (wt) from hemagglutinin__InfluenzaA__ABO38087
MKTIIALSYILCLVFAQKLPVNDNSTATLCLGHHAVPNGTLVKTITNDHIEVTNATELVQSSSTGRICDSPHQILDGENCTLIDALLGDPHCDGFQNKEWDLFVERSTAYSNCYPYDVPDYASLRSLVASSGTLEFNNESFNWTGVAQNGTSSACKRRSIKSFFSRLNWLHQLKYKYPALNVTMPNNEKFDKLYIWGVHHPSTDSDQISLYAQASGRVTVSTKRSQQTVIPNIGSRPWVRGVSSRISIYWTIVKPGDILLINSTGNLIAPRGYFKIRSGKSSIMRSNAPIGKCNSECITPNGSIPNDKPFQNVNRITYGACPRYVKQNTLKLATGMRNVPEKQTRGIFGAIAGFIENGWEGMVDGWYGFRHQNSEGTGQAADLKSTQAAINQINGKLNRLIEKTNEKFHQIEKEFSEVEGRIQDLEKYVEDTKIDLWSYNAELLVALENQHTIDLTDSEMNKLFERTRKQLRENAEDVGNGCFKIYHKCDNACIGSIRNGTYDHDVYRDEALNNRFQIKGVELKSGYKDWILWISFAISCFLLCVVLLGFIMWACQKGNIRCNICI

SEQ ID NO: 1606 - protein, 562 aa, Artificial Sequence
  derived and/or modified protein sequence (wt) from hemagglutinin__InfluenzaA__ABO38098
MAIIYLILLFTAVRGDQICIGYHANNSTEKVDTILERNVTVTHAKDILEKTHNGKLCKLNGIPPLELGDCSIAGWLLGNPECDRLLSVPEWSYIMEKENPRDGLCYPGSFNDYEELKHLLSSVKHFEKVKILPKDRWTQHTTTGGSRACAVSGNPSFFRNMVWLTKKGSNYPVAKGSYNNTSGEQMLIIWGVHHPNDETEQRTLYQNVGTYVSVGTSTLNKRSTPDIATRPKVNGQGGRMEFSWTLLDMWDTINFESTGNLIAPEYGFKISKRGSSGIMKTEGTLGNCETKCQTPLGAINTTLPFHNVHPLTIGECPKYVKSEKLVLATGLRNVPQIESRGLFGAIAGFIEGGWQGMVDGWYGYHHSNDQGSGYAADKESTQKAFDGITNKVNSVIEKMNTQFEAVGKEFSNLERRLENLNKKMEDGFLDVWTYNAELLVLMENERTLDFHDSNVKNLYDKVRMQLRDNVKELGNGCFEFYHKCDDECMNSVKNGTYDYPKYEEESKLNRNEIKGVKLSSMGVYQILAIYATVAGSLSLAIMMAGISFWMCSNGSLQCRICI

SEQ ID NO: 1607 - protein, 566 aa, Artificial Sequence
  derived and/or modified protein sequence (wt) from hemagglutinin__InfluenzaA__ABO38230
MKTIIALSYIFCQVFAQNLPGNDNSTATLCLGHHAVPNGTLVKTITNDQIEVTNATELVQSSSTGRICDNPHRILDGKNCTLIDALLGDPHCDGFQNEKWDLFVERSKAFSNCYPYDVPDYASLRSLVASSGTLEFFNEGFNWTGVTQNGGSYACKRGPDNSFFSRLNWLYKSESTYPVLNVTMPNNDNFDKLYIWGVHHPSTDKEQTNLYVQASGRVTVSTKRSQQTIIPSVGSRPWVRGLSSRISIYWTIVKPGDVLLINSNGNLIAPRGYFKIRTGKSSIMRSDAPIGTCSSECITPNGSIPNDKPFQNVDKITYGACPKYVKQNTLKLATGMRNVPEKQTRGIFGAIAGFIENGWEGMIDGWYGFRHQNSEGTGQAADLKSTQAAIDQINGKLNRVIEKTNEKFHQIEKEFSEVEGRIQDLEKYVEDTKIDLWSYNAELLVALENQHTIDLTDSEMNKLFEKTRRQLRENAEDMGNGCFKIYHKCDNACIGSIRNGTYDHDVYRDEALNNRFQIKGVELKSGYKDWILWISFAISCFLLCVVLLGFIMWACQKGNIRCNICI

SEQ ID NO: 1608 - protein, 566 aa, Artificial Sequence
  derived and/or modified protein sequence (wt) from hemagglutinin__InfluenzaA__ABO38241
MKTIIALSYISCLVFAQKLPGNDNSTATLCLGHHAVPNGTLVKTITNDQIEVTNATELVQSSSTGRICDSPHRILDGKNCTLIDALLGDPHCDGFQNEKWDLFVERSKAFSNCYPYDVPDYASLRSLVASSGTLEFINEGFNWTGVTQSGGSYTCKRGSVNSFFSRLNWLYESESKYPALNVTMPNNGKFDKLYIWGVHHPSTDKEQTNLYVRASGRVTVSTKRSQQTVIPNIGPRPWVRGLSSRISIYWTIVKPGDILLINSTGNLIAPRGYFKIRTGKSSIMRSDAPIGTCSSGCITPNGSIPNDKPFQNVNKITYGACPRYVKQNTLKLATGMRNVPEKQTRGIFGAIAGFIENGWEGMVDGWYGFRHQNSEGTGQAADLKSTQAAIDQINGKLNRLIEKTNEKFHQIEKEFSEVEGRIQDLEKYVEDTKIDLWSYNAELLVALENQHTIDMTDSEMNKLFEKTRKQLRENAEDMGNGCFKIYHKCDNACIGSIRNGTYDHDVYRDEALNNRFQIKGVELKSGYKDWILWISFAISCFLLCVVLLGFIMWACQKGNIRCNICI

SEQ ID NO: 1609 - protein, 566 aa, Artificial Sequence; identical to SEQ ID NO: 282
  derived and/or modified protein sequence (wt) from hemagglutinin__InfluenzaA__ABO38252

SEQ ID NO: 1610 - protein, 562 aa, Artificial Sequence
  derived and/or modified protein sequence (wt) from hemagglutinin__InfluenzaA__ABO38296
MVIIYLILLFTAVRGDQICIGYHANNSTEKVDTILERNVTVTHAKDILEKTHNGKLCKLNGIPPLELGDCSIAGWLLGNPECDRLLSVPEWSYIMEKENPRDGLCYPGSFNDYEELKHFLSSVKHFEKVKILPKDRWTQHTTTGGSRACAVSGNPSFFRNMVWLTKKGSNYPVAKGSYNNTSGEQMLIIWGVHHPNDETEQRTLYQNVGTYVSVGTSTLNKRSTPDIATRPKVNGLGGRMEFSWTLLDMWDTINFESTGNLIAPEYGFKISKRGSSGIMKTEGTLGNCETKCQTPLGAINTTLPFHNVHPLTIGECPKYVKSEKLVLATGLRNVPQIESRGLFGAIAGFIEGGWQGMVDGWYGYHHSNDQGSGYAADKESTQKAFDGITNKVNSVIEKMNTQFEAVGKEFSNLERRLENLNKKMEDGFLDVWTYNAELLVLMENERTLDFHDSNVKNLYDKVRMQLRDNAKELGNGCFEFYHKCDDECMNSVKNGTYYYPKYEEESKLNRNEIKGVKLSSMGVYQILAIYATVAGSLSLAIMMAGISFWMCSNGSLQCRICI

SEQ ID NO: 1611 - protein, 565 aa, Artificial Sequence; identical to SEQ ID NO: 870
  derived and/or modified protein sequence (wt) from hemagglutinin__InfluenzaA__ABO38318

SEQ ID NO: 1612 - protein, 565 aa, Artificial Sequence; identical to SEQ ID NO: 800
  derived and/or modified protein sequence (wt) from hemagglutinin__InfluenzaA__ABO38329

SEQ ID NO: 1613 - protein, 566 aa, Artificial Sequence
  derived and/or modified protein sequence (wt) from hemagglutinin__InfluenzaA__ABO38351
MKARLLVLLCALAATDADTICIGYHANNSTDTVDTVLEKNVTVTHSVNLLEDSHNGKLCRLKGIAPLQLGKCNIAGWLLGNPECDPLLPARSWSYIVETPNSENGICYPGAFIDYEELREQLSSVSSFERFEIFPKESSWPNHNTNIGVTAACSHAGKSSFYRNLLWLTKKGGSYPKLKNSYVNKKGKEVLVLWGIHHPSNSKDQQTLYQNENAYVSVVSSNYNRRFTPEIAERPEVRDQAGRMNYYWTLLEPGDTIMFEANGNLVAPWYAFALSRGFGSGIITSNASMHECNTKCQTPQGAINSSLPFQNIHPVTIGECPKYVRSAKLRMVTGLRNIPSIQSRGLFGAIAGFIEGGWTGMIDGWYGYHHQNEQGSGYAADQKSTQNAINGITNKVNSVIEKMNTQFTAVGKEFNNLEKRMENLNKKVDDGFLDIWTYNAELLVLLENERTLDFHDSNVKNLYEKVKSQLKNNAKEIGNGCFEFYHKCDNECMESVRNGTYDYPKYSEESKLNREKIDGVKLESMGVYQILAIYSTVASSLVLLVSLGAISFWMCSNGSLQCRICI

SEQ ID NO: 1614 - protein, 566 aa, Artificial Sequence
  derived and/or modified protein sequence (wt) from hemagglutinin__InfluenzaA__ABO38362
MKAKLLVLLCALSATDADTICIGYHANNSTDTVDTVLEKNVTVTHSVNLLEDSHNGKLCRLKGIAPLQLGKCSIAGWILGNPECESLVSKKSWSYIAETPNSENGTCYPGYFADYEELREQLSSVSSFERFEIFPKESSWPKHNVTRGVTASCSHKGKSSFYRNLLWLTEKNGSYPNLSKSYVNNKEKEVLVLWGVHHPSNIENQKTIYRKENAYVSVVSSHYNRRFTPEIAKRPKVRDQEGRINYYWTLLEPGDTIIFEANGNLIAPWYAFALSRGFGSGIITSNASIDECDAKCQTPQGAINSSLPFQNVHPVTIGECPKYVRSTKLRMVTGLRNIPSIQSRGLFGAIAGFIEGGWTGMIDGWYGYHHQNEQGSGYAADQKSTQNAINGITNKVNSVIEKMNTQFTAVGKEFNKLEKRMENLNKKVDDGFLDIWTYNAELLVLLENERTLDFHDSNVKNLYEKVKSQLKNNAKEIGNGCFEFYHKCNNECMESVKNGTYDYPKYSEESKLNREKIDGVKLESMGVYQILAIYSTVASSLVLLVSLGAISFWMCSNGSLQCRICI

SEQ ID NO: 1615 - protein, 565 aa, Artificial Sequence
  derived and/or modified protein sequence (wt) from hemagglutinin__InfluenzaA__ABO38373
MKARLLVLLCALAATDADTICIGYHANNSTDTVDTVLEKNVTVTHSVNLLEDSHNGKLCRLKGIAPLQLGKCNIAGWILGNPECESLLSERSWSYIVETPNSENGTCYPGDFIDYEELREQLSSVSSFERFEIFSKESSWPKHTTGGVTAACSHAGKSSFYRNLLWLTEKDGSYPNLNNSYVNKKGKEVLVLWGVHHPSNIKDQQTLYQKENAYVSVVSSNYNRRFTPEIAERPKVRGQAGRINYYWTLLKPGDTIMFEANGNLIAPWYAFALSRGFGSGIITSNASMHECDTKCQTPQGAINSSLPFQNIHPVTIGECPKYVRSTKLRMVTGLRNIPSIQSRGLFGAIAGFIEGGWTGMIDGWYGYHHQNEQGSGYAADQKSTQNAINGITNKVNSVIEKMNTQFTAVGKEFNNLEKRMENLNKKVDDGFLDIWTYNAELLVLLENERTLDFHDSNVKNLYEKVKNQLRNNAKEIGNGCFEFYHKCNNECMESVKNGTYDYPKYSEESKLNREKIDGVKLESMGVYQILAIYSTAASSLVLLVSLGAISFWMCSNGSLQCRICI

SEQ ID NO: 1616 - protein, 566 aa, Artificial Sequence
  derived and/or modified protein sequence (wt) from hemagglutinin__InfluenzaA__ABO38384
MKARLLVLLCALAAADADTICIGYHANNSTDTVDTVLEKNVTVTHSVNLLEDSHNGKLCRLKGIPPLQLGKCNIAGWLLGNPECDSLLPARSWSYIVETPNSENGACYPGDFINYEELREQLSSVSSFERFEIFPKESSWPKHNTTKGVTAACSHAGKSSFYRNLLWLTKKEDSYPKLKNSYVNKKGKEVLVLWGVHHPSSSKEQQTLYQNENAYVSVVSSNYNRRFTPEIAERPKVRDQTGRMNYYWTLLEPGDTIIFEANGNLIAPWYAFALSRGFGSGIITSNASMHECNTKCQTPQGAINSSLPFQNIHPVTIGECPKYVRSAKLRMVTGLRNIPSIQSRGLFGAIAGFIEGGWTGMIDGWYGYHHQNEQGSGYAADQKSTQNAINGITNKVNSVIEKMNTQFTAVGKEFNNLEKRMENLNKKVDDGFLDIWTYNAELLVLLENERTLDFHDSNVKNLYEKVKSQLKNNAKEIGNGCFEFYHKCDNECMESVRNGTYDYPKYSEESKLNREKIDGVKLESMGVYQILAIYSTVASSLVLLVSLGAISFWMCSNGSLQCRICI

SEQ ID NO: 1617 - protein, 566 aa, Artificial Sequence
  derived and/or modified protein sequence (wt) from hemagglutinin__InfluenzaA__ABO38395
MKAKLLVLLCAFTATDADTICIGYHANNSTDTVDTVLEKNVTVTHSVNLLEDSHNGKLCRLKGIAPLQLGNCSIAGWILGNPECESLFSKKSWSYIAETPNSENGTCYPGYFADYEELREQLSSVSSFERFEIFPKESSWPNHTVTKGVTASCSHKGRSSFYRNLLWLTKKNGSYPNLSKSYVNNKEKEVLVLWGVHHPSNIGDQRAIYHTENAYVSVVSSHYNRRFTPEIAKRPKVRDQEGRINYYWTLLEPGDTIIFEANGNLIAPWYAFALSRGFGSGIITSNASMDECDAKCQTPQGAINSSLPFQNVHPVTIGECPKYVRSTKLRMVTGLRNIPSIQSRGLFGAIAGFIEGGWTGMIDGWYGYHHQNEQGSGYAADQKSTQNAINGITNKVNSVIEKMNTQFTAVGKEFNKLERRMENLNKKVDDGFLDIWTYNAELLVLLENERTLDFHDSNVKNLYEKVKSQLKNNAKEIGNGCFEFYHKCNNECMESVKNGTYDYPKYSEESKLNREKIDGVKLESMGVYQILAIYSTVASSLVLLVSLGAISFWMCSNGSLQCRICI

SEQ ID NO: 1618 - protein, 566 aa, Artificial Sequence
  derived and/or modified protein sequence (wt) from hemagglutinin__InfluenzaA__ABO38406
MKAKLLVLLCALSATDADTICIGYHANNSTDTVDTVLEKNVTVTHSVNLLEDNHNGKLCKLKGIAPLQLGKCSIAGWILGNPECESLFSKKSWSYIAETPNSENGTCYPGYFADYEELREQLSSVSSFERFEIFPKESSWPNHNVTKGVTASCSHKGKSSFYRNLLWLTEKKGSYPNLSKSYVNNKEKEVLVLWGIHHPSNIEDQKTIYRKENAYVSVVSSHYNRRFTPEIAKRPKVRDQEGRINYYWTLLEPGDTIIFEANGNLIAPWYAFALSRGFGSGIITSNASMDECDAKCQTPRGAINSSLPFQNVHPVTIGECPKYVRSTKLRMVTGLRNIPSIQSRGLFGAIAGFIEGGWTGMIDGWYGYHHQNEQGSGYAADQKSTQSAINGITNKVNSIIEKMNTQFTAVGKEFNKLEKRMENLNKKVDDGFLDIWTYNAELLVLLENERTLDFHDSNVKNLYEKVKSQLKNNAKEIGNGCFEFYHKCNNECMESVKNGTYDYPKYSEESKLNREKIDGVKLESMGVYQILAIYSTVASSLVLLVSLGAISFWMCSNGSLQCRICI

SEQ ID NO: 1619 - protein, 566 aa, Artificial Sequence
  derived and/or modified protein sequence (wt) from hemagglutinin__InfluenzaA__ABO38417
MKTIIALSYILCLVFAQKLPVNDNSTATLCLGHHAVPNGTLVKTITNDHIEVTNATELVQSSPTGRICDSPHQILDGENCTLIDALLGDPHCDGFQNKEWDLFVERSTAYSNCYPYDVPDYASLRSLVASSGTLEFNNESFNWTGVAQNGTSSACKRRSIKSFFSRLNWLHQLKYKYPALNVTMPNNEKFDKLYIWGVHHPSTDSDQISLYAQASGRVTVSTKRSQQTVIPNIGSRPWVRGVSSRISIYWTIVKPGDILLINSTGNLIAPRGYFKIRSGKSSIMRSNTPIGKCNSECITPNGSIPNDKPFQNVNRITYGACPRYVKQNTLKLATGMRNVPEKQTRGIFGAIAGFIENGWEGMVDGWYGFRHQNSEGTGQAADLKSTQAAINQINGKLNRLIEKTNEKFHQIEKEFSEVEGRIQDLEKYVEDTKIDLWSYNAELLVALENQHTIDLTDSEMNKLFERTRKQLRENAEDMGNGCFKIYHKCDNACIGSIRNGTYDHDVYRDEALNNRFQIKGVELKSGYKDWILWISFAISCFLLCVVLLGFIMWACQKGNIRCNICI

SEQ ID NO: 1620 - protein, 562 aa, Artificial Sequence
  derived and/or modified protein sequence (wt) from hemagglutinin__InfluenzaA__ABO38712
MAIIYFILLFTAVRGDQICIGYHANNSTEKVDTILERNVTVTHAKDILEKTHNGKLCKLNGIPPLELGDCSIAGWLLGNPECDRLLRVPEWSYIMEKENPRYSLCYPGSFNDYEELKHLLSSVKHFEKVRILPKDGWTQHTTSGGSKACAVSGKSSFFRNMVWLTKKGPNYPVAKRSYNNTSGEQMLIIWGVHHPKDEAEQRALYQKVGTYVSASTSTLNKRSTPEIAARPEVNGLGSRMEFSWTLLDVWDTINFESTGNLVAPEYGFKISKRGSSGIMKTEGTLGNCETKCQTPLGAINTTLPFHNVHPLTIGECPKYVKSEKLVLATGLRNVPQIESRGLFGAIAGFIEGGWQGMVDGWYGYHHSNDQGSGYAADKESTQKAFDRITNKVNSVIEKMNTQFEAVGKEFSNLEKRLENLNKKMEDGFLDVWTYNAELLVLMENERTLDFHDSNVKNLYNKVRMQLRDNVKELGNGCFEFYHKCDDECMSSVKNGTYDYPKYEEESKLKRNEIKGVKLSSMGVYQILAIYATVAGSLSLAIMIAGISLWMCSNGSLQCRICI

SEQ ID NO: 1621 - protein, 562 aa, Artificial Sequence
  derived and/or modified protein sequence (wt) from hemagglutinin__InfluenzaA__ABO38723
MAIIYFILLFTAVRGDQICIGYHANNSTEKVDTILERNVTVTHAKDILEKTHNGKLCKLNGIPPLELGDCSIAGWLLGNPECDRLLRVPEWSYIMEKENPRYSLCYPGSFNDYEELKHLLSSVKHFEKVRILPKDGWTQHTTSGGSKACAVSGKSSFFRNMVWLTKKGPNYPVAKRSYNNTSGEQMLIIWGVHHPNDEAEQRALYQKVGTYVSASTSTLNKRSTPEIAARPEVNGLGSRMEFSWTLLDVWDTINFESTGNLVAPEYGFKISKRGSSGIMKTEGTLGNCETKCQTPLGAINTTLPFHNVHPLTIGECPKYVKSEKLVLATGLRNVPQIESRGLFGAIAGFIEGGWQGMVDGWYGYHHSNDQGSGYAADKESTQKAFDRITNKVNSVIEKMNTQFEAVGKEFSNLEKRLGNLNKKMEDGFLDVWTYNAELLVLMENERTLDFHDSNVKNLYNKVRMQLRDNVKELGNGCFEFYHKCDDECMSSVKNGTYDYPKYEEESKLKRNEIKGVKLSSMGVYQILAIYATVAGSLSLAIMIAGISLWMCSNGSLQCRICI

SEQ ID NO: 1622 - protein, 565 aa, Artificial Sequence
  derived and/or modified protein sequence (wt) from hemagglutinin__InfluenzaA__ABO44046
MKVKLLVLLCTFTATYADTICIGYHANNSTDTVDTVLEKNVTVTHSVNLLEDSHNGKLCLLKGIAPLQLGNCSVAGWILGNPECELLISKESWSYIVETPNPENGTCYPGYFADYEELREQLSSVSSFERFEIFPKESSWPNHTVTGVSASCSHNGKSSFYRNLLWLTGKNGLYPNLSKSYANNKEKEVLVLWGVHHPPNIGDQRALYHTENAYVSVVSSHYSRRFTPEIAKRPKVRDQEGRINYYWTLLEPGDTIIFEANGNLIAPRYAFALSRGFGSGIITSNAPMDECDAKCQTPQGAINSSLPFQNVHPVTIGECPKYVRSAKLRMVTGLRNIPSIQSRGLFGAIAGFIEGGWTGMVDGWYGYHHQNEQGSGYAADQKSTQNAINGITNKMNSVIEKMNTQFTAVGKEFNKLERRMENLNKKVDDGFLDIWTYNAELLVLLENERTLDFHDSNVKNLYEKVKSQLKNNAKEIGNGCFEFYHKCNNECMESVKNGTYDYPKYSEESKLNREKIDGVKLESMGVYQILAIYSTVASSLVLLVSLGAISFWMCSNGSLQCRICI

SEQ ID NO: 1623 - protein, 562 aa, Artificial Sequence
  derived and/or modified protein sequence (wt) from hemagglutinin__InfluenzaA__ABO44057
MAIIYLILLFTAVRGDQICIGYHANNSTEKVDTILERNVTVTHAKDILEKTHNGKLCKLNGIPPLELGDCSIAGWLLGNPECDRLLRVPEWSYIMEKENPRYSLCYPGSFNDYEELKHLLSSVKHFEKVKILPKDGWTQHETDGGSKACAVSGKASFFRNMVWLTKRGPNYQVAKRSYNNTSGEQMLIIWGVHHPKDEAEQRALYQKVGTYVSASTSTLNKRSTPEIAARPEVNGLESRMEFSWTLLDVWDTINFESTGNLVAPEYGFKISKRGSSGIMKTEGTLGNCETKCQTPLGAINTTLPFHNVHPLTIGECPKYVKSEKLVLATGLRNVPQIESRGLFGAIAGFIEGGWQGMVDGWYGYHHSNDQGSGYAADKESTQKAFDRITNKVNSVIEKMNIQFEAVGKEFSNLEKRLENLNKKMEDGFLDVWTYNAELLVLMENERTLDFHDSNVKNLYDKVRMQLRDNVKELGNGCFEFYHKCDDECMNSVKNGTYDYPKYEEESKLKRNEIKGVKLSSMGVYQILAIYATVAGSLSLAIMIAGISFWMCSNGSLQCRVCI

SEQ ID NO: 1624 - protein, 566 aa, Artificial Sequence; identical to SEQ ID NO: 256
  derived and/or modified protein sequence (wt) from hemagglutinin__InfluenzaA__ABO44079

SEQ ID NO: 1625 - protein, 562 aa, Artificial Sequence
  derived and/or modified protein sequence (wt) from hemagglutinin__InfluenzaA__ABO44090
MAIIYLILLFTAVRGDQICIGYHANNSTEKVDTILERNVTVTHAKDILEKTHNGKLCKLNGIPPLELGDCSIAGWLLGNPECDRLLRVPEWSYIMEKENPRDGLCYPGSFNDYEELKHLLSSVKHFEKVKILPKDRWTQHTTTGGSRACAVSGNPSFFRNMIWLTKKGSNYPVAKGSYNNTSGEQMLIIWGVHHPNDETEQRTLYQNVGTYVSVVTSTLNKRSTPKIATRPKVNGLGGRMEFSWTLLDMWDTINFESTGNLIAPEYGFKISKRGSSGIMKTEGTLENCETKCQTPLGAINTTLPFHNVHPLTIGECPKYVKSEKLVLATGLRNVPQIESRGLFGAIAGFIEGGWQGMVDGWYGYHHSNDQGSGYAADKESTQRAFDGITNKVNSVIEKMNTQFEAVGKEFSNLERRLENLNKKMEDGLLDVWTYNAELLVLMENERILDFHDSNVKNLYDKVRMQLRDNVKELGNGCFEFYHKCDDECMNSVKNGTYDYPKYEEESKLNRNEIKGVKLSSMGVYQILAIYATVAGSLSLAIMMAGISFWMCSNGSLQCRICI

SEQ ID NO: 1626 - protein, 562 aa, Artificial Sequence
  derived and/or modified protein sequence (wt) from hemagglutinin__InfluenzaA__ABO44101
MAIIYLILLFTAVRGDQICIGYHANNSTEKVDTILERNVTVTHAKDILEKTHNGKLCKLNGIPPLELGDCSIAGWLLGNPECDRLLRVPEWSYIMEKENPRYSLCYPGSFNDYEELKHLLSSVKHFEKVKILPKDGWTQHKTDGGSKACAVSGKPSFFRNMVWLTKKGPNYPVAKRSYNNTSGEQMLIIWGVHHPNDEAEQRALYQKVGTYVSASTSTLNKRSTPEIAARPEVSGLGSRMEFSWTLLDVWDTISFESTGNLVAPEYGFKISKRGSSGIMKTEGTLGNCETKCQTPLGAINTTLPFHNVHPLTIGECPKYVKSEKLVLATGLRNVPQIESRGLFGAIAGFIEGGWQGMVDGWYGYHHSNDQGSGYAADKESTQKAFDRITNKVNSVIEKMNTQFEAVGKEFSNLEKRLENLNKKMEDGFLDVWTYNAELLVLMENERTLDFHDSNVKNLYDKVRMQLRDNVKELGNGCFEFYHKCDDECMNSVKNGTYDYPKYEEESKLKRNEIKGVKLSSMGVYQILAIYATVAGSLSLAIMIAGISFWMCSNGSLQCRICI

SEQ ID NO: 1627 - protein, 566 aa, Artificial Sequence
  derived and/or modified protein sequence (wt) from hemagglutinin__InfluenzaA__ABO44123
MKAKLLVLLCAFTATDADTICIGYHANNSTDTVDTVLEKNVTVTHSVNLLEDSHNGKLCRLKGIAPLQLGNCSIAGWILGNPECESLFSKKSWSYIAETPNSENGTCYPGYFADYEELREQLSSVSSFERFEIFPKESSWPNHTVTKGVTASCSHKGKSSFYRNLLWLTKKNGSYPNLSKSYVNNKEKEVLVLWGVHHPSNIGDQRAIYHTENAYVSVVSSHYNRRFTPEIAKRPKVRDQEGRINYYWTLLEPGDTIIFEANGNLIAPWYAFALSRGFGSGIITSNASMDECDAKCQTPQGAINSSLPFQNVHPVTIGECPKYVRSTKLRMVTGLRNIPSIQSRGLFGAIAGFIEGGWTGMIDGWYGYHHQNEQGSGYAADQKSTQNAINGITNKVNSVIEKMNTQFTAVGKEFNKLERRMENLNKKVDDGFLDIWTYNAELLVLLENERTLDFHDSNVKNLYEKVKSQLKNNAKEIGNGCFEFYHKCNNECMESVKNGTYDYPKYSEESKLNREKIDGVKLESMGVYQILAIYSTVASSLVLLVSLGAISFWMCSNGSLQCRICI

SEQ ID NO: 1628 - protein, 566 aa, Artificial Sequence
  derived and/or modified protein sequence (wt) from hemagglutinin__InfluenzaA__ABO44134
MKAKLLVLLCALSATDADTICIGYHANNSTDTVDTVLEKNVTVTHSVNLLEDSHNGKLCRLKGIAPLQLGKCSIAGWILGNPECESLFSKKSWSYIAETPNSENGTCYPGYFADYEELREQLSSVSSFERFEIFPKERSWPKHNVTRGVTASCSHKGKSSFYRNLLWLTEKNGSYPNLSKSYVNNKEKEVLVLWGVHHPSNIEDQKTIYRKENAYVSVVSSNYNRRFTPEIAERPKVRGQAGRINYYWTLLEPGDTIIFEANGNLIAPWHAFALSRGFGSGIITSNASMDECDTKCQTPQGAINSSLPFQNIHPVTIGECPKYVRSTKLRMVTGLRNIPSIQSRGLFGAIAGFIEGGWTGMIDGWYGYHHQNEQGSGYAADQKSTQNAINGITNKVNSVIEKMNTQFTAVGKEFNKLEKRMENLNKKVDDGFLDIWTYNAELLVLLENERTLDFHDSNVKNLYEKVKSQLKNNAKEIGNGCFEFYHKCNNECMESVKNGTYDYPKYSEESKLNREKIDGVKLESMGVYQILAIYSTVASSLVLLVSLGAISFWMCSNGSLQCRICI

SEQ ID NO: 1629 - protein, 566 aa, Artificial Sequence
  derived and/or modified protein sequence (wt) from hemagglutinin__InfluenzaA__ABO52071
MKTIIALSYILCLVFAQKLPGNDNSTATLCLGHHAVPNGTIVKTITNDQIEVTNATELVQNSSTGGICDSPHQILDGENCTLIDALLGDPQCDGFQNKKWDLFVERSKAYSNCYPYDVPDYASLRSLVASSGTLEFNNESFNWTGVTQNGTSSACKRRSNNSFFSRLNWLTHLKFKYPALNVTMPNNEKFDKLYIWGVHHPSTDNDQISLYAQASGRITVSTKRSQQTVIPNIGSRPRVRDIPSRISIYWTIVKPGDILLINSTGNLIAPRGYFKIRSGKSSIMRSDAPIGKCNSECITPNGSIPNDKPFQNVNRITYGACPRYVKQNTLKLATGMRNVPEKQTRGIFGAIAGFIENGWEGMVDGWYGFRHQNSEGIGQAADLKSTQAAINQINGKLNRLIGKTNEKFHQIEKEFSEVEGRIQDLEKYVEDTKIDLWSYNAELLVALENQHTIDLTDSEMNKLFERTKKQLRENAEDMGNGCFKIYHKCDNACIGSIRNGTYDHDVYRDEALNNRFQIKGVELKSGYKDWILWISFAISCFLLCVALLGFIMWACQKGNIRCNICI

SEQ ID NO: 1630 - protein, 566 aa, Artificial Sequence
  derived and/or modified protein sequence (wt) from hemagglutinin__InfluenzaA__ABO52225
MKAKLLVLLCAFTATYADTICIGYHANNSTDTVDTVLEKNVTVTHSVNLLEDSHNGKLCRLKGTAPLQLGNCSVAGWILGNPECESLFSKESWSYIAETPNPENGTCYPGYFADYEELKEQLSSVSSFERFEIFPKESSWPNHTVTKGVTASCSHNGKSSFYKNLLWLTEKNGLYPNLSKSYVNNKEKEVLVLWGVHHPSNIGDQRAIYHTENAYVSVVSSHYSRRFTPEIAKRPKVRDQEGRINYYWTLLEPGDTIIFEANGNLIAPWYAFALSRGFGSGIITSNASMGECDAKCQTPQGAINSSLPFQNVHPVTIGECPKYVRSTKLRMVTGLRNIPSIQSRGLFGAIAGFIEGGWTGMIDGWYGYHHQNEQGSGYAADKKSTQNAIDGITNKVNSVIEKMNTQFTAVGKEFNKLERRMENLNKKVDDGFLDIWTYNAELLVLLENERTLDFHDSNVKNLYEKVKNQLKNNAKEIGNGCFEFYHKCNDECMESVKNGTYDYPKYSEESKLKREKIDGVKLESMGVYQILAIYSTVASSLVLLVSLGAISFWMCSNGSLQCRICI

SEQ ID NO: 1631 - protein, 562 aa, Artificial Sequence
  derived and/or modified protein sequence (wt) from hemagglutinin__InfluenzaA__ABO52236
MAIIYLILLFTAVRGDQICIGYHANNSTEKVDTILERNVTVTHAKDILEKTHNGKLCKLNGIPPLELGDCSIAGWLLGNPECDRLLSVPEWSYIMEKENPRDGLCYPGSFNDYEELKHFLSSVKHFEKVKILPKDRWTQHTTTGGSRACAVSGNPSFFRNMVWLTKKGSNYPVAKGSYNNTSGEQMLIIWGVHHPNDETEQRTLYQNVGTYVSVGTSTLNKRSTPDIATRPKVNGLGGRMEFSWTLLDMWDTINFESTGNLIAPEYGFKISKRGSSGIMKTEGTLGNCETKCQTPLGAINTTLPFHNVHPLTIGECPKYVKSEKLVLATGLRNVPQIESRGLFGAIAGFIEGGWQGMVDGWYGYHHSNDQGSGYAADKESTQKAFDGITNKVNSVIEKMNTQFEAVGKEFSNLERRLENLNKKMEDGFLDVWTYNAELLVLMENERTLDFHDSNVKNLYDKVRMQLRDNAKELGNGCFEFYHKCDDECMNSVKNGTYYYPKYEEESKLNRNEIKGVKLSSMGVYQILAIYATVAGSLSLAIMMAGISFWMCSNGSLQCRICI

SEQ ID NO: 1632 - protein, 562 aa, Artificial Sequence
  derived and/or modified protein sequence (wt) from hemagglutinin__InfluenzaA__ABO52247
MAIIYLILLFTAVRGDQICIGYHANNSTEKVDTILERNVTVTHAKDILEKTHNGKLCKLNGIPPLELGDCSIAGWLLGNPECDRLLRVPEWSYIMEKENPRYSLCYPGSFNDYEELKHLLSSVKHFEKVKILPKDGWTQHKTDGGSKACAVSGKPSFFRNMVWLTKKGPNYPVAKRSYNNTSGEQMLIIWGVHHPNDEAEQRALYQKVGTYVSASTSTLNKRSTPEIAARPEVSGLGSRMEFSWTLLDVWDTISFESTGNLVAPEYGFKISKRGSSGIMKTEGTLGNCETKCQTPLGAINTTLPFHNVHPLTIGECPKYVKSEKLVLATGPRNVPQIESRGLFGAIAGFIEGGWQGMVDGWYGYHHSNDQGSGYAADKESTQKAFDRITNKVNSVIEKMNTQFEAVGKEFSNLEKRLENLNKKMEDGFLDVWTYNAELLVLMENERTLDFHDSNVKNLYDKVRMQLRDNVKELGNGCFEFYHKCDDECMNSVKNGTYDYPKYEEESKLKRNEIKGVKLSSMGVYQILAIYATVAGSLSLAIMIAGISFWMCSNGSLQCRICI

SEQ ID NO: 1633 - protein, 566 aa, Artificial Sequence
  derived and/or modified protein sequence (wt) from hemagglutinin__InfluenzaA__ABO52258
MKAKLLVLLCALSATDADTICIGYHANNSTDTVDTVLEKNVTVTHSVNLLEDSHNGKLCRLKGIAPLQLGKCSIAGWILGNPECESLFSKKSWSYIAETPNSENGTCYPGYFADYEELREQLSSVSSFERFEIFPKESSWPKHNVTRGVTASCSHKGKCSFYRNLLWLTEKNGSYPNLSKSYVNNKEKEVLVLWGVHHPSNIEDQKTIYRKENAYVSVVSSHYNRRFTPEIAKRPKVRDQEGRINYYWTLLEPGDTIIFEANGNLIAPWYAFALSRGFGSGIITSNASMDECDAKCQTPQGAINSSLPFQNVHPVTIGECPKYVRSTKLRMVTGLRNIPSIQSRGLFGAIAGFIEGGWTGMIDGWYGYHHQNEQGSGYAADQKSTQNAINGITNKVNSVIEKMNTQFTAVGKEFNKLEKRMENLNKKVDDGFLDIWTYNAELLVLLENERTLDFHDSNVKNLYEKVKSQLKNNAKEIGNGCFEFYHKCNNECMESVKNGTYDYPKYSEESKLNREKIDGVKLESMGVYQILAIYSTVASSLVLLVSLGAISFWMCSNGSLQCRICI

SEQ ID NO: 1634 - protein, 566 aa, Artificial Sequence
  derived and/or modified protein sequence (wt) from hemagglutinin__InfluenzaA__ABO52280
MKARLLILLCALSATDADTICIGYHANNSTDTVDTVLEKNVTVTHSVNLLEDSHNGKLCRLKGIAPLQLGKCNIAGWILGNPECESLLSNRSWSYIAETPNSENGICYPGDFADYEELREQLSSVSSFERFEIFPKESSWPKHNITRGVTVACSHAKKSSFYKNLLWLTEANGLYPSLSKSYVNDREKEVLVLWGVHHPSNIEDQRTLYRKENAYVSVVSSNYNRRFTPEIAERPKVRGQPGRMNYYWTLLEPGDKIIFEANGNLIAPWYAFALSRGPGSGIITSNASMDECDTKCQTPQGAINSSLPFQNIHPVTIGECPKYVRSTKLRMVTGLRNIPSIQSRGLFGAIAGFIEGGWTGMVDGWYGYHHQNEQGSGYAADQKSTQNAINGITNKVNSVIEKMNTQFTAVGKEFNKLEKRMENLNKKVDDGFLDIWTYNAELLVLLENERTLDFHDSNVKNLYEKVKNQLRNNAKEIGNGCFEFYHKCDNECMESVKNGTYDYPKYSEESKLNRAKIDGVKLESMGVYQILAIYSTVASSLVLLVSLGAISFWMCSNGSLQCRICI

SEQ ID NO: 1635 - protein, 562 aa, Artificial Sequence
  derived and/or modified protein sequence (wt) from hemagglutinin__InfluenzaA__ABO52302
MAIIYLILLFTAVRGDQICIGYHANNSTEKVDTILERNVTVTHAKDILEKTHNGKLCKLNGIPPLELGNCSIAGWLLGNPECDRLLSVPEWSYIMEKENPRDGLCYPGSFNDYEELKHLLSSVKHFEKVKILPKDRWTQHTTTGGSRACAVSGNPSFFRNMVWLTKKGSNYPVAKGSYNNTSGEQMLIIWGVHHPNDETEQRTLYQNVGTYVSVGTSTLNKRSTPDIATRPKVNGLGGRMEFSWTLLDMWDTINFESTGNLIAPEYGFKISKRGSSGIMKTEGTLGNCETKCQTPLGAINTTLPFHNVHPLTIGECPKYVKSEKLVLATGLRNVPQIESRGLFGAIAGFIEGGWQGMVDGWYGYHHSNDQGSGYAADKESTQKAFDGITNKVNSVIEKMNTQFEAVGKEFSNLERRLENLNKKMEDGFLDVWTYNAELLVLMENERTLDFHDSNVKNLYDKVRMQLRDNVKELGNGCFEFYHKCDDECMNSVKNGTYDYPKYEEESKLNRNEIKGVKLSSMGIYQILAIYATVAGSLSLAIMMAGISFWMCSNGSLQCRICI

SEQ ID NO: 1636 - protein, 566 aa, Artificial Sequence
  derived and/or modified protein sequence (wt) from hemagglutinin__InfluenzaA__ABO52313
MKTIIALSYIFCLVFAQNLPGNDNSTATLCLGHHAVPNGTLVKTITNDQIEVTNATELVQSSSTGKICNNPHRILDGINCTLIDALLGDPHCDGFQNEKWDLFVERSKAFSNCYPYDVPDYASLRSLVASSGTLEFINEGFNWTGVTQNGGSNACKRGPDSGFFSRLNWLYKSGSTYPVLNVTMPNNDNFDKLYIWGVHHPSTDQEQTNLYVQASGRVTVSTKRSQQTIIPNVGSRPWVRGLSSRISIYWTIVKPGDILVINSNGNLIAPRGHFKMRTGKSSIMRSDAPIGTCSSECITPNGSIPNDKPFQNVNKITYGACPKYVKQNTLKLATGMRNVPEKQTRGIFGAIAGFIENGWEGMIDGWYGFRHRNSEGTGQAADLKSTQAAIDQINGKLNRVIEKTNEKFHQIEKEFSEVEGRIQDLEKYVEDTKIDLWSYNAELLVALENQHTIDLTDSEMNKLFEKTRRQLRENAEDMGNGCFKIYHKCDNACIGSIRNGTYDHDVYRDEALNNRFQIKGVELKSGYKDWILWISFAISCFLLCVVLLGFIMWACQKGNIRCNICI

SEQ ID NO: 1637 - protein, 566 aa, Artificial Sequence
  derived and/or modified protein sequence (wt) from hemagglutinin__InfluenzaA__ABO52335
MKTIIALSYIFCLVLGQDFPRNDNSTATLCLGHHAVPNGTLVKTITNDQIEVTNATELVQSSSTGKICNNPHRILDGIDCTLIDALLGDPHCDGFQNETWDLFVERSKAFSNCYPYDVPDYASLRSLVASSGTLEFINEGFTWTGVTQNGGSNACKRGPDSGFFSRLNWLYKSGNTYPVLNVTMPNNDNFDKLYIWGVHHPSTDQDQTSLYVQASGRVTVSTKRSQQTVIPNIGPRPWVRGLSSRISIYWTIVKPGDILLINSNGNLIAPRGYFKMRTGKSSIMRSDAPIGTCISECITPNGSIPNDKPFQNVNKITYGACPKYVKQNTLKLATGMRNVPEKQTRGIFGAIAGFIENGWEGMIDGWYGFRHQNSEGTGQAADLKSTQAAIDQINGKLNRVIEKTNEKFHQIEKEFSEVEGRIQDLEKYVEDTKIDLWSYNAELLVALENQHTIDLTDSEMNKLFEKTRRQLRENAEDMGNGCFKIYHRCDNACIGSIRNGTYDHDVYRDEALNNRFQIKGVELKSGYKDWILWISFAISCFLLCVVLLGFIMWACQKGNIRCNICI

SEQ ID NO: 1638 - protein, 566 aa, Artificial Sequence
  derived and/or modified protein sequence (wt) from hemagglutinin__InfluenzaA__ABO52346
MKTIIALSYIFCLVFAQDLPGNDNSTATLCLGHHAVPNGTLVKTITNDQIEVTNATELVQSSSTGKICDNPHRILDGINCTLIDALLGDPHCDGFQNEKWDLFVERSKAFSDCYPYDVPDYASLRSLVASSGTLEFINEGFNWTGVTQNGGSSACKRGPDNGFFSRLNWLYKSGSTYPVQNVTMPNNDNSDKLYIWGVHHPSTDKEQTDLYVQASGKVTVSTKRSQQTVIPNVGSRPWVRGLSSRVSIYWTIVKPGDILVINSNGNLIAPRGYFKMRTGKSSIMRSDAPIGTCSSECITPNGSIPNDKPFQNVNKITYGACPKYVKQNTLKLATGMRNVPEKQTRGIFGAIAGFIENGWEGMIDGWYGFRHQNSEGTGQAADLKSTQAAIDQINGKLNRVIEKTNEKFHQIEKEFSEVEGRIQDLEKYVEDTKIDLWSYNAELLVALENQHTIDLTDSEMNKLFEKTRRQLRENAEDMGNGCFKIYHKCDNACIGSIRNGTYDHDVYRDEALNNRFQIKGVELKSGYKDWILWISFAISCFLLCVVLLGFIMWACQKGNIRCNICI

SEQ ID NO: 1639 - protein, 566 aa, Artificial Sequence
  derived and/or modified protein sequence (wt) from hemagglutinin__InfluenzaA__ABO52357
MKTIIALSYIFCLALGQDLPGNDNSTATLCLGHHAVPNGTLVKTITDDQIEVTNATELVQSSSTGKICNNPHRILDGIDCTLIDALLGDPHCDVFQNETWDLFVERSKAFSNCYPYDVPDYASLRSLVASSGTLEFITEGFTWTGVTQNGGSNACKRGPGSGFFSRLNWLTKSGSTYPVLNVTMPNNDNFDKLYIWGVHHPSTNQEQTSLYVQASGRVTVSTRRSQQTIIPNIGSRPWVRGLSSRISIYWTIVKPGDVLVINSNGNLIAPRGYFKMRTGKSSIMRSDAPIDTCIFECITPNGSIPNDKPFQNVNKITYGACPKYVKQNTLKLATGMRNVPEKQTRGIFGAIAGFIENGWEGMIDGWYGFRHQNSEGTGQAADLKSTQAAIDQINGKLNRVIEKTNEKFHQIEKEFSEVEGRIQDLEKYVEDTKIDLWSYNAELLVALENQHTIDLTDSEMNKLFEKTRRQLRENAEDMGNGCFKIYHKCDNACIESIRNGTYDHDVYRDEALNNRFQIKGVELKSGYKDWILWISFAISCFLLCVVLLGFIMWACQRGNIRCNICI

SEQ ID NO: 1640 - protein, 566 aa, Artificial Sequence
  derived and/or modified protein sequence (wt) from hemagglutinin__InfluenzaA__ABO52368
MKTIIALSYIFCLALGQDLPGNDNSTATLCLGHHAVPNGTLVKTITNDQIEVTNATELVQSSSTGKICNNPHRILDGINCTLIDALLGDPHCDVFQDETWDLFVERSKAFSNCYPYDVPDYASLRSLVASSGTLEFITEGFTWTGVTQNGGSNACKRGPGSGFFSRLNWLTKSGSTYPVLNVTMPNNDNFDKLYIWGVHHPSTNQEQTSLYVQASGRVTVSTRRSQQTIIPNIGSRPWVRGLSSRISIYWTIVKPGDVLVINSNGNLIAPRGYFKMRTGKSSIMRSDAPIDTCISECITPNGSIPNDKPFQNVNKITYGACPKYVKQNTLKLATGMRNVPEKQTRGLFGAIAGFIENGWEGMIDGWYGFRHQNSEGTGQAADLKSTQAAIDQINGKLNRVIEKTNEKFHQIEKEFSEVEGRIQDLEKYVEDTKIDLWSYNAELLVALENQHTIDLTDSEMNKLFEKTRRQLRENAEDMGNGCFKIYHKCDNACIESIRNGTYDHDVYRDEALNNRFQIKGVELKSGYKDWILWISFAISCFLLCVVLLGFIMWACQRGNIRCNICI

SEQ ID NO: 1641 - protein, 566 aa, Artificial Sequence
  derived and/or modified protein sequence (wt) from hemagglutinin__InfluenzaA__ABO52797
MKAKLLVLLCALSATDADTICIGYHANNSTDTVDTVLEKNVTVTHSVNLLEDNHNGKLCKLKGIAPLQLGKCSIAGWILGNPECESLFSKKSWSYIAETPNSENGTCYPGYFADYEELREQLSSVSSFERFEIFPKESSWPNHNVTKGVTASCSHKGKSSFYRNLLWLTEKNGSYPSLSKSYVNNKEKEVLVLWGVHHPSNIKDQKTIYRKENAYVSVVSSHYNRRFTPEIAKRPKVRDQEGRINYYWTLLEPGDTIIFEANGNLIAPWYAFALSRGFGSGIITSNASMDECDAKCQTPQGAINSSLPFQNVHPVTIGECPKYVRSTKLRMVTGLRNIPSIQSRGLFGAIAGFIEGGWTGMIDGWYGYHHQNEQGSGYAADQKSTQSAINGITNKVNSIIEKMNTQFTAVGKEFNKLEKRMENLNKKVDDGFLDIWTYNAELLVLLENERTLDFHDSNVKNLYEKVKSQLKNNAKEIGNGCFEFYHKCNNECMESVKNGTYDYPKYSEESKLNREKIDGVKLESMGVYQILAIYSTVASSLVLLVSLGAISFWMCSNGSLQCRICI

SEQ ID NO: 1642 - protein, 565 aa, Artificial Sequence; identical to SEQ ID NO: 742
  derived and/or modified protein sequence (wt) from hemagglutinin__InfluenzaA__ABP49217

SEQ ID NO: 1643 - protein, 565 aa, Artificial Sequence
  derived and/or modified protein sequence (wt) from hemagglutinin__InfluenzaA__ABP49305
MKAKLMVLLCTFTATYADTICIGYHANNSTDTVDTVLEKNVTVTHSVNLLEDSHNGKLCLLKGIAPLQLGNCSVAGWILGNPECELLISKESWSYIVETPNPENGTCYPGYFADYEELREQLSSVSSFERFEIFPKESSWPNHTVTGVSASCSHNGKSSFYRNLLWLTGKNGLYPNLSKSYANNKEKEVLVLWGVHHPPNIGDQRALYHTENAYVSVVSSHYSRRFTPEIAKRPKVRDQEGRINYYWTLLEPGDTIIFEANGNLIAPWYAFALSRGFGSGIITSNAPMGECDAKCQTPQGAINSSLPFQNVHPVTIGECPKYVRSAKLRMVTGLRNIPSIQSRGLFGAIAGFIEGGWTGMVDGWYGYHHQNEQGSGYAADQKSTQNAINGITNKVNSVIEKMNTQFTAVGKEFNKLERRMENLNKKVDDGFLDIWTYNAELLVLLENERTLDFHDSNVKNLYEKVKSQLKNNAKEIGNGCFEFYHKCNNECMESVKNGTYDYPKYSEESKLNREKIDGVKLESMGVYQILAIYSTVASSLVLLVSLGAISFWMCSNGSLQCRICI

SEQ ID NO: 1644 - protein, 566 aa, Artificial Sequence
  derived and/or modified protein sequence (wt) from hemagglutinin__InfluenzaA__ABP49316
MKAKLLVLLCALSATDADTICIGYHANNSTDTVDTVLEKNVTVTHSVNLLEDSHNGKLCRLKGIAPLQLGKCNIAGWILGNPECESLFSKKSWSYIAETPNSENGTCYPGYFADYEELREQLSSVSSFERFEIFPKERSWPKHNITRGVTAACSHKGKSSFYRNLLWLTEKNGSYPNLKKSYVNNKEKEVLVLWGVHHPSNIEDQKTLYRKENAYVSVVSSNYNKRFTPEIAERPKVRGQAGRINYYWTLLEPGDTIIFEANGNLIAPWHAFALSRGFGSGIITSNASMDECDTKCQTPQGAINSSLPFQNIHPVTIGECPKYVRSTKLRMVTGLRNIPSIQSRGLFGAIAGFIEGGWTGMIDGWYGYHHQNEQGSGYAADQKSTQNAINGITNKVNSVIEKMNTQFTAVGKEFNKLEKRMENLNKKVDDGFLDIWTYNAELLVLLENERTLDFHDSNVKNLYEKVKSQLKNNAKEIGNGCFEFYHKCNNECMESVKNGTYDYPKYSEESKLNREKIDGVKLESMGVYQILAIYSTVASSLVLLVSLGAISFWMCSNGSLQCRICI

SEQ ID NO: 1645 - protein, 566 aa, Artificial Sequence
  derived and/or modified protein sequence (wt) from hemagglutinin__InfluenzaA__ABP49327
MKARLLVLLCALAATDADTICIGYHANNSTDTVDTVLEKNVTVTHSVNLLEDSHNGKLCRLKGIAPLQLRKCNIAGWILGNPECESLLSERSWSYIVETPNSENGTCYPGDFTNYEELREQLSSVSSFERFEIFPKESSWPKHNTTRGVTAACSHAGKSSFYRNLLWLTEKDGSYPNLNNSYVNKKGKEVLVLWGVHHPSNIKDQQTLYQKENAYVSVVSSNYNRRFTPEIAERPKVRGQAGRMNYYWTLLKPGDTIMFEANGNLIAPWYAFALSRGFGSGIITSNASMHECDTKCQTPQGAINSSLPFQNIHPVTIGECPKYVRSTKLRMVTGLRNIPSIQSRGLFGAIAGFIEGGWTGMIDGWYGYHHQNEQGSGYAADQKSTQNAINGITNKVNSVIEKMNTQFTAVGKEFNNLEKRMENLNKKVDDGFLDIWTYNAELLILLENERTLDFHDSNVKNLYEKVKSQLRNNAKEIGNGCFEFYHKCNNECMESVKNGTYDYPKYSEESKLNREKIDGVKLESMGVYQILAIYSTVASSLVLLVSLGAISFWMCSNGSLQCRICI

SEQ ID NO: 1646 - protein, 566 aa, Artificial Sequence
  derived and/or modified protein sequence (wt) from hemagglutinin__InfluenzaA__ABP49338
MKAKLLVLLCALSATDADTICIGYHANNSTDTVDTVLEKNVTVTHSVNLLEDSHNGKLCRLKGIAPLQLGKCSIAGWILGNPECESLFSKKSWSYIAETPNSENGTCYPGYFADYEELREQLSSVSSFERFEIFPKERSWPKHNVTRGVTASCSHKGKSSFYRNLLWLTEKNGSYPNLSKSYVNNKEKEVLVLWGVHHPSNIEDQKTIYRKENAYVSVVSSNYNRRFTPEIAKRPKVRGQEGRINYYWTLLEPGDTIIFEANGNLIAPWYAFALSRGFGSGIITSNASMDECDTKCQTPQGAINSSLPFQNVHPVTIGECPKYVRSTKLRMVTGLRNIPSIQSRGLFGAIAGFIEGGWTGMIDGWYGYHHQNEQGSGYAADQKSTQNAINGITNKVNSVIEKMNTQFTAVGKEFNKLEKRMENLNKKVDDGFLDIWTYNAELLVLLENERTLDFHDSNVKNLYEKVKSQLKNNAKEIGNGCFEFYHKCNNECMESVKNGTYDYPKYSEESKLNREKIDGVKLESMGVYQILAIYSTVASSLVLLVSLGAISFWMCSNGSLQCRICI

SEQ ID NO: 1647 - protein, 566 aa, Artificial Sequence
  derived and/or modified protein sequence (wt) from hemagglutinin__InfluenzaA__ABP49349
MKAKLLVLLCALSATDADTICIGYHANNSTDTVDTVLEKNVTVTHSVNLLEDNHNGKLCKLKGIAPLQLGKCSIAGWILGNPECESLFSKKSWSYIAETPNSENGTCYPGYFADYEELREQLSSVSSFERFEIFPKESSWPNHNVTKGVTASCSHKGKSSFYRNLLWLTEKNGSYPNLSKSYVNNKEKEVLVLWGIHHPSNIEDQKTIYRKENAYVSVVSSHYNRRFTPEIAKRPKVRDQEGRINYYWTLLEPGDTIIFEANGNLIAPWYAFALSRGFGSGIITSNASMDECDAKCQTPLGAINSSLPFQNVHPVTIGECPKYVRSTKLRMVTGLRNIPSIQSRGLFGAIAGFIEGGWTGMIDGWYGYHHQNEQGSGYAADQKSTQSAINGITNKVNSIIEKMNTQFTAVGKEFNKLEKRMENLNKKVDDGFLDIWTYNAELLVLLENERTLDFHDSNVKNLYEKVKSQLKNNAKEIGNGCFEFYHKCNNECMESVKNGTYDYPKYSEESKLNREKIDGVKLESMGVYQILAIYSTVASSLVLLVSLGAISFWMCSNGSLQCRICI

SEQ ID NO: 1648 - protein, 566 aa, Artificial Sequence
  derived and/or modified protein sequence (wt) from hemagglutinin__InfluenzaA__ABP49360
MKAKLLILLCAFTATDADTICIGYHANNSTDTVDTVLEKNVTVTHSVNLLEDSHNGKLCRLKGIAPLQLGNCSIAGWILGNPECESLFSKKSWSYIAETPNSENGTCYPGYFADYEELREQLSSVSSFERFEIFPKESSWPNHTVTKGVTASCSHNGKSSFYRNLLWLTKKNGSYPNLSKSYVNNKEKEVLVLWGVHHPSNIGDQRAIYHTENAYVSVVSSHYNRRFTPEIAKRPKVRDQEGRINYYWTLLEPGDTIIFEANGNLIAPWYAFALSRGFGSGIITSNASMDECDAKCQTPQGAINSSLPFQNVHPVTIGECPKYVRSTKLRMVTGLRNIPSIQSRGLFGAIAGFIEGGWTGMIDGWYGYHHQNEQGSGYAADQKSTQNAINGITNKVNSVIEKMNTQFTAVGKEFNKLERRMENLNKKVDDGFLDIWTYNAELLVLLENERTLDFHDSNVKNLYEKVKSQLKNNAKEIGNGCFEFYHKCNNECMESVKNGTYDYPKYSEESKLNREKIDGVKLESMGVYQILAIYSTVASSLVLLVSLGAISFWMCSNGSLQCRICI

SEQ ID NO: 1649 - protein, 566 aa, Artificial Sequence; identical to SEQ ID NO: 650
  derived and/or modified protein sequence (wt) from hemagglutinin__InfluenzaA__ABP49371

SEQ ID NO: 1650 - protein, 566 aa, Artificial Sequence; identical to SEQ ID NO: 1387
  derived and/or modified protein sequence (wt) from hemagglutinin__InfluenzaA__ABP49382

SEQ ID NO: 1651 - protein, 565 aa, Artificial Sequence
  derived and/or modified protein sequence (wt) from hemagglutinin__InfluenzaA__ABP49393
MKVKLLVLLCTFTATYADTICIGYHANNSTDTVDTVLEKNVTVTHSVNLLEDSHNGKLCLLKGIAPLQLGNCSVAGWILGNPECELLISKESWSYIVETPNPENGTCYPGYFADYEELREQLSSVSSFERFEIFPKESSWPNHTVTGVSASCSHNGKSSFYRNLLWLTGKNGLYPNLSKSYANNKEKEVLVLWGIHHPPNIGDQRALYHTENAYVSVVSSHYSRRFTPEIAKRPKVRDQEGRINYYWTLLEPGDTIIFEANGNLIAPRFAFALSRGFGSGIITSNAPMDECDAKCQTPQGAINSSLPFQNVHPVTIGECPKYVRSAKLRMVTGLRNIPSIQSRGLFGAIAGFIEGGWTGMVDGWYGYHHQNEQGSGYAADQKSTQNAINGITNKVNSVIEKMNTQFTAVGKEFNKLERRMENLNKKVDDGFLDIWTYNAELLVLLENERTLDFHDSNVKNLYEKVKSQLKNNAKEIGNGCFEFYHKCNDECMESVKNGTYDYPKYSEESKLNRERIDGVKLESMGVYQILAIYSTVASSLVLLVSLGAISFWMCSNGSLQCRICI

SEQ ID NO: 1652 - protein, 566 aa, Artificial Sequence
  derived and/or modified protein sequence (wt) from hemagglutinin__InfluenzaA__ABP49404
MKTIIALSYTLCLVFAQKLPGNDNSTATLCLGHHAVPNGTIVKTITNDQIEVTNATELVQSSSTGGICDSPHQILDGENCTLIGALLGDPQCDGFQNKKWDLFVERSKAYSNCYPYDVPDYASLRSLVASSGTLEFNNESFNWTGVTQNGTSSACKRRSNNSFFSRLNWLTHLKFKYPALNVTMPNNEKFDKLYIWGVHHPGTYNDQISLYAQASGRITVSTKRSQQTVIPNIGSRPRVRDIPSRISIYWTIVKPGDILLINSTGNLIAPRGYFKIRSGKSSIMRSDAPIGKCNSECITPNGSIPNDKPFQNVNRITYGACPRYVKQNTLKLATGMRNVPEKQTRGIFGAIAGFIENGWEGMVDGWYGFRHQNSEGIGQAADLKSTQAAINQINGKLNRLIGKTNEKFHQIEKEFSEVEGRIQDLEKYVEDTKIDLWSYNAELLVALENQHTIDLTDSEMNKLFERTKKQLRENAEDMGNGCFKIYHKCDNACIGSIRNGTYDHDVYRDEALNNRFQIKGVELKSGYKDWILWISFAISCFLLCVALLGFIMWACQKGNIRCNICI

SEQ ID NO: 1653 - protein, 566 aa, Artificial Sequence; identical to SEQ ID NO: 650
  derived and/or modified protein sequence (wt) from hemagglutinin__InfluenzaA__ABP49415

SEQ ID NO: 1654 - protein, 566 aa, Artificial Sequence; identical to SEQ ID NO: 650
  derived and/or modified protein sequence (wt) from hemagglutinin__InfluenzaA__ABP49426

SEQ ID NO: 1655 - protein, 562 aa, Artificial Sequence
  derived and/or modified protein sequence (wt) from hemagglutinin__InfluenzaA__ABP49437
MAIIYLILLFTAVRGDQICIGYHANNSTEKVDTILERNVTVTHAKDILEKTHNGKLCKLNGIPPLELGDCSIAGWLLGNPECDRLLSVPEWSYIMEKENPRDGLCYPGSFNDYEELKHLLSSVKHFEKVKILPKDRWTQHTTTGGSRACAVSGNPSFFRNMVWLTKKGSNYPVAKGSYNNTSGEQMLIIWGVHHPNDETEQRTLYQNVGTYVSVGTSTLNKRSTPEIATRPKVNGLGGRMEFSWTLLDMWDTINFESTGNLIAPEYGFKISKRGSSGIMKTEGTLENCETKCQTPLGAINTTLPFHNVHPLTIGECPKYVKSEKLVLATGLRNVPQIESRGLFGAIAGFIEGGWQGMVDGWYGYHHSNDQGSGYAADKESTQKAFDGITNKVNSVIEKMNTQFEAVGKEFSNLERRLENLNKKMEDGFLDVWTYNAELLVLMENERTLDFHDSNVKNLYDKVRMQLRDNVKELGNGCFEFYHKCDDECMNSVKNGTYDYPKYEEESKLNRNEIKGVKLSSMGVYQILAIYATVAGSLSLAIMMAGISFWMCSNGSLQCRICI

SEQ ID NO: 1656 - protein, 566 aa, Artificial Sequence
  derived and/or modified protein sequence (wt) from hemagglutinin__InfluenzaA__ABP49448
MKAKLLVLLCALSATDADTICIGYHANNSTDTVDTVLEKNVTVTHSVNLLEDSHNGKLCRLKGIAPLQLGKCSIAGWILGNPECESLFSKKSWSYIAETPNSENGTCYPGYFADYEELREQLSSVSSFERFEIFPKERSWPKHNVTRGVTASCSHKGKSSFYRNLLWLTEKNGSYPNLSKSYVNNKEKEVLVLWGVHHPSNIEDQKTIYRKENAYVSVVSSNYNRRFTPEISERPKVRGQEGRINYYWTLLEPGDTIIFEANGNLIAPWYAFALSRGFGSGIITSNASMDECDTKCQTPQGAINSSLPFQNVHPVTIGECPKYVRSTKLRMVTGLRNIPSIQSRGLFGAIAGFIEGGWTGMIDGWYGYHHQNEQGSGYAADQKSTQNAINGITNKVNSVIEKMNTQFTAVGKEFNKLEKRMENLNKKVDDGFLDIWTYNAELLVLLENERTLDFHDSNVKNLYEKVKSQLKNNAKEIGNGCFEFYHKCNNECMESVKNGTYDYPKYSEESKLNREKIDGVKLESMGVYQILAIYSTVASSLVLLVSLGAISFWMCSNGSLQCRICI

SEQ ID NO: 1657 - protein, 562 aa, Artificial Sequence
  derived and/or modified protein sequence (wt) from hemagglutinin__InfluenzaA__ABP49459
MAIIYLILLFTAVRGDQICIGYHANNSTEKVDTILERNVTVTHAKDILEKTHNGKLCKLNGIPPLELGDCSIAGWLLGNPECDRLLSVPEWSYIMEKENPRDGLCYPGSFNDYEELKHLLSSVKHFEKVKILPKDRWTQHTTTGGSRACAVSGNPSFFRNMVWLTKKGSNYPVAKGSYNNTSGEQMLIIWGVHHPNDETEQRTLYQNVGTYVSVGTPTLNKRSTPDIATRPKVNGQGGRMEFSWTLLDMWDTINFESTGNLIAPEYGFKISKRGSSGIMKTEGTLGNCETKCQTPLGAINTTLPFHNVHPLTIGECPKYVKSEKLVLATGLRNVPQIESRGLFGAIAGFIEGGWQGMVDGWYGYHHSNDQGSGYAADKESTQKAFDGITNKVNSVIEKMNTQFEAVGKEFSNLERRLENLNKKMEDGFLDVWTYNAELLVLMENERTLDFHDSNVKNLYDKVRMQLRDNVKELGNGCFEFYHKCDDECMNSVKNGTYDYPKYEEESKLNRNEIKGVKLSSMGVYQILAIYATVAGSLSLAIMMAGISFWMCSNGSLQCRICI

SEQ ID NO: 1658 - protein, 562 aa, Artificial Sequence
  derived and/or modified protein sequence (wt) from hemagglutinin__InfluenzaA__ABP49470
MAIIYLILLFTAVRGDQICIGYHANNSTEKVDTILERNVTVTHAKDILEKTHNGKLCKLNGIPPLELGDCSIAGWLLGNPECDRLLSVPEWSYIMEKENPRDGLCYPGSFNDYEELKHLLSSVKHFEKVKILPKDRWTQHTTTGGSRACAVSGNPSFFRNMVWLTKKGSNYPVAKGSYNNTSGEQMLIIWGVHHPNDETEQRTLYQNVGTYVSVSTSTLNKRSTPDIATRPKVNGLGGRMEFSWTLLDMWDTINFESTGNLIAPEYGFKISKRGSSGIMKTEGTLGNCETKCQTPLGAINTTLPFHNVHPLTIGECPKYVKSEKLVLATGLRNVPQIESRGLFGAIAGFIEGGWQGMVDGWYGYHHSNDQGSGYAADKESTQKAFDGITNKVNSVIEKMNTQFEAVGKEFSNLERRLENLNKKMEDGFLDVWTYNAELLVLMENERTLDFHDSNVKNLYDKVRMQLRDNVKELGNGCFEFYHKCDDECMNSVKNGTYDYPKYEEESKLNRNEIKGVKLSSMGVYQILAIYATVAGSLSLAIMMAGISFWMCSNGSLQCRICI

SEQ ID NO: 1659 - protein, 566 aa, Artificial Sequence
  derived and/or modified protein sequence (wt) from hemagglutinin__InfluenzaA__ABP49492
MKTIIALSYIFCLVFAQGLPGNDNSTATLCLGHHAVPNGTLVKTITNDQIEVTNATELVQSSSTGKICDNPHRILDGINCTLIDALLGDPHCDGFQNEKWDLFVERSKAFSNCYPYDVPDYASLRSLVASSGTLEFINEGFNWTGVTQNGGSSSCKRGPDNGFFSRLNWLYKSGSTYPVQNVTMPNNDNSDKLYIWGVHHPSTDKEQTDLYVQASGKVTVSTKRSQQTVIPNVGSRPWVRGLSSRVSIYWTIVKPGDILVINSNGNLIAPRGYFKMRTGKSSIMRSDAPIGTCSSECITPNGSIPNDKPFQNVNKITYGACPKYVKQNTLKLATGMRNVPEKQTRGIFGAIAGFIENGWEGMIDGWYGFRHQNSEGTGQAADLKSTQAAIDQINGKLNRVIEKTNEKFHQIEKEFSEVEGRIQDLEKYVEDTKIDLWSYNAELLVALENQHTIDLTDSEMNKLFEKTRRQLRENAEDMGNGCFKIYHKCDNACIGSIRNGTYDHDVYRDEALNNRFQIKGVELKSGYKDWILWISFAISCFLLCVVLLGFIMWACQKGNIRCNICI

SEQ ID NO: 1660 - protein, 566 aa, Artificial Sequence; identical to SEQ ID NO: 1556
  derived and/or modified protein sequence (wt) from hemagglutinin__InfluenzaA__ABP49503

SEQ ID NO: 1661 - protein, 566 aa, Artificial Sequence
  derived and/or modified protein sequence (wt) from hemagglutinin__InfluenzaA__ABP49514
MKTIIALSYIFYLALGQDLPGNDNSTATLCLGHHAVPNGTLVKTITNDQIEVTNATELVQSSSTGKICNNPHRILDGIDCTLIDALLGDPHCDVFQNETWDLFVERSKAFSNCYPYDVPDYASLRSLVASSGTLEFITEGFTWTGVTQNGGSNACKRGPGSGFFSRLNWLTKSGSTYPVLNVTMPNNDNFDKLYIWGVHHPSTNQEQTSLYVQASGRVTVSTRRSQQTIIPNIGSRPWVRGLSSRISIYWTIVKPGDVLVINSNGNLIAPRGYFKMRTGKSSIMRSDAPIDTCISECITPNGSIPNDKPFQNVNKITYGACPKYVKQNTLKLATGMRNVPEKQTRGLFGAIAGFIENGWEGMIDGWYGFRHQNSEGTGQAADLKSTQAAIDQINGKLNRVIEKTNEKFHQIEKEFSEVEGRIQDLEKYVEDTKIDLWSYNAELLVALENQHTIDLTDSEMNKLFEKTRRQLRENAEDMGNGCFKIYHKCDNACIESIRNGTYDHDVYRDEALNNRFQIKGVELKSGYKDWILWISFAISCFLLCVVLLGFIMWACQRGNIRCNICI

SEQ ID NO: 1662 - protein, 566 aa, Artificial Sequence
  derived and/or modified protein sequence (wt) from hemagglutinin__InfluenzaA__ABQ01311
MKARLLILLCALSATDADTICIGYHANNSTDTVDTVLEKNVTVTHSVNLLEDSHNGKLCRLKGIAPLQLGKCNIAGWILGNPECESLLSNRSWSYIAETPNSENGTCYPGDFADYEELREQLSSVSSFERFEIFPKERSWPKHNITRGVTAACSHAKKSSFYKNLLWLTEANGSYPNLSKSYVNNKEKEVLVLWGVHHPSKIEDQRTLYRKENAYVSVVSSNYNRRFTPEIAERPKVRGQAGRMNYYWTLLEPGDKIIFEANGNLIAPWYAFALSRGLGSGIITSNASMDECDTKCQTPQGAINSSLPFQNIHPVTIGECPKYVRSTKLRMVTGLRNIPSIQSRGLFGAIAGFIEGGWTGMVDGWYGYHHQNEQGSGYAADQKSTQNAINGITNKVNSVIEKMNTQFTAVGKEFNKLEKRMENLNKKVDDGFLDIWTYNAELLVLLENERTLDFHDSNVKNLYEKVKNQLRNNAKEIGNGCFEFYHKCDNECMESVKNGTYDYPKYSEESKLNREKIDGVKLESMGVYQILAIYSTVASSLVLLVSLGAISFWMCSNGSLQCRICI

SEQ ID NO: 1663 - protein, 566 aa, Artificial Sequence
  derived and/or modified protein sequence (wt) from hemagglutinin__InfluenzaA__ABQ01322
MKAKLLVLLCALSATDADTICIGYHANNSTDTVDTVLEKNVTVTHSVNLLEDSHNGKLCRLKGIAPLHLGKCSIAGWILGNPECESLFSKKSWSYIAETPNSENGTCYPGYFADYEELREQLSSVSSFERFEIFPKERSWPKHNVTRGVTAACSHKGKSSFYRNLLWLTEKNGSYPNLSKSYVNNKEKEVLVLWGVHHPSNIEDQKTIYRKENAYVSVVSSNYNRRFTPEIAKRPKVRGQEGRINYYWTLLEPGDTIIFEANGNLIAPWYAFALSRGFGSGIITSNASMDECDAKCQTPQGAINSSLPFQNVHPVTIGECPKYVRSTKLRMVTGLRNIPSIQSRGLFGAIAGFIEGGWTGMIDGWYGYHHQNEQGSGYAADQKSTQNAINGITNKVNSVIEKMNTQFTAVGKEFNKLEKRMENLNKKVDDGFLDIWTYNAELLVLLENERTLDFHDSNVKNLYEKVKSQLKNNAKEIGNGCFEFYHKCNNECMESVKNGTYDYPKYSEESKLNREKIDGVKLESMGVYQILAIYSTVASSLVLLVSLGAISFWMCSNGSLQCRICI

SEQ ID NO: 1664 - protein, 566 aa, Artificial Sequence; identical to SEQ ID NO: 650
  derived and/or modified protein sequence (wt) from hemagglutinin__InfluenzaA__ABQ01333

SEQ ID NO: 1665 - protein, 566 aa, Artificial Sequence
  derived and/or modified protein sequence (wt) from hemagglutinin__InfluenzaA__ABQ01344
MKTIIALSYILCLVFAQKLPGNDNSTATLCLGHHAVPNGTLVKTITNDQIEVTNATELVQSSSTGGICDSPHQILDGENCTLIDALLGDPHCDGFQNKEWDLFVERSKAYSNCYPYDVPDYASLRSLVASSGTLEFNNESFNWTGVAQNGTSSACKRRSNKSFFSRLNWLHQLKYKYPALNVTMPNNEKFDKLYIWGVHHPSTDSDQISLYAQAPGRVTVSTKRSQQTVIPNIGSRPWVRGVSSRISIYWTIVKPGDILLINCTGNLIAPRGYFKIRSGKSSIMRSDASIGKCNSECITPNGSIPNDKPFQNVNRITYGACPRYVKQNTLKLATGMRNVPEKQTRGIFGAIAGFIENGWEGMVDGWYGFRHQNSEGTGQAADLKSTQAAINQINGKLNRLIGKTNEKFHQIEKEFSEVEGRIQDLEKYVEDTKIDLWSYNAELLVALENQHTIDLTDSEMNKLFERTKKQLRENAEDMGNGCFKIYHKCDNACIGSIRNGTYDHDVYRDEALNNRFQIKGVELKSGYKDWILWISFAISCFLLCVVLLGFIMWACQKGNIRCNICI

SEQ ID NO: 1666 - protein, 562 aa, Artificial Sequence
  derived and/or modified protein sequence (wt) from hemagglutinin__InfluenzaA__ABQ01355
MAIIYLILLFTAVRGDQICIGYHANNSTEKVDTILERNVTVTHAKDILEKTHNGKLCKLNGIPPLELGDCSIAGWLLGNPECDRLLRVPEWSYIMEKENPRDGLCYPGSFNDYEELKHLLSSVKHFEKVRILPKDRWTQHTTTGGSRACAVSGNPSFFRNMIWLTKKGSNYPVAKGSYNNTSGEQMLIIWGVHHPIDETEQRTLYQNVETYVSVVTSTLNKRSTPKIATRPKVNGLGGRMEFSWTLLDMWDTINFESTGNLIAPEYGFKISKRGSSGIMKTEGTLENCETKCQTPLGAINTTLPFHNVHPLTIGECPKYVKSEKLVLATGLRNVPQIESRGLFGAIAGFIEGGWQGMVDGWYGYHHSNDQGSGYAADKESTQRAFDGITNKVNSVIEKMNTQFEAVGKEFSNLERRLENLNKKMEDGFLDVWTYNAELLVLMENERTLDFHDSNVKNLYDKVRMQLRDNVKELGNGCFEFYHKCDDECMNSVKNGTYDYPKYEEESKLNRNEIKGVKLSSMGVYQILAIYATVAGSLSLAIMMAGISFWMCSNGSLQCRICI

SEQ ID NO: 1667 - protein, 566 aa, Artificial Sequence
  derived and/or modified protein sequence (wt) from hemagglutinin__InfluenzaA__ABQ01366
MKTIIALSYIFCLVFAQDLPGNDNSTATLCLGHHAVPNGTLVKTITNDQIEVTNATELVQSSSTGKICDNPHRILDGINCTLIDALLGDPHCDGFQNEKWDLFVERSKAFSNCYPYDVPDYASLRSLVASSGTLEFINEGFNWTGVTQNGGSSACKRGPDNGFFSRLNWLYKSGSTYPVQNVTMTNNDNSDKLYIWGVHHPSTDKEQTDLYVQASGKVTVSTKRSQQTIIPNVGSRPWVRGLSSRVSIYWTIVKPGDILVINSNGNLIAPRGYFKMRTGKSSIMRSDAPIGTCSSECITPNGSIPNDKPFQNVNKITYGACPKYVKQNTLKLATGMRNVPEKQTRGIFGAIAGFIENGWEGMIDGWYGFRHQNSEGTGQAADLKSTQAAIDQINGKLNRVIEKTNEKFHQIEKEFSEVEGRIQDLEKYVEDTKIDLWSYNAELLVALENQHTIDLTDSEMNKLFEKTRRQLRENAEDMGNGCFKIYHKCDNACIGSIRNGTYDHDVYRDEALNNRFQIKGVELKSGYKDWILWISFAISCFLLCVVLLGFIMWACQKGNIRCNICI

SEQ ID NO: 1668 - protein, 566 aa, Artificial Sequence; identical to SEQ ID NO: 1433
  derived and/or modified protein sequence (wt) from hemagglutinin__InfluenzaA__ABQ44383

SEQ ID NO: 1669 - protein, 566 aa, Artificial Sequence; identical to SEQ ID NO: 633
  derived and/or modified protein sequence (wt) from hemagglutinin__InfluenzaA__ABQ44405

SEQ ID NO: 1670 - protein, 566 aa, Artificial Sequence
  derived and/or modified protein sequence (wt) from hemagglutinin__InfluenzaA__ABQ44416
MKAKLLVLLCAFTATDADTICIGYHANNSTDTVDTVLEKNVTVTHSVNLLEDSHNGKLCRLKGIAPLQLGNCSIAGWILGNPECESLFSKKSWSYIAETPNSENGTCYPGYFADYEELREQLSSVSSFERFEIFPKESSWPNHTVTKGVTASCSHKGKSSFYRNLLWLTEKNGSYPNLSKSYVNNKEKEVLVLWGVHHPSNIGDQRAIYHTENAYVSVVSSHYNRRFTPEIAKRPKVRDQEGRINYYWTLLEPEDTIIFEANGNLIAPWYAFALSRGFGSGIITSNASMDECDAKCQTPQGAINSSLPFQNVHPVTIGECPKYVRSTKLRMVTGLRNIPSIQSRGLFGAIAGFIEGGWTGMIDGWYGYHHQNEQGSGYAADQKSTQNAINGITNKVNSVIEKMNTQFTAVGKEFNKLERRMENLNKKVDDGFLDIWTYNAELLVLLENERTLDFHDSNVKNLYEKVKSQLKNNAKEIGNGCFEFYHKCNNECMESVKNGTYDYPKYSEESKLNREKIDGVKLESMGVYQILAIYSTVASSLVLLVSLGAISFWMCSNGSLQCRICI

SEQ ID NO: 1671 - protein, 566 aa, Artificial Sequence; identical to SEQ ID NO: 256
  derived and/or modified protein sequence (wt) from hemagglutinin__InfluenzaA__ABQ44427

SEQ ID NO: 1672 - protein, 562 aa, Artificial Sequence
  derived and/or modified protein sequence (wt) from hemagglutinin__InfluenzaA__ABQ44438
MAIIYFILLFTAVRGDQICIGYHANNSTEKVDTILERNVTVTHAKDILEKTHNGKLCKLNGIPPLELGDCSITGWLLGNPECDRLLRVPEWSYIMEKENPRYSLCYPGSFNDYEELKHLLSSVKHFEKVRILPKDGWTQHTTSGGSKACAVSGKSSFFRNMVWLTKKGPNYPVAKRSYNNTSGEQMLIIWGVHHPNDEAEQSALYQKVGTYVSASTSTLNKRSTPEIAARPEVNGLGSRMEFSWTLLDVWDTINFESTGNLVAPEYGFKISKRGSSGIMKTEGTLGNCETKCQTPLGAINTTLPFHNVHPLTIGECPKYVKSEKLVLATGLRNVPQIESRGLFGAIAGFIEGGWQGMVDGWYGYHHSNDQGSGYAADKESTQKAFDRITNKVNSVIEKMNTQFEAVGKEFSNLEKRLENLNKKMEDGFLDVWTYNAELLVLMENERTLDFHDSNVKNLYNKVRMQLRDNVKELGNGCFEFYHKCDDECMSSVKNGTYDYPKYEEESKLKRNEIKGVKLSSMGVYQILAIYATVAGSLSLAIMIAGISLWMCSNGSLQCRICI

SEQ ID NO: 1673 - protein, 562 aa, Artificial Sequence
  derived and/or modified protein sequence (wt) from hemagglutinin__InfluenzaA__ABQ44460
MAIIYLILLFTAVRGDQICIGYHANNSTEKVDTILERNVTVTHAKDILEKTHNGKLCKLNGIPPLELGDCSIAGWLLGNPECDRLLSVPEWSYIMEKENPRDGLCYPGSFNDYEELKHLLSSVKHFEKVKILPKDRWTQHTTTGGSRACAVSGNPSFFRNMIWLTKKGSNYPVAKGSYNNTSGEQMLIIWGVHHPNDETEQRTLYQNVGTYVSVGTSTLNKRSTPDIATRPKVNGLGSRMEFSWTLLDMWDTINFESTGNLIAPEYGFKISKRGSSGIMKTEGTLGNCETKCQTPLGAINTTLPFHNVHPLTIGECPKYVKSEKLVLATGLRNVPQIESRGLFGAIAGFIEGGWQGMVDGWYGYHHSNDQGSGYAADKESTQKAFDGITNKVNSVIEKMNTQFEAVGKEFSNLERRLENLNKKMEDGFLDVWTYNAELLVLMENERTLDFHDSNVKNLYDKVRMQLRDNVKELGNGCFEFYHKCDDECMNSVKNGTYDYPKYEEESKLNRNEIKGVKLSSMGVYQILAIYATVAGSLSLAIMMAGISFWMCSNGSLQCRICI

SEQ ID NO: 1674 - protein, 566 aa, Artificial Sequence
  derived and/or modified protein sequence (wt) from hemagglutinin__InfluenzaA__ABQ44471
MKARLLILLCALSATDADTICIGYHANNSTDTVDTVLEKNVTVTHSVNLLEDSHNGKLCRLKGIAPLQLGKCNIAGWILGNPECESLLSNRSWSYIAETPNSENGTCYPGDFADYEELREQLSSVSSFERFEIFPKERSWPKHNITRGVTAACSHAKKSSFYKNLLWLTEANGSYPNLSKSYVNNKEKEVLVLWGVHHPSNIEDQRTLYRKENAYVSVVSSNYNRRFTPEIAERPKVRGQAGRMNYYWTLLEPGDKIIFEANGNLIAPWYAFALSRGLGSGIITSNASMDECDTKCQTPQGAINNSLPFQNIHPVTIGECPKYVRSTKLRMVTGLRNIPSIQSRGLFGAIAGFIEGGWTGMVDGWYGYHHQNEQGSGYAADQKSTQNAINGITNKVNSVIEKMNTQFTAVGKEFNKLEKRMENLNKKVDDGFLDIWTYNAELLVLLENERTLDFHDSNVKNLYEKVKNQLRNNAKEIGNGCFEFYHKCDNECMESVKNGTYDYPKYSEESKLNREKIDGVKLESMGVYQILAIYSTVASSLVLLVSLGAISFWMCSNGSLQCRICI

SEQ ID NO: 1675 - protein, 566 aa, Artificial Sequence
  derived and/or modified protein sequence (wt) from hemagglutinin__InfluenzaA__ABR15797
MKTIIALSYIFCLALGQDLPGNDNSTATLCLGHHAVPNGTLVKTITNDQIEVTNATELVQSSSTGKICNNPHRILDGIDCTLIDALLGDPHCDVFQNETWDLFVERSKAFSNCYPYDVPDYASLRSLVASSGTLEFITEGFTWTGVTQNGGSNACKRGPGSGFFSRLNWLTKSGSTYPVLNVTMPNNDNFDKLYIWGVHHPSTNQEQTSLYVQASGRVTVSTRRSQQTIIPNIGSRPWVRGLSSRISIYWTIVKPGDVLVINSNGNLIAPRGYFKMRTGKSSIMRSDAPIDTCISECITPNGSIPNDKPFQNVNKITYGACPKYVKQNTLKLATGMRNVPEKQTRGLFGAIAGFIENGWEGMIDGWYGFRHQNSEGTGQAADLKSTQAAIDQINGKLNRVIEKTNEKFHQIEKEFSEVEGRIQDLEKYVEDTKIDLWSYNAELLVALENQHTIDLTDSEMNKLFEKTRRQLRENAEDMGNGCFKIYHKCDNACIESIRNGTYDHDVYRDEALNNRFQIKGVELKSGYKDWILWISFAISCFLLCVVLLGFIMWACQRGNIRCNICI

SEQ ID NO: 1676 - protein, 566 aa, Artificial Sequence
  derived and/or modified protein sequence (wt) from hemagglutinin__InfluenzaA__ABR15808
MKARLLILLCALSATDADTICIGYHANNSTDTVDTVLEKNVTVTHSVNLLEDSHNGKLCRLKGIAPLQLGKCNIAGWILGNPECESLLSNRSWSYIAETPNSENGTCYPGDFADYEELREQLSSVSSFERFEIFPKERSWPKHNITRGVTAACSHAKKSSFYKNLLWLTEANGSYPNLSKSYVNNKEKEVLVLWGVHHPSNIEDQRTLYRKENAYVSVVSSNYNRRFTPEIAERPKVRGQAGRMNYYWTLLEPGDKIIFEANGNLIAPWYAFALSRGLGSGIITSNASMDECDTKCQTPQGAINSSLPFQNIHPVTIGECPKYVRSTKLRMVTGLRNIPSIQSRGLFGAIAGFIEGGWTGMVDGWYGYHHQNEQGSGYAADQKSTQNAINGITNKVNSVIEKMNTQFTAVGKEFNKLEKRMENLNKKVDDGFLDIWTYNAELLVLLENERTLDFHDSNVKNLYEKVKNQLRNNAKEIGNGCFEFYHKCDNECMESVKNGTYDYPKYSEESKLNREKIDGVKLESMGVYQILAIYSTVASSLVLLVSLGAISFWMCSNGSLQCRICI

SEQ ID NO: 1677 - protein, 565 aa, Artificial Sequence; identical to SEQ ID NO: 742
  derived and/or modified protein sequence (wt) from hemagglutinin__InfluenzaA__ABR15885

SEQ ID NO: 1678 - protein, 565 aa, Artificial Sequence
  derived and/or modified protein sequence (wt) from hemagglutinin__InfluenzaA__ABR15896
MKAKLLVLLCTFTATYADTICIGYHANNSTDTVDTVLEKNVTVTHSVNLLEDSHNGKLCLLKGIAPLQLGNCSVAGWILGNPECELLISKESWSYIVEAPNPENGTCYPGYFADYEELREQLSSVSSFERFEIFPKESSWPNHTVTGVSASCSHNGKSSFYRNLLWLTGKNGLYPNLSMSYVNNKEKEVLVLWGVHHPPNIGDQRALYHTENAYVSVVSSHYSRRFTPEIAKRPKVRDQEGRINYYWTLLEPGDTIIFEANGNLIAPWYAFALSRGFGSGIITSNAPMDECDAKCQTPQGAINSSLPFQNVHPVTIGECPKYVRSAKLRMVTGLRNIPSIQSRGLFGAIAGFIEGGWTGMVDGWYGYHHQNEQGSGYAADQKSTQNAINGITNKVNSVIEKMNTQFTAVGKEFNKLERRMENLNKKVDDGFLDIWTYNAELLVLLENERTLDFHDSNVKNLYEKVKSQLKNNAKEIGNGCFEFYHKCNNECMESVKNGTYDYPKYSEESKLNREKIDGVKLESMGVYQILAIYSTVASSLVLLVSLGAISFWMCSNGSLQCRICI

SEQ ID NO: 1679 - protein, 565 aa, Artificial Sequence; identical to SEQ ID NO: 741
  derived and/or modified protein sequence (wt) from hemagglutinin__InfluenzaA__ABR15907

SEQ ID NO: 1680 - protein, 565 aa, Artificial Sequence; identical to SEQ ID NO: 742
  derived and/or modified protein sequence (wt) from hemagglutinin__InfluenzaA__ABR15918

SEQ ID NO: 1681 - protein, 566 aa, Artificial Sequence
  derived and/or modified protein sequence (wt) from hemagglutinin__InfluenzaA__ABR15929
MKTIIALSYILCLVFAQKLPGNDNSTATLCLGHHAVPNGTLVKTITNDQIEVTNATELVQSSSTGRICDSPHQILDGENCTLIDALLGDPHCDGFQNKEWDLFVERSKAYSNCYPYDVPDYVSLRSLVASSGTLEFNNESFNWTGVAQNGTSSACKRRSDKSFFSRLNWLHQLKYKYPALNVTMPNNEKFDKLYIWGVHHPGTDSDQISLYAQASGRVTVSTKRSQQTVIPNIGSRPWVRGISSRISIYWTIVKPGDILLINSTGNLIAPRGYFKIRSGKSSIMRSDAPIGKCNSECITPNGSIPNDKPFQNVNRITYGPCPRYVKQNTLKLATGMRNVPEKQTRGIFGAIAGFIENGWEGMMDGWYGFRHQNSEGTGQAADLKSTQAAINQINGKLNRLIEKTNEKFHQIEKEFSEVEGRIQDLEKYVEDTKIDLWSYNAELLVALENQHTIDLTDSEMNKLFERTKKQLRENAEDMGNGCFKIYHKCNNACIGSIRNGTYDHDVYRDEALNNRFQIKGVELKSGYKDWILWISFAISCFLLCIVLLGFIMWACQKGNIRCNICI

SEQ ID NO: 1682 - protein, 566 aa, Artificial Sequence
  derived and/or modified protein sequence (wt) from hemagglutinin__InfluenzaA__ABR15940
MKTIIALSYILCLVFAQKLPGNDNSTATLCLGHHAVPNGTLVKTITNDQIEVTNATELVQSSSTGRICDSPHQILDGENCTLIDALLGDPHCDGFQNKEWDLFVERSKAYSNCYPYDVPDYVSLRSLVASSGTLEFNNESFNWTGVAQNGTSSACKRRSDKSFFSRLNWLHQLKYKYPALNVTMPNNEKFDKLYIWGVHHPGTDSDQISLYAQASGRVTVSTKRSQQTVIPNIGSRPWVRGVSSRISIYWTIVKPGDILLINSTGNLIAPRGYFKIRSGKSSIMRSDAPIGKCNSECITPNGSISNDKPFQNVNRITYGACPRYVKQNTLKLATGMRNVPEKQTRGIFGAIAGFIENGWEGMMDGWYGFRHQNSEGTGQAADLKSTQAAINQINGKLNRLIEKTNEKFHQIEKEFSEVEGRIQDLEKYVEDTKIDLWSYNAELLVALENQHTIDLTDSEMNKLFERTKKQLRENAEDMGNGCFKIYHKCDNACIGSIRNGTYDHDVYRDEALNNRFQIKGVELKSGYKDWVLWISFAISCFLLCIVLLGFIMWACQKGNIRCNICI

SEQ ID NO: 1683 - protein, 566 aa, Artificial Sequence; identical to SEQ ID NO: 562
  derived and/or modified protein sequence (wt) from hemagglutinin__InfluenzaA__ABR15951

SEQ ID NO: 1684 - protein, 566 aa, Artificial Sequence
  derived and/or modified protein sequence (wt) from hemagglutinin__InfluenzaA__ABR15962
MKTIIALSYILCLVFAQKLPGNDNSTATLCLGHHAVPNGTLVKTITNDQIEVTNATELVQSSSTGRICDSPHQILDGENCTLIDALLGDPHCDGFQNKEWDLFVERSRAYSNCYPYDVPDYVSLRSLVASSGTLEFNNESFNWTGVAQNGTSSACKRRSDKSFFSRLNWLHQLKYKYPALNVTMPNNEKFDKLYIWGVHHPGTDSDQISLYAQASGRVTVSTKRSQQTVIPNIGSRPWVRGVSSIISIYWTIVKPGDILLINSTGNLIAPRGYFKIRSGKSSIMRSDAPIGKCNSECITPNGSIPNDKPFQNVNRITYGPCPRYVKQNTLKLATGMRNVPEKQTRGIFGAIAGFIENGWEGMMDGWYGFRHQNSEGTGQAADLKSTQAAINQINGKLNRLIEKTNEKFHQIEKEFSEVEGRIQDLEKYVEDTKIDLWSYNAELLVALENQHTIDLTDSEMNKLFERTKKQLRENAEDMGNGCFKIYHKCDNACIGSIRNGTYDHDVYRDEALNNRFQIKGVELKSGYKDWILWISFAISCFLLCIVLLGFIMWACQKGNIRCNICI

SEQ ID NO: 1685 - protein, 566 aa, Artificial Sequence
  derived and/or modified protein sequence (wt) from hemagglutinin__InfluenzaA__ABR22241
MKTIIALSYILCLAFAQKLPGNDNSTATLCLGHHAVPNGTLVKTITNDQIEVTNATELVQSSSTGRICDSPHQILDGENCTLIDALLGDPHCDGFQNKEWDLFVERSKAYSNCYPYDVPDYASLRSLVASSGTLEFNNESFNWTGVAQNGTSSACKRRSIKSFFSRLNWLHQLEYRYPALNVTMPNNDKFDKLYIWGVHHPSTDSDQISVYAQASGRVTVSTKRSQQTVIPNIGSRPWVRGISSRISIYWTIVKPGDILLINSTGNLIAPRGYFKIRSGKSSIMRSDAPIGKCNSECITPNGSIPNDKPFQNVNRITYGACPRYVKQNTLKLATGMRNVPEKQTRGIFGAIAGFIENGWEGMMDGWYGFRHQNSEGTGQAADLKSTQAAINQINGKLNKLIEKTNEKFHQIEKEFSEVEGRIQDLEKYVEDTKIDLWSYNAELLVALENQNTIDLTDSEMNKLFERTRKQLRENAEDMGNGCFKIYHKCDNACIGSIRNGTYDHDVYRDEALNNRFQIKGVELKSGYKDWILWISFAISCFLLCVVLLGFIMWACQKGNIRCNICI

SEQ ID NO: 1686 - protein, 566 aa, Artificial Sequence; identical to SEQ ID NO: 650
  derived and/or modified protein sequence (wt) from hemagglutinin__InfluenzaA__ABR28515

SEQ ID NO: 1687 - protein, 566 aa, Artificial Sequence
  derived and/or modified protein sequence (wt) from hemagglutinin__InfluenzaA__ABR28592
MKTIIALSYVFCLVFAQDLPGNDNSTATLCLGHHAVPNGTLVKTITNDQIEVTNATELVQSSSTGKICDNPHRILDGINCTLIDALLGDPHCDGFQNEKWDLFVERSKAFSNCYPYDVPDYASLRSLVASSGTLEFINEGFNWTGVTQNGGSSACKRGPDNGFFSRLNWLYKSGSTYPVQNVTMPNNDNSDKLYIWGVHHPSTDKEQTDLYVQASGKVTVSTKRSQQTVIPNVGSRPWVRGLSSRVSIYWTIVKPGDILVINSNGNLIAPRGYFKMRTGKSSIMRSDAPIGTCSSECITPNGSIPNDKPFQNVNKITYGACPKYVKQNTLKLATGMRNVPEKQTRGIFGAIAGFIENGWEGMIDGWYGFRHQNSEGTGQAADLKSTQAAIDQINGKLNRVIEKTNEKFHQIEKEFSEVEGRIQDLEKYVEDTKIDLWSYNAELLVALENQHTIDLTDSEMNKLFEKTRRQLRENAEDMGNGCFKIYHKCDNACIGSIRNGTYDHDVYRDEALNNRFQIKGVELKSGYKDWILWISFAISCFLLCVVLLGFIMWACQKGNIRCNICI

SEQ ID NO: 1688 - protein, 565 aa, Artificial Sequence; identical to SEQ ID NO: 742
  derived and/or modified protein sequence (wt) from hemagglutinin__InfluenzaA__ABR28768

SEQ ID NO: 1689 - protein, 565 aa, Artificial Sequence; identical to SEQ ID NO: 742
  derived and/or modified protein sequence (wt) from hemagglutinin__InfluenzaA__ABR28779

SEQ ID NO: 1690 - protein, 566 aa, Artificial Sequence; identical to SEQ ID NO: 1433
  derived and/or modified protein sequence (wt) from hemagglutinin__InfluenzaA__ABR28790

SEQ ID NO: 1691 - protein, 565 aa, Artificial Sequence; identical to SEQ ID NO: 742
  derived and/or modified protein sequence (wt) from hemagglutinin__InfluenzaA__ABR28801

SEQ ID NO: 1692 - protein, 566 aa, Artificial Sequence; identical to SEQ ID NO: 650
  derived and/or modified protein sequence (wt) from hemagglutinin__InfluenzaA__ABR28812

SEQ ID NO: 1693 - protein, 566 aa, Artificial Sequence
  derived and/or modified protein sequence (wt) from hemagglutinin__InfluenzaA__ABR28823
MKTIIALSYILCLVFAQKLPGNDNSTATLCLGHHAVPNGTLVKTITNDQIEVTNATELVQSSSTGRICDSPHQILDGENCTLIDALLGDPHCDGFQNKEWDLFVERSKAYSNCYPYDVPDYVSLRSLVASSGTLEFNNESFNWTGVAQNGTSSACKRRSDKSFFSRLNWLHQLKYKYPALNVTMPNNEKFDKLYIWGVHHPGTDSDQISLYAQASGRVTVSTKRSQQTVIPNIGSRPWVRGISSRISIYWTIVKPGDILLINSTGNLIAPRGYFKIRSGKSSIMRSDAPIGKCNSECITPNGSIPNDKPFQNVNRITYGPCPRYVKQNTLKLATGMRNVPEKQTRGIFGAIAGFIENGWEGMMDGWYGFRHQNSEGTGQAADLKSTQAAINQINGKLNRLIEKTNEKFHQIEKEFSEVEGRIQDLEKYVEDTKIDLWSYNAELLVALENQHTIDLTDSEMNKLFERTKKQLRENAEDMGNGCFKIYHKCDNACIGSIRNGTYDHDVYRDEALNNRFQIKGVELKSGYKDWILWISFAISCFLLCIVLLGFIMWACQKGNIRCNICI

SEQ ID NO: 1694 - protein, 565 aa, Artificial Sequence; identical to SEQ ID NO: 870
  derived and/or modified protein sequence (wt) from hemagglutinin__InfluenzaA__ABR28834

SEQ ID NO: 1695 - protein, 565 aa, Artificial Sequence; identical to SEQ ID NO: 841
  derived and/or modified protein sequence (wt) from hemagglutinin__InfluenzaA__ABR28845

SEQ ID NO: 1696 - protein, 566 aa, Artificial Sequence
  derived and/or modified protein sequence (wt) from hemagglutinin__InfluenzaA__ABR28856
MKTIIALSYILCLVFAQKLPGNDNSTATLCLGHHAVPNGTLVKTITNDQIEVTNATELVQSSSTGRICDSPHQILDGENCTLIDALLGDPHCDGFQNKEWDLFVERSKAYSNCYPYDVPDYVSLRSLVASSGTLEFNNESFNWTGVAQNGTSSACKRRSDKSFFSRLNWLHQLKYKYPALNVIMPNNEKFDKLYIWGVHHPGTDSDQISLYAQASGRVTVSTKRSQQTVIPNIGSRPWVRGVSSRISIYWTIVKPGDILLINSTGNLIAPRGYFKIRSGKSSIMRSDAPIGKCNSECITPNGSIPNDKPFQNVNRITYGACPRYVKQKTLKLATGMRNVPEKQTRGIFGAIAGFIENGWEGMMDGWYGFRHQNSEGTGQAADLKSTQAAINQINGKLNRLIEKTNEKFHQIEKEFSEVEGRIQDLEKYVEDTKIDLWSYNAELLVALENQHTIDLTDSEMNKLFERTKKQLRENAEDMGNGCFKIYHKCDNACIGSIRNGTYDHDVYRDEALNNRFQIKGVELKSGYKDWILWISFAISCFLLCIVLLGFIMWACQKGNIRCNICI

SEQ ID NO: 1697 - protein, 566 aa, Artificial Sequence; identical to SEQ ID NO: 607
  derived and/or modified protein sequence (wt) from hemagglutinin__InfluenzaA__ABR28867

SEQ ID NO: 1698 - protein, 566 aa, Artificial Sequence; identical to SEQ ID NO: 562
  derived and/or modified protein sequence (wt) from hemagglutinin__InfluenzaA__ABR28878

SEQ ID NO: 1699 - protein, 565 aa, Artificial Sequence; identical to SEQ ID NO: 1204
  derived and/or modified protein sequence (wt) from hemagglutinin__InfluenzaA__ABR28900

SEQ ID NO: 1700 - protein, 566 aa, Artificial Sequence
  derived and/or modified protein sequence (wt) from hemagglutinin__InfluenzaA__ABR28922
MKTIIALSYILCLVFAQKLPGNDNSTATLCLGHHAVPNGTIVKTITNDQIEVTNATELVQSSSTGGICDSPHQILDGENCTLIDALLGDPQCDGFQNKKWDLFVERSKAYSNCYPYDVPDYASLRSLVASSGTLEFNNESFNWTGVTQNGTSSACKRRSNNSFFSRLNWLTHLKFKYPALNVTMPNNEKFDKLYIWGVHHPGTDNDQISLYAQASGRITVSTKRSQQTVIPNIGSRPRVRDIPSRVSIYWTIVKPGDILLINSTGNLIAPRGYFKIRSGKSSIMRSDAPIGKCNSECITPNGSIPNDKPFQNVNRITYGACPRYVKQNTLKLATGMRNVPEKQTRGIFGAIAGFIENGWEGMVDGWYGFRHQNSEGIGQAADLKSTQAAINQINGKLNRLIGKTNEKFHQIEKEFSEVEGRIQDLEKYVEDTKIDLWSYNAELLVALENQHTIDLTDSEMNKLFERTKKQLRENAEDMGNGCFKIYHKCDNACIGSIRNGTYDHDVYRDEALNNRFQIKGVELKSGYKDWILWISFAISCFLLCVALLGFIMWACQKGNIRCNICI

SEQ ID NO: 1701 - protein, 566 aa, Artificial Sequence; identical to SEQ ID NO: 1581
  derived and/or modified protein sequence (wt) from hemagglutinin__InfluenzaA__ABR88080

SEQ ID NO: 1702 - protein, 566 aa, Artificial Sequence
  derived and/or modified protein sequence (wt) from hemagglutinin__InfluenzaA__ABS00315
MKAKLLVLLCAFTATDADTICIGYHANNSTDTVDTVLEKNVTVTHSVNLLEDSHNGKLCRLKGIAPLQLGNCSVAGWILGNPECESLFSKKSWSYIAETPNSENGTCYPGYFADYEELREQLSSVSSFERFEIFPKESSWPNHTVTKGVSASCSHKGRSSFYRNLLWLTEKNGSYPNLSKSYVNNKEREVLVLWGVHHPSNIGEQRAIYHTENAYVSVVSSHYNRRFTPEIAKRPKVRGQEGRINYYWTLLEPGDTIIFEANGNLIAPWYAFALSRGFGSGIITSNASMDECDAKCQTPQGAINSSLPFQNVHPVTIGECPKYVRSTKLRMVTGLRNIPSIQSRGLFGAIAGFIEGGWTGMIDGWYGYHHQNEQGSGYAADQKSTQNAINGITNKVNSVIEKMNTQFTAVGKEFNKLERRMENLNKKVDDGFLDIWTYNAELLVLLENERTLDFHDSNVKNLYEKVKSQLKNNAKEIGNGCFEFYHKCNNECMESVKNGTYDYPKYSEESKLNREKIDGVKLESMGVYQILAIYSTVASSLVLLVSLGAISFWMCSNGSLQCRICI

SEQ ID NO: 1703 - protein, 566 aa, Artificial Sequence
  derived and/or modified protein sequence (wt) from hemagglutinin__InfluenzaA__ABS00326
MKAKLLVLLCAFTATDADTICIGYHANNSTDTVDTVLEKNVTVTHSVNLLEDSHNGKLCRLKGIAPLQLGNCSVAGWILGNPECESLFSKKSWSYIAETPNSENGTCYPGYFADYEELREQLSSVSSFERFEIFPKESSWPNHTVTKGVSASCSHKGRSSFYRNLLWLTEKNGSYPNLSKSYVNNKEKEVLVLWGVHHPSNIGEQRAIYHTENAYVSVVSSHYNRRFTPEIAKRPKVRGQEGRINYYWTLLEPGDTIIFEANGNLIAPWYAFALSRGFGSGIITSNASMDECDAKCQTPQGAINSSLPFQNVHPVTIGECPKYVRSTKLRMVTGLRNIPSIQSRGLFGAIAGFIEGGWTGMIDGWYGYHHQNEQGSGYAADQKSTQNAINGITNKVNSVIEKMNTQFTAVGKEFNKLERRMENLNKKVDDGFLDIWTYNAELLVLLENERTLDFHDSNVKNLYEKVKSQLKNNAKEIGNGCFEFYHKCNNECMESVKNGTYDYPKYSEESKLNREKIDGVKLESMGVYQILAIYSTVASSLVLLVSLGAISFWMCSNGSLQCRICI

SEQ ID NO: 1704 - protein, 566 aa, Artificial Sequence; identical to SEQ ID NO: 1640
  derived and/or modified protein sequence (wt) from hemagglutinin__InfluenzaA__ABS49899

SEQ ID NO: 1705 - protein, 566 aa, Artificial Sequence
  derived and/or modified protein sequence (wt) from hemagglutinin__InfluenzaA__ABS49910
MKTIIALSYIFCLALGQDLPGNDNSTATLCLGHHAVPNGTLVKTITNDQIEVTNATELVQSSSTGKICNNPHRILDGINCTLIDALLGDPHCDVFQDETWDLFVERSKAFSNCYPYDVPDYASLRSLVASSGTLEFITEGFTWTGVTQNGGSNACKRGPGSGFFSRLNWLTKSGSTYPVLNVTMPNNDNFDKLYIWGVHHPSTNQEQTSLYVQASGRVTVSTRRSQQTIIPNIGSRPWVRGLSSRISIYWTIVKPGDVLVINSNGNLIAPRGYFKMRTGKSSIMRSDAPIDTCISECITPNGSIPNDKPFQNVNKITYGACPKYVKQNTLKLATGMRNVPEKQTRGLFGAIAGFIENGWEGMIDGWYGFRHQNSEGTGQAADLKSTQAAIDQINGKLNRVIEKTNEKFHQIEKEFSEVEGRIQDLEKYVEDTKIDLWSYNAELLVALENQHTIDLTDSEMNKLFEKTRRQMRENAEDMGNGCFKIYHKCDNACIESIRNGTYDHDVYRDEALNNRFQIKGVELKSGYKDWILWISFAISCFLLCVVLLGFIMWACQRGNIRCNICI

SEQ ID NO: 1706 - protein, 566 aa, Artificial Sequence; identical to SEQ ID NO: 650
  derived and/or modified protein sequence (wt) from hemagglutinin__InfluenzaA__ABS49965

SEQ ID NO: 1707 - protein, 565 aa, Artificial Sequence
  derived and/or modified protein sequence (wt) from hemagglutinin__InfluenzaA__ABS49976
MKVKLLVLLCTFTATYADTICIGYHANNSTDTVDTVLEKNVTVTHSVNLLEDSHNGKLCLLKGIAPLQLGNCSVAGWILGNPECELLISKESWSYIVETPNPENGTCYPGYFADYEELREQLSSVSSFERFEIFPKESSWPNHTVTGVSASCSHNGKSSFYRNLLWLTGKNGLYPNLSKSYANNKEKEVLVLWGVHHPPNIGNQRALYHTENAYVSVVSSHYSRRFTPEIAKRPKVRDQEGRINYYWTLLEPGDTIIFEANGNLIAPRYAFALSRGFGSGIITSNAPMDECDAKCQTPQGAINSSLPFQNVHPVTIGECPKYVRSAKLRMVTGLRNIPSIQSRGLFGAIAGFIEGGWTGMVDGWYGYHHQNEQGSGYAADQKSTQNAINGITNKVNSVIEKMNTQFTAVGKEFNKLERRMENLNKKVDDGFLDIWTYNAELLVLLENERTLDFHNSNVKNLYEKVKSQLKNNAKEIGNGCFEFYHKCNNECMESVKNGTYDYPKYSEESKLNREKIDGVKLESMGVYQILAIYSTVASSLVLLVSLGAISFWMCSNGSLQCRICI

SEQ ID NO: 1708 - protein, 565 aa, Artificial Sequence
  derived and/or modified protein sequence (wt) from hemagglutinin__InfluenzaA__ABS49987
MKVKLLVLLCTFTATYADTICIGYHANNSTDTVDTVLEKNVTVTHSVNLLEDSHNGKLCLLKGIAPLQLGNCSVAGWILGNPECELLISKESWSYIVETPNPENGTCYPGYFADYEELREQLSSVSSFERFEIFPKESSWPNHTVTGVSASCSHNGKSSFYRNLLWLTGKNGLYPNLSKSYANNKEKEVLVLWGVHHPPNIGDQRALYHTENAYVSVVSSHYSRRFTPEIAKRPKVRDQEGRINYYWTLLEPGDTIIFEANGNLIAPRYAFALSRGFGSGIITSNAPMDECDAKCQTPQGAINSSLPFQNVHPVTIGECPKYVRSAKLRMVTGLRNIPSIQSRGLFGAIAGFIEGGWTGMVDGWYGYHHQNEQGSGYAADQKSTQNAINGITNKVNSVIEKMNTQFTAVGKEFNKLERRMENLNKKVDDGFLDIWTYNAELLVLLENERTLDFHDSNMKNLYEKVKSQLKNNAKEIGNGCFEFYHKCNNECMESVKNGTYDYPKYSEESKLNREKIDGVKLESMGVYQILAIYSTVASSLVLLVSLGAISFWMCSNGSLQCRICI

SEQ ID NO: 1709 - protein, 566 aa, Artificial Sequence
  derived and/or modified protein sequence (wt) from hemagglutinin__InfluenzaA__ABS49998
MKTIIALSYILCLVFAQKLPGNDNSTATLCLGHHAVPNGTLVKTITNDQIEVTNATELVQSSSTGGICDSPHQILDGENCTLIDALLGDPHCDGFQNKEWDLFVERSKAYSNCYPYDVPDYASLRSLVASSGTLEFNNESFNWTGVAQNGTSSACKRRSNKSFFSRLNWLHQLKYKYPALNVIMPNNEKFDKLYIWGVHHPSTDSDQISLYAQAPGRVTVSTKRSQQTVIPNIGSRPWVRGVSSRISIYWTIVKPGDILLINCTGNLIAPRGYFKIRSGKSSIMRSDASIGKCNSECITPNGSIPNDKPFQNVNRITYGACPRYVKQNTLKLATGMRNVPEKQTRGIFGAIAGFIENGWEGMVDGWYGFRHQNSEGTGQAADLKSTQAAINQINGKLNRLIEKTNEKFHQIEKEFSEVEGRIQDLEKYVEDTKIDLWSYNAELLVALENQHTIDLTDSEMNKLFERTKKQLRENAEDMGNGCFKIYHKCDNACIGSIRNGTYDHDVYRDEALNNRFQIKGVELKSGYKDWILWISFAISCFLLCVVLLGFIMWACQKGNIRCNICI

SEQ ID NO: 1710 - protein, 566 aa, Artificial Sequence
  derived and/or modified protein sequence (wt) from hemagglutinin__InfluenzaA__ABS50009
MKTIIALSYILCLVFAQKLPGNDNSTATLCLGHHAVPNGTLVKTITNDQIEVTNATELVQSSSTGGICDSPHQILDGENCTLIDALLGDPHCDGFQNKEWDLFVERSKAYSNCYPYDVPDYASLRSLVASSGTLEFNNESFNWTGVAQNGTSSACKRRSNKSFFSRLNWLHQLKYKYPALNVTMPNNEKFDKLYIWGVHHPSTDSDQISLYAQAPGRVTVSTKRSQQTVIPNIGSRPWVRGVSSKISIYWTIVKPGDILLINCTGNLIAPRGYFKIRSGKSSIMRSDASIGKCNSECITPNGSIPNDKPFQNVNRITYGACPRYVKQNTLKLATGMRNVPEKQTRGIFGAIAGFIENGWEGMVDGWYGFRHQNSEGTGQAADLKSTQAAINQINGKLNRLIEKTNEKFHQIEKEFSEVEGRIQDLEKYVEDTKIDLWSYNAELLVALENQHTIDLTDSEMNKLFERTKKQLRENAEDMGNGCFKIYHKCDNACIGSIRNGTYDHDVYRDEALNNRFQIKGVELKSGYKDWILWISFAISCFLLCVVLLGFIMWACQKGNIRCNICI

SEQ ID NO: 1711 - protein, 566 aa, Artificial Sequence; identical to SEQ ID NO: 710
  derived and/or modified protein sequence (wt) from hemagglutinin__InfluenzaA__ABS50020

SEQ ID NO: 1712 - protein, 566 aa, Artificial Sequence
  derived and/or modified protein sequence (wt) from hemagglutinin__InfluenzaA__ABS50031
MKTIIALSYMLCLVFAQKLPGNDNSTAMLCLGHHAVPNGTLVKTITNDQIEVTNATELVQSSSTGGICDSPHQILDGENCTLIDALLGDPHCDGFQNKEWDLFVERSKAYSNCYPYDVPDYASLRSLVASSGTLEFNNESFNWTGVAQNGTSSACKRRSNKSFFSRLNWLHQLKYKYPALNVTMPNNEKFDKLYIWGVHHPSTDSDQISLYAQAPGRVTVSTKRSQQTVIPNIGSGPWVRGVSSRISIYWTIVKPGDILLINCTGNLIAPRGYFKIRSGKSSIMRSDASIGKCNSECITPNGSIPNDKPFQNVNRITYGACPRYVKQNTLKLATGMRNVPEKQTRGIFGAIAGFIENGWEGMVDGWYGFRHQNSEGTGQAADLKSTQAAINQINGKLNRLIEKTNEKFHQIEKEFSEVEGRIQDLEKYVEDTKIDLWSYNAELLVALENQHTIDLTDSEMNKLFERTKKQLRENAEDMGNGCFKIYHKCDNACIGSIRNGTYDHDVYRDEALNNRFQIKGVELKSGYKDWILWISFAISCFLLCVVLLGFIMWACQKGNIRCNICI

SEQ ID NO: 1713 - protein, 566 aa, Artificial Sequence; identical to SEQ ID NO: 51
  derived and/or modified protein sequence (wt) from hemagglutinin__InfluenzaA__ABS50042

SEQ ID NO: 1714 - protein, 566 aa, Artificial Sequence; identical to SEQ ID NO: 1693
  derived and/or modified protein sequence (wt) from hemagglutinin__InfluenzaA__ABS50053

SEQ ID NO: 1715 - protein, 566 aa, Artificial Sequence
  derived and/or modified protein sequence (wt) from hemagglutinin__InfluenzaA__ABS50064
MKTIIALSYILCLVFAQKLPGNDNSTATLCLGHHAVPNGTLVKTITNDQIEVTNATELVQSSSTGRICDSPHQILDGENCTLIDALLGDPHCDGFQNKEWDLFVERSKAYSNCYPYDVPDYVSLRSLVASSGTLEFNNESFNWTGVAQNGTSSACKRRSDKSFFSRLNWLHQLKYKYPALNVTMPNNEKFDKLYIWGVHHPGTDSDQISLYAQASGRVTVSTKRSQQTVIPNIGSRPWVRGVSSRISIYWTIVKPGDILLINSTGNLIAPRGYFKIRSGKSSIMRSDAPIGKCNSECITPNGSIPNDKPFQNVNRITYGPCPRYVKQTTLKLATGMRNVPEKQTRGIFGAIAGFIENGWEGMMDGWYGFRHQNSEGTGQAADLKSTQAAINQINGKLNRLIEKTNEKFHQIEKEFSEVEGRIQDLEKYVEDTKIDLWSYNAELLVSLENQHTIDLTDSEMNKLFERTKKQLRENAEDMGNGCFKIYHKCDNACIGSIRNGTYDHDVYRDEALNNRFQIKGVELKSGYKDWILWISFAISCFLLCIVLLGFIMWACQKGNIRCNICI

SEQ ID NO: 1716 - protein, 566 aa, Artificial Sequence
  derived and/or modified protein sequence (wt) from hemagglutinin__InfluenzaA__ABS50075
MKTIIALSYILCLVFAQKLPGNDNSTATLCLGHHAVPNGTIVKTITNDQIEVTNATELVQSSSTGGICDSPHKILDGENCTLIDALLGDPQCDGFQNKKWDLFVERSKAYSNCYPYDVPDYASLRSLIASSGTLEFNNESFNWTGVTQNGTSSACKRRSNSSFFSRLNWLTHLKFKYPALNVTMPNNEEFDKLYIWGVHHPGTYNDQISLYAQASGRITVSTKRSQQTVIPNIGSRPRVRDIPSRISIYWTIVKPGDILLINSTGNLIAPRGYFKIRSGKSSIMRSDAPIGKCNSECITPNGSIPNDKPFQNVNRITYGACPRYVKQNTLKLATGMRNVPEKQTRGIFGAIAGFIENGWEGMVDGWYGFRHQNSEGIGQAADLKSTQAAIDQINGKLNRLIGKTNEKFHQIEKEFSEVEGRIQDLEKYVEDTKIDLWSYNAELLVALENQHTIDLTDSEMNKLFERTKKQLRENAEDMGNGCFKIYHKCDNACIGSIRNGTYDHDVYRDEALNNRFQIKGVELKSGYKDWILWISFAISCFLLCVALLGFIMWACQKGNIRCNICI

SEQ ID NO: 1717 - protein, 565 aa, Artificial Sequence
  derived and/or modified protein sequence (wt) from hemagglutinin__InfluenzaA__ABS71665
MKVKLLVLLCTFTATYADTICIGYHANNSTDTVDTVLEKNVTVTHSVNLLEDSHNGKLCLLKGIAPLQLGNCSVAGWILGNPECESLISRESWSYIVEKPSPENGTCYPGHFADYEELREQLSSVSSFERFEIFPKESSWPNHTATGVSASCSHNGESSFYKNLLWLTGKNGLYPNLSKSYANNKEKEVLVLWGVHHPPNIGDQRALYHTENAYVSVVSSHYSRKFTPEIAKRPKVRDQEGRISYYWTLLEPGDTIIFEANGNLIAPRYAFALSRGFGSGIINSNAPMDECDAKCQTPQGAINSSLPFQNVHPVTIGECPKYVRSAKLRMVTGLRNIPSIQSRGLFGAIAGFIEGGWTGMVDGWYGYHHQNEQGSGYAADQKSTQNAINGITNKVNSVIEKMNTQFTAVGKEFNKLERRMENLNKKVDDGFIDIWTYNAELLVLLENERTLDFHDSNVKNLYEKVKSQLKNNAKEIGNGCFEFYHKCNDECMESVKNGTYDYPKYSEESKLNREKIDGVKLESMGVYQILAIYSTVASSLVLLVSLGAISFWMCSNGSLQCRICI

SEQ ID NO: 1718 - protein, 565 aa, Artificial Sequence
  derived and/or modified protein sequence (wt) from hemagglutinin__InfluenzaA__ABS71666
MKVKLLVLLCTFTATYADTICIGYHANNSTDTVDTVLEKNVTVTHSVNLLEDSHNGKLCLLKGIAPLQLGNCSVAGWILGNPECESLISRESWSYIVEKPSPENGTCYPGHFADYEELREQLSSVSSFERFEIFPKESSWPNHTATGVSASCSHNGKSSFYKNLLWLTGKNGLYPNLSKSYANNKEKEVLVLWGVHHPPNIGDQRALYHTENAYVSVVSSHYSRKFTPEIAKRPKVRDQEGRISYYWTLLEPGDTIIFEANGNLIAPRYAFALSRGFGSGIINSNAPMDECDAKCQTPQGAINSSLPFQNVHPVTIGECPKYVRSAKLRMVTGLRNIPSIQSRGLFGAIAGFIEGGWTGMVDGWYGYHHQNEQGSGYAADQKSTQNAINGITNKVNSVIEKMNTQFTAVGKEFNKLERRMENLNKKVDDGFIDIWTYNAELLVLLENERTLDFHDSNVKNLYEKVKSQLKNNAKEIGNGCFEFYHKCNDECMESVKNGTYDYPKYSEESKLNREKIDGVKLESMGVYQILAIYSTVASSLVLLVSLGAISFWMCSNGSLQCRICI

SEQ ID NO: 1719 - protein, 565 aa, Artificial Sequence
  derived and/or modified protein sequence (wt) from hemagglutinin__InfluenzaA__ABS71667
MKVKLLVLLCTFTATYADTICIGYHANNSTDTVDTVLEKNVTVTHSVNLLEDSHNGKLCLLKGIAPLQLGNCSVAGWILGNPECESLISRESWSYIVEKPSPENGTCYPGHFADYEELREQLSSVSSFERFEIFPKESSWPNHTATGVSASCSHNGKSSFYKNLLWLTGKNGLYPNLSKSYANNKEKEVLVLWGVHHPPNIGDQRALYHTENAYISVVSSHYSRKFTPEIAKRPKVRDQEGRISYYWTLLEPGDTIIFEANGNLIAPRYAFALSRGFGSGIINSNAPMDECDAKCQTPQGAINSSLPFQNVHPVTIGECPKYVRSAKLRMVTGLRNIPSIQSRGLFGAIAGFIEGGWTGMVDGWYGYHHQNEQGSGYAADQKSTQNAINGITNKVNSVIEKMNTQFTAVGKEFNKLERRMENLNKKVDDGFIDIWTYNAELLVLLENERTLDFHDSNVKNLYEKVKSQLKNNAKEIGNGCFEFYHKCNDECMESVKNGTYDYPKYSEESKLNREKIDGVKLESMGVYQILAIYSTVASSLVLLVSLGAISFWMCSNGSLQCRICI

SEQ ID NO: 1720 - protein, 565 aa, Artificial Sequence
  derived and/or modified protein sequence (wt) from hemagglutinin__InfluenzaA__ABS71668
MKVKLLVLLCTFTATYADTICIGYHANNSTDTVDTVLEKNVTVTHSVNLLEDSHNGKLCLLKGIAPLQLGNCSVAGWILGNPECESLISRESWSYIVEKPSPENGTCYPGHFADYEELREQLSSVSSFERFEIFPKESSWPNHTASGVSASCSHNGKSSFYKNLLWLTGKNGLYPNLSKSYANNKEKEVLVLWGVHHPPNIGDQRALYHTENAYVSVVSSHYSRKFTPEIAKRPKVRDQEGRINYYWTLLEPGDTIIFEANGNLIAPRYAFALSRGFGSGIINSNAPMDECDAKCQTPQGAINSSLPFQNVHPVTIGECPKYVRSAKLRMVTGLRNIPSIQSRGLFGAIAGFIEGGWTGMVDGWYGYHHQNEQGSGYAADQKSTQNAINGITNKVNSVIEKMNTQFTAVGKEFNKLERRMENLNKKVDDGFIDIWTYNAELLVLLENERTLDFHDSNVKNLYEKVKSQLKNNAKEIGNGCFEFYHKCNDECMESVKNGTYDYPKYSEESKLNREKIDGVKLESMGVYQILAIYSTVASSLVLLVSLGAISFWMCSNGSLQCRICI

SEQ ID NO: 1721 - protein, 565 aa, Artificial Sequence
  derived and/or modified protein sequence (wt) from hemagglutinin__InfluenzaA__ABS71669
MKVKLLVLLCTFTATYADTICIGYHANNSTDTVDTVLEKNVTVTHSVNLLEDSHNGKLCLLKGIAPLQLGNCSVAGWILGNPECELLISKESWSYIVEKPNPENGTCYPGHFADYEELREQLSSVSSFERFEIFPKESSWPNHTVTGVSASCSHNGESSFYKNLLWLTGKNGLYPNLSKSYANNKEKEVLVLWGVHHPPNIGDQKALYHTENAYVSVVSSHYSRKFTPEIAKRPKVRDQEGRINYYWTLLEPGDTIIFEANGNLIAPRYAFALSRGFGSGIINSNAPMDKCDAKCQTPQGAINSSLPFQNVHPVTIGECPKYVRSAKLRMVTGLRNIPSIQSRGLFGAIAGFIEGGWTGMVDGWYGYHHQNEQGSGYAADQKSTQNAINGITNKVNSVIEKMNTQFTAVGKEFNKLERRMENLNKKVDDGFIDIWTYNAELLVLLENERTLDFHDSNVKNLYEKVKSQLKNNAKEIGNGCFEFYHKCNDECMESVKNGTYDYPKYSEESKLNREKIDGVKLESMGVYQILAIYSTVASSLVLLVSLGAISFWMCSNGSLQCRICI

SEQ ID NO: 1722 - protein, 565 aa, Artificial Sequence
  derived and/or modified protein sequence (wt) from hemagglutinin__InfluenzaA__ABS71671
MKVKLLVLLCTFTATYADTICIGYHANNSTDTVDTVLEKNVTVTHSVNLLEDSHNGKLCLLKGIAPLQLGNCSVAGWILGNPECELLISKESWSYIVEKPNPENGTCYPGHFADYEELREQLSSVSSFERFEMFPKESSWPNHTVTGVSASCSHNGKSSFYKNLLWLTGKNGLYPNLSKSYANNKEKEVLVLWGVHHPPNIGDQRALYHTENAYVSVVSSHYSRKFTPEIAKRPKVRDQEGRINYYWTLLEPGDTIIFEANGNLIAPRYAFALSRGFGSGIINSNAPMDECDAKCQTPQGAINSSLPFQNVHPVTIGECPKYVRSAKLRMVTGLRNIPSIQSRGLFGAIAGFIEGGWTGMVDGWYGYHHQNEQGSGYAADQKSTQNAINGITNKVNSVIEKMNTQFTAVGKEFNKLERRMENLNKKVDDGFIDIWTYNAELLVLLENERTLDFHDSNVKNLYEKVKSQLKNNAKEIGNGCFEFYHKCNDECMESVKNGTYDYPKYSEESKLNREKIDGVKLESMGVYQILAIYSTVASSLVLLVSLGAISFWMCSNGSLQCRICI

SEQ ID NO: 1723 - protein, 565 aa, Artificial Sequence
  derived and/or modified protein sequence (wt) from hemagglutinin__InfluenzaA__ABS71672
MKVKLLVLLCTFTATYADTICIGYHANNSTDTVDTVLEKNVTVTHSVNLLEDSHNGKLCLLKGIAPLQLGNCSVAGWILGNPECELLISKESWSYIVEKPNPENGTCYPGHFADYEELRERLSSVSSFERFEMFPKESSWPNHTVTGVSASCSHNGKSSFYKNLLWLTGKNGLYPNLSKSYANNKEKEVLVLWGVHHPPNIGAQRALYHTENAYVSVVSSHYSRKFTPEIAKRPKVRDQEGRINYYWTLLEPGDTIIFEANGNLIAPRYAFALSRGFGSGIINSNAPMDECDAKCQTPQGAINSSLPFQNVHPVTIGECPKYVRSAKLRMVTGLRNIPSIQSRGLFGAIAGFIEGGWTGMVDGWYGYHHQNEQGSGYAADQKSTQNAINGITNKVNSVIEKMNTQFTAVGKEFNKLERRMENLNKKVDDGFIDIWTYNAELLVLLENERTLDFHDSNVKNLYEKVKSQLKNNAKEIGNGCFEFYHKCNDECMESVKNGTYDYPKYSEESKLSREKIDGVKLESMGVYQILAIYSTVASSLVLLVSLGAISFWMCSNGSLQCRICI

SEQ ID NO: 1724 - protein, 565 aa, Artificial Sequence
  derived and/or modified protein sequence (wt) from hemagglutinin__InfluenzaA__ABS71673
MKVKLLVLLCTFTATYADTICIGYHANNSTDTVDTVLEKNVTVTHSVNLLEDSHNGKLCLLKGIAPLQLGNCSVAGWILGNPECELLISKESWSYIVETPNPENGTCYPGYFADYEELREQLSSVSSFERFEIFPKESSWPNHTVTGVSASCSHNGRSSFYRNLLWLTGKNGLYPNLSKSYANNKEKEVLVLWGVHHPPNIGDQRALYHTENTYVSVVSSHYSRRFTPEIAKRPKVRDQEGRINYYWTLLEPGDTIIFEANGNLIAPRFAFALSRGFGSGIITSNAPMDECDAKCQTPQGAINSSLPFQNVHPVTIGECPKYVRSAKLRMATGLRNIPSIQSRGLFGAIAGFIEGGWTGMVDGWYGYHHQNEQGSGYAADQKSTQNAINGITNKVNSVIEKMNTQFTAVGKEFSKLERRMENLNKKVDDGFLDIWTYNAELLVLLENERTLDFHDSNVKNLYEKVKSQLKNNAKEIGNGCFEFYHKCNDECMESVKNGTYDYPKYSEESKLNREKIDGVKLESMGVYQILAIYSTVASSLVLLVSLGAISFWMCSNGSLQCRICI

SEQ ID NO: 1725 - protein, 566 aa, Artificial Sequence; identical to SEQ ID NO: 630
  derived and/or modified protein sequence (wt) from hemagglutinin__InfluenzaA__ABS71674

SEQ ID NO: 1726 - protein, 566 aa, Artificial Sequence
  derived and/or modified protein sequence (wt) from hemagglutinin__InfluenzaA__ABS71675
MKTIIALSYILCLVFAQKLPGNDNSTATLCLGHHAVPNGTIVKTITNDQIEVTNATELVQSSSTGGICDSPHQILDGENCTLIDALLGDPQCDGFQNKKWDLFVERSKAHSNCYPYDVPDYASLRSLVASSGTLEFNNESFNWTGVTQNGTSSACKRRSNNSFFSRLNWLTHLKFKYPALNVTMPNNEKFDKLYIWGVHHPGTDNDQIFLYAQASGRITVSTKRSQQTVIPNIGSRPRVRNIPSRISIYWTIVKPGDILLINSTGNLIAPRGYFKIRSGKSSIMRSDAPIGKCNSECITPNGSIPNDKPFQNVNRITYGACPRYVKQNTLKLATGMRNVPEKQTRGIFGAIAGFIENGWEGMVDGWYGFRHQNSEGIGQAADLKSTQAAINQINGKLNRLIGKTNEKFHQIEKEFSEVEGRIQDLEKYVEDTKIDLWSYNAELLVALENQHTIDLTDSEMNKLFERTKKQLRENAEDMGNGCFKIYHKCDNACIGSIRNGTYDHDVYRDEALNNRFQIKGVELKSGYKDWILWISFAISCFLLCVALLGFIMWACQKGNIRCNICI

SEQ ID NO: 1727 - protein, 566 aa, Artificial Sequence
  derived and/or modified protein sequence (wt) from hemagglutinin__InfluenzaA__ABS71676
MKTIIALSYILCLVFAQKLPGIDNSTATLCLGHHAVPNGTIVKTITNDQIEVTNATELVQNSSTGGICDSPHQILDGENCTLIDALLGDPQCDGFQNKKWDLFVERSKAYSNCYPYDVPDYASLRSLVASSGTLEFNNESFNWTGVTQNGTSSACKRGSNNSFFSRLNWLTHSKFKYPALNVTMPNNEEFDKLYIWGVHHPGTDNDQIFLYAQASGRITVSTKRSQQTVIPNIGSRPRVRNIPSRISIYWTIVKPGDILLINSTGNLIAPRGYFIIRSGKSSIMRSDAPIGKCNSECITPNGSIPNDKPFQNVNRITYGACPRYVKQNTLKLATGMRNVPEKQTRGIFGAIAGFIENGWEGMVDGWYGFRHQNSEGIGQAADLKSTQAAIDQINGKLNRLIGKTNEKFHQIEKEFSEVEGRIQDLEKYVEDTKIDLWSYNAELLVALENQHTIDLTDSEMNKLFEKTKKQLRENAEDMGNGCFKIYHKCDNACIGSIRNGTYDHDVYRDEALNNRFQIKGVELKSGYKDWILWISFAISCFLLCVALLGFIMWACQKGNIRCNICI

SEQ ID NO: 1728 - protein, 566 aa, Artificial Sequence
  derived and/or modified protein sequence (wt) from hemagglutinin__InfluenzaA__ABS71677
MKTIIALSYILCLVFAQKLPGIDNSTATLCLGHHAVPNGTIVKTITDDQIEVTNATELVQNSSTGGICDSPHQILDGENCTLIDALLGDPQCDGFQNKKWDLFVERSKAYSNCYPYDVPDYASLRSLVASSGTLEFNNESFNWTGVTQNGTSSACKRGSNNSFFSRLNWLTHSKFKYPALNVTMPNNEEFDKLYIWGVHHPGTDNDQIFLYAQASGRITVSTKRSQQTVIPNIGSRPRVRNIPSRISIYWTIVKPGDILLINSTGNLIAPRGYFKIRSGKSSIMRSDAPIDKCNSECITPNGSIPNDKPFQNVNRITYGACPRYVKQNTLKLATGMRNVPEKQTRGIFGAIAGFIENGWEGMVDGWYGFRHQNSEGIGQAADLKSTQAAIDQINGKLNRLIGKTNEKFHQIEKEFSEVEGRIQDLEKYVEDTKIDLWSYNAELLVALENQHTIDLTDSEMNKLFEKTKKQLRENAEDMGNGCFKIYHKCDNACIGSIRNGTYDHDVYRDEALNNRFQIKGVELKSGYKDWILWISFAISCFLLCVALLGFIMWACQKGNIRCNICI

SEQ ID NO: 1729 - protein, 566 aa, Artificial Sequence
  derived and/or modified protein sequence (wt) from hemagglutinin__InfluenzaA__ABS71679
MKTIIALSYILCLVFAQKLPGIDNSTATLCLGHHAVPNGTIVKTITNDQIEVTNATELVQSSSTGGICDSPHQILDGENCTLIDALLGDPQCDGFQNKKWDLFVERSKAYSNCYPYDVPDYASLRSLVASSGTLEFNNESFNWTGVTQNGTSSACKRGSNNSFFSRLNWLTHSKFKYPALNVTMPNNEEFDKLYIWGVHHPGTDNDQIFLYAQASGRITVSTKRSQQTVIPNIGSRPRVRNIPSRISIYWTIVKPGDILLINSTGNLIAPRGYFKIRSGKSSIMRSDAPIGKCNSECITPNGSIPNDKPFQNVNRITYGACPRYVKQNTLKLATGMRNVPEKQTRGIFGAIAGFIENGWEGMVDGWYGFRHQNSEGIGQAADLKSTQAAIDQINGKLNRLIGKTNEKFHQIEKEFSEVEGRIQDLEKYVEDTKIDLWSYNAELLVALENQHTIDLTDSEMNKLFEKTKKQLRENAEDMGNGCFKIYHKCDNACIGSIRNGTYDHDVYRDEALNNRFQIKGVELKSGYKDWILWISFAISCFLLCVALLGFIMWACQKGNIRCNICI

SEQ ID NO: 1730 - protein, 566 aa, Artificial Sequence; identical to SEQ ID NO: 1729
  derived and/or modified protein sequence (wt) from hemagglutinin__InfluenzaA__ABS71680

SEQ ID NO: 1731 - protein, 566 aa, Artificial Sequence
  derived and/or modified protein sequence (wt) from hemagglutinin__InfluenzaA__ABS71682
MKTIIALSYILCLVFAQKLPGNDNSTATLCLGHHAVPNGTIVKTITNDQIEVTNATELVQSSSTGGICDSPHQILDGENCTLIDALLGDPQCDGFQNKKWDLFVERSKAYSNCYPYDVPDYASLRSLIASSGTLEFNNESFNWTGVTQNGTSSACKRRSNNSFFSRLNWLTHLKFKYPALNVTMPNNEKFDKLYIWGVHHPGTDNDQIFLYAQASGRITVSTKRSQQTVIPNIGSRPRVRNIPSRISIYWTIVKPGDILLINSTGNLIAPRGYFKIRSGKSSIMRSDAPIGKCNSECITPNGSIPNDKPFQNVNRITYGACPRYVKQNTLKLATGMRNVPEKQTRGIFGAIAGFIENGWEGMVDGWYGFRHQNSEGIGQAADLKSTQAAIDQINGKLNRLIGKTNEKFHQIEKEFSEVEGRIQDLEKYVEDTKIDLWSYNAELLVALENQHTIDLTDSEMNKLFEKTKKQLRENAEDMGNGCFKIYHKCDNACIGSIRNGTYDHDVYRDEALNNRFQIKGVELKSGYKDWILWISFAISCFLLCVVLLGFIMWACQKGNIRCNICI

SEQ ID NO: 1732 - protein, 566 aa, Artificial Sequence
  derived and/or modified protein sequence (wt) from hemagglutinin__InfluenzaA__ABU80177
MKTIIALSYILCLVFAQKLPVNDNSTATLCLGHHAVPNGTLVKTITNDHIEVTNATELVQSSSTGRICDSPHQILDGENCTLIDALLGDPHCDGFQNKEWDLFVERSTAYSNCYPYDVPDYASLRSLVASSGTLEFNNESFNWTGVAQNGTSSSCKRRSIKSFFSRLNWLHQLKYKYPALNVTMPNNEKFDKLYIWGVHHPSTDSDQISLYAQASGRVTVSTKRSQQTVIPNIGSRPWVRGVSSRISIYWTIVKPGDILLINSTGNLIAPRGYFKIRSGKSSIMRSNAPIGKCNSECITPNGSIPNDKPFQNVNRITYGACPRYVKQNTLKLATGMRNVPEKQTRGIFGAIAGFIENGWEGMVDGWYGFRHQNSEGTGQAADLKSTQAAINQINGKLNRLIEKTNEKFHQIEKEFSEVEGRIQDLEKYVEDTKIDLWSYNAELLVALENQHTIDLTDSEMNKLFERTRKQLRENAEDMGNGCFKIYHKCDNACIGSIRNGTYDHDVYRDEALNNRFQIKGVELKSGYKDWILWISFAISCFLLCVVLLGFIMWACQKGNIRCNICI

SEQ ID NO: 1733 - protein, 565 aa, Artificial Sequence
  derived and/or modified protein sequence (wt) from hemagglutinin__InfluenzaA__ABU80298
MKVKLLVLLCTFTATYADTICIGYHANNSTDTVDTVLEKNVTVTHSVNLLEDSHNGKLCLLKGIAPLQLGNCSVAGWILGNPECELLISKESWSYIVETPNPENGTCYPGYFADYEELREQLSSVSSFERFEIFPKESSWPNHTVTGVSASCSHNGKSSFYRNLLWLTGKNGLYPNLSKSYANNKEKEVLVLWGVHHPPNIGDQRALYHTENAYVSVVSSHYSRRFTPEIAKRPKVRDQEGRINYYWTLLEPGDTIIFEANGNLIAPRYAFALSRGFGSGIITSNAPMDECDAKCQTPQGAINSSLPFQNVHPVTIGECPKYVRSAKLRMATGLRNIPSIQSRGLFGAIAGFIEGGWTGMVDGWYGYHHQNEQGSGYAADQKSTQNAINGITNKVNSVIEKMNTQFTAVGKEFNKLERRMENLNKKVDDGFLDIWTYNAELLVLLENERTLDFHDSNVKNLYKKVKSQLKNNAKEIGNGCFEFYHKCNNECMESVKNGTYDYPKYSEESKLNREKIDGVKLESMGVYQILAIYSTVASSLVLLVSLGAISFWMCSNGSLQCRICI

SEQ ID NO: 1734 - protein, 566 aa, Artificial Sequence
  derived and/or modified protein sequence (wt) from hemagglutinin__InfluenzaA__ABU80320
MKTIIALSYILCLVFAQKLPGNDNSTATLCLGHHAVPNGTLVKTITNDQIEVTNATELVQSSSTGGICDSPHQILDGENCTLIDALLGDPHCDSFQNKEWDLFVERSKAYSNCYPYDVPDYASLRSLVASSGTLEFNNESFNWTGVAQNGTSSACKRRSNKSFFSRLNWLHQLKYKYPALNVTMPNNEKFDKLYIWGVHHPSTDSDQISLYAQAPGRVTVSTKRSQQTVIPNIGSRPWVRGVSSIISIYWTIVKPGDILLINCTGNLIAPRGYFKIRSGKSSIMRSDASIGKCNSECITPNGSIPNDKPFQNVNRITYGACPRYVKQNTLKLATGMRNVPEKQTRGIFGAIAGFIENGWEGMVDGWYGFRHQNSEGTGQAADLKSTQAAINQINGKLNRLIEKTNEKFHQIEKEFSEVEGRIQDLEKYVEDTKIDLWSYNAELLVALENQHTIDLTDSEMNKLFERTKKQLRENAEDMGNGCFKIYHKCDNACIGSIRNGTYDHDVYRDEALNNRFQIKGVELKSGYKDWILWISFAISCFLLCVVLLGFIMWACQKGNIRCNICI

SEQ ID NO: 1735 - protein, 566 aa, Artificial Sequence; identical to SEQ ID NO: 1039
  derived and/or modified protein sequence (wt) from hemagglutinin__InfluenzaA__ABU80331

SEQ ID NO: 1736 - protein, 566 aa, Artificial Sequence
  derived and/or modified protein sequence (wt) from hemagglutinin__InfluenzaA__ABU80400
MKAILLVLLYTFTAANADTLCIGYHANNSTDTVDTVLEKNVTVTHSVNLLEDRHNGKLCKLRGVAPLHLGKCNIAGWLLGNPECELLFTASSWSYIVETSNSDNGTCYPGDFINYEELREQLSSVSSFERFEIFPKASSWPNHETNRGVTAACPYAGANSFYRNLIWLVKKGNSYPKLSKSYVNNKEKEVLVLWGIHHPPTSTDQQSLYQNADAYVFVGSSKYNKKFKPEIATRPKVRGQAGRMNYYWTLVEPGDTITFEATGNLVVPRYAFAMKRGSGSGIIISDTPVHDCNTTCQTPKGAINTSLPFQNIHPVTIGECPKYVKSTKLRMATGLRNIPSIQSRGLFGAIAGFIEGGWTGMIDGWYGYHHQNEQGSGYAADRKSTQNAIDGITNKVNSVIEKMNTQFTAVGKEFNHLEKRIENLNRKVDDGFLDIWTYNAELLVLLENERTLDYHDSNVKNLYEKVRSQLKNNAKEIGNGCFEFYHKCDDTCMESVKNGTYDYPKYSEESKLNREEIDGVKLESTRIYQILAIYSTVASSLVLLVSLGAISFWMCSNGSLQCRICI

SEQ ID NO: 1737 - protein, 566 aa, Artificial Sequence
  derived and/or modified protein sequence (wt) from hemagglutinin__InfluenzaA__ABU92572
MKTIIALSYILCLVFTQKLPGNDNSTATLCLGHHAVPNGTLVKTITNDQIEVTNATELVQSSSTGRICDSPHQILDGENCTLIDALLGDPHCDGFQNKEWDLFVERSKAYSNCYPYDVPDYVSLRSLVASSGTLEFNNESFNWTGVAQNGTSSACKRRSDKSFFSRLNWLHQLKYKYPALNVTMPNNEKFDKLYIWGVHHPGTDSDQISLYAQASGRVTVSTKRSQQTVIPNIGSRPWVRGVSSRISIYWTIVKPGDILLINSTGNLIAPRGYFKIRSGKSSIMRSDAPIGKCNSECITPNGSIPNDKPFQNVNRITYGPCPRYVKQNTLKLATGMRNVPEKQTRGIFGAIAGFIENGWEGMMDGWYGFRHQNSEGTGQAADLKSTQAAINQINGKLNRLIEKTNEKFHQIEKEFSEVEGRIQDLEKYVEDTKIDLWSYNAELLVALENQHTIDLTDSEMNKLFERTKKQLRENAEDMGNGCFKIYHKCDNACIGSIRNGTYDHDVYRDEALNNRFQIKGVELKSGYKDWILWISFAISCFLLCIVLLGFIMWACQKGNIRCNICI

SEQ ID NO: 1738 - protein, 566 aa, Artificial Sequence
  derived and/or modified protein sequence (wt) from hemagglutinin__InfluenzaA__ABU92573
MKTIIALSYILCLVFAQKLPGNDNSTATLCLGHHAVPNGTLVKTITNDQIEVTNATELVQSSSTGRICDSPHQILDGENCTLIDALLGDPHCDGFQNKEWDLFVERSKAYSNCYPYDVPDYVSLRSLVASSGTLEFNNESFNWTGVAQNGTSSACKRRSDKSFFSRLNWLHQLKYKYPALNVTMPNNEKFDKLYIWGVHHPGTDSDQISLYAQASGRVTVSTKRSQQTVIPNIGSRPWVRGVSSRISIYWTIVKPGDILLINSTGNLIAPRGYFKIRSGKSSIMRSDAPIGKCNSECITPNGSIPNGKPFQNVNRITYGACPRYVKQNTLKLATGMRNVPEKQTRGIFGAIAGFIENGWEGMMDGWYGFRHQNSEGTGQAADLKSTQAAINQINGKLNRLIKKTNEKFHQIEKEFSEVEGRIQDLEKYVEDTKIDLWSYNAELLVALENQHTIDLTDSEMNKLFERTKKQLRENAEDMGNGCFKIYHKCDNACIGSIRNGTYDHDVYRDEALNNRFQIKGVELKSGYKDWILWISFAISCFLLCIVLLGFIMWACQKGNIRCNICI

SEQ ID NO: 1739 - protein, 566 aa, Artificial Sequence
  derived and/or modified protein sequence (wt) from hemagglutinin__InfluenzaA__ABU92575
MKTIIALSYILCLVFAQKLPGNDNSTATLCLGHHAVPNGTLVKTITNDQIEVTNATELVQSSSTGRICDSPHQILDGENCTLIDALLGDPHCDGFQNKEWDLFVERSKAYSNCYPYDVPDYVSLRSLVASSGTLEFNNESFNWTGVAQNGTSSACKRRSDKSFFSRLNWLHQLKYKYPALNVTMPNNEKFDKLYIWGVHHPGTDSDQISLYAQASGRVTVSTKRSQQTVIPNIGSKPWVRGVSSRISIYWTIVKPGDILLINSTGNLIAPRGYFKIRSGKSSIMRSDAPIGKCNSECITPNGSIPNDKPFQNVNRITYGPCPRYVKQNTLKLATGMRNVPEKQTRGIFGAIAGFIENGWEGMMDGWYGFRHQNSEGTGQAADLKSTQAAINQINGKLNRLIEKTNEKFHQIEKEFSEVEGRIQDLEKYVEDTKIDLWSYNAELLVALENQHTIDLTDSEMNKLFERTKKQLRENAEDMGNGCFKIYHKCDNACIGSIRNGTYDHDVYRDEALNNRFQIKGVELKSGYKDWILWISFAISCFLLCIVLLGFIMWACQKGNIRCNICI

SEQ ID NO: 1740 - protein, 566 aa, Artificial Sequence; identical to SEQ ID NO: 51
  derived and/or modified protein sequence (wt) from hemagglutinin__InfluenzaA__ABU92576

SEQ ID NO: 1741 - protein, 566 aa, Artificial Sequence; identical to SEQ ID NO: 51
  derived and/or modified protein sequence (wt) from hemagglutinin__InfluenzaA__ABU92577

SEQ ID NO: 1742 - protein, 566 aa, Artificial Sequence; identical to SEQ ID NO: 72
  derived and/or modified protein sequence (wt) from hemagglutinin__InfluenzaA__ABU92578

SEQ ID NO: 1743 - protein, 566 aa, Artificial Sequence; identical to SEQ ID NO: 72
  derived and/or modified protein sequence (wt) from hemagglutinin__InfluenzaA__ABU92579

SEQ ID NO: 1744 - protein, 566 aa, Artificial Sequence; identical to SEQ ID NO: 72
  derived and/or modified protein sequence (wt) from hemagglutinin__InfluenzaA__ABU92580

SEQ ID NO: 1745 - protein, 566 aa, Artificial Sequence; identical to SEQ ID NO: 1737
  derived and/or modified protein sequence (wt) from hemagglutinin__InfluenzaA__ABU92581

SEQ ID NO: 1746 - protein, 566 aa, Artificial Sequence
  derived and/or modified protein sequence (wt) from hemagglutinin__InfluenzaA__ABU92582
MKTIIALSYILCLVFAQKLPGNDNSTATLCLGHHAVPNGTLVKTITNDQIEVTNATELVQSSSTGRICDSPHQILDGENCTLIDALLGDPHCDGFQNKEWDLFVERSKAYSNCYPYDVPDYVSLRSLVASSGTLEFNNESFNWTGVAQNGTSSACKRRSDKSFFSRLNWLHQLKYKYPAQNVTMPNNEKFDKLYIWGVHHPGTDSDQISLYAQASGRVTVSTKRSQQTVIPNIGSRPWVRGVSSRISIYWTIVKPGDILLINSTGNLIAPRGYFKIRSGKSSIMRSDAPIGKCNSECITPNGSIPNDKPFQNVNRITYGACPRYVKQNTLKLATGMRNVPEKQTRGIFGAIAGFIENGWEGMMDGWYGFRHQNSEGTGQAADLKSTQAAINQINGKLNRLIEKTNEKFHQIEKEFSEVEGRIQDLEKYVEDTKIDLWSYNAELLVALENQHTIDLTDSEMNKLFERTKKQLRENAEDMGNGCFKIYHKCDNACIGSIRNGTYDHDVYRDEALNNRFQIKGVELKSGYKDWILWISFAISCFLLCIVLLGFIMWACQKGNIRCNICI

SEQ ID NO: 1747 - protein, 566 aa, Artificial Sequence; identical to SEQ ID NO: 1746
  derived and/or modified protein sequence (wt) from hemagglutinin__InfluenzaA__ABU92583

SEQ ID NO: 1748 - protein, 566 aa, Artificial Sequence
  derived and/or modified protein sequence (wt) from hemagglutinin__InfluenzaA__ABU92584
MKTIIALSYILCLVFAQKLPGNDNSTATLCLGHHAVPNGTLVKTITNDQIEVTNATELVQSSSTGRICDSPHQILDGENCTLIDALLGDPHCDGFQNKEWDLFVERSKAYSNCYPYDVPDYVSLRSLVASSGTLEFNNESFNWTGVAQNGTSSACKRRSDKSFFSRLNWLHQLRYKYPALNVTMPNNEKFDKLYIWGVHHPGTDSDQISLYAQASGRVTVSTKRSQQTVIPNIGSRPWVRGVSSRISIYWTIVKPGDILLINSTGNLIAPRGYFKIRSGKSSIMRSDAPIGKCNSECITPNGSIPNDKPFQNVNRITYGACPRYVKQKTLKLATGMRNVPEKQTRGIFGAIAGFIENGWEGMMDGWYGFRHQNSEGTGQAADLKSTQAAINQINGKLNRLIEKTNEKFHQIEKEFSEVEGRIQDLEKYVEDTKIDLWSYNAELLVALENQHTIDLTDSEMNKLFERTKKQLRENAEDMGNGCFKIYHKCDNACIGSIRNGTYDHDVYRDEALNNRFQIKGVELKSGYKDWILWISFAISCFLLCIVLLGFIMWACQKGNIRCNICI

SEQ ID NO: 1749 - protein, 566 aa, Artificial Sequence
  derived and/or modified protein sequence (wt) from hemagglutinin__InfluenzaA__ABU92586
MKTIIALSYILCLVFAQKLPGNDNSTATLCLGHHAVPNGTIVKTITNDQIEVTNATELVQSSSTGGICDSPHQILDGENCTLIDALLGDPQCDGFQNKKWDLFVERSKAYSNCYPYDVPDYASLRSLIASSGTLEFNNESFNWTGVTQNGTSSACKRRSNSSFFSRLNWLTHLKFKYPALNVTMPNNEEFDKLYIWGVHHPGTDNDQISLYAQASGRITVSTKRSQQTVIPNIGSRPRVRDIPSRISIYWTIVKPGDILLINSTGNLIAPRGYFKIRSGKSSIMRSDAPIGKCNSECITPNGSIPNDKPFQNVNRITYGACPRYVKQNTLKLATGMRNVPEKQTRGIFGAIAGFIENGWEGMVDGWYGFRHQNSEGIGQAADLKSTQAAIDQINGKLNRLIGKTNEKFHQIEKEFSEVEGRIQDLEKYVEDTKIDLWSYNAELLVALENQHTIDLTDSEMNKLFERTKKQLRENAEDMGNGCFKIYHKCDNACIGSIRNGTYDHDVYRDEALNNRFQIKGVELKSGYKNWILWISFAISCFLLCVALLGFIMWACQKGNIRCNICI

SEQ ID NO: 1750 - protein, 566 aa, Artificial Sequence
  derived and/or modified protein sequence (wt) from hemagglutinin__InfluenzaA__ABU92587
MKTIIALSYILCLVFAQKLPGNDNSTATLCLGHHAVPNGTIVKTITNDQIEVTNATELVQSSSTGGICDSPHQILDGENCTLIDALLGDPQCDGFQNKKWDLFVERSKAYSNCYPYDVPDYASLRSLIASSGTLEFNNESFNWTGVTQNGTSSACKRRSNSSFFSRLNWLTHLKFKYPALNVTMPNNEEFDKLYIWGVHHPGTYNDQISLYAQASGRITVSTKRSQQTAIPNIGSRPRVRDIPSRISIYWTIVKPGDILLINSTGNLIAPRGYFKIRSGKSSIMRSDAPIGKCNSECITPNGSIPNDKPFQNVNRITYGACPRYVKQNTLKLATGMRNVPEKQTRGIFGAIAGFIENGWEGMVDGWYGFRHQNSEGIGQAADLKSTQAAIDQINGKLNRLIGKTNEKFHQIEKEFSEVEGRIQDLEKYVEDTKIDLWSYNAELLVALENQHTIDLTDSEMNKLFERTKKQLRENAEDMGNGCFKIYHKCDNACIGSIRNGTYDHDVYRDEALNNRFQIKGVELKSGYKDWILWISFAISCFLLCVALLGFIMWACQKGNIRCNICI

SEQ ID NO: 1751 - protein, 566 aa, Artificial Sequence
  derived and/or modified protein sequence (wt) from hemagglutinin__InfluenzaA__ABU92588
MKTIIALSYILCLVFAQKLPGNDNSTATLCLGHHAVPNGTIVKTITNDQIEVTNATELVQSSSTGGICDSPHQILDGENCTLIDALLGDPQCDGFQNKKWDLFVERSKAYSNCYPYDVPDYASLRSLVASSGTLEFNNESFNWTGVTQNGTSSACKRKSNNSFFSRLNWLTHLKFKYPALNVTMPNNEKFDKLYIWGVHHPGTDNDQISLYAQASGRITVSTKRSQQTVIPNIGSRPRVRDIPSRISIYWTIVKPGDILLINSTGNLIAPRGYFKIRSGKSSIMRSDAPIGKCNSECITPNGSIPNDKPFQNVNRITYGACPRYVKQNTLKLATGMRNVPEKQTRGIFGAIAGFIENGWEGMVDGWYGFRHQNSEGIGQAADLKSTQAAINQINGKLNRLIGKTNEKFHQIEKEFSEVEGRIQDLEKYVEDTKIDLWSYNAEFLVALENQHTIDLTDSEMNKLFERTKKQLRENAEDMGNGCFKIYHKCDNACIGSIRNGTYDHDVYRDEALNNRFQIKGVELKSGYKDWILWISFAISCFLLCVALLGFIMWACQKGNIRCNICI

SEQ ID NO: 1752 - protein, 566 aa, Artificial Sequence; identical to SEQ ID NO: 633
  derived and/or modified protein sequence (wt) from hemagglutinin__InfluenzaA__ABU92590

SEQ ID NO: 1753 - protein, 566 aa, Artificial Sequence
  derived and/or modified protein sequence (wt) from hemagglutinin__InfluenzaA__ABU92591
MKTIIALSYILCLVFAQKLPGNDNSTATLCLGHHAVPNGTIVKTITNDQIEVTNATELVQSSSTGGICDSPHQILDGENCTLIDALLGDPQCDGFQNKKWDLFVERSKAYSNCYPYDVPDYASLRSLIASSGTLEFNNESFNWTGVTQNGTSSACKRRSNSSFFSRLNWLTHLKFKYPALNVTMPNNEEFDKLYIWGVHHPGTDNDQISLYAQASGRITVSTKRSQQTVIPNIGSRPRVRDIPSRISIYWTIVKPGDILLINSTGNLIAPRGYFKIRSGKSSIMRSDAPIGKCNSECITPNGSIPNDKPFQNVNRITYGACPRYVKQNTLKLATGMRNVPEKQTRGIFGAIAGFIENGWEGMVDGWYGFRHQNSEGIGQAADLKSTQAAIDQINGKLNRLIGKTNEKFHQIEKEFSEVEGRIQDLEKYVEDTKIDLWSYNAELLVALENQHTIDLTDSEMNKLFERTKKQLRENAEDMGNGCFKIYHKCDNACIGSIRNGTYDHDVYRDEALNNRFQIKGVELKSGYKDWILWISFAISCFLLCVALLGFIMWACQKGNIRCNICI

SEQ ID NO: 1754 - protein, 566 aa, Artificial Sequence; identical to SEQ ID NO: 1753
  derived and/or modified protein sequence (wt) from hemagglutinin__InfluenzaA__ABU92592

SEQ ID NO: 1755 - protein, 566 aa, Artificial Sequence
  derived and/or modified protein sequence (wt) from hemagglutinin__InfluenzaA__ABU92593
MKTIIALSYILCLVFAQKLPGNDNSTATLCLGHHAVPNGTIVKTITNDQIEVTNATELVQSSSTGGICDSPHQILDGENCTLIDALLGDPQCDGFQNKKWDLFVERSKAYSNCYPYDVPDYASLRSLVASSGTLEFNNESFNWTGVTQNGTSSACKRRSNNSFFSRLNWLTHLKFKYPALNVTMPNNEKFDKLYIWGVHHPGTDNDQIFLYAQASGRITVSTKRSQQTVIPNIGSRPRVRNIPSRISIYWTIVKPGDILLINSTGNLIAPRGYFKIRSGKSSIMRSDAPIGKCNSECITPNGSIPNDKPFQNVNRITYGACPRYVKQNTLKLATGMRNVPEKQTRGIFGAIAGFIENGWEGMVDGWYGFRHQNSEGIGQAADLKSTQAAIDQINGKLNRLIGKTNEKFHQIEKEFSEVEGRIQDLEKYVEDTKIDLWSYNAELLVALENQHTIDLTDSEMNKLFEKTKKQLRENAEDMGNGCFKIYHKCDNACIGSIRNGTYDHDVYRDEALNNRFQIKGVELKSGYKDWILWISFAISCFLLCVALLGFIMWAGQKGNKRCNICI

SEQ ID NO: 1756 - protein, 566 aa, Artificial Sequence
  derived and/or modified protein sequence (wt) from hemagglutinin__InfluenzaA__ABU92594
MKTIIALSYILCLVFAQKLPGNDNSTATLCLGHHAVPNGTIVKTITNDQIEVTNATELVQSSSTGEICNSPHQILDGESCTLIDALLGDPQCDGFQNKKWDLFVERSKAYSNCYPYDVPDYASLRSLVASSGTLEFNNESFNWTGVTQNGTSSACKRRSNNSFFSRLNWLTHLKFKYPALNVTMPNNEKFDKLYIWGVHHPGTDNDQIFLYAQASGRITVSTKRSQQTVIPNIGSRPRVRNIPSRISIYWTIVKPGDILLINSTGNLIAPRGYFKIRSGKSSIMRSDAPIGKCNSECITPNGSIPNDKPFQNVNRITYGACPRYVKQNTLKLATGMRNVPEKQTRGIFGAIAGFIENGWEGMVDGWYGFRHQNSEGIGQAADLKSTQAAINQINGKLNRLIGKTNEKFHQIEKEFSEVEGRIQDLEKYVEDTKIDLWSYNAELLVALENQHTIDLTDSEMNKLFERTKKQLRENAEDMGNGCFKIYHKCDNACIGSIRNGTYDHDVYRDEALNNRFQIKGVELKSGYKDWILWISFAISCFLLCVALSGFIMWACQKGNIRCNICI

SEQ ID NO: 1757 - protein, 566 aa, Artificial Sequence
  derived and/or modified protein sequence (wt) from hemagglutinin__InfluenzaA__ABU92595
MKTIIALSYILCLVFAQKLPENDNSTATLCLGHHAVPNGTIVKTITNDQIEVTNATELVQSSSTGGICDSPHQILDGENCTLIDALLGDPQCDGFQNKKWDLFVERSKAYSNCYPYDVPDYASLRSLVASSGTLEFNNESFNWTGVTQNGTSSACKRRSNNSFFSRLNWLTHLKFKYPALNVTMPNNEKFDKLYIWGVHHPGTDNDQIFLYAQASGRITVSTKRSQQTVIPNIGSRPRVRNIPSRISIYWTIVKPGDILLINSTGNLIAPRGYFKIRSGKSSIMRSDAPIGKCNSECITPNGSIPNDKPFQNVNRITYGACPRYVKQNTLKLATGMRNVPEKQTRGIFGAIAGFIENGWEGMVDGWYGFRHQNSEGIGQAADLKSTQAAIDQINGKLNRLIGKTNEKFHQIEKEFSEVEGRIQDLEKYVEDTKIDLWSYNAELLVALENQHTIDLTDSEMNKLFEKTKKQLRENAEDMGNGCFKIYHKCDNACIGSIRNGTYDHDVYRDEALNNRFQIKGVELKSGYKDWILWISFAISCFLLCVALLGFIMWACQKGNIRCNICI

SEQ ID NO: 1758 - protein, 566 aa, Artificial Sequence
  derived and/or modified protein sequence (wt) from hemagglutinin__InfluenzaA__ABU92596
MKTIIALSYILCLVFAQKLPGNDNSTATLCLGHHAVPNGTMVKTITNDQIEVTNATELVQSSSTGEICDSPHQILDGENCTLIDALLGDPQCDGFQNKKWDLFVERSKAHSNCYPYDVPDYASLRSLIASSGTLEFNNESFNWTGVTQNGTSSACKRRSDNSFFSRLNWLTHLKFKYPALNVTMPNNEEFDKLYIWGVHHPGTDNDQISLYAQASGRITVSTKRSQQTVIPNIGSRPRVRDIPSRISIYWTIVKPGDILLINSTGNLIAPRGYFKIRSGKSSIMRSDAPIGKCNSGCITPNGSIPNDKPFQNVNRITYGACPRYVKQNTLKLATGMRNVPEKQTRGIFGAIAGFIENGWEGMVDGWYGFRHQNSEGIGQAADLKSTQAAIDQINGKLNRLIGKTNEKFHQIEKEFSEVEGRIQDLEKYVEDTKIDLWSYNAELLVALENQHTIDLTDSEMNKLFERTKKQLRENAEDMGNGCFKIYHKCDNACIGSIRNGTYDHDVYRDEALNNRFQIKGVELKSGYKDWILWISFAISCFLLCVALLGFIMWACQKGNIRCNICI

SEQ ID NO: 1759 - protein, 566 aa, Artificial Sequence; identical to SEQ ID NO: 630
  derived and/or modified protein sequence (wt) from hemagglutinin__InfluenzaA__ABU92597

SEQ ID NO: 1760 - protein, 566 aa, Artificial Sequence; identical to SEQ ID NO: 73
  derived and/or modified protein sequence (wt) from hemagglutinin__InfluenzaA__ABU92601

SEQ ID NO: 1761 - protein, 566 aa, Artificial Sequence; identical to SEQ ID NO: 73
  derived and/or modified protein sequence (wt) from hemagglutinin__InfluenzaA__ABU92602

SEQ ID NO: 1762 - protein, 566 aa, Artificial Sequence
  derived and/or modified protein sequence (wt) from hemagglutinin__InfluenzaA__ABU92603
MKTIIALSYILCLVFAQKLPGNDNSTATLCLGHHAVPNGTIVKTITNDQIEVTNATELVQISSTGEICDSPHQILDGENCTLIDALLGDPQCDGFQNKKWDLFVERSKAYSNCYPYDVPDYASLRSLVASSGTLEFNNESFDWTGVTQNGTSSACKRRSDKSFFSRLNWLTHLKYKYPALNVTMPNNEKFDKLYIWGVHHPGTDSDQISLYAQASGRITVSTKRSQQTVIPNIGSRPRVRDVSSRISIYWTIVKPGDILLINSTGNLIAPRGYFKIRSGKSSIMRSDAPIGKCNSECITPNGSIPNDKPFQNVNRITYGACPRYVKQNTLKLATGMRNVPEKQTRGIFGAIAGFIENGWEGMVDGWYGFRHQNSEGTGQAADLKSTQAAINQINGKLNRLIGKTNEKFHQIEKEFSEVEGRIQDLEKYVEDTKIDLWSYNAELLVALENQHTIDLTDSEMNKLFERTKKQLRENAEDMGNGCFKIYHKCDNACIGSIRNGTYDHDVYRDEALNNRFQIKGVELKSGYKDWILWISFAISCFLLCVALLGFIMWACQKGNIRCNICI

SEQ ID NO: 1763 - protein, 566 aa, Artificial Sequence; identical to SEQ ID NO: 73
  derived and/or modified protein sequence (wt) from hemagglutinin__InfluenzaA__ABU92604

SEQ ID NO: 1764 - protein, 566 aa, Artificial Sequence; identical to SEQ ID NO: 1762
  derived and/or modified protein sequence (wt) from hemagglutinin__InfluenzaA__ABU92605

SEQ ID NO: 1765 - protein, 566 aa, Artificial Sequence; identical to SEQ ID NO: 1762
  derived and/or modified protein sequence (wt) from hemagglutinin__InfluenzaA__ABU92606

SEQ ID NO: 1766 - protein, 566 aa, Artificial Sequence; identical to SEQ ID NO: 612
  derived and/or modified protein sequence (wt) from hemagglutinin__InfluenzaA__ABU92608

SEQ ID NO: 1767 - protein, 566 aa, Artificial Sequence; identical to SEQ ID NO: 612
  derived and/or modified protein sequence (wt) from hemagglutinin__InfluenzaA__ABU92609

SEQ ID NO: 1768 - protein, 566 aa, Artificial Sequence
  derived and/or modified protein sequence (wt) from hemagglutinin__InfluenzaA__ABU92610
MKTIIALSYILCLVFAQKLPGNDNSTATLCLGHHAVPNGTIVKTITNDQIEVTNATELVQSSSTGEICDSPHQILDGENCTLIDALLGDPQCDGFQNKKWDLFVERSKAYSNCYPYDVPDYASLRSLVASSGTLEFNNESFNWTGVTQNGTSSACKRRSNNSFFSRLNWLTHSKFKYPALNVTMPNNEKFDKLYIWGVHHPGTDNDQIFLYAQASGRITVSTKRSQQTVIPNIGSRPRVRNIPSRISIYWTIVKPGDILLINSTGNLIAPRGYFKIRSGKSSIMRSDAPIGKCNSECITPNGSIPNDKPFQNVNRIAYGACPRYVKQNTLKLATGMRNVPEKQTRGIFGAIAGFIENGWEGMVDGWYGFRHQNSEGIGQAADLKSTQAAINQINGKLNRLIGKTNEKFHQIEKEFSEVEGRIQDLEKYVEDTKIDLWSYNAELLVALENQHTIDLTDSEMNKLFERTKKQLRENAEDMSNGCFKIYHKCDNACIGSIRNGTYDHDVYRDEALNNRFQIKGVELKSGYKDWILWISFAISCFLLCVVLLGFIMWACQKGNIRCNICI

SEQ ID NO: 1769 - protein, 566 aa, Artificial Sequence
  derived and/or modified protein sequence (wt) from hemagglutinin__InfluenzaA__ABU92611
MKTIIALSYILCLVFAQKLPGNDNSTATLCLGHHAVPNGTIVKTITNDQIEVTNATELVQSSSTGGICDSPHQILDGENCTLIDALLGDPQCDGFQNKKWDLFVERSKAYSNCYPYDVPDYASLRSLIASSGTLEFNNESFNWTGVTQNGTSSACKRRSNNSFFSRLNWLTHLKFKYPALNVTMPNNEEFDKLYIWGVHHPGTDNDQISLYAQASGKITVSTKRSQQTVIPNIGSRPRVRDIPSRISIYWTIVKPGDILLINSTGNLIAPRGYFKIRSGKSSIMRSDAPIGKCNSECITPNGSIPNDKPFQNVNRITYGACPRYVKQNTLKLATGMRNVPEKQTRGIFGAIAGFIENGWEGMVDGWYGFRHQNSEGIGQAADLKSTQAAIDQINGKLNRLIGKTNEKFHQIEKEFSEVEGRIQDLEKYVEDTKIDLWSYNAELLVALENQHTIDLTDSEMNKLFERTKKQLRENAEDMGNGCFKIYHKCDNACIGSIRNGTYDHDVYRDEALNNRFQIKGVELKSGYKDWILWISFAISCFLLCVALLGFIIWACLKGNIRCNICI

SEQ ID NO: 1770 - protein, 566 aa, Artificial Sequence
  derived and/or modified protein sequence (wt) from hemagglutinin__InfluenzaA__ABU92612
MKTIIALSYILCLVFAQKLPGNDNSTATLCLGHHAVPNGTMVKTITNDQIEVTNATELVQSSSTGGICDSPHQILDGENCTLIDALLGDPQCDGFQNKKWDLFVERSKAHSNCYPYDVPDYASLRSLVASSGTLEFNNESFNWTGVTQNGTSSACKRRSNNSFFSRLNWLTHLKFKYPALNVTMPNNEKFDKLYIWGVHHPGTDNDQISLYAQASGRITVSTKRSQQTVIPNIGSRPRVRDIPSRISIYWTIVKPGDILLINSTGNLIAPRGYFKIRSGKSSIMRSDAPIGKCNSECITPNGSIPNNKPFQNVNRITYGACPRYVKQNTLKLATGMRNVPEKQTRGIFGAIAGFIENGWEGMVDGWYGFRHQNSEGIGQAADLKSTQAAINQINGKLNRLIGKTNEKFHQIEKEFSEVEGRIQDLEKYVEDTKIDLWSYNAELLVALENQHTIDLTDSEMNKLFERTKKQLRENAEDMGNGCFKIYHKCDNACIGSIRNGTYDHDVYRDEALNNRFQIKGVELKSGYKDWILWISFAISCFLLCVALLGFIMWACQKGNIRCNICI

SEQ ID NO: 1771 - protein, 566 aa, Artificial Sequence; identical to SEQ ID NO: 1258
  derived and/or modified protein sequence (wt) from hemagglutinin__InfluenzaA__ABU92613

SEQ ID NO: 1772 - protein, 566 aa, Artificial Sequence; identical to SEQ ID NO: 1757
  derived and/or modified protein sequence (wt) from hemagglutinin__InfluenzaA__ABU92614

SEQ ID NO: 1773 - protein, 566 aa, Artificial Sequence
  derived and/or modified protein sequence (wt) from hemagglutinin__InfluenzaA__ABU92615
MKTIIALSYILCLVFAQKLPGNDNSTATLCLGHHAVPNGTIVRTITNDQIEVTNATELVQSSSTGGICDSPHQILDGENCTLIDALLGDPQCDGFQNKKWDLFVERSKAYSNCYPYDVPDYASLRSLVASSGTLEFNNESFNWTGVTQNGTSSACKRRSNNSFFSRLNWLTHLKFKYPALNVTMPNNEKFDKLYIWGVHHPGTDNDQISLYAQASGRITVSTKRSQQTVIPNVGSRPRVRDIPSRISIYWTIVKPGDILLINSTGNLIAPRGYFKIRSGKSSIMRSDAPIGKCNSECITPNGSIPNDKPFQNVNRITYGACPRYVKQNTLKLATGMRNVPEKQTRGIFGAIAGFIENGWEGMVDGWYGFRHQNSEGIGQAADLKSTQAAINQINGKLNRLIGKTNEKFHQIEKEFSEVEGRIQDLEKYVEDTKIDLWSYNAELLVALENQHTIDLTDSEMNKLFERTKKQLRENAEDMGNGCFKIYHKCDNACIGSIRNGTYDHDVYRDEALNNRFQIKGVELKSGYKDWILWISFAISCFLLCVALLGFIMWACQKGNIRCNICI

SEQ ID NO: 1774 - protein, 566 aa, Artificial Sequence
  derived and/or modified protein sequence (wt) from hemagglutinin__InfluenzaA__ABU92617
MKTIIALSYILCLVFAQKLPGNDNSTATLCLGHHSVPNGTIVKTITNDQIEVTNATELVQSSSTGGICDSPHQILDGENCTLIDALLGDPQCDGFQNKKWDLFVERSKAYSNCYPYDVPDYASLRSLIASSGTLEFNNESFNWTGVTQNGTSSACKRRSNSSFFSRLNWLTHLKFKYPALNVTMPNNEEFDKLYIWGVHHPGTDNDQISLYAQASGRITVSTKRSQQTVIPNIGSRPRVRDIPSRISIYWTIVKPGDILLINSTGNLIAPRGYFKIRSGKSSIMRSDAPIGKCNSECITPNGSIPNDKPFQNVNRITYGACPRYVKQNTLKLATGMRNVPEKQTRGIFGAIAGFIENGWEGMVDGWYGFRHQNSEGIGQAADLKSTQAAIDQINGKLNRLIGKTNEKFHQIEKEFSEVEGRIQDLEKYVEDTKIDLWSYNAELLVALENQHTIDLTDSEMNKLFERTKKQLRENAEDMGNGCFKIYHKCDNACIGSIRNGTYDHDVYRDEALNNRFQIKGVELKSGYKDWILWISFAISCFLLCVALLGFIMWACQKGNIRCNICI

SEQ ID NO: 1775 - protein, 566 aa, Artificial Sequence; identical to SEQ ID NO: 1258
  derived and/or modified protein sequence (wt) from hemagglutinin__InfluenzaA__ABU92619

SEQ ID NO: 1776 - protein, 566 aa, Artificial Sequence; identical to SEQ ID NO: 1757
  derived and/or modified protein sequence (wt) from hemagglutinin__InfluenzaA__ABU92620

SEQ ID NO: 1777 - protein, 566 aa, Artificial Sequence
  derived and/or modified protein sequence (wt) from hemagglutinin__InfluenzaA__ABU92622
MKTIIALSYILCLVFAQKLPGNDNSTATLCLGHHAVPNGTIVKTITNDQIEVTNATELVQSSSTGGICDSPHQILDGENCTLIDALLGDPQCDGFQNKKWDLFVERSKAYSNCYPYDVPDYASLRSLIASSGTLEFNNESFNWTGVTQNGTSSACKRRSNSSFFSRLNWLTHLKFKYPALNVTMPNNEEFDKLYIWGVHHPGTDNDQISLYAQASGRITVSTKRSQQTVIPNIGSRPRVRDIPSRISIYWTIVKPGDILLINSTGNLIAPRGYFKIRSGKSSIMRSDAPIGKCNSECITPNGSIPNDKPFQNVNRITYGACPRSVKQNTLKLATGMRNVPEKQTRGIFGAIAGFIENGWEGMVDGWYGFRHQNSEGIGQAADLKSTQAAIDQINGKLNRLIGKTNEKFHQIEKEFSEVEGRIQDLEKYVEDTKIDLWSYNAELLVALENQHTIDLTDSEMNKLFERTKKQLRENAEDMGNGCFKIYHKCDNACIGSIRNGTYDHDVYRDEALNNRFQIKGVELKSGYKDWILWISFAISCFLLCVALLGFIMWACQKGNIRCNICI

SEQ ID NO: 1778 - protein, 566 aa, Artificial Sequence; identical to SEQ ID NO: 73
  derived and/or modified protein sequence (wt) from hemagglutinin__InfluenzaA__ABU92623

SEQ ID NO: 1779 - protein, 566 aa, Artificial Sequence
  derived and/or modified protein sequence (wt) from hemagglutinin__InfluenzaA__ABU92624
MKTIIALSYILCLVFAQKLPGNDNSTATLCLGHHAVPNGTIVKTITNDQIEVTNATELVQISSTGEICDSPHQILDGENCTLIDALLGDPQCDGFQNKKWDLFVERSKAYSNCYPYDVPDYASLRSLVASSGTLEFNNESFDWTGVTQNGTSSACKRRSDKSFFSRLNWLTHLKYKYPALNVTMPNNEKFDKLYIWGVHHPGTDSDQISLYAQALGRITVSTKRSQQTVIPNIGSRPRVRDVSSRISIYWTIVKPGDILLINSTGNLIAPRGYFKIRSGKSSIMRSDAPIGKCNSECITPNGSIPNDKPFQNVNRITYGACPRYVKQNTLKLATGMRNVPEKQTRGIFGAIAGFIENGWEGMVDGWYGFRHQNSEGTGQAADLKSTQAAINQINGKLNRLIGKTNEKFHQIEKEFSEVEGRIQDLEKYVEDTKIDLWSYNAELLVALENQHTIDLTDSEMNKLFERTKKQLRENAEDMGNGCFKIYHKCDNACIGSIRNGTYDHDVYRDEALNNRFQIKGVELKSGYKDWILWISFAISCFLLCVALLGFIMWACQKGNIRCNICI

SEQ ID NO: 1780 - protein, 566 aa, Artificial Sequence; identical to SEQ ID NO: 1762
  derived and/or modified protein sequence (wt) from hemagglutinin__InfluenzaA__ABU92625

SEQ ID NO: 1781 - protein, 566 aa, Artificial Sequence; identical to SEQ ID NO: 73
  derived and/or modified protein sequence (wt) from hemagglutinin__InfluenzaA__ABU92626

SEQ ID NO: 1782 - protein, 566 aa, Artificial Sequence
  derived and/or modified protein sequence (wt) from hemagglutinin__InfluenzaA__ABU92627
MKTIIALSYILCMVFAQKLPGNDNSTATLCLGHHAVPNGTIVKTITNDQIEVTNATELVQISSTGEICDSPHQILDGENCTLIDALLGDPQCDGFQNKKWDLFVERSKAYSNCYPYDVPDYASLRSLVASSGTLEFNNESFDWTGVTQNGTSSACKRRSDKSFFSRLNWLTHLKYKYPALNVTMPNNEKFDKLYIWGVHHPGTDSDQISLYAQASGRITVSTKRSQQTVIPNIGSRPRVRDVSSRISIYWTIVKPGDILLINRPGNLIAPRGYFKIRSGKSSIMRSDAPIGKCNSECITPNGSIPNDKPFQNVNRITYGACPRYVKQNTLKLATGMRNVPEKQTRGIFGAIAGFIENGWEGMVDGWYGFRHQNSEGTGQAADLKSTQAAINQINGKLNRLIGKTNEKFHQIEKEFSEVEGRIQDLEKYVEDTKIDLWSYNAELLVALENQHTIDLTDSEMNKLFERTKKQLRENAEDMGNGCFKIYHKCDNACIGSIRNGTYDHDVYRDEALNNRFQIKGVELKSGYKDWILWISFAISCFLLCVALLGFIMWACQKGNIRCNICI

SEQ ID NO: 1783 - protein, 566 aa, Artificial Sequence; identical to SEQ ID NO: 1762
  derived and/or modified protein sequence (wt) from hemagglutinin__InfluenzaA__ABU92628

SEQ ID NO: 1784 - protein, 566 aa, Artificial Sequence; identical to SEQ ID NO: 1762
  derived and/or modified protein sequence (wt) from hemagglutinin__InfluenzaA__ABU92631

SEQ ID NO: 1785 - protein, 566 aa, Artificial Sequence
  derived and/or modified protein sequence (wt) from hemagglutinin__InfluenzaA__ABU92632
MKTIIALSYILCLVFAQKLPGNDNSTATLCLGHHAVPNGTIVKTITNDQIEVTNATELVQSSSTGGICDSPHQILDGENCTLIDALLGDPQCDGFQNKKWDLFVERSKAYSNCYPYDVPDYASLRSLIASSGTLEFNNESFNWTGVTQNGTSSACKRRSNKSFFSRLNWLTHLKYKYPALNVTMPNNEKFDKLYIWGVHHPGTDSDQISLYAQASGRITVSTKRSQQTVIPNIGSRPRVRDVSSRISIYWTIVKPGDILLINSTGNLIAPRGYFKIRSGKSSIMRSDAPIGKCNSECITPNGSIPNDKPFQNVNRITYGACPRYVKQNTLKLATGMRNVPEKQTRGIFGAIAGFIENGWEGMVDGWYGFRHLNSEGTGQAADLKSTQAAINQINGKLNRLIGKTNEKFHQIEKEFSEVEGRIQDLEKYVEDTKIDLWSYNAELLVALENQHTIDLTDSEMNKLFERTKKQLRENAEDMGNGCFKIYHKCDNACIGSIRNGTYDHDVYRDEALNNRFQIKGVELKSGYKDWILWISFAISCFLLCVALLGFIMWACQKGNIRCNICI

SEQ ID NO: 1786 - protein, 566 aa, Artificial Sequence
  derived and/or modified protein sequence (wt) from hemagglutinin__InfluenzaA__ABU92635
MKTIIALSYILCLVFAQKLPGNDNSTATLCLGHHAVPNGTIVKTITNDQIEVTNATELVQSSSTGGICDSPHQILDGENCTLIDALLGDPQCDGFQNKKWDLFVERSKAYSNCYPYDVPDYASLRSIVASSGTLEFNNESFNWTGVTQNGTSSACKRKSNKSFFSRLNWLTHLKYKYPALNVTMPNNEKFDKLYIWGVHHPGTDNDQISLYAQASGRITVSTKRSQQTVIPNIGSRPRVRDVSSRISIYWTIVKPGDILLINSTGNLIAPRGYFKIRSGKSSIMRSDAPIGKCNSECITPNGSIPNDKPFQNVNRITYGACPRYVKQNTLKLATGMRNVPEKQTRGIFGAIAGFIENGWEGMVDGWYGFRHQNSEGTGQAADLKSTQAAINQINGKLNRLIGKTNEKFHQIEKEFSEVEGRIQDLEKYVEDTKIDLWSYNAELLVALENQHTIDLTDSEMNKLFERTKKQLRENAEDMGNGCFKIYHKCDNACIGSIRNGTYDHDVYRDEALNNRFQIKGVELKSGYKDWILWISFAISCFLLCVALLGFIMWACQKGNIRCNICI

SEQ ID NO: 1787 - protein, 566 aa, Artificial Sequence; identical to SEQ ID NO: 630
  derived and/or modified protein sequence (wt) from hemagglutinin__InfluenzaA__ABU92636

SEQ ID NO: 1788 - protein, 566 aa, Artificial Sequence
  derived and/or modified protein sequence (wt) from hemagglutinin__InfluenzaA__ABU92637
MKTIIALSYILCLVFAQKLPGNDNSTATLCLGHHAVPNGTTVKTITNDQIEVTNATELVQSSSTGGICDSPHQILDGENCTLIDALLGDPQCDGFQNKKWDLFVERSKAYSNCYPYDVPDYVSLRSLVASSGTLEFNNESFNWTGVTQNGTSSACKRRSNNSFFSRLNWLTHLKFKYPALNVTMPNNEKFDKLYIWGVHHPGTDNDQISLYAQASGRITVSTKRSQQTVIPNIGSRPRVRDIPSRISIYWTIVKPGDILLINSTGNLIAPRGYFKIRSGKSSIMRSDAPIGKCNSECITPNGSIPNDKPFQNVNRITYGACPRYVKQNTLKLATGMRNVPEKQTRGIFGAIAGFIENGWEGMVDGWYGFRHQNSEGIGQAADLKSTQAAINQINGKLNRLIGKTNEKFHQIEKEFSEVEGRIQDLEKYVEDTKIDLWSYNAELLVALENQHTIDLTDSEMNKLFERTKKQLRENAEDMGNGCFKIYHKCDNACIGSIRNGTYDHDVYRDEALNNRFQIKGVELKSGYKDWILWISFAISCFLLCVALLGFIMWACQKGNIRCNICI

SEQ ID NO: 1789 - protein, 566 aa, Artificial Sequence
  derived and/or modified protein sequence (wt) from hemagglutinin__InfluenzaA__ABU92639
MKTIIALSYILCLVFAQKLPGNDNSTATLCLGHHAVPNGTIVKTITNDQIEVTNATELVQISSTGEICDSPHQILDGENCTLIDALLGDPQCDGFQNTKWDLFVERSKAYSNCYPYDVPDYASLRSLVASSGTLEFNNESFDWTGVTQNGTSSACKRRSDKSFFSRLNWLTHLKYKYPALNVTMPNNEKFDKLYIWGVHHPGTDSDQISLYAQASGRITVSTKRSQQTVIPNIGSRPRVRDVSSRISIYWTIVKPGDILLINSTGNLIAPRGYFKIRSGKSSIMRSDAPIGKCNSECITPNGSIPNDKPFQNVNRITYGACPRYVKQNTLKLATGMRNVPEKQTRGIFGAIAGFIENGWEGMVDGWYGFRHQNSEGTGQAADLKSTQAAINQINGKLNRLIGKTNEKFHQIEKEFSEVEGRIQDLEKYIEDTKIDLWSYNAELLVALENQHTIDLTDSEMNKLFERTKKQLRENAEDMGNGCFKIYHKCDNACIGSIRNGTYDHDVYRDEALNNRFQIKGVELKSGYKDWILWISFAISCFLLCVALLGFIMWACQKGNIRCNICI

SEQ ID NO: 1790 - protein, 566 aa, Artificial Sequence
  derived and/or modified protein sequence (wt) from hemagglutinin__InfluenzaA__ABU92640
MKTIIALSYILCLVFAQKLPGNDNSTATLCLGHHAVPNGTIVKTITNDQIEVTNATELVQSSSTGEICDSPHQILDGENCTLIDALLGDPQCDGFQNKKWDLFVERSKAYSNCYPYDVPDYASLRSLVASSGTLEFNNESFNWTGVTQNGTSSACKRRSNNSFFSRLNWLTHLKFKYPALNVTMPNNEKFDKLYIWGVHHPGTDNDQIFLYAQASGRITVSTKRSQQTVIPNIGSRPRVRNIPSRISIYWTIVKPGDILLINSTGNLIAPRGYFKIRSGKSSIMRSDAPIGKCNSECITPNGSIPNDKPFQNVNRITYGACPRYVKQNTLKLATGMRNVPEKQTRGIFGAIAGFIENGWEGMVDGWYGFRHQNSEGIGQAADLKSTQAAINQINGKLNRLIGKTNEKFHQIEKEFSEVEGRIQDLEKYVEDTKIDLWSYNAELLVALENQHTIDLTDSEMNKLFERTKKQLRENAEDMGNGCFKIYHKCDNACIGSIRNGTYDHDVYRDEALNNRFQIKGVELKSGYKDWILWISFAISCFLLCAALLGFIMWACQKGNIRCNICI

SEQ ID NO: 1791 - protein, 566 aa, Artificial Sequence
  derived and/or modified protein sequence (wt) from hemagglutinin__InfluenzaA__ABU92641
MKTIIALSYILCLVFAQKLPGNDNSTATLCLGHHAVPNGTIVKTITNDQIEVTNATELVQSSSTGGICDSPHQILDGENCTLIDALLGDPQCDGFQNKKWDLFVERSKAYSNCYPYDVPDYASLRSLVASSGTLEFNNESFNWTGVTQNGTSSACKRKSNNSFFSRLNWLTHLKFKYPALNVTMPNNEKFDKLYIWGVHHPGTDNDQISLYAQASGRITVSTKRSQQTVIPNIGSRPRVRDIPSRISIYWTIVKPGDILLINSTGNLIAPRGYFKIRSGKSSIMRSDAPIGKCNSECITPNGSIPNDKPFQNVNRITYGACPRYVKQNTLKLATGMRNVPEKQTRGIFGAIAGFIENGWEGMVDGWYGFRHQNSEGIGQAADLKSTQAAINQINGKLNRLIGKTNEKFHQIEKEFSEVEGRIQDLEKYVEDTKIDLWSYNAELLVALENQHTIDLTDSEMNKLFERTKKQLRENAEDMGNGCFKIYHKCDNACIGSIRNGTYDHDVYRDEALNNRFQIKGVELKSGYKDWILWISFAISCFLLCVALLGFIMWACQKGNIRCNICI

SEQ ID NO: 1792 - protein, 566 aa, Artificial Sequence
  derived and/or modified protein sequence (wt) from hemagglutinin__InfluenzaA__ABU92642
MKTIIALSYILCLVFAQKLPGNDNSTATLCLGHHAVPNGTIVKTITNDQIEVTNATELVQSSSTGGICDSPHQILDGENCTLIDALLGDPQCDGFQNKKWDLFVERSKAYSNCYPYDVPDYASLRSLVASSGTLEFNNESFNWTGVTQNGTSSACKRRSNNSFFSRLNWLTHLKFKYPALNVTMPNNEKFDKLYIWGVHHPGTDNDQIFLYAQASGRIIVSTKRSQQTVIPNIGSRPRVRNIPSRISIYWTIVKPGDILLINSTGNLIAPRGYFKIRSGKSSIMRSDAPIGKCNSECITPNGSIPNDKPFQNVNRITYGACPRYVKQNTLKLATGMRNVPEKQTRGIFGAIAGFIENGWEGMVDGWYGFRHQNSEGIGQAADLKSTQAAIDQINGKLNRLIGKTNEKFHQIEKEFSEVEGRIQDLEKYVEDTKIDLWSYNAELLVALENQHTIDLTDSEMNKLFEKTKKQLRENAEDMGNGCFKIYHKCDNACIGSIRNGTYDHDVYRDEALNNRFQIKGVELKSGYKDWILWISFAISCFLLCVALLGFIMWACQKGNIRCNICI

SEQ ID NO: 1793 - protein, 566 aa, Artificial Sequence
  derived and/or modified protein sequence (wt) from hemagglutinin__InfluenzaA__ABU92643
MKTIIALSYILCLVFAQKLPGNDNSTATLCLGHHAVPNGTIVKTITNDQIEVTNATELVQISSTGEICDSPHQILDGENCTLIDALLGDPQCDGFQNKKWDLFVERSKAYSNCYPYDVPDYASLRSLVASSGTLEFNNESFDWTGVTQNGTSSACKRRSDKSFFSRLNWLTHLKYKYPALNVTMPNNEKFDKLYIWGVHHPGTDSDQISLYAQASGRITVSTKRSQQTVIPNIGSRPRVRDVSSRISIYWTIVKPGDILLINSTGNLIAPRGYFKIRSGKSSIMRSDAPIGKCNSECITPNGSIPNDKPFQNVNRITYGACPRYVKQNTLKLATGMRNVPEKQTRGIFGAIAGFIENGWEGMVDGWYGFRHQNSEGTGQAADLKSTQAAINQINGKLNRLIGKTNEKFHQIEKEFSEVEGRIQDLEKYVEDTKIDLWSYNAELLVALENQHTIDLTDSEMNKLFERTKKQLRENAEDMGNGCFKIYHKCDNACIGSIRNGTYDHNVYRDEALNNRFQIKGVELKSGYKDWILWISFAISCFLLCVALLGFIMWACQKGNIRCNICI

SEQ ID NO: 1794 - protein, 566 aa, Artificial Sequence
  derived and/or modified protein sequence (wt) from hemagglutinin__InfluenzaA__ABU92645
MKTIIALSYILCLVFAQKLPGNDNSTATLCLGHHAVPNGTIVKTITNDQIEVTNATELVQSSSTGEICDSPHQILDGENCTLIDALLGDPQCDGFQNKKWDLFVERSKAYSNCYPYDVPDYASLRSLVASSGTLEFNNESFNWTGVTQNGTSSACKRRSNNSFFSRLNWLTHLKFKYPALNVTMPNNEKFDKLYIWGVHHPGTDNDQIFLYAQASGRITVSTKRSQQTVIPNIGSRPRVRNIPSRISIYWTIVKPGDILLINSTGNLIAPRGYFKIRSGKSSIMRSDAPIGKCNSECITPNGSIPNDKPFQNVNRIAYGACPRYVKQNTLKLATGMRNVPEKQTRGIFGAIAGFIENGWEGMVDGWYGFRHQNSEGIGQAADLKSTQAAINQINGKLNRLIGKTNEKFHQIEKEFSEVEGRIQDLEKYVEDTKIDLWSYNAELLVALENQHTIDLTDSEMNKLFERTKKQLRENAEDMGNGCFKIYHKCDNACIGSIRNGTYDHDVYRDEALNNRFQIKGIELKSGYKDWILWISFAISCFLLCVVLLGFIMWACQKGNIRCNICI

SEQ ID NO: 1795 - protein, 566 aa, Artificial Sequence
  derived and/or modified protein sequence (wt) from hemagglutinin__InfluenzaA__ABU92646
MKTIIALSYILCLVFAQKLPGNDNSTATLCLGHHAVPNGTIVKTITNDQIEVTNATELVQSSSTGGICDSPHQILDGENCTLIDALLGDPQCDGFQNKKWDLFVERSKAYSNCYPYDVPDYASLRSLVASSGTLEFNNESFNWTGVTQNGTSSACKRRSNKSFFSRLNWLTHLKFKYPALNVTMPNNEKFDKLYIWGVHHPGTDNDQISLYAQASGRITVSTKRSQQTVIPNIGSRPRVRDVPSRISIYWTIVKPGDILLINSTGNLIAPRGYFKIRSGKSSIMRSDAPIGKCNSECITPNGSIPNDKPFQNVNRITYGACPRYVKQNTLKLATGMRNVPEKQTRGIFGAIAGFIENGWEGMVDGWYGFRHQNSEGTGQAADLKSTQAAINQINGKLNRLIGKTNEKFHQIEKEFSEVEGRIQDLEKYVEDTKIDLWSYNAELLVALENQHTIDLTDSEMNKLFERTKKQLRENAEDMGNGCFKIYHKCDNACIGSIRNGTYDHDVYRDEALNNRFQIKGVELKSGYKDWILWISFAISCFLLCVALLGFIMWACQKGNIRCNICI

SEQ ID NO: 1796 - protein, 566 aa, Artificial Sequence; identical to SEQ ID NO: 73
  derived and/or modified protein sequence (wt) from hemagglutinin__InfluenzaA__ABU92647

SEQ ID NO: 1797 - protein, 566 aa, Artificial Sequence
  derived and/or modified protein sequence (wt) from hemagglutinin__InfluenzaA__ABU92648
MKTIIALSYILCLVFAQKLPGNDNSTATLCLGHHAVPNGTIVKTITNDQIEVTNATELVQISSTGEICDSPHQILDGENCTLIDALLGDPQCDGFQNKKWDLFVERSKAYSNCYPYDVPDYASLRSLVASSGTLEFNNESFNWTGVTQNGTSSACKRRSDKSFFSRLNWLTHLKYKYPALNVTMPNNEKFDKLYIWGVHHPGTDSDQISLYAQASGRITVSTKRSQQTVIPNIGSRPRVRDVSSRISIYWTIVKPGDILLINSTGNLIAPRGYFKIRSGKSSIMRSDAPIGKCNSECITPNGSIPNDKPFQNVNRITYGACPRYVKQNTLKLATGMRNVPEKQTRGIFGAIAGFIENGWEGMVDGWYGFRHQNSEGTGQAADLKSTQAAINQINGKLNRLIGKTNEKFHQIEKEFSEVEGRIQDLEKYVEDTKIDLWSYNAELLVALENQHTIDLTDSEMNKLFERTKKQLRENAEDMGNGCFKIYHKCDNACIGSIRNGTYDHDVYRDEALNNRFQIKGVELKSGYKDWILWISFAISCFLLCVALLGFIMWACQKGNIRCNICI

SEQ ID NO: 1798 - protein, 566 aa, Artificial Sequence; identical to SEQ ID NO: 73
  derived and/or modified protein sequence (wt) from hemagglutinin__InfluenzaA__ABU92649

SEQ ID NO: 1799 - protein, 566 aa, Artificial Sequence; identical to SEQ ID NO: 1762
  derived and/or modified protein sequence (wt) from hemagglutinin__InfluenzaA__ABU92650

SEQ ID NO: 1800 - protein, 566 aa, Artificial Sequence
  derived and/or modified protein sequence (wt) from hemagglutinin__InfluenzaA__ABU92651
MKTIIALSYILCLVFAQKLPGNDNSTATLCLGHHAVPNGTIVKTITNDQIEVTNATELVQISSTGEICDSPHQILDGENCTLIDALLGDPQCDGFQNKKWDLFVERSKAYSNCYPYDVPDYASLRSLVASSGTLEFYNESFDWTGVTQNGTSSACKRRSDKSFFSRLNWLTHLKYKYPALNVTMPNNEKFDKLYIWGVHHPGTDSDQISLYAQASGRITVSTKRSQQTVIPNIGSRPRVRDVSSRISIYWTIVKPGDILLINSTGNLIAPRGYFKIRSGKSSIMRSDAPIGKCNSECITPNGSIPNDKPFQNVNRITYGACPRYVKQNTLKLATGMRNVPEKQTRGIFGAIAGFIENGWEGMVDGWYGFRHQNSEGTGQAADLKSTQAAINQINGKLNRLIGKTNEKFHQIEKEFSEVEGRIQDLEKYVEDTKIDLWSYNAELLVALENQHTIDLTDSEMNKLFERTKKQLRENAEDMGNGCFKIYHKCDNACIGSIRNGTYDHDVYRDEALNNRFQIKGVELKSGYKDWILWISFAISCFLLCVALLGFIMWACQKGNIRCNICI

SEQ ID NO: 1801 - protein, 566 aa, Artificial Sequence
  derived and/or modified protein sequence (wt) from hemagglutinin__InfluenzaA__ABU92652
MKTIIALSYILCLVFAQKLPGNDNSTATLCLGHHAVPNGTIVKTITNDQIEVTNATELVQSSSTGGICDSPHQILDGENCTLIDALLGDPQCDGFQNKKWDLFVERSKAYSNCYPYDVPDYASLRSLVASSGTLEFNNESFDWTGVTQNGTSSACKRRSNKSFFSRLNWLTHLKYKYPALNVTMPNNEKFDKLYIWGVHHPGTDSDQISLYAQASGRITVSTKRSQQTVIPNIGSRPRVRDVSSRISIYWTIVKPGDILLINSTGNLIAPRGYFKIRSGKSSIMRSDAPIGKCNSECITPNGSIPNDKPFQNVNRITYGACPRYVKQNTLKLATGMRNVPEKQTRGIFGAIAGFIENGWEGMVDGWYGFRHQNSEGTGQAADLKSTQAAINQINGKLNRLIGKTNEKFHQIEKEFSEVEGRIQDLEKYVEDTKIDLWSYNAELLVALENQHTIDLTDSEMNKLFERTKKQLRENAEDIGNGCFKIYHKCDNACIGSIRNGTYDHDVYRDEALNNRFQIKGVELKSGYKDWILWISFAISCFLLCVALLGFIMWACQKGNIRCNICI

SEQ ID NO: 1802 - protein, 566 aa, Artificial Sequence; identical to SEQ ID NO: 1762
  derived and/or modified protein sequence (wt) from hemagglutinin__InfluenzaA__ABU92653

SEQ ID NO: 1803 - protein, 566 aa, Artificial Sequence
  derived and/or modified protein sequence (wt) from hemagglutinin__InfluenzaA__ABU92654
MKTIIALSYILCLVFAQKLPGNDNSTATLCLGHHAVPNGTIVKTITNDQIEVTNATELVQSSSTGGICDSPHQILDGENCTLIDALLGDPQCDGFQNKKWDLFVERSKAYSNCYPYDVPDYASLRSLVASSGTLEFNNESFNWTGVTQNGTSSACKRRSNKSFFSRLNWLTHLKFKYPALNVTMPNNEKFDKLYIWGVHHPGTDNDQISLYAQASGKITVSTKRSQQTVIPNIGSRPRVRDVPSRISIYWTIVKPGDILLINSTGNLIAPRGYFKIRSGKSSIMRSDAPIGKCNSECITPNGSILNDKPFQNVNRITYGACPRYVKQNTLKLATGMRNVPEKQTRGIFGAIAGFIENGWEGMVDGWYGFRHQNAEGTGQAADLKSTQAAINQINGKLNRLIGKTNEKFHQIEKEFSEVEGRIQDLEKYVEDTKIDLWSYNAELLVALENQHTIDLTDSEMNKLFERTKKQLRENAEDMGNGCFKIYHKCDNACIGSIRNGTYDHDVYRDEALNNRFQIKGVELKSGYKDWILWISFAISCFLLCVALLGFIMWACQKGNIRCNICI

SEQ ID NO: 1804 - protein, 566 aa, Artificial Sequence
  derived and/or modified protein sequence (wt) from hemagglutinin__InfluenzaA__ABU92655
MKTIIALSYILCLVFAQKLPGNDNSTATLCLGHHAVPNGTIVKTITNDQIEVTNATELVQSSSTGGICDSPHQILDGENCTLIDALLGDPQCDGFQNKKWDLFVERSKAYSNCYPYDVPDYASLRSLVASSGTLEFNNESFNWTGVTQNGTSSACKRRSNKSFFSRLNWLTHLKFKYPALNVTMPNNEKFDKLYIWGVHHPGTDNDQISLYAQASGRITVSTKRSQQTVIPNIGSRPRVRDVPSRISIYWTIVKPGDILLINSTGNLIAPRGYFKIRSGKSSIMRSDAPIGKCNSECITPNGSIPNDKPFQNVNRITYGACPRYVKQNTLKLATGMRNVPEKQTRGIFGAIAGFIENGWEGMVDGWYGFRHQNAEGTGQAADLKSTQAAINQINGKLNRLIGKTNEKFHQIEKEFSEVEGRIQDLEKYVEDTKIDLWSYNAELLVALENQHTIDLTDSEMNKLFERTKKQLRENAEDMGNGCFKIYHKCDNACIGSIRNGTYDHDVYRDEALNNRFQIKGVELKSGYKDWILWISFAISCFLLCVALLGFIMWACQKGNIRCNICI

SEQ ID NO: 1805 - protein, 566 aa, Artificial Sequence; identical to SEQ ID NO: 1762
  derived and/or modified protein sequence (wt) from hemagglutinin__InfluenzaA__ABU92656

SEQ ID NO: 1806 - protein, 566 aa, Artificial Sequence; identical to SEQ ID NO: 633
  derived and/or modified protein sequence (wt) from hemagglutinin__InfluenzaA__ABU92657

SEQ ID NO: 1807 - protein, 566 aa, Artificial Sequence; identical to SEQ ID NO: 1762
  derived and/or modified protein sequence (wt) from hemagglutinin__InfluenzaA__ABU92658

SEQ ID NO: 1808 - protein, 566 aa, Artificial Sequence; identical to SEQ ID NO: 633
  derived and/or modified protein sequence (wt) from hemagglutinin__InfluenzaA__ABU92659

SEQ ID NO: 1809 - protein, 566 aa, Artificial Sequence; identical to SEQ ID NO: 1762
  derived and/or modified protein sequence (wt) from hemagglutinin__InfluenzaA__ABU92660

SEQ ID NO: 1810 - protein, 566 aa, Artificial Sequence
  derived and/or modified protein sequence (wt) from hemagglutinin__InfluenzaA__ABU92661
MKTIIALSYILCLVFAQKLPGNDNSTATLCLGHHAVPNGTIVKTITNDQIEVTNATELVQISSTGEICDSPHQILDGENCTLIDALLGDPQCDGFQNKKWDLFVERSKAYSNCYPYDVPDYASLRSLVASSGTLEFNNESFDWTGVTQNGTSSACKRRSDKSFFSRLNWLTHLKYKYPALNVTMPNNEKFDKLYIWGVHHPGTDSDQISLYAQASGRITVSTKRSQQTVIPNIGSRPRVRDVSSRISIYWTIVKPGDILLINSTGNLIAPRGYFKIRSGKSSIMRSDAPIGKCNSECITPNGSIPNDKPFQNVNRITYGACPRYVKQNTLKLATGMRNVPEKQTRGIFGAIAGFIENGWEGMVDGWYGFRHQNSEGTGQAADLKSTQAAINQINGKLNRLIGKTNEKFHQIEKEFSEVEGRIQDLEKYVEDTKIDLWSYNAELLVALENQHTIDLTDSEMNKLFERTKKQLRENAEDMGNGCFKIYHKCDNACIGSIRNGTYDHDVYRDEALNNRFQIKGVELESGYKDWILWISFAISCFLLCVALLGFIMWACQKGNIRCNICI

SEQ ID NO: 1811 - protein, 566 aa, Artificial Sequence; identical to SEQ ID NO: 73
  derived and/or modified protein sequence (wt) from hemagglutinin__InfluenzaA__ABU92662

SEQ ID NO: 1812 - protein, 566 aa, Artificial Sequence; identical to SEQ ID NO: 1762
  derived and/or modified protein sequence (wt) from hemagglutinin__InfluenzaA__ABU92663

SEQ ID NO: 1813 - protein, 566 aa, Artificial Sequence; identical to SEQ ID NO: 1762
  derived and/or modified protein sequence (wt) from hemagglutinin__InfluenzaA__ABU92664

SEQ ID NO: 1814 - protein, 566 aa, Artificial Sequence
  derived and/or modified protein sequence (wt) from hemagglutinin__InfluenzaA__ABU92665
MKTIIALSYILCLVFAQKLPGNDNSTATLCLGHHAVPNGTIVKTITNDQIEVTNATELVQSSSTGGICDSPHQILDGENCTLIDALLGDPQCDGFQNKKWDLFVERSKAYSNCYPYDVPDYASLRSLVASSGTLEFNNESFNWTGVTQNGTSSACKRRSNKSFFSRLNWLTHLKFKYPALNVTMPNNEKFDKLYIWGVHHPGTDNDQISLYAQASGRITVSTKRSQQTVIPNIGSRPRVRDVPSRISIYWTIVKPGDILLINSTGNLIAPRGYFKIRSGKSSIMRSDAPIGKCNSECITPNGSIPNDKPFQNVNRITYGACPRYVTQNTLKLATGMRNVPEKQTRGIFGAIAGFIENGWEGMVDGWYGFRHQNSEGTGQAADLKSTQAAINQINGKLNRLIGKTNEKFHQIEKEFSEVEGRIQDLEKYVEDTKIDLWSYNAELLVALENQHTIDLTDSEMNKLFERTKKQLRENAEDMGNGCFKIYHKCDNACIGSIRNGTYDHDVYRDEALNNRFQIKGVELKSGYKDWILWISFAISCFLLCVALLGFIMWACQKGNIRCNICI

SEQ ID NO: 1815 - protein, 566 aa, Artificial Sequence; identical to SEQ ID NO: 1762
  derived and/or modified protein sequence (wt) from hemagglutinin__InfluenzaA__ABU92666

SEQ ID NO: 1816 - protein, 566 aa, Artificial Sequence; identical to SEQ ID NO: 72
  derived and/or modified protein sequence (wt) from hemagglutinin__InfluenzaA__ABU92667

SEQ ID NO: 1817 - protein, 566 aa, Artificial Sequence; identical to SEQ ID NO: 72
  derived and/or modified protein sequence (wt) from hemagglutinin__InfluenzaA__ABU92668

SEQ ID NO: 1818 - protein, 566 aa, Artificial Sequence
  derived and/or modified protein sequence (wt) from hemagglutinin__InfluenzaA__ABU92669
MKTIIALSYILCLVFAQKLPVNDNSTATLCLGHHAVPNGTLVKTITNDHIEVTNATELVQSSSTGRICDSPHQILDGENCTLIDALLGDPHCDGFQNKEWDLFVERSTAYSNCYPYDVPDYASLRSLVASSGTLEFNNESFNWTGVAQNGTSSACKRRSIKSFFSRLNWLHQLKYKYPALNVTMPNNEKFDKLYIWGVHHPSTDSDQISLYAQASGRVTVSTKRSQQTVIPNIGSRPWVRGVSSRISIYWTIVKPGDILLINSTGNLIAPRGYFKIRNGKSSIMRSNAPIGKCNSECITPNGSIPNDKPFQNVNRITYGACPRYVKQNTLKLATGMRNVPEKQTRGIFGAIAGFIENGWEGMVDGWYGFRHQNSEGTGQAADLKSTQAAINQINGKLNRLIEKTNEKFHQIEKEFSEVEGRIQDLEKYVEDTKIDLWSYNAELLVALENQHTIDLTDSEMNKLFERTRKQLRENAEDMGNGCFKIYHKCDNACIGSIRNGTYDHDVYRDEALNNRFQIKGVELKSGYKDWILWISFAISCFLLCVVLLGFIMWACQKGNIRCNICI

SEQ ID NO: 1819 - protein, 566 aa, Artificial Sequence; identical to SEQ ID NO: 72
  derived and/or modified protein sequence (wt) from hemagglutinin__InfluenzaA__ABU92670

SEQ ID NO: 1820 - protein, 566 aa, Artificial Sequence
  derived and/or modified protein sequence (wt) from hemagglutinin__InfluenzaA__ABU92671
MKTIIALSHILCLVFAQKLPVNDNSTATLCLGHHAVPNGTLVKTITNDHIEVTNATELVQSSSTGRICDIPHQILDGENCTLIDALLGDPHCDGFQNKEWDLFVERSTAYSNCYPYDVPDYASLRSLVASSGTLEFNNESFNWTGVAQNGTSSACKRRSIKSFFSRLNWLHQLKYKYPALNVTMPNNEKFDKLYIWGVHHPSTDSDQISLYAQAPGRVTVSTKRSQQTVIPNIGSRPWVRGVSSRISIYWTIVKPGDILLINSTGNLIAPRGYFKIRSGKSSIMRSNAPIGKCNSECITPNGSIPNDKPFQNVNRITYGACPRYVKQNTLKLATGMRNVPEKQTRGIFGAIAGFIENGWEGMVDGWYGFRHQNSEGTGQAADLKSTQAAINQINGKLNRLIEKTNEKFHQIEKEFSEAEGRIQDLEKYVEDTKIDLWSYNAELLVALENQHTIDLTDSEMNKLFERTRKQLRENAEDMGNGCFKIYHKCDNACIGSIRNGTYDHDVYRDEALNNRFQIKGVELKSGYKDWILWISFAISCFLLCVVLLGFIMWACQKGNIRCNICI

SEQ ID NO: 1821 - protein, 566 aa, Artificial Sequence; identical to SEQ ID NO: 72
  derived and/or modified protein sequence (wt) from hemagglutinin__InfluenzaA__ABU92672

SEQ ID NO: 1822 - protein, 566 aa, Artificial Sequence; identical to SEQ ID NO: 72
  derived and/or modified protein sequence (wt) from hemagglutinin__InfluenzaA__ABU92673

SEQ ID NO: 1823 - protein, 566 aa, Artificial Sequence
  derived and/or modified protein sequence (wt) from hemagglutinin__InfluenzaA__ABU92674
MKTIIALSYILCLVFAQKLPVNDNSTATLCLGHHAVPNGTLVKTITNDHIEVTNATELVQSSSTGRICDSPHQILDGENCTLIDALLGDPHCDGFQNKEWDLFVERRTAYSNCYPYDVPDYASLRSLVASSGTLEFNNESFNWTGVAQNGTSSACKRRSIKSFFSRLNWLHQLKYKYPALNVTMPNNEKFDKLYIWGVHHPSTDSDQISLYAQASGRVTVSTKRSQQTVIPNIGSRPWVRGVSSRISIYWTIVKPGDILLINSTGNLIAPRGYFKIRSGKSSIMRSNAPIGKCNSECITPNGSIPNDKPFQNVNRITYGACPRYVKQNTLKLATGMRNVPEKQTRGIFGAIAGFIENGWEGMVDGWYGFRHQNSEGTGQAADLKSTQAAINQINGKLNRLIEKTNEKFHQIEKEFSEVEGRIQDLEKYVEDTKIDLWSYNAELLVALENQHTIDLTDSEMNKLFERTRKQLRENAEDMGNGCFKIYHKCDNACIGSIRNGTYDHDVYRDEALNNRFQIKGVELKSGYKDWILWISFAISCFLLCVVLLGFIMWACQKGNIRCNICI

SEQ ID NO: 1824 - protein, 566 aa, Artificial Sequence
  derived and/or modified protein sequence (wt) from hemagglutinin__InfluenzaA__ABU92675
MKTIIALSYILCLVFAQKLPGNDNSTATLCLGHHAVPNGTIVKTITNDQIEVTNATELVQSSSTGGICDSPHQILDGENCTLIDALLGDPQCDGFQNKKWDLFVERSKAYSNCYPYDVPDYASLRSLIASSGTLEFNNESFNWTGVTQNGTSSACKRRSNSSFFSRLNWLTHLKFKYPALNVTMPNNEEFDKLYIWGVHHPGTDNDQISLYAQASGRITVSTKRSQQTVIPNIGSRPRVRDIPSRISIYWTIVKPGDILLINSTGNLIAPRGYFKIRSGKSSIMRSDAPIGKCNSECITPNGSIPNDKPFQNVNRITYGACPRYVKQNTLKLATGMRNVPEKQTRGIFGAIAGFIENGWEGMVDGWYGFRHQNSEGIGQAADLKSTQAAIDQINGKLNRLIGKTNEKFHQIEKEFSEVEGRIQDLEKYVEDTKIDLWSYNAELLVALENQHTIDLTDSEMNKLFERTKKQLRENAEDMGNGCFKIYHKCDNACMGSIRNGTYDHDVYRDEALNNRFQIKGVELKSGYKDWILWISFAISCFLLCVALLGFIMWACQKGNIRCNICI

SEQ ID NO: 1825 - protein, 566 aa, Artificial Sequence; identical to SEQ ID NO: 633
  derived and/or modified protein sequence (wt) from hemagglutinin__InfluenzaA__ABU92676

SEQ ID NO: 1826 - protein, 566 aa, Artificial Sequence; identical to SEQ ID NO: 1753
  derived and/or modified protein sequence (wt) from hemagglutinin__InfluenzaA__ABU92677

SEQ ID NO: 1827 - protein, 566 aa, Artificial Sequence
  derived and/or modified protein sequence (wt) from hemagglutinin__InfluenzaA__ABU92678
MKTIIALSYILCLVFAQKLPGNDNSTATLCLGHHAVPNGTIVKTITNDQIEVTNATELVQSSSTGGICDSPHQILDGENCTLIDALLGDPQCDGLQNKKWDLFVERSKAYSNCYPYDVPDYASLRSLIASSGTLEFNNESFNWTGVTQNGTSSACKRRSNNSFFSRLNWLTHLKFKYPALNVTMPNNEEFDKLYIWGVHHPGTDNDQISLYAQASGRITVSTKRSQQTVIPNIGSRPRVRDIPSRISIYWTIVKPGDILLINSTGNLIAPRGYFKIRSGKSSIMRSDAPIGNCNSECITPNGSIPNDKPFQNVNRITYGACPRYVKQNTLKLATGMRNVPEKQTRGIFGAIAGFIENGWEGMVDGWYGFRHQNSEGIGQAADLKSTQAAIDQINGKLNRLIGKTNEKFHQIEKEFSEVEGRIQDLEKYVEDTKIDLWSYNAELLVALENQHTIDLTDSEMNKLFERTKKQLRENAEDMGNGCFKIYHKCDNACIGSIRNGTYDHDVYRDEALNNRFQIKGVELKSGYKDWILWISFAISCFLLCVALLGFIMWACQKGNIRCNICI

SEQ ID NO: 1828 - protein, 566 aa, Artificial Sequence
  derived and/or modified protein sequence (wt) from hemagglutinin__InfluenzaA__ABU92680
MKTIIALSYILCLVFAQKLPGNDNSTATLCLGHHAVPNGTIVKTITNDQIEVTNATELVQSSSTGGICDSPHQILDGENCTLIDALLGDPQCDGFQNKKWDLFVERSKAYSNCYPYDVPDYASLRSLVASSGTLEFNNESFNWTGVTQNGTSSACKRRSNNSFFSRLNWLTHLKFKYPALNVTMPNNEKFDKLYIWGVHHPGTDNDQIFLYAQASGRITVSTKRSQQTVIPNIGSRPRVRNIPSRISIYWTIVKPGDILLINSTGNLIAPRGYFKIRSGKSSIMRSDAPIGKCNSECITPNGSIPNDKPFQNVNRITYGACPRYVKQNTLKLATGMRNVPEKQTRGIFGAIAGFIENGWEGMVDGWYGFRHQNSEGIGQAADLKSTQAAIDQINGKLNRLIGKTNEKFHQIEKEFSEVEGRIQDLEKYVEDTKIDLWSYNAELLVALENQHTIDLTDSEMNKLFEKTKKQLRENAEDMGNGCFKIYHKCDNACIGSIRNGTYDHDVYRDEALNNRFQIKGVELKSGYKDWILWISFAISCFLLCVALLGFIMWACQKGNIRCNICI

SEQ ID NO: 1829 - protein, 566 aa, Artificial Sequence; identical to SEQ ID NO: 1757
  derived and/or modified protein sequence (wt) from hemagglutinin__InfluenzaA__ABU92681

SEQ ID NO: 1830 - protein, 566 aa, Artificial Sequence; identical to SEQ ID NO: 73
  derived and/or modified protein sequence (wt) from hemagglutinin__InfluenzaA__ABU92682

SEQ ID NO: 1831 - protein, 566 aa, Artificial Sequence; identical to SEQ ID NO: 1762
  derived and/or modified protein sequence (wt) from hemagglutinin__InfluenzaA__ABU92683

SEQ ID NO: 1832 - protein, 566 aa, Artificial Sequence
  derived and/or modified protein sequence (wt) from hemagglutinin__InfluenzaA__ABU92684
MKTIIALSYILCLVFAQKLPGNDNSTATLCLGHHAVPNGTIVKTITNDQIEVTNATELVQISSTGGICDSPHQILDGENCTLIDALLGDPQCDGFQNKKWDLFIERSKAYSNCYPYDVPDYASLRSLVASSGTLEFNNESFDWTGVTQNGTSSACKRRSNKSFFSRLNWLTHLKYKYPALNVTMPNNEKFDKLYIWGVHHPGTDSDQISLYAQAPGRITVSTKRSQQTVIPNIGSRPRVRDVSSRISIYWTIVKPGDILLINSTGNLIAPRGYFKIRSGKSSIMRSDAPIGKCNSECITPNGSIPNDKPFQNVNRITYGACPRYVKQNTLKLATGMRNVPEKQTRGIFGAIAGFIENGWEGMVDGWYGFRHQNSEGTGQAADLKSTQAAINQINGKLNRLIGKTNEKFHQIEKEFSEVEGRIQDLEKYVEDTKIDLWSYNAELLVALENQHTIDLTDSEMNKLFERTKKQLRENAEDMGNGCFKIYHKCDNACIGSIRNGTYDHDVYRDEALNNRFQIKGVELKSGYKDWILWISFAISCFLLCVALLGFIMWACQKGNIRCNICI

SEQ ID NO: 1833 - protein, 566 aa, Artificial Sequence
  derived and/or modified protein sequence (wt) from hemagglutinin__InfluenzaA__ABU92685
MKTIIALSYILCLVFAQKLPGNDNSTATLCLGHHAVPNGTIVKTITNDQIEVTNATELVQISSTGGICDSPHQILDGENCTLIDALLGDPQCDGFQNKKWDLFVERSKAYSNCYPYDVPDYASLRSLVASSGTLEFNNESFDWTGVTQNGTSSACKRRSNKSFFSRLNWLTHLKYKYPALNVTMPNNEKFDKLYIWGVHHPGTDSDQISLYAQASGRITVSTKRSQQTVIPNIGSRPRVRDVSSRISIYWTIVKPGDILLINSTGNLIAPRGYFKIRSGKSSIMKSDAPIGKCNSECITPNGSIPNDKPFQNVNRITYGACPRYVKQNTLKLATGMRNVPEKQTRGIFGAIAGFIENGWEGMVDGWYGFRHQNSEGTGQAADLKSTQAAINQINGKLNRLIGKTNEKFHQIEKEFSEVEGRIQDLEKYVEDTKIDLWSYNAELLVALENQHTIDLTDSEMNKLFERTKKQLRENAEDMGNGCFKIYHKCDNACIGSIRNGTYDHDVYRDEALNNRFQIKGVELKSGYKDWILWISFAISCFLLCVALLGFIMWACQKGNIRCNICI

SEQ ID NO: 1834 - protein, 566 aa, Artificial Sequence; identical to SEQ ID NO: 1762
  derived and/or modified protein sequence (wt) from hemagglutinin__InfluenzaA__ABU92686

SEQ ID NO: 1835 - protein, 566 aa, Artificial Sequence; identical to SEQ ID NO: 1762
  derived and/or modified protein sequence (wt) from hemagglutinin__InfluenzaA__ABU92687

SEQ ID NO: 1836 - protein, 566 aa, Artificial Sequence; identical to SEQ ID NO: 1795
  derived and/or modified protein sequence (wt) from hemagglutinin__InfluenzaA__ABU92688

SEQ ID NO: 1837 - protein, 566 aa, Artificial Sequence; identical to SEQ ID NO: 1762
  derived and/or modified protein sequence (wt) from hemagglutinin__InfluenzaA__ABU92689

SEQ ID NO: 1838 - protein, 566 aa, Artificial Sequence
  derived and/or modified protein sequence (wt) from hemagglutinin__InfluenzaA__ABU92691
MKTIIALSYILCLVFAQKLPGNDNSTATLCLGHHAVPNGTIVKTITNDQIEVTNATELVQISSTGGICDSPHQILDGENCTLIDALLGDPQCDGFQNKKWDLFVERSKAYSNCYPYDVPDYASLRSLVASSGTLEFNNESFDWTGVTQNGTSSACKRRSNKSFFSRLNWLTHLKYKYPALNVTMPNNEKFDKLYIWGVHHPGTDSDQISLYAQASGRITVSTKRSQQTVIPNIGSRPRVRDVSSRISIYWTIVKPGDILLINSTGNLIAPRGYFKIRSGKSSVMRSDAPIGKCNSECITPNGSIPNDKPFQNVNRITYGACPRYVKQNTLKLATGMRNVPEKQTRGIFGAIAGFIENGWEGMVDGWYGFRHQNSEGTGQAADLKSTQAAINQINGKLNRLIGKTNEKFHQIEKEFSEVEGRIQDLEKYVEDTKIDLWSYNAELLVALENQHTIDLTDSEMNKLFERTKKQLRENAEDIGNGCFKIYHKCDNACIGSIRNGTYDHNVYRDEALNNRFQIKGVELKSGYKDWILWISFAISCFLLCVALLGFIMWACQKGNIRCNICI

SEQ ID NO: 1839 - protein, 566 aa, Artificial Sequence; identical to SEQ ID NO: 690
  derived and/or modified protein sequence (wt) from hemagglutinin__InfluenzaA__ABU92692

SEQ ID NO: 1840 - protein, 566 aa, Artificial Sequence
  derived and/or modified protein sequence (wt) from hemagglutinin__InfluenzaA__ABU92693
MKAIIALSYILCLVFAQKLPGNDNSTATLCLGHHAVPNGTIVKTITNDQIEVTNATELVQISSTGEICDSPHQILDGENCTLIDALLGDPQCDGFQNKKWDLFVERSKAYSNCYPYDVPDYASLRSLVASSGTLEFNNESFDWTGVTQNGTSSACKRRSDKSFFSRLNWLTHLKYKYPALNVTMPNNEKFDKLYIWGVHHPGTDSDQISLYAQASGRITVSTKRSQQTVIPNIGSRPRVRDVSSRISIYWTIVKPGDILLINSTGNLIAPRGYFKIRSGKSSIMRSDAPIGKCNSECITPNGSIPNDKPFQNVNRITYGACPRYVKQNTLKLATGMRNVPEKQTRGIFGAIAGFIENGWEGMVDGWYGFRHQNSEGTGQAADLKSTQAAINQINGKLNRLIGKTNEKFHQIEKEFSEVEGRIQDLEKYVEDTKIDLWSYNAELLVALENQHTIDLTDSEMNKLFERTKKQLRENAEDMGNGCFKIYHKCDNACIGSIRNGTYDHDVYRDEALNNRFQIKGVELKSGYKDWILWISFAISCFLLCVALLGFIMWACQKGNIRCNICI

SEQ ID NO: 1841 - protein, 566 aa, Artificial Sequence
  derived and/or modified protein sequence (wt) from hemagglutinin__InfluenzaA__ABU92694
MKTIIALSYILCLVFAQKLPGNDNSTATLCLGHHAVPNGTIVKTITNDQIEVTNATELVQSSSTGGICDSPHQILDGENCTLIDALLGDPQCDGFQNKKWDLFVERSKAYSNCYPYDVPDYASLRSLVASSGTLEFNNESFNWTGVTQNGTSSACKRRSNNSFFSRLNWLTHLKFKYPALNVTMPNNEKFDKLYIWGVHHPGTDNDQISLYAQASGRITVSTKRSQQTVIPNIGSRPRVRDIPSRISIYWTIVKPGDILLINSTGNLIAPRGYFKIRSGKSSIMRSDAPIGKCNSECITPNGSIPNDKPFQNVNRITYGACPRYVKQNTLKLATGMRNVPEKQTRGIFGAIAGFIENGWEGMVDGWYGFRHQNSEGIGQAADLKSTQAAINQINGKLNRLIGKTNEKFHQIEKEFSEVEGRIQDLEKYVEDTKVDLWSYNAELLVALENQHTIDLTDSEMNKLFERTKKQLRENAEDMGNGCFKIYHKCDNACIGSIRNGTYDHDVYRDEALNNRFQIKGVELKSGYKDWILWISFAISCFLLCVALLGFIMWACQKGNIRCNICI

SEQ ID NO: 1842 - protein, 566 aa, Artificial Sequence; identical to SEQ ID NO: 1753
  derived and/or modified protein sequence (wt) from hemagglutinin__InfluenzaA__ABU92695

SEQ ID NO: 1843 - protein, 566 aa, Artificial Sequence
  derived and/or modified protein sequence (wt) from hemagglutinin__InfluenzaA__ABU92696
MKTIIALGYILCLVFAQKLPGNDNSTATLCLGHHAVPNGTIVKTITNDQIEVTNATELVQSSSTGGICDSPHQILDGENCTLIDALLGDPQCDGFQNKKWDLFVERSKAYSNCYPYDVPDYASLRSLIASSGTLEFNNESFNWTGVTQNGTSSACKRRSNSSFFSRLNWLTHLKFKYPALNVTMPNNEEFDKLYIWGVHHPGTDNDQISLYAQASGRITVSTKRSQQTVIPNIGSRPRVRDIPSRISIYWTIVKPGDILLINSTGNLIAPRGYFKIRSGKSSIMRSDAPIGKCNSECITPNGSIPNDKPFQNVNRITYGACPRYVKQNTLKLATGMRNVPEKQTRGIFGAIAGFIENGWEGMVDGWYGFRHQNSEGIGQAADLKSTQAAIDQINGKLNRLIGKTNEKFHQIEKEFSEVEGRIQDLEKYVEDTKIDLWSYNAELLVALENQHTIDLTDSEMNKLFERTKKQLRENAEDMGNGCFKIYHKCDNACIGSIRNGTYDHDVYRDEALNNRFQIKGVELKSGYKDWILWISFAISCFLLCVALLGFIMWACQKGNIRCNICI

SEQ ID NO: 1844 - protein, 566 aa, Artificial Sequence; identical to SEQ ID NO: 633
  derived and/or modified protein sequence (wt) from hemagglutinin__InfluenzaA__ABU92697

SEQ ID NO: 1845 - protein, 566 aa, Artificial Sequence; identical to SEQ ID NO: 243
  derived and/or modified protein sequence (wt) from hemagglutinin__InfluenzaA__ABU92698

SEQ ID NO: 1846 - protein, 566 aa, Artificial Sequence
  derived and/or modified protein sequence (wt) from hemagglutinin__InfluenzaA__ABU92699
MKTIIALSYILCLVFAQKLPGNDNSTATLCLGHHAVPNGTIVKTITNDQIEVTNATELVQSSSTGGICDSPHQILDGENCTLIDALLGDPQCDGFQNKKWDLFVERSKAYSNCYPYDVPDYASLRSLVASSGTLEFNNESFNWAGVTQNGTSSACKRRSNNSFFSRLNWLTHLKFKYPALNVTMPNNEKFDKLYIWGVHHPGTDNDQIFLYAQASGRITVSTKRSQQTVIPNIGSRPRVRNIPSRISIYWTIVKPGDILLINSTGNLIAPRGYFKIRSGKSSIMRSDAPIGKCNSECITPNGSIPNDKPFQNVNRITYGACPRYVKQNTLKLATGMRNVPEKQTRGIFGAIAGFIENGWEGMVDGWYGFRHQNSEGIGQAADLKSTQAAIDQINGKLNRLIGKTNEKFHQIEKEFSEVEGRIQDLEKYVEDTKIDLWSYNAELLVALENQHTIDLTDSEMNKLFEKTKKQLRENAEDMGNGCFKIYHKCDNACIGSIRNGTYDHDVYRDEALNNRFQIKGVELKSGYKDWILWISFAISCFLLCVALLGFIMWACQKGNIRCNICI

SEQ ID NO: 1847 - protein, 566 aa, Artificial Sequence
  derived and/or modified protein sequence (wt) from hemagglutinin__InfluenzaA__ABU92700
MKTIIALSYILCLVFAQKLPENDNSTATLCLGHHAVPNGTIVKTITNDQIEVTNATELVQSSSTGGICDSPHQILDGENCTLIDALLGDPQCDGFQNKKWDLFVERSKAYSNCYPYDVPDYASLRSLVASSGTLEFNNESFNWTGVTQNGTSSACKRRSNNSFFSRLNWLTHLKFKYPALNVTMPNNERFDKLYIWGVHHPGTDNDQIFLYAQASGRITVSTKRSQQTVIPNIGSRPRVRNIPSRISIYWTIVKPGDILLINSTGNLIAPRGYFKIRSGKSSIMRSDAPIGKCNSECITPNGSIPNDKPFQNVNRITYGACPRYVKQNTLKLATGMRNVPEKQTRGIFGAIAGFIENGWEGMVDGWYGFRHQNSEGIGQAADLKSTQAAIDQINGKLNRLIGKTNEKFHQIEKEFSEVEGRIQDLEKYVEDTKIDLWSYNAELLVALENQHTIDLTDSEMNKLFEKTKKQLRENAEDMGNGCFKIYHKCDNACIGSIRNGTYDHDVYRDEALNNRFQIKGVELKSGYKDWILWISFAISCFLLCVALLGFIMWACQKGNIRCNICI

SEQ ID NO: 1848 - protein, 566 aa, Artificial Sequence
  derived and/or modified protein sequence (wt) from hemagglutinin__InfluenzaA__ABU92701
MKTIIALSYILCLVFAQKLPENDNSTATLCLGHHAVPNGTIVKTITNDQIEVTNATELVQSSSTGGICDSPHQILDGENCTLIDALLGDPQCDGFQNKKWDLFVERSKAYSNCYPYDVPDYASLRSLVASSGTLEFNNESFNWTGVTQNGTSSACKRRSNNSFFSRLNWLTHLKFKYPALNVTMPNNERFDKLYIWGVHHPGTDNDQIFLYAQASGRITVSTKRSQQTVIPNIGSRPRVRNIPSRISIYWTIVKPGDILLINSTGNLIAPRGYFKIRSGKSSIMRSDAPIGKCNSECITPNGSIPNDKPFQNVNRITYGACPRYVKQNTLKLATGMRNVPEKQTRGIFGAIAGFIENGWEGMVDGWYGFRHQNSEGIGQAADLKSTQAAIDQINGKLNRLIGKTNEKFHQIEKEFSEVEGRIQDLEKYVEDTKIDLWSYNAELLVALENQHTIDLTDSEMNKLFEKTKKQLRENAEDMGNGCFKIYHKCDNACIGSIRNGTYDHDVYRDEALNNRLQIKGVELKSGYKDWILWISFAISCFLLCVALLGFIMWACQKGNIRCNICI

SEQ ID NO: 1849 - protein, 566 aa, Artificial Sequence; identical to SEQ ID NO: 612
  derived and/or modified protein sequence (wt) from hemagglutinin__InfluenzaA__ABU92702

SEQ ID NO: 1850 - protein, 566 aa, Artificial Sequence; identical to SEQ ID NO: 1828
  derived and/or modified protein sequence (wt) from hemagglutinin__InfluenzaA__ABU92703

SEQ ID NO: 1851 - protein, 566 aa, Artificial Sequence
  derived and/or modified protein sequence (wt) from hemagglutinin__InfluenzaA__ABU92704
MKTIIALSYILCLVFAQKLPGNDNSTATLCLGHHAVPNGTIVKTITNDQIEVTNATELVQSSSTGGICDSPHQILDGENCTLIDALLGDPQCDGFQNKKWDLFVERNKAYSNCYPYDVPDYASLRSLVASSGTLEFNNESFNWTGVTQNGTSSACKRRSNNSFFSRLNWLTHLKFKYPALNVTMPNNEKFDKLYIWGVHHPGTDNDQIFLYAQASGRITVSTKRSQQTVIPNIGSRPRVRNIPSRISIYWTIVKPGDILLINSTGNLIAPRGYFKIRSGKSSIMRSDAPIGKCNSECITPNGSIPNDKPFQNVNRITYGACPRYVKQNTLKLATGMRNVPEKQTRGIFGAIAGFIENGWEGMVDGWYGFRHQNSEGIGQAADLKSTQAAIDQINGKLNRLIGKTNEKFHQIEKEFSEVEGRIQDLEKYVEDTKIDLWSYNAELLVALENQHTIDLTDSEMNKLFEKTKKQLRENAEDMGNGCFKIYHKCDNACIGSIRNGTYDHDVYRDEALNNRFQIKGVELKSGYKDWILWISFAISCFLLCVALLGFIMWACQKGNIRCNICI

SEQ ID NO: 1852 - protein, 566 aa, Artificial Sequence
  derived and/or modified protein sequence (wt) from hemagglutinin__InfluenzaA__ABU92705
MKTIIALSYILCLVFAQKLPGNDNSTATLCLGHHAVPNGTIVKTITNDQIEVTNATELVQSSSTGGICDSPHQILDGENCTLIDALLGDPQCDGFQNKKWDLFVERSKAYSNCYPYDVPDYASLRSLIASSGTLEFNNESFNWTGVTQNGTSSACKRRSNNSFFSRLNWLTHLKFKYPALNVTMPNNEEFDKLYIWGVHHPGTDNDQISLYAQAPGRITVSTKRSQQTVIPNIGSRPRVRDIPSRISIYWTIVKPGDILLINSTGNLIAPRGYFKIRSGKSSIMRSDAPIGKCKSECITPNGSIPNDKPFQNVNRITYGACPRYVKQNTLKLATGMRNVPEKQTRGIFGAIAGFIENGWEGMVDGWYGFRHQNSEGIGQAADLKSTQAAIDQINGKLNRLIGKTNEKFHQIEKEFSEVEGRIQDLEKYVEDTKIDLWSYNAELLVALENQHTIDLTDSEMNKLFERTKKQLRENAEDMGNGCFKIYHKCDNACIGSIRNGTYDHDVYRDEALNNRFRIKSVELKSGYKDWILWISFAISCFLLCVALLGFIMWACQKGNIRCNICI

SEQ ID NO: 1853 - protein, 566 aa, Artificial Sequence; identical to SEQ ID NO: 73
  derived and/or modified protein sequence (wt) from hemagglutinin__InfluenzaA__ABU92706

SEQ ID NO: 1854 - protein, 566 aa, Artificial Sequence; identical to SEQ ID NO: 1762
  derived and/or modified protein sequence (wt) from hemagglutinin__InfluenzaA__ABU92707

SEQ ID NO: 1855 - protein, 566 aa, Artificial Sequence; identical to SEQ ID NO: 1762
  derived and/or modified protein sequence (wt) from hemagglutinin__InfluenzaA__ABU92708

SEQ ID NO: 1856 - protein, 566 aa, Artificial Sequence
  derived and/or modified protein sequence (wt) from hemagglutinin__InfluenzaA__ABU92709
MKTIIALSYILCLVFAQKLPGNDNSTATLCLGHHAVPNGTIVKTITNDQIEVTNATELVQSSSTGGICDSPHQILDGENCTLIDALLGDPQCDGFQNKKWDLFVERSKAYSNCYPYDVPDYASLRSLVASSGTLEFNNESFNWAGVTQNGTSSACKRRSNKSFFSRLNWLTHLKYKYPALNVTMPNNEKFDKLYIWGVHHPGTDSDQISLYAQASGRITVSTKRSQQTVIPNIGSRPRVRDVSSRISIYWTIVKPGDILLINSTGNLIAPRGYFKIRSGKSSIMRSDAPIGKCNSECITPNGSIPNDKPFQNVNRITYGACPRYVKQNTLKLATGMRNVPEKQTRGIFGAIAGFIENGWEGMVDGWYGFRHQNSEGTGQAADLKSTQAAINQINGKLNRLIGKTNEKFHQIEKEFSEVEGRIQDLEKYVEDTKIDLWSYNAELLVALENQHTIDLTDSEMNKLFERTKKQLRENAEDMGNGCFKIYHKCDNACIESIRNGTYDHDVYRDEALNNRFQIKGVELKSGYKDWILWISFAISCFLLCVALLGFIMWACQKGNIRCNICI

SEQ ID NO: 1857 - protein, 566 aa, Artificial Sequence; identical to SEQ ID NO: 51
  derived and/or modified protein sequence (wt) from hemagglutinin__InfluenzaA__ABU92710

SEQ ID NO: 1858 - protein, 566 aa, Artificial Sequence; identical to SEQ ID NO: 73
  derived and/or modified protein sequence (wt) from hemagglutinin__InfluenzaA__ABU92711

SEQ ID NO: 1859 - protein, 566 aa, Artificial Sequence; identical to SEQ ID NO: 73
  derived and/or modified protein sequence (wt) from hemagglutinin__InfluenzaA__ABU92712

SEQ ID NO: 1860 - protein, 566 aa, Artificial Sequence; identical to SEQ ID NO: 1762
  derived and/or modified protein sequence (wt) from hemagglutinin__InfluenzaA__ABU92713

SEQ ID NO: 1861 - protein, 566 aa, Artificial Sequence; identical to SEQ ID NO: 1762
  derived and/or modified protein sequence (wt) from hemagglutinin__InfluenzaA__ABU92714

SEQ ID NO: 1862 - protein, 566 aa, Artificial Sequence
  derived and/or modified protein sequence (wt) from hemagglutinin__InfluenzaA__ABU92715
MKTIIALSYILCLVFAQKLPGNDNSTATLCLGHHAVPNGTIVKTITNDQIEVTNATELVQISSTGEICDSPHQILDGENCTLIDALLGDPQCDGFQNKKWDLFVERSKAYSNCYPYDVPDYASLRSLVASSGTLEFNNESFDWTGVTQNGTSSACKRRSNKSFFSRLNWLTHLKYKYPALNVTMPNNEKFEKLYIWGVHHPGTDSDQINLYAQASGRITVSTKRSQQTVIPNIGSRPRVRDVSSRISIYWTIVKPGDILLINSTGNLIAPRGYFKIRSGKSSIMRSDAPIGKCNSECITPNGSIPNDKPFQNVNRITYGACPRYVKQNTLKLATGMRNVPEKQTRGIFGAIAGFIENGWEGMVDGWYGFRHQNSEGTGQAADLKSTQAAINQINGKLNRLIGKTNEKFHQIEKEFSEVEGRIQDLEKYVEDTKIDLWSYNAELLVALENQHTIDLTDSEMNKLFERTKKQLRENAEDMGNGCFKIYHKCDNACIGSIRNGTYDHDVYRDEALNNRFQIKGVELKSGYKDWILWISFAISCFLLCVALLGFIMWACQKGNIRCNICI

SEQ ID NO: 1863 - protein, 566 aa, Artificial Sequence; identical to SEQ ID NO: 1762
  derived and/or modified protein sequence (wt) from hemagglutinin__InfluenzaA__ABU92716

SEQ ID NO: 1864 - protein, 566 aa, Artificial Sequence; identical to SEQ ID NO: 1762
  derived and/or modified protein sequence (wt) from hemagglutinin__InfluenzaA__ABU92717

SEQ ID NO: 1865 - protein, 566 aa, Artificial Sequence; identical to SEQ ID NO: 73
  derived and/or modified protein sequence (wt) from hemagglutinin__InfluenzaA__ABU92718

SEQ ID NO: 1866 - protein, 566 aa, Artificial Sequence; identical to SEQ ID NO: 73
  derived and/or modified protein sequence (wt) from hemagglutinin__InfluenzaA__ABU92719

SEQ ID NO: 1867 - protein, 566 aa, Artificial Sequence
  derived and/or modified protein sequence (wt) from hemagglutinin__InfluenzaA__ABU92720
MKTIIALSYILCLVFAQKLPGNDNSTATLCLGHHAVPNGTIVKTITNDQIEVTNATELVQISSTGEICDSPHQILDGENCTLIDALLGDPQCDGFQNKKWDLFVERSKAYSNCYPYDVPDYSSLRSLVASSGTLEFNNESFDWTGVTQNGTSSACKRRSDKSFFSRLNWLTHLKYKYPALNVTMPNNEKFDKLYIWGVHHPGTDSDQISLYAQASGRITVSTKRSQQTVIPNIGSRPRVRDVSSRISIYWTIVKPGDILLINSTGNLIAPRGYFKIRSGKSSIMRSDAPIGKCNSECITPNGSIPNDKPFQNVNRITYGACPRYVKQNTLKLATGMRNVPEKQTRGIFGAIAGFIENGWEGMVDGWYGFRHQNSEGTGQAADLKSTQAAINQINGKLNRLIGKTNEKFHQIEKEFSEVEGRIQDLEKYVEDTKIDLWSYNAELLVALENQHTIDLTDSEMNKLFERTKKQLRENAEDMGNGCFKIYHKCDNACIGSIRNGTYDHDVYRDEALNNRFQIKGVELKSGYKDWILWISFAISCFLLCVALLGFIMWACQKGNIRCNICI

SEQ ID NO: 1868 - protein, 566 aa, Artificial Sequence
  derived and/or modified protein sequence (wt) from hemagglutinin__InfluenzaA__ABU92721
MKTIIALSYILCLVFAQKLPGNDNSTATLCLGHHAVPNGTIVKTITNDQIEVTNATELVQISSTGEICDSPHQILDGENCTLIDALLGDPQCDGFQNKKWDLFVERSKAYSNCYPYDVPDYASLRSLVASSGTLEFNNESFDWTGVTQNGTSSACKRRSDKSFFSRLNWLTHLKYKYPALNVTMPNNEKFDKLYIWGVHHPGTDSDQISLYAQASGRITVSTKRSQQTVTPNIGSRPRVRDVSSRISIYWTIVKPGDILLINSTGNLIAPRGYFKIRSGKSSIMRSDAPIGKCNSECITPNGSIPNDKPFQNVNRITYGACPRYVKQNTLKLATGMRNVPEKQTRGIFGAIAGFIENGWEGMVDGWYGFRHQNSEGTGQAADLKSTQAAINQINGKLNRLIGKTNEKFHQIEKEFSEVEGRIQDLEKYVEDTKIDLWSYNAELLVALENQHTIDLTDSEMNKLFERTKKQLRENAEDMGNGCFKIYHKCDNACIGSIRNGTYDHDVYRDEALNNRFQIKGVELKSGYKDWILWISFAISCFLLCVALLGFIMWACQKGNIRCNICI

SEQ ID NO: 1869 - protein, 566 aa, Artificial Sequence; identical to SEQ ID NO: 1753
  derived and/or modified protein sequence (wt) from hemagglutinin__InfluenzaA__ABU92722

SEQ ID NO: 1870 - protein, 566 aa, Artificial Sequence; identical to SEQ ID NO: 73
  derived and/or modified protein sequence (wt) from hemagglutinin__InfluenzaA__ABU92723

SEQ ID NO: 1871 - protein, 566 aa, Artificial Sequence; identical to SEQ ID NO: 1856
  derived and/or modified protein sequence (wt) from hemagglutinin__InfluenzaA__ABU92724

SEQ ID NO: 1872 - protein, 566 aa, Artificial Sequence
  derived and/or modified protein sequence (wt) from hemagglutinin__InfluenzaA__ABU92725
MKTIIALSYILCLVFAQKLPGNDNSTATLCLGHHAVPNGTIVKTITNDQIEVTNATELVQSSSTGGICDSPHQILDGENCTLIDALLGDPQCDGFQNKKWDLFVERSKAYSNCYPYDVPDYASLRSLVASSGTLEFNNESFNWTGVTQNGTSSACKRRSNKSFFSRLNWLTHLKYKYPALNVTMPNNEKFDKLYIWGVHHPGTDSDQINLYAQASGRITVSTKRSQQTVIPNIGSRPRVRDVPSRISIYWTIVKPGDLLLINSTGNLIAPRGYFKIRSGKSSIMRSDAPIGKCNSECITPNGSIPNDKPFQNVNRITYGACPRYVKQNTLKLATGMRNVPEKQTRGIFGAIAGFIENGWEGMVDGWYGFRHQNSEGTGQAADLKSTQAAINQINGKLNRLIGKTNEKFHQIEKEFSEVEGRIQDLEKYVEDTKIDLWSYNAELLVALENQHTIDLTDSEMNKLFERTKKQLRENAEDMGNGCFKIYHKCDNACIGSIRNGTYDHDVYRDEALNNRFQIKGVELKSGYKDWILWISFAISCFLLCVALLGFIMWACQKGNIRCNICI

SEQ ID NO: 1873 - protein, 566 aa, Artificial Sequence; identical to SEQ ID NO: 1856
  derived and/or modified protein sequence (wt) from hemagglutinin__InfluenzaA__ABU92726

SEQ ID NO: 1874 - protein, 566 aa, Artificial Sequence
  derived and/or modified protein sequence (wt) from hemagglutinin__InfluenzaA__ABU92727
MKTIIALSYILCLVFAQKLPGNDNSTATLCLGHHAVPNGTIVKTITNDQIEVTNATELVQSSSTGGICDSPHQILDGENCTLIDALLGDPQCDGFQNKKWDLFVERSKAYSNCYPYDVPDYASLRSLIASSGTLEFNNESFNWTGVTQNGTSSACKRRSNSSFFSRLNWLTHLKFKYPALNVTMPNNEDFDKLYIWGVHHPGTDNDQISLYAQASGRITVSTKRSQQTVIPNIGSRPRVRDIPSRISIYWTIVKPGDILLINSTGNLIAPRGYFKIRSGKSSIMRSDAPIGKCNSECITPNGSIPNDKPFQNVNRITYGACPRYVKQNTLKLATGMRNVPEKQTRGIFGAIAGFIENGWEGMVDGWYGFRHQNSEGIGQAADLKSTQAAIDQINGKLNRLIGKTNEKFHQIEKEFSEVEGRIQDLEKYVEDTKIDLWSYNAELLVALENQHTIDLTDSEMNKLFERTKKQLRENAEDMGNGCFKIYHKCDNACIGSIRNGTYDHDVYRDEALNNRFQIKGVELKSGYKDWILWISFAISCFLLCVALLGFIMWACQKGNIRCNICI

SEQ ID NO: 1875 - protein, 566 aa, Artificial Sequence
  derived and/or modified protein sequence (wt) from hemagglutinin__InfluenzaA__ABU92728
MKTIIALSYILCQVFAQKLPGNDNSTATLCLGHHAVPNGTIVKTITNDQIEVTNATELVQISSTGEICDSPHQILDGENCTLIDALLGDPQCDGFQNKKWDLFVERSKAYSNCYPYDVPDYASLRSLVASSGTLEFNNESFDWTGVTQNGTSSACKRRSDKSFFSRLNWLTHLKYKYPALNVTMPNNEKFDKLYIWGVHHPGTDNDQISLYAQASGRITVSTKRSQQTVIPNIGSRPRVRDVSSRISIYWTIVKPGDILLINSTGNLIAPRGYFKIRSGKSSIMRSDAPIGKCNSECITPNGSIPNDKPFQNVNRITYGACPRYVKQNTLKLATGMRNVPEKQTRGIFGAIAGFIENGWEGMVDGWYGFRHQNSEGTGQAADLKSTQAAINQINGKLNRLIGKTNEKFHQIEKEFSEVEGRIQDLEKYVEDTKIDLWSYNAELLVALENQHTIDLTDSEMNKLFERTKKQLRENAEDMGNGCFKIYHKCDNACIGSIRNGTYDHDVYRDEALNNRFQIKGVELKSGYKDWILWISFAISCFLLCVALLGFIMWACQKGNIRCNICI

SEQ ID NO: 1876 - protein, 566 aa, Artificial Sequence; identical to SEQ ID NO: 1875
  derived and/or modified protein sequence (wt) from hemagglutinin__InfluenzaA__ABU92729

SEQ ID NO: 1877 - protein, 566 aa, Artificial Sequence; identical to SEQ ID NO: 1753
  derived and/or modified protein sequence (wt) from hemagglutinin__InfluenzaA__ABU92730

SEQ ID NO: 1878 - protein, 566 aa, Artificial Sequence
  derived and/or modified protein sequence (wt) from hemagglutinin__InfluenzaA__ABU92731
MKTIIALSYILCLVFAQKLPGNDNSTATLCLGHHAVPNGTIVKTITNDQIEVTNATELVQSSSTGGICDSPHQILDGENCTLIDALLGDPQCDGFQNKKWDLFVERSKAYSNCYPYDVPDYASLRSLIASSGTLEFNNESFNWTGVTQNGTSSACKRRSNSSFFSRLNWLTHLKFKYPALNVTMPNNEEFDKLYVWGVHHPGTYNDQISLYAQASGRITVSTKRSQQTVIPNIGSRPRVRDIPSRISIYWTIVKPGDILLINSTGNLIAPRGYFKIRSGKSSIMRSDAPIGKCNSECITPNGSIPNDKPFQNVNRITYGACPRYVKQNTLKLATGMRNVPEKQTRGIFGAIAGFIENGWEGMVDGWYGFRHQNSEGIGQAADLKSTQAAIDQINGKLNRLIGKTNEKFHQIEKEFSEVEGRIQDLEKYVEDTKIDLWSYNAELLVALENQHTIDLTDSEMNKLFERTKKQLRENAEDMGNGCFKIYHKCDNACIGSIRNGTYDHDVYRDEALNNRFQIKGVELKSGYKDWILWISFAISCFLLCVALLGFIMWACQKGNIRCNICI

SEQ ID NO: 1879 - protein, 566 aa, Artificial Sequence
  derived and/or modified protein sequence (wt) from hemagglutinin__InfluenzaA__ABU92732
MKTIIALSYILCLVFAQKLPGNDNSTATLCLGHHAVPNGTIVKTITNDQIEVTNATELVQSSSTGGICDSPHQILDGENCTLIDALLGDPQCDGFQNKKWDLFVERSKAYSNCYPYDVPDYASLRSLIASSGTLEFNNESFNWTGVTQNGTSSACKRRSNSSFFSRLNWLTHLKFKYPALNVTMPNNEEFDKLYIWGVHHPGTYNDQISLYAQASGRITVSTKRSQQTVIPNIGSRPRVRDIPSRISIYWTIVKPGDILLINSTGNLIAPRGYFKIRSGKSSIMRSDAPIGKCNSECITPNGSIPNDKPFQNVNRITYGACPRYVKQNTLKLATGMRNVPEKQTRGIFGAIAGFIENGWEGMVDGWYGFRHQNSEGIGQAADLKSTQAAIDQINGKLNRLIGKTNEKFHQIEKEFSEVEGRIQDLEKYVEDTKIDLWSYNAELLVALENQHTIDLTDSEMNKLFERTKKQLRENAEDMGNGCFKIYHKCDNACIGSIRNGTYDHDVYRDEALNNRFQIKGVELKSGYKDWILWISFAISCFLLCVVLLGFIMWACQKGNIRCNICI

SEQ ID NO: 1880 - protein, 566 aa, Artificial Sequence
  derived and/or modified protein sequence (wt) from hemagglutinin__InfluenzaA__ABU92733
MKTIIALSYILCLVFAQKLPGNDNSTATLCLGHHAVPNGTIVKTITNDQIEVTNATELVQSSSTGGICDSPHQILDGENCTLIDALLGDPQCDGFQNKKWDLFIERSKAYSNCYPYDVPDYASLRSLVASSGTLEFNNESFNWTGVTQNGTSSACKRRSNNSFFSRLNWLTHLKFKYPALNVTMPNNEKFDKLYIWGVHHPGTDNDQISLYAQASGRITVSTKRSQQTVIPNIGSRPRVRDIPSRISIYWTIVKPGDILLINSTGNLIAPRGYFKIRSGKSSIMRSDAPIGKCNSECITPNGSIPNDKPFQNVNRITYGACPRYVKQNTLKLATGMRNVPEKQTRGIFGAIAGFIENGWEGMVDGWYGFRHQNSEGIGQAADLKSTQAAINQINGKLNRLIGKTNEKFHQIEKEFSEVEGRIQDLEKYVEDTKVDLWSYNAELLVALENQHTIDLTDSEMNKLFERTKKQLRENAEDMGNGCFKIYHKCDNACIGSIRNGTYNHDVYRDEALNNRFQIKGVELKSGYKDWILWISFAISCFLLCVALLGFIMWACQKGNIRCNICI

SEQ ID NO: 1881 - protein, 566 aa, Artificial Sequence; identical to SEQ ID NO: 1753
  derived and/or modified protein sequence (wt) from hemagglutinin__InfluenzaA__ABU92734

SEQ ID NO: 1882 - protein, 566 aa, Artificial Sequence
  derived and/or modified protein sequence (wt) from hemagglutinin__InfluenzaA__ABU92735
MKTIIALSYILCLVFAQKLPGNDNSTATLCLGHHAVPNGTIVKTITNDQIEVTNATELVQSSSTGGICGSPHQILDGENCTLIDALLGDPQCDGFQNKKWDLFVERSKAYSNCYPYDVPDYASLRSLVASSGTLEFNNESFNWTGVTQNGTSSACKRRSNNSFFSRLNWLTHLKFKYPALNVTMPNNEKFDKLYIWGVHHPGTDNDQISLYAQAPARITVSTKRSQQTVIPNIGSRPRVRDIPSRISIYWTIVKPGDILLINSTGNLIAPRGYFKILSGKSSIMRSDAPIGKCNSECITPNGSIPNDKPFQNVNRITYGACPRYVKQNTLKLATGMRNVPEKQTRGIFGAIAGFIENGWEGMVDGWYGFRHQNSEGIGQAADLKSTQAAINQINGKLNRLIGKTNEKFHQIEKEFSEVEGRIQDLEKYVEDTKIDLWSYNAELLVALENQHTIDLTDSEMNKLFERTKKQLRENAEDMGNGCFKIYHKCDNACIGSIRNGTYDHDVYRDEALNNRFQIKGVELKSGYKDWILWISFAMSCFLLCVALLGFIMWACQKGNIRCNICI

SEQ ID NO: 1883 - protein, 566 aa, Artificial Sequence; identical to SEQ ID NO: 1828
  derived and/or modified protein sequence (wt) from hemagglutinin__InfluenzaA__ABU92737

SEQ ID NO: 1884 - protein, 566 aa, Artificial Sequence
  derived and/or modified protein sequence (wt) from hemagglutinin__InfluenzaA__ABU92738
MKTIIALSYILCLVFAQKLPGNDNSTATLCLGHHAVPNGTIVKTITNDQIEVTNATELVQSSSTGGICDSPHQILDGENCTLIDALLGDPQCDGFQNKKWDLFVERSKAYSNCYPYDVPDYASLRSLIASSGTLEFNNESFNWTGVTQNGTSSACKRRSNNSFFSRLNWLTHLKFKYPALNVTMPNNEKFDKLYIWGVHHPGTDNDQISLYAQAPGRITVSTKRSQQTVIPNIGSRPRVRDIPSRISIYWTIVKPGDILLINSTGNLIAPRGYFKIRSGKSSIMRSDAPIGKCNSECITPNGSIPNDKPFQNVNRITYGACPRYVKQNTLKLATGMRNVPEKQTRGIFGAIAGFIENGWEGMVDGWYGFRHQNSEGIGQAADLKSTQAAIDQINGKLNRLIGKTNEKFHQIEKEFSEVEGRIQDLEKYVEDTKIDLWSYNAELLVALENQHTIDLTDSEMNKLFERTKKQLRENAEDMGNGCFKIYHKCDNACIGSIRNGTYDHDVYRDEALNNRFQIKGVELKSGYKDWILWISFAISCFLLCVVLLGFIMWACQKGNIRCNICI

SEQ ID NO: 1885 - protein, 566 aa, Artificial Sequence; identical to SEQ ID NO: 1762
  derived and/or modified protein sequence (wt) from hemagglutinin__InfluenzaA__ABU92739

SEQ ID NO: 1886 - protein, 566 aa, Artificial Sequence
  derived and/or modified protein sequence (wt) from hemagglutinin__InfluenzaA__ABU92740
MKTIIALSYILCLVFAQKLPGNDNSTATLCLGHHAVPNGTIVKTITNDQIEVTNATELVQSSSTGEICDSPHQILDGENCTLIDTLLGDPQCDGFQNKKWDLFVERSKAYSNCYPYDVPDYASLRSLVASSGTLEFNNESFNWTGVTQNGTSSACKRRSNNSFFSRLNWLTHLKFKYPALNVTMPNNEKFDKLYIWGVHHPGTDNDQIFLYAQASGRITVSTKRSQQTVIPNIGSRPRVRNIPSRISIYWTIVKPGDILLINSTGNLIAPRGYFKIRSGKSSIMRSDAPIGKCNSECITPNGSIPNDKPFQNVNRITYGACPRYVKQNTLKLATGMRNVPEKQTRGIFGAIAGFIENGWEGMVDGWYGFRHQNSEGIGQAADLKSTQAAINQINGKLNRLIGKTNEKFHQIEKEFSEVEGRIQDLEKYVEDTKIDLWSYNAELLVALENQHTIDLTDSEMNKLFERTKKQLRENAEDMGNGCFKIYHKCDNACIGSIRNGTYDHDVYRDEALNNRFQIKGVELKSGYKDWILWISFAISCFLLCVALLGFIMWACQKGNIRCNICI

SEQ ID NO: 1887 - protein, 566 aa, Artificial Sequence
  derived and/or modified protein sequence (wt) from hemagglutinin__InfluenzaA__ABU92741
MKTIIALSYILCLVFAQKLPGNDNSTATLCLGHHAVPNGTIVKTITNDQIEVTNATELVQSSSTGGICDSPHQILDGENCTLIDALLGDPQCDGFQNKKWDLFVERSKAYSNCYPYDVPDYASLRSLIASSGTLEFNNESFNWTGVTQNGTSSACKRRSNNSFFSRLNWLTHLKFKYPALNVTMPNNEEFDKLYIWGVHHPGTDNDQISLYAQAPGRITVSTKRSQQTVIPNIGSRPRVRDIPSRISIYWTIVKPGDILLINSTGNLIAPRGYFKIRSGKSSIMRSDAPIGKCNSECITPNGSIPNDKPFQNVNRITYGACPRYVKQNTLKLATGMRNVPEKQTRGIFGAIAGFIENGWEGMVDGWYGFRHQNSEGIGQAADLKSTQAAIDQINGKLNRLIGKTNEKFHQIEKEFSEVEGRIQDLEKYVEDTKIDLWSYNAELLVALENQHTIDLTDSEMNKLFERTKKQLRENAEDMGNGCFKIYHKCDNACIGSIRNGTYDHDIYRDEALNNRFQIKGVELKSGYKDWILWISFAISCFLLCVVLLGFIMWACQKGNIRCNICI

SEQ ID NO: 1888 - protein, 566 aa, Artificial Sequence; identical to SEQ ID NO: 1828
  derived and/or modified protein sequence (wt) from hemagglutinin__InfluenzaA__ABU92742

SEQ ID NO: 1889 - protein, 566 aa, Artificial Sequence
  derived and/or modified protein sequence (wt) from hemagglutinin__InfluenzaA__ABU92743
MKTIIALSYILYLVFAQKLPENDNSTATLCLGHHAVPNGTIVKTITNDQIEVTNATELVQSSSTGGICDSPHQILDGENCTLIDALLGDPQCDGFQNKKWDLFVERSKAYSNCYPYDVPDYASLRSLVASSGTLEFNNESFNWTGVTQNGTSSACKRRSNNSFFSRLNWLTHLKFKYPALNVTMPNNEKFDKLYIWGVHHPGTDNDQIFLYAQASGRITVSTKRSQQTVIPNIGSRPRVRNIPSRISIYWTIVKPGDILLINSTGNLIAPRGYFKIRSGKSSIMRSDAPIGKCNSECITPNGSIPNDKPFQNVNRITYGACPRYVKQNTLKLATGMRNVPEKQTRGIFGAIAGFIENGWEGMVDGWYGFRHQNSEGIGQAADLKSTQAAIDQINGKLNRLIGKTNEKFHQIEKEFSEVEGRIQDLEKYVEDTKIDLWSYNAELLVALENQHTIDLTDSEMNKLFEKTKKQLRENAEDMGNGCFKIYHKCDNACIGSIRNGTYDHDVYRDEALNNRFQIKGVELKSGYKDWILWISFAISCFLLCVALLGFIMWACQKGNIRCNICI

SEQ ID NO: 1890 - protein, 566 aa, Artificial Sequence; identical to SEQ ID NO: 1828
  derived and/or modified protein sequence (wt) from hemagglutinin__InfluenzaA__ABU92744

SEQ ID NO: 1891 - protein, 566 aa, Artificial Sequence
  derived and/or modified protein sequence (wt) from hemagglutinin__InfluenzaA__ABU92745
MKTIIALSYILCLVFAQKLPGNDNSTATLCLGHHAVPNGTIVKTITNDQIEVTNATELVQSSSTGGICDSPHQILDGENCTLIDALLGDPQCDGFQNKKWDLFVERSKAYSNCYPYDVPDYASLRSLIASSGTLEFNNESFNWTGVTQNGTSSACKRRSNNSFFSRLNWLTHLKFKYPALNVTMPNNEEFDKLYIWGVHHPGTDNDQISLYAQAPGRITVSTKRSQQTVIPNIGSRPRVRDIPSRISIYWTIVKPGDILLINSTGNLIAPRGYFKIRIGKSSIMRSDAPIGKCNSECITPNGSIPNDKPFQNVNRITYGACPRYVKQNTLKLATGMRNVPEKQTRGIFGAIAGFIENGWEGMVDGWYGFRHQNSEGIGQAADLKSTQAAIDQINGKLNRLIGKTNEKFHQIEKEFSEVEGRIQDLEKYVEDTKIDLWSYNAELLVALENQHTIDLTDSEMNKLFERTKKQLRENAEDMGNGCFKIYHKCDNACIGSIRNGTYDHDVYRDEALNNRFQIKGVELKSGYKDWILWISFAISCFLLCVVLLGFIMWACQKGNIRCNICI

SEQ ID NO: 1892 - protein, 566 aa, Artificial Sequence; identical to SEQ ID NO: 1828
  derived and/or modified protein sequence (wt) from hemagglutinin__InfluenzaA__ABU92746

SEQ ID NO: 1893 - protein, 566 aa, Artificial Sequence; identical to SEQ ID NO: 73
  derived and/or modified protein sequence (wt) from hemagglutinin__InfluenzaA__ABU92747

SEQ ID NO: 1894 - protein, 566 aa, Artificial Sequence
  derived and/or modified protein sequence (wt) from hemagglutinin__InfluenzaA__ABU92748
MKTIIALSYILCLVFAQKLPGNDNSTATLCLGHHAVPNGTIVKTITNDQIEVTNATELVQSSSTGEICDSPHQILDGENCTLIDALLGDPQCDGFQNKKWDLFVERSKAYSNCYPYDVPDYASLRSLVASSGTLEFNNESFNWTGVTQNGTSSACKRRSNNSFFSRLNWLTHSKFKYPALNVTMPNNEKFDKLYIWGVHHPGTDNDQTFLYAQASGRITVSTKRSQQTVIPNIGSRPRVRNIPSRISIYWTIVKPGDILLINSTGNLIAPRGYFKIRSGKSSIMRSDAPIGKCNSECITPNGSIPNDKPFQNVNRITYGACPRYVKQNTLKLATGMRNVPEKQTRGIFGAIAGFIENGWEGMVDGWYGFRHQNSEGIGQAADLKSTQAAINQINGKLNRLIGKTNEKFHQIEKEFSEVEGRIQDLEKYVEDTKIDLWSYNAELLVALENQHTIDLTDSEMNKLFERTKKQLRENAEDMGNGCFKIYHKCDNACIGSIRNGTYDHDVYRDEALNNRFQIKGVELKSGYKDWILWISFAISCFLLCVVLLGFIMWACQKGNIRCNICI

SEQ ID NO: 1895 - protein, 566 aa, Artificial Sequence; identical to SEQ ID NO: 73
  derived and/or modified protein sequence (wt) from hemagglutinin__InfluenzaA__ABU92749

SEQ ID NO: 1896 - protein, 566 aa, Artificial Sequence
  derived and/or modified protein sequence (wt) from hemagglutinin__InfluenzaA__ABU92750
MKTIIALSYILCLVFAQKLPGNDNRTATLCLGHHAVPNGTIVKTITNDQIEVTNATELVQISSTGGICDSPHQILDGENCTLIDALLGDPQCDGFQNKKWDLFVERSKAYSNCYPYDVPDYASLRSLVASSGTLEFNNESFDWTGVTQNGTSSACKRRSNKSFFSRLNWLTHLKYKYPALNVTMPNNEKFDKLYIWGVHHPGTDSDQISLYAQASGRITVSTKRSQQTVIPNIGSRPRVRDVSSRISIYWTIVKPGDILLINSTGNLIAPRGYFKIRSGKSSIMRSDAPIGKCNSECITPNGSIPNDKPFQNVNRITYGACPRYVKQNTLKLATGMRNVPEKQTRGIFGAIAGFIENGWEGMVDGWYGFRHQNSEGTGQAADLKSTQAAINQINGKLNRLIGKTNEKFHQIEKEFSEVEGRIQDLEKYVEDTKIDLWSYNAELLVALENQHTIDLTDSEMNKLFERTKKQLRENAEDMGNGCFKIYHKCDNACIGSIRNGTYDHDVYRDEALNNRFQIKGVELKSGYKDWILWISFAISCFLLCVALLGFIMWACQKGNIRCNICI

SEQ ID NO: 1897 - protein, 566 aa, Artificial Sequence
  derived and/or modified protein sequence (wt) from hemagglutinin__InfluenzaA__ABU92751
MKTIIALSYILCLVFAQKLPGNDNSTATLCLGHHAVPNGTIVKTITNDQIEVTNATELVQSSSTGGICDSPHQILDGENCTLIDALLGDPQCDGFQNKKWDLFVERSKAYSNCYPYDVPDYASLRSLVASSGTLEFNNESFNWTGVTQNGTSSACKRRSNKSFFSRLNWLTHLKYKYPALNVTMPNNEKFDKLYIWGVHHPGTDSDQISLYAQASGRITVSTKRSQQTVIPNIGSRPRVRDVSSRISIYWTIVKPGDILLINSTGNLIAPRGYFKIRSGKSSIMRSDAPIGKCNSECITPNGSIPNDKPFQNVNRITYGACPRYVKQNTLKLATGMRNVPEKQTRGIFGAIAGFIENGWEGMVDGWYGFRHQNSEGTGQAADLKSTQAAINQINGKLNRLIGKTNEKFHQIEKEFSEVEGRIQDLEKYVEDTKIDLWSYNAELLVALENQHTIDLTDSEMNKLFERTKKQLRENAEDMGNGCFKIYHKCDNACIGSIRNGTYDHDVYRDEALNNRFQIKGVELKSGYKDWILWISFAISCFLLCVALLGFIMWACQKGNIRCNICI

SEQ ID NO: 1898 - protein, 566 aa, Artificial Sequence; identical to SEQ ID NO: 1762
  derived and/or modified protein sequence (wt) from hemagglutinin__InfluenzaA__ABU92752

SEQ ID NO: 1899 - protein, 566 aa, Artificial Sequence; identical to SEQ ID NO: 73
  derived and/or modified protein sequence (wt) from hemagglutinin__InfluenzaA__ABU92753

SEQ ID NO: 1900 - protein, 566 aa, Artificial Sequence; identical to SEQ ID NO: 1762
  derived and/or modified protein sequence (wt) from hemagglutinin__InfluenzaA__ABU92754

SEQ ID NO: 1901 - protein, 566 aa, Artificial Sequence
  derived and/or modified protein sequence (wt) from hemagglutinin__InfluenzaA__ABU92755
MKTIIALSYILCLVFAQKLPGNDNGTATLCLGHHAVPNGTIVKTITNDQIEVTNATELVQSSSTGGICDSPHQILDGENCTLIDALLGDPQCDGFQNKKWDLFVERSKAYSNCYPYDVPDYASLRSLVASSGTLEFNNESFNWTGVTQNGTSSACKRRSNKSFFSRLNWLTHLKFKYPALNVTMPNNEKFDKLYIWGVHHPGTDNDQISLYAQASGRITVSTKRSQQTVIPNIGSRPRVRDVPSRISIYWTIVKPGDILLINSTGNLIAPRGYFKIRSGKSSIMRSDAPIGKCNSECITPNGSIPNDKPFQNVNRITYGACPRYVKQNTLKLATGMRNVPEKQTRGIFGAIAGFIENGWEGMVDGWYGFRHQNAEGTGQAADLKSTQAAINQINGKLNRLIGKTNEKFHQIEKEFSEVEGRIQDLEKYVEDTKIDLWSYNAELLVALENQHTIDLTDSEMNKLFERTKKQLRENAEDMGNGCFKIYHKCDNACIGSIRNGTYDHNVYRDEALNNRFQIKGVELKSGYKDWILWISFAISCFLLCVVLLGFIMWACQKGNIRCNICI

SEQ ID NO: 1902 - protein, 566 aa, Artificial Sequence
  derived and/or modified protein sequence (wt) from hemagglutinin__InfluenzaA__ABU92756
MKTIIALSYILCLVFAQKLPGNDNSTATLCLGHHAVPNGTIVKTITNDQIEVTNATELVQISSTGGICDSPHQILDGENCTLIDALLGDPQCDGFQNKKWDLFVERSKAHSNCYPYDVPDYASLRSLVASSGTLEFNNESFDWTGVTQNGTSSACKRRSNKSFFSRLNWLTHLKYKYPALNVTMPNNEKFDKLYIWGVHHPGTDSDQISLYAQASGRITVSTKRSQQTVIPNIGSRPRVRDVSSRISIYWTIVKPGDILLINSTGNLIAPRGYFKIRSGKSSIMRSDAPIGKCNSECITPNGSIPNDKPFQNVNRITYGACPRYVKQNTLKLATGMRNVPEKQTRGIFGAIAGFIENGWEGMVDGWYGFRHQNSEGTGQAADLKSTQAAINQINGKLNRLIGKTNEKFHQIEKEFSEVEGRIQDLEKYVEDTKIDLWSYNAELLVALENQHTIDLTDSEMNKLFERTKKQLRENAEDMGNGCFKIYHKCDNACIGSIRNGTYDHDVYRDEALNNRFQIKGVELKSGYKDWILWISFAISCFLLCVALLGFIMWACQKGNIRCNICI

SEQ ID NO: 1903 - protein, 566 aa, Artificial Sequence
  derived and/or modified protein sequence (wt) from hemagglutinin__InfluenzaA__ABU92757
MKTIIALSYILCLVFAQKLPGNDNSTATLCLGHHAVPNGTIVKTITNDQIEVTNATELVQISSTGEICDSPHQILDGENCTLIDALLGDPQCDGFQNKKWDLFVERSKAYSNCYPYDVPDYASLRSLVASSGTLEFNNESFDWTGVTQNGTSSACKRRSDKSFFSRLNWLTHLKYKYPALNVTMPNNEKFDKLYIWGVHHPGTDSDQISLYAQASGRITVSTKRSQQTVIPNIGSRPRVRDVSSRISIYWTIVKPGDILLINSTGNLIAPRGYFKIRRGKSSIMRSDAPIGKCNSECITPNGSIPNDKPFQNVNRITYGACPRYVKQNTLKLATGMRNVPEKQTRGIFGAIAGFIENGWEGMVDGWYGFRHQNSEGTGQAADLKSTQAAINQINGKLNRLIGKTNEKFHQIEKEFSEVEGRIQDLEKYVEDTKIDLWSYNAELLVALENQHTIDLTDSEMNKLFERTKKQLRENAEDMGNGCFKIYHKCDNACIGSIRNGTYDHDVYRDEALNNRFQIKGVELKSGYKDWILWISFAISCFLLCVALLGFIMWACQKGNIRCNICI

SEQ ID NO: 1904 - protein, 566 aa, Artificial Sequence; identical to SEQ ID NO: 1762
  derived and/or modified protein sequence (wt) from hemagglutinin__InfluenzaA__ABU92758

SEQ ID NO: 1905 - protein, 566 aa, Artificial Sequence; identical to SEQ ID NO: 1762
  derived and/or modified protein sequence (wt) from hemagglutinin__InfluenzaA__ABU92759

SEQ ID NO: 1906 - protein, 566 aa, Artificial Sequence
  derived and/or modified protein sequence (wt) from hemagglutinin__InfluenzaA__ABU92760
MKTIIALSYILCLVFAQKLPGNDNSTATLCLGHHAVPNGTIVKTITNDQIEVTNATELVQISSTGEICNSPHQILDGENCTLIDALLGDPQCDGFQNKKWDLFVERSKAYSNCYPYDVPDYASLRSLVASSGTLEFNNESFDWTGVTQNGTSSACKRRSDKSFFSRLNWLTHLKYKYPALNVTMPNNEKFDKLYIWGVHHPGTDSDQISLYAQASGRITVSTKRSQQTVIPNIGSRPRVRDVSSRISIYWTIVKPGDILLINSTGNLIAPRGYFKIRSGKSSIMRSDAPIGKCNSECITPNGSIPNDKPFQNVNRITYGACPRYVKQNTLKLATGMRNVPEKQTRGIFGAIAGFIENGWEGMVDGWYGFRHQNSEGTGQAADLKSTQAAINQINGKLNRLIGKTNEKFHQIEKEFSEVEGRIQDLEKYVEDTKIDLWSYNAELLVALENQHTIDLTDSEMNKLFERTKKQLRENAEDMGNGCFKIYHKCDNACIGSIRNGTYDHDVYRDEALNNRFQIKGVELKSGYKDWILWISFAISCFLLCVALLGFIMWACQKGNIRCNICI

SEQ ID NO: 1907 - protein, 565 aa, Artificial Sequence
  derived and/or modified protein sequence (wt) from hemagglutinin__InfluenzaA__ABV29579
MKVKLLVLLCTFTATYADTICIGYHANNSTDTVDTVLEKNVTVTHSVNLLEDSHNGKLCLLKGIAPLQLGNCSVAGWILGNPECELLISKESWSYIVETPNPENGTCYPGYFADYEELREQLSSVSSFERFEIFPKESSWPNHTVTGVSASCSHNGKSSFYRNLLWLTGKNGLYPNLSKSYANNKEKEVLVLWGVHHPPNIGDQRALYHTENAYVSVVSSHYSRRFTPEIAKRPKVRDQEGRINYYWTLLEPGDTIIFEANGNLIAPRFAFALSRGFGSGIITSNAPMDECDAKCQTPQGAINSSLPFQNVHPVTIGECPKYVRSTKLRMVTGLRNIPSIQSRGLFGAIAGFIEGGWTGMVDGWYGYHHQNEQGSGYAADQKSTQNAINGITNKVNSVIEKMNTQFTAVGKEFNKLEKRMENLNKKVDDGFLDIWTYNAELLVLLENERTLDFHDSNVKNLYEKVKSQLKNNAKEIGNGCFEFYHKCNDECMESVKNGTYDYPKYSEESKLNREKIDGVKLESMGVYQILAIYSTVASSLVLLVSLGAISFWMCSNGSLQCRICI

SEQ ID NO: 1908 - protein, 565 aa, Artificial Sequence
  derived and/or modified protein sequence (wt) from hemagglutinin__InfluenzaA__ABV29612
MKVKLLILLCTFTATYADTICIGYHANNSTDTVDTVLEKNVTVTHSVNLLEDSHNGKLCLLKGIAPLQLGNCSVAGWILGNPECELLISKESWSYIVETPNPENGTCYPGYFADYEELREQLSSVSSFERFEIFPKESSWPNHTVTGVSASCSHNGKSSFYRNLLWLTGKNGLYPNLSKSYANNKEKEVLVLWGVHHPPNIGDQRALYHTENAYVSVVSSHYSRRFTPEVAKRPKVRDQEGRINYYWTLLEPGDTIIFEANGNLIAPRFAFALSRGFGSGIITSNAPMDECDAKCQTPQGAINSSLPFQNVHPVTIGECPKYVRSTKLRMVTGLRNIPSIQSRGLFGAIAGFIEGGWTGMVDGWYGYHHQNEQGSGYAADQKSTQNAINGITNKVNSVIEKMNTQFTAVGKEFNKLERRMENLNKKVDDGFLDIWTYNAELLVLLENERTLDFHDSNVKNLYEKVKSQLKNNAKEIGNGCFEFYHKCNDECMESVKNGTYDYPKYSEESKLNREKIDGVKLESMGVYQILAIYSTVASSLVLLVSLGAISFWMCSNGSLQCRICI

SEQ ID NO: 1909 - protein, 565 aa, Artificial Sequence
  derived and/or modified protein sequence (wt) from hemagglutinin__InfluenzaA__ABV29634
MKVKLLVLLCTFTATYADTICIGYHANNSTDTVDTVLEKNVTVTHSVNLLEDSHNGKLCLLKGIAPLQLGNCSVAGWILGNPECELLISKESWSYIVEAPSPENGTCYPGYFADYEELREQLSSVSSFERFEIFPKESSWPNHTVTGVSASCSHNGKSSFYRNLLWLTGKNGLYPNLSKSYANNKEKEVLVLWGVHHPPNIGDQRALYHTENAYVSVVSSHYSRRFTPEIAKRPKVRDQEGRINYYWTLLEPGDTIIFEANGNLIAPRFAFALSRGFGSGIITSNAPMGECDAKCQTPQGAINSSLPFQNVHPVTIGECPKYVRSAKLRMVTGLRNIPSIQSRGLFGAIAGFIEGGWTGMVDGWYGYHHQNEQGSGYAADQKSTQNAINGITNKVNSVIEKMNTQFTAVGKEFNKLERRMENLNKKVDDGFLDIWTYNAELLVLLENERTLDFHDSNVKNLYEKVKSQLKNNAKEIGNGCFEFYHKCNDECMESVKNGTYDYPKYSEESKLNREKIDGVKLESMGVYQILAIYSTVASSLVLLVSLGAISFWMCSNGSLQCRICI

SEQ ID NO: 1910 - protein, 565 aa, Artificial Sequence
  derived and/or modified protein sequence (wt) from hemagglutinin__InfluenzaA__ABV29645
MKVKLLILLCTFTATYADTICIGYHANNSTDTVDTVLEKNVTVTHSVNLLEDSHNGKLCLLKGIAPLQLGNCSVAGWILGNPECELLISKESWSYIVETPNPENGTCYPGYFADYEELREQLSSVSSFERFEIFPKESSWPNHTVTGVSASCSHNGKSSFYRNLLWLTGKNGLYPNLSKSYANNKEKEVLVLWGVHHPPNIGDQRALYHTENAYVSVVSSHYSRRFTPEIAKRPKVRDQEGRINYYWTLLEPGDTIIFEANGNLIAPRFAFALSRGFGSGIITSNAPMDECDAKCQTPQGAINSSLPFQNVHPVTIGECPKYVRSTKLRMVTGLRNIPSIQSRGLFGAIAGFIEGGWTGMVDGWYGYHHQNEQGSGYAADQKSTQNAINGITNKVNSVIEKMNTQFTAVGKEFNKLERRMENLNKKVDDGFLDIWTYNAELLVLLENERTLDFHDSNVKNLYEKVKSQLKNNAKEIGNGCFEFYHKCNDECMESVKNGTYDYPKYSEESKLNREKIDGVKLESMGVYQILAIYSTVASSLVLLVSLGAISFWMCSNGSLQCRICI

SEQ ID NO: 1911 - protein, 565 aa, Artificial Sequence; identical to SEQ ID NO: 1910
  derived and/or modified protein sequence (wt) from hemagglutinin__InfluenzaA__ABV29667

SEQ ID NO: 1912 - protein, 565 aa, Artificial Sequence
  derived and/or modified protein sequence (wt) from hemagglutinin__InfluenzaA__ABV29678
MKVKLLILLCTFTATYADTICIGYHANNSTDTVDTVLEKNVTVTHSVNLLEDSHNGKLCLLKGIAPLQLGNCSVAGWILGNPECELLISKESWSYIVETPNPENGTCYPGYFADYEELREQLSSVSSFERFEIFPKESSWPNHTVTGVSASCSHNGKSSFYRNLLWLTGKNGLYPNLSKSYANNKEKEVLVLWGVHHPPNIGDQRALYHTENAYVSVVSSHYSRRFTPEIAKRPKVRDQEGRINYYWTLLEPGDTIIFEANGNLIAPRFAFALSRGFGSGIITSNAPVDECDAKCQTPQGAINSSLPFQNVHPVTIGECPKYVRSTKLRMVTGLRNIPSIQSRGLFGAIAGFIEGGWTGMVDGWYGYHHQNEQGSGYAADQKSTQNAINGITNKVNSVIEKMNTQFTAVGKEFNKLERRMENLNKKVDDGFLDIWTYNAELLVLLENERTLDFHDSNVKNLYEKVKSQLKNNAKEIGNGCFEFYHKCNDECMESVKNGTYDYPKYSEESKLNREKIDGVKLESMGVYQILAIYSTVASSLVLLVSLGAISFWMCSNGSLQCRICI

SEQ ID NO: 1913 - protein, 565 aa, Artificial Sequence
  derived and/or modified protein sequence (wt) from hemagglutinin__InfluenzaA__ABV29689
MKVKLLVLLCTFTATYADTICIGYHANNSTDTVDTVLEKNVTVTHSVNLLEDSHNGKLCLLKGIAPLQLGNCSVAGWILGNPECELLISKESWSYIVETPNPENGTCYPGYFADYEELREQLSSVSSFERFEIFPKESSWPNHTVTGVSASCSHNGKSSFYRNLLWLTGKNGLYPNLSKSYANNKEKEVLVLWGVHHPPNIGDQRALYHTENAYVSVVSSHYSRRFTPEIAKRPKVRDQEGRINYYWTLLEPGDTIIFEANGNLIAPRFAFALSRGFGSGIITSNAPMDECDAKCQTPQGAINSSLPFQNVHPVTIGECPKYVRSTKLRMVTGLRNIPSIQSRGLFGAIAGFIEGGWIGMVDGWYGYHHQNEQGSGYAADQKSTQNAINGITNKVNSVIEKMNTQFTAVGKEFNKLERRMENLNKKVDDGFLDIWTYNAELLVLLENERTLDFHDSNVKNLYEKVKSQLKNNAKEIGNGCFEFYHKCNDECMESVKNGTYDYPKYSEESKLNREKIDGVKLESMGVYQILAIYSTVASSLVLLVSLGAISFWMCSNGSLQCRICI

SEQ ID NO: 1914 - protein, 565 aa, Artificial Sequence
  derived and/or modified protein sequence (wt) from hemagglutinin__InfluenzaA__ABV29700
MKVKLLVLLCTFTATYADTICIGYHANNSTDTVDTVLEKNVTVTHSVNLLEDSHNGKLCLLKGIAPLQLGNCSVAGWILGNPECELLISKESWSYIVETPNPENGTCYPGYFADYEELREQLSSVSSFERFEIFPKESSWPNHTVTGVSASCSHNGKSSFYRNLLWLTGKNGLYPNLSKSYANNKEKEVLVLWGVHHPPNIGDQRALYHTENAYVSVVSSHYSRRFTPEIAKRPKVRDQEGRINYYWTLLEPGDTIIFEANGNLIAPRFAFALSRGFGSGIITSNAPMDECDAKCQTPQGAINSSLPFQNVHPVTIGECPKYVRSTKLRMVTGLRNIPSIQSRGLFGAIAGFIEGGWTGMVDGWYGYHHQNEQGSGYAADQKSTQNAINGITNKVNSVIEKMNTQFTAVGKEFNKLERRMENLNKKVDDGFLDIWTYNAELLVLLENERTLDFHDSNVKNLYEKVKSQLKNNAKEIGNGCFEFYHKCNDECMESVKNGTYDYPKYSEESKLNREKIDGVKLESMGVYQILAIYSTVASSLVLLVSLGAISFWMCSNGSLQCRICI

SEQ ID NO: 1915 - protein, 566 aa, Artificial Sequence
  derived and/or modified protein sequence (wt) from hemagglutinin__InfluenzaA__ABV29711
MKTIIALSYILCLVFAQKLPGNDNSTATLCLGHHAVPNGTIVKTITNDQIEVTNATELVQSSSTGEICDSPHQILDGENCTLIDALLGDPQCDGFQNKKWDLFVERSKAYSNCYPYDVPDYASLRSLVASSGTLEFNNESFNWTGVTQNGTSSACIRRSNNSFFSRLNWLTHLKFKYPALNVTMPNNEKFDKLYIWGVHHPGTDNDQIFLYAQASGRITVSTKRSQQTVIPNIGSRPRVRNIPSRISIYWTIVKPGDILLINSTGNLIAPRGYFKIQSGKSSIMRSDAPIGKCNSECITPNGSIPNDKPFQNVNRITYGACPRYVKQNTLKLATGMRNVPEKQTRGIFGAIAGFIENGWEGMVDGWYGFRHQNSEGIGQAADLKSTQAAIDQINGKLNRLIGKTNEKFHQIEKEFSEVEGRIQDLEKYVEDTKIDLWSYNAELLVALENQHTIDLTDSEMNKLFEKTKKQLRENAEDMGNGCFKIYHKCDNACIGSIRNGTYDHDVYRDEALNNRFQIKGVELKSGYKDWILWISFAISCFLLCVALLGFIMWACQKGNIRCNICI

SEQ ID NO: 1916 - protein, 566 aa, Artificial Sequence
  derived and/or modified protein sequence (wt) from hemagglutinin__InfluenzaA__ABV29722
MKTIIALSYILCLVFAQKLPGNDNSTATLCLGHHAVPNGTIVKTITNDQIEVTNATELVQSSSTGEICDSPHQILDGENCTLIDALLGDPQCDGFQNKKWDLFVERSKAYSNCYPYDVPDYASLRSLVASSGTLEFNNESFNWTGVTQNGTSSACIRRSNNSFFSRLNWLTHLKFKYPALNVTMPNNEKFDKLYIWGVHHPGTDNDQIFLYAQASGRITVSTKRSQQTVIPNIGSRPRVRNIPSRISIYWTIVKPGDILLINSTGNLIAPRGYFKIRSGKSSIMRSDAPIGKCNSECITPNGSIPNDKPFQNVNRITYGACPRYVKQNTLKLATGMRNVPEKQTRGIFGAIAGFIENGWEGMVDGWYGFRHQNSEGIGQAADLKSTQAAIDQINGKLNRLIGKTNEKFHQIEKEFLEVEGRIQDLEKYVEDTKIDLWSYNAELLVALENQHTIDLTDSEMNKLFEKTKKQLRENAEDMGNGCFKIYHKCDNACIGSIRNGTYDHDVYRDEALNNRFQIKGVELKSGYKDWILWISFAISCFLLCVALLGFIMWACQKGNIRCNICI

SEQ ID NO: 1917 - protein, 565 aa, Artificial Sequence
  derived and/or modified protein sequence (wt) from hemagglutinin__InfluenzaA__ABV29733
MKVKLLVLLCTFTATYADTICIGYHANNSTDTVDTVLEKNVTVTHSVNLLEDSHNGKLCLLKGIAPLQLGNCSVAGWILGNPECELLISKESWSYIVETPNPENGTCYPGYFADYEELREQLSSVSSFERFEIFPKESSWPNHTVTGVSASCSHNGESSFYRNLLWLTGKNGLYPNLSKSYANNKEKEVLVLWGVHHPPNIGDQRALYHTENAYVSVVSSHYSRRFTPEIAKRPKVRDQEGRINYYWTLLEPGDTIIFEANGNLIAPRFAFALSRGFGSGIITSNAPMDKCDAKCQTPQGAINSSLPFQNVHPVTIGECPKYVRSTKLRMVTGLRNIPSIQSRGLFGAIAGFIEGGWTGMVDGWYGYHHQNEQGSGYAADQKSTQNAINGITNKVNSVIEKMNTQFTAVGKEFNKLERRMENLNKKVDDGFLDIWTYNAELLVLLENERTLDFHDSNVKNLYEKVKSQLKNNAKEIGNGCFEFYHKCDDECMESVKNGTYDYPKYSEESKLNREKIDGVKLESMGVYQILAIYSTVASSLVLLVSLGAISFWMCSNGSLQCRICI

SEQ ID NO: 1918 - protein, 565 aa, Artificial Sequence; identical to SEQ ID NO: 1910
  derived and/or modified protein sequence (wt) from hemagglutinin__InfluenzaA__ABV29744

SEQ ID NO: 1919 - protein, 565 aa, Artificial Sequence
  derived and/or modified protein sequence (wt) from hemagglutinin__InfluenzaA__ABV29755
MKVKLLVLLCTFTATYADTICIGYHANNSTDTVDTVLEKNVTVTHSVNLLEDSHNGKLCLLKGIAPLQLGNCSVAGWILGNPECELLISKESWSYIVETPSPENGTCYPGYFADYEELREQLSSVSSFERFEIFPKESSWPNHTVTGVSASCSHNGKSSFYRNLLWLTGKNGLYPNLSKSYANNKEKEVLVLWGVHHPPNIGDQRALYHTENAYVSVVSSHYSRRFTPEIAKRPKVRDQEGRINYYWTLLEPGDTIIFEANGNLIAPRFAFALSRGFGSGIITSNAPMGKCDAKCQTPQGAINSSLPFQNVHPVTIGECPKYVRSAKLRMVTGLRNIPSIQSRGLFGAIAGFIEGGWTGMVDGWYGYHHQNEQGSGYAADQKSTQNAINGITNKVNSVIEKMNTQFTAVGKEFNKLERRMENLNKKVDDGFLDIWTYNAELLVLLENERTLDFHDSNVKNLYEKVKSQLKNNAKEIGNGCFEFYHKCNDECMESVKNGTYDYPKYSEESKLNREKIDGVKLESMGVYQILAIYSTVASSLVLLVSLGAISFWMCSNGSLQCRICI

SEQ ID NO: 1920 - protein, 565 aa, Artificial Sequence; identical to SEQ ID NO: 1910
  derived and/or modified protein sequence (wt) from hemagglutinin__InfluenzaA__ABV29766

SEQ ID NO: 1921 - protein, 565 aa, Artificial Sequence
  derived and/or modified protein sequence (wt) from hemagglutinin__InfluenzaA__ABV29777
MKVKLLVLLCTFTATYADTICIGYHANNSTDTVDTVLEKNVTVTHSVNLLEDSHNGKLCLLKGIAPLQLGNCSVAGWILGNPECELLISKESWSYIVETPNPENGTCYPGYFADYEELREQLSSVSSFERFEIFPKESSWPNHTVTGVSASCSHNGESSFYRNLLWLTGKNGLYPNLSKSYANNKEKEVLVLWGVHHPPNIGDQRALYHTENAYVSVVSSHYSRRFTPEIAKRPKVRDQEGRINYYWTLLEPGDTIIFEANGNLIAPRFAFALSRGFGSGIITSNAPMDKCDAKCQTPQGAINSSLPFQNVHPVTIGECPKYVRSTKLRMVTGLRNIPSIQSRGLFGAIAGFIEGGWTGMVDGWYGYHHQNEQGSGYAADQKSTQNAINGITNKVNSVIEKMNTQFTAVGKEFNKLERRMENLNKKVDDGFLDIWTYNAELLVLLENERTLDFHDSNVKNLYEKVKSQLKNNAKEIGNGCFEFYHKCNDECMESVKNGTYDYPKYSEESKLNREKIDGVKLESMGVYQILAIYSTVASSLVLLVSLGAISFWMCSNGSLQCRICI

SEQ ID NO: 1922 - protein, 565 aa, Artificial Sequence; identical to SEQ ID NO: 1910
  derived and/or modified protein sequence (wt) from hemagglutinin__InfluenzaA__ABV29788

SEQ ID NO: 1923 - protein, 565 aa, Artificial Sequence; identical to SEQ ID NO: 1914
  derived and/or modified protein sequence (wt) from hemagglutinin__InfluenzaA__ABV29799

SEQ ID NO: 1924 - protein, 566 aa, Artificial Sequence
  derived and/or modified protein sequence (wt) from hemagglutinin__InfluenzaA__ABV29821
MKTIIALSYILCLVFAQKLPGNDNSTATLCLGHHAVPNGTIVKTITNDQIEVTNATELVQSSSTGEICDSPHQILDGENCTLIDALLGDPQCDGFQNKKWDLFVERSKAYSNCYPYDVPDYASLRSLVASSGTLEFNNESFNWTGVTQNGTSSACIRRSNNSFFSRLNWLTHLKFKYPALNVTMPNNEKFDKLYIWGVHHPGTDNDQVFLYAQASGRITVSTKRSQQTVIPNIGSRPRVRNIPSRISIYWTIVKPGDILLINSTGNLIAPRGYFKIRSGKSSIMRSDAPIGKCNSECITPNGSIPNDKPFQNVNRITYGACPRYVKQNTLKLATGMRNVPEKQTRGIFGAIAGFIENGWEGMVDGWYGFRHQNSEGIGQAADLKSTQAAIDQINGKLNRLIGKTNEKFHQIEKEFSEVEGRIQDLEKYVEDTKIDLWSYNAELLVALENQHTIDLTDSEMNKLFEKTKKQLRENAEDMGNGCFKIYHKCDNACIGSIRNGTYDHDVYRDEALNNRFQIKGVELKSGYKDWILWISFAISCFLLCVALLGFIMWACQKGNIKCNICI

SEQ ID NO: 1925 - protein, 565 aa, Artificial Sequence; identical to SEQ ID NO: 1914
  derived and/or modified protein sequence (wt) from hemagglutinin__InfluenzaA__ABV29832

SEQ ID NO: 1926 - protein, 565 aa, Artificial Sequence; identical to SEQ ID NO: 1910
  derived and/or modified protein sequence (wt) from hemagglutinin__InfluenzaA__ABV29865

SEQ ID NO: 1927 - protein, 565 aa, Artificial Sequence; identical to SEQ ID NO: 1910
  derived and/or modified protein sequence (wt) from hemagglutinin__InfluenzaA__ABV29876

SEQ ID NO: 1928 - protein, 566 aa, Artificial Sequence
  derived and/or modified protein sequence (wt) from hemagglutinin__InfluenzaA__ABV29898
MKTIIALSYILCLVFAQKLPGNDNSTATLCLGHHAVPNGTIVKTITNDQIEVTNATELVQSSSTGEICDSPHQILDGENCTLIDALLGDPQCDGFQNKKWDLFVERSKAYSNCYPYDVPDYASLRSLVASSGTLEFNNESFNWTGVTQNGTSSACIRRSNNSFFSRLNWLTHLKFKYPALNVTMPNNEKFDKLYIWGVHHPGTDNDQIFLYAQASGRITVSTKRSQQTVIPNIGSRPRVRNIPSRISIYWTIVKPGDILLINSTGNLIAPRGYFKIRSGKSSIMRSDAPIGKCNSECITPNGSIPNDKPFQNVNRITYGACPRYVKQNTLKLATGMRNVPEKQTRGIFGAIAGFIENGWEGMVDGWYGFRHQNSEGIGQAADLKSTQAAIDQINGKLNRLIGKTNEKFHQIEKEFSEVEGRIQDLEKYVEDTKIDLWSYNAELLVALENQHTIDLTDSEMNKLFEKTKKQLRENAEDMGNGCFKIYHKCDNACIGSIRNGTYDHDVYRDEALNNRFQIKGVELKSGYKDWILWISFAISCFLLCVALLGFIMWACQKGNIRCNICI

SEQ ID NO: 1929 - protein, 566 aa, Artificial Sequence
  derived and/or modified protein sequence (wt) from hemagglutinin__InfluenzaA__ABV29909
MKTIIALSYILCLVFAQKLPGNDNSTATLCLGHHAVPNGTIVKTITSDQIEVTNATELVQNSSIGGICNSPHQILDGENCTLIDALLGDPQCDGFQNKKWDLFVERSKAYSNCYPYDVPDYASLRSLIASSGTLEFNNESFNWTGVTQNGTSSACKRRSNNSFFSRLNWLTHLKFKYPALNVTMPNNEEFDKLYIWGVHHPGTDNDQISLYAQAPGRITVSTKRSQQTVIPNIGSRPRVRDIPSRISIYWTIVKPGDILLINSTGNLIAPRGYFKIRSGKSSIMRSDAPIDKCNSECITPNGSIPNDKPFQNVNRITYGACPRYVKQNTLKLATGMRNVPEKQTRGIFGAIAGFIENGWEGMVDGWYGFRHQNSEGIGQAADLKSTQAAIDQINGKLNRLIGKTNEKFHQIEKEFSEVEGRIQDLEKYVEDTKIDLWSYNAELLVALENQHTIDLTDSEMNKLFERTKKQLRENAEDMGNGCFKIYHKCDNACIGSIRNGTYDHDVYRDEALNNRFQIKGVELKSGYKDWILWISFAISCFLLCVALLGFIMWACQKGNIRCNICI

SEQ ID NO: 1930 - protein, 565 aa, Artificial Sequence
  derived and/or modified protein sequence (wt) from hemagglutinin__InfluenzaA__ABV29920
MKVKLLVLLCTFTATYADTICIGYHANNSTDTVDTVLEKNVTVTHSVNLLEDSHNGKLCLLKGIAPLQLGNCSVAGWILGNPECELLISKESWSYIVETPNPENGTCYPGYFADYEELREQLSSVSSFERFEIFPKESSWPNHTVTGVSASCSHNGKSSFYRNLLWLTGKNGLYPNLSKSYANNKEKEVLVLWGVHHPPNIGDQRALYHTENAYVSVVSSHYSRRFTPEIAKRPKVRDQEGRINYYWTLLEPGDTIIFEANGNLIAPRFAFALSRGFGSGIITSNAPMGECDAKCQTPQGAINSSLPFQNVHPVTIGECPKYVRSAKLRMVTGLRNIPSIQSRGLFGAIAGFIEGGWTGMVDGWYGYHHQNEQGSGYAADQKSTQNAINGITNKVNSVIEKMNTQFTAVGKEFNKLERRMENLNKKVDDGFLDIWTYNAELLVLLENERTLDFHDSNVKNLYEKVKSQLKNNAKEIGNGCFEFYHKCNDECMESVKNGTYDYPKYSEESKLNREKIDGVKLESMGVYQILAIYSTVASSLVLLVSLGAISFWMCSNGSLQCRICI

SEQ ID NO: 1931 - protein, 565 aa, Artificial Sequence; identical to SEQ ID NO: 1921
  derived and/or modified protein sequence (wt) from hemagglutinin__InfluenzaA__ABV29942

SEQ ID NO: 1932 - protein, 565 aa, Artificial Sequence; identical to SEQ ID NO: 1914
  derived and/or modified protein sequence (wt) from hemagglutinin__InfluenzaA__ABV29953

SEQ ID NO: 1933 - protein, 565 aa, Artificial Sequence; identical to SEQ ID NO: 1914
  derived and/or modified protein sequence (wt) from hemagglutinin__InfluenzaA__ABV29964

SEQ ID NO: 1934 - protein, 565 aa, Artificial Sequence; identical to SEQ ID NO: 1910
  derived and/or modified protein sequence (wt) from hemagglutinin__InfluenzaA__ABV29986

SEQ ID NO: 1935 - protein, 565 aa, Artificial Sequence; identical to SEQ ID NO: 1914
  derived and/or modified protein sequence (wt) from hemagglutinin__InfluenzaA__ABV29997

SEQ ID NO: 1936 - protein, 565 aa, Artificial Sequence; identical to SEQ ID NO: 1910
  derived and/or modified protein sequence (wt) from hemagglutinin__InfluenzaA__ABV30008

SEQ ID NO: 1937 - protein, 565 aa, Artificial Sequence; identical to SEQ ID NO: 1914
  derived and/or modified protein sequence (wt) from hemagglutinin__InfluenzaA__ABV30019

SEQ ID NO: 1938 - protein, 565 aa, Artificial Sequence; identical to SEQ ID NO: 1914
  derived and/or modified protein sequence (wt) from hemagglutinin__InfluenzaA__ABV30030

SEQ ID NO: 1939 - protein, 565 aa, Artificial Sequence
  derived and/or modified protein sequence (wt) from hemagglutinin__InfluenzaA__ABV30041
MKVKLLVLLCTFTATYADTICIGYHANNSTDTVDTVLEKNVTVTHSVNLLEDSHNGKLCLLKGTAPLQLGNCSVAGWILGNPECELLISKESWSYIVETPNPENGTCYPGYFADYEELREQLSSVSSFERFEIFPKESSWPNHTVTGVSASCSHNGKSSFYRNLLWLTGKNGLYPNLSKSYANNKEKEVLVLWGVHHPPNIGDQRALYHTENAYVSVVSSHYSRRFTPEIAKRPKVRDQEGRINYYWTLLEPGDTIIFEANGNLIAPRFAFALSRGFGSGIITSNAPMGECDAKCQTPQGAINSSLPFQNVHPVTIGECPKYVRSAKLRMVTGLRNIPSIQSRGLFGAIAGFIEGGWTGMVDGWYGYHHQNEQGSGYAADQKSTQNAINGITNKVNSVIEKMNTQFTAVGKEFNKLERRMENLNKKVDDGFLDIWTYNAELLVLLENERTLDFHDSNVKNLYEKVKNQLKNNAKEIGNGCFEFYHKCNDECMESVKNGTYDYPKYSEESKLNREKIDGVKLESMGVYQILAIYSTVASSLVLLISLGAISFWMCSNGSLQCRICI

SEQ ID NO: 1940 - protein, 566 aa, Artificial Sequence; identical to SEQ ID NO: 1928
  derived and/or modified protein sequence (wt) from hemagglutinin__InfluenzaA__ABV30063

SEQ ID NO: 1941 - protein, 566 aa, Artificial Sequence; identical to SEQ ID NO: 1928
  derived and/or modified protein sequence (wt) from hemagglutinin__InfluenzaA__ABV30074

SEQ ID NO: 1942 - protein, 565 aa, Artificial Sequence; identical to SEQ ID NO: 1914
  derived and/or modified protein sequence (wt) from hemagglutinin__InfluenzaA__ABV30085

SEQ ID NO: 1943 - protein, 565 aa, Artificial Sequence; identical to SEQ ID NO: 1914
  derived and/or modified protein sequence (wt) from hemagglutinin__InfluenzaA__ABV30096

SEQ ID NO: 1944 - protein, 565 aa, Artificial Sequence; identical to SEQ ID NO: 1910
  derived and/or modified protein sequence (wt) from hemagglutinin__InfluenzaA__ABV30107

SEQ ID NO: 1945 - protein, 565 aa, Artificial Sequence
  derived and/or modified protein sequence (wt) from hemagglutinin__InfluenzaA__ABV30129
MKVKLLVLLCTFTATYADTICIGYHANNSTDTVDTVLEKNVTVTHSVNLLEDSHNGKLCLLKGIAPLQLGNCSVAGWILGNPECELLISKESWSYIVETPNPENGTCYPGNFADYEELREQLSSVSSFERFEIFPKESSWPNHTVTGVSASCSHNGKSSFYRNLLWLTGKNGLYPNLSKSYANNKEKEVLVLWGVHHPPNIGDQRALYHTENAYVSVVSSHYSRRFTPEIAKRPKVRDQEGRINYYWTLLEPGDTIIFEANGNLIAPRFAFALSRGFGSGIITSNAPMDECDAKCQTPQGAINSSLPFQNVHPVTIGECPKYVRSAKLRMVTGLRNIPSIQSRGLFGAIAGFIEGGWTGMVDGWYGYHHQNEQGSGYAADQKSTQNAINGITNKVNSVIEKMNTQFTAVGKEFNKLERRMENLNKKVDDGFLDIWTYNAELLVLLENERTLDFHDSNVKNLYEKVKSQLKNNAKEIGNGCFEFYHKCNDECMESVKNGTYDYPKYSEESKLNREKIDGVKLESMGVYQILAIYSTVASSLVLLVSLGAISFWMCSNGSLQCRICI

SEQ ID NO: 1946 - protein, 565 aa, Artificial Sequence
  derived and/or modified protein sequence (wt) from hemagglutinin__InfluenzaA__ABV30140
MKVKLLVLLCTFTATYADTICIGYHANNSTDTVDTVLEKNVTVTHSVNLLEDRHNGKLCLLKGIAPLKLGNCSVAGWILGNPECELLISKESWSYIVETPNPENGTCYPGYFADYEELREQLSSVSSFERFEIFPKESSWPNHTVTGVSASCSHNGKSSFYRNLLWLTGKNGLYPNLSRSYANNKEKEVLVLWGVHHPPNIGDQRALYHTENAYVSVVSSHYSRRFTPEIAKRPKVRDQEGRINYYWTLLEPGDTIIFEANGNLIAPRFAFALSRGFGSGIITSNAPMDECDAKCQTPQGAINSSLPFQNVHPVTIGECPKYVRSAKLRMVTGLRNIPSIQSRGLFGAIAGFIEGGWTGMVDGWYGYHHQNEQGSGYAADQKSTQNAINGITNKVNSVIEKMNTQFTAVGKEFNKLERRMENLNKKVDDGFLDIWTYNAELLVLLENERTLDFHDSNVKNLYEKVKSQLKNNAKEIGNGCFEFYHKCNDECMESVKNGTYDYPKYSEESKLNREKIDGVKLESMGVYQILAIYSTVASSLVLLVSLGAISFWMCSNGSLQCRICI

SEQ ID NO: 1947 - protein, 565 aa, Artificial Sequence
  derived and/or modified protein sequence (wt) from hemagglutinin__InfluenzaA__ABV30151
MKVKLLVLLCTFTATYADTICIGYHANNSTDTVDTVLEKNVTVTHSVNLLEDSHNGKLCLLKGIAPLQLGNCSVAGWILGNPECELLISKESWSYIVETPNPENGTCYPGYFADYEELREQLSSVSSFERFEIFPKESSWPNHTVTGVSASCSHSGKSSFYRNLLWLTGKNGLYPNLSKSYANNKEKEVLVLWGVHHPPNIGDQRALYHTENAYVSVVSSHYSRRFTPEIAKRPKVRDQEGRINYYWTLLEPGDTIIFEANGNLIAPRFAFALSRGFGSGIITSNAPMGECDAKCQTPQGAINSSLPFQNVHPVTIGECPKYVRSAKLRMVTGLRNIPSIQSRGLFGAIAGFIEGGWTGMVDGWYGYHHQNEQGSGYAADQKSTQNAINGITNKVNSVIEKMNTQFTAVGKEFNKLERRMENLNKKVDDGFLDIWTYNAELLVLLENERTLDFHDSNVKNLYEKVKSQLKNNAKEIGNGCFEFYHKCNDECMESVKNGTYDYPKYSEESKLNREKIDGVKLESMGVYQILAIYSTVASSLVLLVSLGAISFWMCSNGSLQCRICI

SEQ ID NO: 1948 - protein, 565 aa, Artificial Sequence
  derived and/or modified protein sequence (wt) from hemagglutinin__InfluenzaA__ABV30162
MKVKLLVLLCTFTATYADTICIGYHANNSTDTVDTVLEKNVTVTHSVNLLEDSHNGKLCLLKGIAPLQLGNCSVAGWILGNPECELLISRESWSYIVETPNPENGTCYPGYFADYEELREQLSSVSSFERFEIFPKESSWPNHTVTGVSASCSHNGKSSFYRNLLWLTGKNGLYPNLSKSYANNKEKEVLVLWGVHHPPNIGDQRALYHTENAYVSVVSSHYSRRFTPEIAKRPKVRDQEGRINYYWTLLEPGDTIIFEANGNLIAPRFAFALSRGFGSGIITSNAPMDECDAKCQTPQGAINSSLPFQNVHPVTIGECPKYVRSTKLRMVTGLRNIPSIQSRGLFGAIAGFIEGGWTGMVDGWYGYHHQNEQGSGYAADQKSTQNAINGITNKVNSVIEKMNTQFTAVGKEFNKLERRMENLNKKVDDGFLDIWTYNAELLVLLENERTLDFHDSNVKNLYEKVKSQLKNNAKEIGNGCFEFYHKCNDECMESVKNGTYDYPKYSEESKLNREKIDGVKLESMGVYQILAIYSTVASSLVLLVSLGAISFWMCSNGSLQCRICI

SEQ ID NO: 1949 - protein, 565 aa, Artificial Sequence; identical to SEQ ID NO: 1914
  derived and/or modified protein sequence (wt) from hemagglutinin__InfluenzaA__ABV30173

SEQ ID NO: 1950 - protein, 565 aa, Artificial Sequence; identical to SEQ ID NO: 1914
  derived and/or modified protein sequence (wt) from hemagglutinin__InfluenzaA__ABV30184

SEQ ID NO: 1951 - protein, 566 aa, Artificial Sequence; identical to SEQ ID NO: 1928
  derived and/or modified protein sequence (wt) from hemagglutinin__InfluenzaA__ABV30217

SEQ ID NO: 1952 - protein, 566 aa, Artificial Sequence; identical to SEQ ID NO: 1928
  derived and/or modified protein sequence (wt) from hemagglutinin__InfluenzaA__ABV30228

SEQ ID NO: 1953 - protein, 566 aa, Artificial Sequence
  derived and/or modified protein sequence (wt) from hemagglutinin__InfluenzaA__ABV30261
MKTIIALSYILCLVFAQKLPGIDNSTATLCLGHHAVPNGTIVKTITNDQVEVTNATELVQSSSTGGICDSPHQILDGENCTLIDALLGDPQCDGFQNKKWDLFVERSKAYSNCYPYDVPDYASLRSLVASSGTLEFNNESFNWAGVTQNGTSSACKRGSNNSFFSRLNWLTHSKFKYPALNVTMPNNEEFDKLYIWGVHHPGTDNDQIFLYAQASGRITVSTKRSQQTVIPNIGSRPRVRNIPSRISIYWTIVKPGDILLINSTGNLIAPRGYFKIRSGKSSIMRSDAPIGKCNSECITPNGSIPNDKPFQNVNRITYGACPRYVKQNTLKLATGMRNVPEKQTRGIFGAIAGFIENGWEGMVDGWYGFRHQNSEGMGQAADLKSTQAAIDQINGKLNRLIGKTNEKFHQIEKEFSEVEGRIQDLEKYVEDTKIDLWSYNAELLVALENQHTIDLTDSEMNKLFEKTKKQLRENAEDMGNGCFKIYHKCDNACIGSIRNGTYDHDVYRAEALNNRFQIKGVELKSGYKDWILWISFAISCFLLCVALLGFIMWACQKGNIRCNICI

SEQ ID NO: 1954 - protein, 566 aa, Artificial Sequence
  derived and/or modified protein sequence (wt) from hemagglutinin__InfluenzaA__ABV30272
MKTIIALSYILCLVFAQKLPGNDNSTATLCLGHHAVPNGTIVKTITNDQIEVTNATELVQSSSTGEICDSPHQILDGENCTLIDALLGDPQCDGFQNKKWDLFVERSKAYSNCYPYDVPDYASLRSLVASSGTLEFNNESFNWTGVTQNGTSSACIRRSNNSFFSKLNWLTHLKFKYPALNVTMPNNEKFDKLYIWGVHHPGTDNDQIFLYAQASGRITVSTKRSQQTVIPNIGSRPRVRNIPSRISIYWTIVKPGDILLINSTGNLIAPRGYFKIRSGKSSIMRSDAPIGKCNSECITPNGSIPNDKPFQNVNRITYGACPRYVKQNTLKLATGMRNVPEKQTRGIFGAIAGFIENGWEGMVDGWYGFRHQNSEGIGQAADLKSTQAAIDQINGKLNRLIGKTNEKFHQIEKEFSEVEGRIQDLEKYVEDTKIDLWSYNAELLVALENQHTIDLTDSEMNKLFEKTKKQLRENAEDMGNGCFKIYHKCDNACIGSIRNGTYDHDVYRDEALNNRFQIKGVELKSGYKDWILWISFAISCFLLCVALLGFIMWACQKGNIRCNICI

SEQ ID NO: 1955 - protein, 565 aa, Artificial Sequence
  derived and/or modified protein sequence (wt) from hemagglutinin__InfluenzaA__ABV30283
MKVKLLVLLCTFTATYADTICIGYHANNSTDTVDTVLEKNVTVTHSVNLLEDSHNGKLCLLKGIAPLQLGNCSVAGWILGNPECELLISKESWSYIVETPNPENGTCYPGNFADYEELREQLSSVSSFERFEIFPKESSWPNHTVTGVSASCSHNGKSSFYRNLLWLTGKNGLYPNLSKSYANNKEKEVLVLWGVHHPPNIGDQRALYHTENAYVSVVSSHYSRRFTPEIAKRPKVRDQEGRINYYWTLLEPGDTIIFEANGNLIAPRFAFALSRGFGSGIITSNAPMDECDAKCQTPQGAINSSLPFQNVHPVTIGECPKYVRSAKLRMVTGLRNIPSIQSRGLFGAIAGFIEGGWTGMVDGWYGYHHQNEQGSGYAADQKSTQNAIDGITNKVNSVIEKMNTQFTAVGKEFNKLERRMENLNKKVDDGFLDIWTYNAELLVLLENERTLDFHDSNVKNLYEKVKSQLKNNAKEIGNGCFEFYHKCNDECMESVKNGTYDYPKYSEESKLNREKIDGVKLESMGVYQILAIYSTVASSLVLLVSLGAISFWMCSNGSLQCRICI

SEQ ID NO: 1956 - protein, 565 aa, Artificial Sequence
  derived and/or modified protein sequence (wt) from hemagglutinin__InfluenzaA__ABV30294
MKVKLLVLLCTFTATYADTICIGYHANNSTDTVDTVLEKNVTVTHSVNLLEDRHNGKLCLLKGIAPLQLGNCSVAGWILGNPECELLISKESWSYIVETPNPENGTCYPGYFADYEELREQLSSVSSFERFEIFPKESSWPNHTVTGVSASCSHNGKSSFYRNLLWLTGKNGLYPNLSRSYANNKEKEVLVLWGVHHPPNIGDQRALYHTENAYVSVVSSHYSRRFTPEIAKRPKVRDQEGRINYYWTLLEPGDTIIFEANGNLIAPRFAFALSRGFGSGIITSNAPMDECDAKCQTPQGAINSSLPFQNVHPVTIGECPKYVRSAKLRMVTGLRNIPSIQSRGLFGAIAGFIEGGWTGMVDGWYGYHHQNEQGSGYAADQKSTQNAINGITNKVNSVIEKMNTQFTAVGKEFNKLERRMENLNKKVDDGFLDIWTYNAELLVLLENERTLDFHDSNVKNLYEKVKSQLKNNAKEIGNGCFEFYHKCNDECMESVKNGTYDYPKYSEESKLNREKIDGVKLESMGVYQILAIYSTVASSLVLLVSLGAISFWMCSNGSLQCRICI

SEQ ID NO: 1957 - protein, 565 aa, Artificial Sequence
  derived and/or modified protein sequence (wt) from hemagglutinin__InfluenzaA__ABV30305
MKVKLLVLLCTFTATYADTICIGYHANNSTDTVDTVLEKNVTVTHSVNLLEDSHNGKLCLLKGIAPLQLGNCSVAGWILGNPECELLISKESWSYIVETPNPENGTCYPGYFADYEELREQLSSVSSFERFEIFPKESSWPNHTVTGGSASCSHNGKSSFYRNLLWLTGKNGLYPNLSKSYANNKEKEVLVLWGVHHPPNIGDQRALYHTENAYVSVVSSHYSRRFTPEIAKRPKVRDQEGRINYYWTLLEPGDTIIFEANGNLIAPRFAFALSRGFGSGIITSNAPMDECDAKCQTPQGAINSSLPFQNVHPVTIGECPKYVRSTKLRMVTGLRNIPSIQSRGLFGAIAGFIEGGWTGMVDGWYGYHHQNEQGSGYAADQKSTQNAINGITNKVNSVIEKMNTQFTAVGKEFNKLERRMENLNKKVDDGFLDIWTYNAELLVLLENERTLDFHDSNVKNLYEKVKSQLKNNAKEIGNGCFEFYHKCNNECMESVKNGTYDYPKYSEESKLNREKIDGVKLESMGVYQILAIYSTVASSLVLLVSLGAISFWMCSNGSLQCRICI

SEQ ID NO: 1958 - protein, 565 aa, Artificial Sequence; identical to SEQ ID NO: 1910
  derived and/or modified protein sequence (wt) from hemagglutinin__InfluenzaA__ABV30316

SEQ ID NO: 1959 - protein, 565 aa, Artificial Sequence; identical to SEQ ID NO: 1956
  derived and/or modified protein sequence (wt) from hemagglutinin__InfluenzaA__ABV30327

SEQ ID NO: 1960 - protein, 565 aa, Artificial Sequence; identical to SEQ ID NO: 1910
  derived and/or modified protein sequence (wt) from hemagglutinin__InfluenzaA__ABV30338

SEQ ID NO: 1961 - protein, 565 aa, Artificial Sequence; identical to SEQ ID NO: 1914
  derived and/or modified protein sequence (wt) from hemagglutinin__InfluenzaA__ABV30349

SEQ ID NO: 1962 - protein, 565 aa, Artificial Sequence
  derived and/or modified protein sequence (wt) from hemagglutinin__InfluenzaA__ABV30360
MKVKLLVLLCTFTATYADTICIGYHANNSTDTVDTVLEKNVTVTHSVNLLEDSHNGKLCLLKGIAPLQLGNCSVAGWILGNPECELLISKESWSYIVETPNPENGTCYPGNFADYEELREQLSSVSSFERFEIFPKESSWPNHTVTGVSASCSHNGKSSFYRNLLWLTGKNGLYPNLSKSYANNKEKEVLVLWGVHHPPNIGDQRALYHTENAYVSVVSSHYSRRFTPEIAKRPKVRDQEGRINYYWTLLEPGDTIIFEANGNLIAPRFAFALSRGFGSGIITSNAPMDECDAKCQTPQGAINSSLPFQNVHPVTIGECPKYVRSAKLRMVTGLRNIPSIQSRGLFGAIAGFIEGGWTGMVDGWYGYHHQNEQGSGYAADQKSTQNAIDGITNKVNSVIEKMNTQFTAVGKEFNKLERRMENLNKKVDDGFLDIWTYNAELLVLLENERTLDFHDSNVKNLYEKVKSQLKNNAKEIGNGCFEFYHKCNDECMESVKNGTYDYPKYSEESKLNREKIDGIKLESMGVYQILAIYSTVASSLVLLVSLGAISFWMCSNGSLQCRICI

SEQ ID NO: 1963 - protein, 565 aa, Artificial Sequence; identical to SEQ ID NO: 1914
  derived and/or modified protein sequence (wt) from hemagglutinin__InfluenzaA__ABV30371

SEQ ID NO: 1964 - protein, 566 aa, Artificial Sequence; identical to SEQ ID NO: 1729
  derived and/or modified protein sequence (wt) from hemagglutinin__InfluenzaA__ABV30382

SEQ ID NO: 1965 - protein, 566 aa, Artificial Sequence; identical to SEQ ID NO: 630
  derived and/or modified protein sequence (wt) from hemagglutinin__InfluenzaA__ABV30393

SEQ ID NO: 1966 - protein, 566 aa, Artificial Sequence
  derived and/or modified protein sequence (wt) from hemagglutinin__InfluenzaA__ABV30404
MKTIIALSYILCLVFAQKLPGNDNSTATLCLGHHAVPNGTIVKTITNDQIEVTNATELVQSSSTGEICDSPHQILDGENCTLIDALLGDPQCDGFQNKKWDLFVERSKAYSKCYPYDVPDYASLRSLVASSGTLEFNNESFNWTGVTQNGTSSACIRRSNNSFFSRLNWLTHLKFKYPALNVTMPNNEKFDKLYIWGVHHPGTDNDQIFLYAQASGRITVSTKRSQQTVIPNIGSRPRVRNIPSRISIYWTIVKPGDILLINSTGNLIAPRGYFKIRSGKSSIMRSDAPIGKCNSECITPNGSIPNDKPFQNVNRITYGACPRYVKQNTLKLATGMRNVPEKQTRGIFGAIAGFIENGWEGMVDGWYGFRHQNSEGIGQAADLKSTQAAIDQINGKLNRLIGKTNEKFHQIEKEFSEVEGRIQDLEKYVEDTKIDLWSYNADLLVALENQHTIDLTDSEMNKLFEKTKKQLRENAEDMGNGCFKIYHKCDNACIGSIRNGTYDHDVYRDEALNNRFQIKGVELKSGYKDWILWISFAISCFLLCVALLGFIMWACQKGNIRCNICI

SEQ ID NO: 1967 - protein, 566 aa, Artificial Sequence
  derived and/or modified protein sequence (wt) from hemagglutinin__InfluenzaA__ABV30415
MKTIIALSYILCLVFAQKLPGIDNSTATLCLGHHAVPNGTIVKTITNDQIEVTNATELVQSSSTGGICDSPHQILDGENCTLIDALLGDPQCDGFQNKKWDLFVERSKAYSNCYPYDVPDYASLRSLVASSGTLEFNNESFNWAGVTQNGTSSACKRGSNNSFFSRLNWLTHSKFKYPALNVTMPNNEEFDKLYIWGVHHPGTDNDQIFLYAQASGRITVSTKRSQQTVIPNIGSRPRVRNIPSRISIYWTIVKPGDILLINSTGNLIAPRGYFKIRSGKSSIMRSDAPIGKCNSECITPNGSIPNDKPFQNVNRITYGACPRYVKQNTLKLATGMRNVPEKQTRGIFGAIAGFIENGWEGMVDGWYGFRHQNSEGIGQAADLKSTQAAIDQINGKLNRLIGKTNEKFHQIEKEFSEVEGRIQDLEKYVEDTKIDLWSYNAELLVALENQHTIDLTDSEMNKLFEKTKKQLRENAEDMGNGCFKIYHKCDNACIGSIRNGTYDHDVYRDEALNNRFQIKSVELKSGYKDWILWISFAISCFLLCVALLGFIMWACQKGNIRCNICI

SEQ ID NO: 1968 - protein, 566 aa, Artificial Sequence; identical to SEQ ID NO: 1928
  derived and/or modified protein sequence (wt) from hemagglutinin__InfluenzaA__ABV30426

SEQ ID NO: 1969 - protein, 566 aa, Artificial Sequence
  derived and/or modified protein sequence (wt) from hemagglutinin__InfluenzaA__ABV30437
MKTIIALSYILCLVFAQKLPGNDNSTATLCLGHHAVPNGTIVKTITNDQIEVTNATELVQSSSTGEICDSPHQILDGENCTLIDALLGDPQCDGFQNKKWDLFVERSKAYSNCYPYDVPDYASLRSLVASSGTLEFNNESFNWTGVTQNGTSSACIRRSNHSFFSRLNWLTHLKFKYPALNVTMPNNEKFDKLYIWGVHHPGTDNDQIFLYAQASGRITVSTKRSQQTVIPNIGSRPRVRNIPSRISIYWTIVKPGDILLINSTGNLIAPRGYFKIRSGKSSIMRSDAPIGKCNSECITPNGSIPNDKPFQNVNRITYGACPRYVKQNTLKLATGMRNVPEKQTRGIFGAIAGFIENGWEGMVDGWYGFRHQNSEGIGQAADLKSTQAAIDQINGKLNRLIGKTNEKFHQIEKEFSEVEGRIQDLEKYVEDTKIDLWSYNAELLVALENQHTIDLTDSEMNKLFEKTKKQLRENAEDMGNGCFKIYHKCDNACIGSIRNGTYDHDVYRDEALNNRFQIKGVELKSGYKDWILWISFAISCFLLCVALLGFIMWACQKGNIRCNICI

SEQ ID NO: 1970 - protein, 566 aa, Artificial Sequence; identical to SEQ ID NO: 1928
  derived and/or modified protein sequence (wt) from hemagglutinin__InfluenzaA__ABV30448

SEQ ID NO: 1971 - protein, 565 aa, Artificial Sequence
  derived and/or modified protein sequence (wt) from hemagglutinin__InfluenzaA__ABV30459
MKVKLLILLCTFTATYADTICIGYHANNSTDTVDTVLEKNVTVTHSVNLLEDSHNGKLCLLKGIAPLQLGNCSVAGWILGNPECELLISKESWSYIVEAPNPENGTCYPGYFADYEELREQLSSVSSFERFEIFPKESSWPNHTVTGVSASCSHNGKSSFYRNLLWLTGKNGLYPNLSKSYANNKEKEVLVLWGVHHPPNIGDQRALYHTENAYVSVVSSHYSRRFTPEIAKRPKVRDQEGRINYYWTLLEPGDTIIFEANGNLIAPRFAFALSRGFGSGIITSNAPMDECDAKCQTPQGAINSSLPFQNVHPVTIGECPKYVRSTKLRMVTGLRNIPSIQSRGLFGAIAGFIEGGWTGMVDGWYGYHHQNEQGSGYAADQKSTQNAINGITNKVNSVIEKMNTQFTAVGKEFNKLERRMENLNKKVDDGFLDIWTYNAELLVLLENERTLDFHDSNVKNLYEKVKSQLKNNAKEIGNGCFEFYHKCNDECMESVKNGTYDYPKYSEESKLNREKIDGVKLESMGVYQILAIYSTVASSLVLLVSLGAISFWMCSNGSLQCRICI

SEQ ID NO: 1972 - protein, 566 aa, Artificial Sequence; identical to SEQ ID NO: 1928
  derived and/or modified protein sequence (wt) from hemagglutinin__InfluenzaA__ABV30470

SEQ ID NO: 1973 - protein, 565 aa, Artificial Sequence; identical to SEQ ID NO: 1910
  derived and/or modified protein sequence (wt) from hemagglutinin__InfluenzaA__ABV30492

SEQ ID NO: 1974 - protein, 565 aa, Artificial Sequence
  derived and/or modified protein sequence (wt) from hemagglutinin__InfluenzaA__ABV30503
MKVKLLILLCTFTATYADTICIGYHANNSTDTVDTVLEKNVTVTHSVNLLEDSHNGKLCLLKGIAPLQLGNCSVAGWILGNPECELLISKESWSYIVETPNPENGTCYPGYFADYEELREQLSSVSSFERFEIFPKESSWPNHTITGVSASCSHNGKSSFYRNLLWLTGKNGLYPNLSKSYANNKEKEVLVLWGVHHPPNIGDQRALYHTENAYVSVVSSHYSRRFTPEIAKRPKVRDQEGRINYYWTLLEPGDTIIFEANGNLIAPRFAFALSRGFGSGIITSNAPMDECDAKCQTPQGAINSSLPFQNVHPVTIGECPKYVRSTKLRMVTGLRNIPSIQSRGLFGAIAGFIEGGWTGMVDGWYGYHHQNEQGSGYAADQKSTQNAINGITNKVNSVIEKMNTQFTAVGKEFNKLERRMENLNKKVDDGFLDIWTYNAELLVLLENERTLDFHDSNVKNLYEKVKSQLKNNAKEIGNGCFEFYHKCNDECMESVKNGTYDYPKYSEESKLNREKIDGVKLESMGVYQILAIYSTVASSLVLLVSLGAISFWMCSNGSLQCRICI

SEQ ID NO: 1975 - protein, 566 aa, Artificial Sequence; identical to SEQ ID NO: 1928
  derived and/or modified protein sequence (wt) from hemagglutinin__InfluenzaA__ABV30514

SEQ ID NO: 1976 - protein, 565 aa, Artificial Sequence
  derived and/or modified protein sequence (wt) from hemagglutinin__InfluenzaA__ABV30525
MKVKLLVLLCTFTATYADTICIGYHANNSTDTVDTVLEKNVTVTHSVNLLEDSHNGKLCLLKGIAPLQLGNCSVAGWILGNPECELLISKESWSYIVETPNPENGTCYPGYFADYEELREQLSSVSSFERFEIFPKESSWPNHTVTGVSASCSHSGKSSFYRNLLWLTGKNGLYPNLSKSYANNKEKEVLVLWGVHHPPNIGDQRALYHTENAYVSVVSSHYSRRFTPEIAKRPKVRDQEGRINYYWTLLEPGDTIIFEANGNLIAPRFAFALSRGFGSGIITSNTPMGECDAKCQTPQGAINSSLPFQNVHPVTIGECPKYVRSAKLRMVTGLRNIPSIQSRGLFGAIAGFIEGGWTGMVDGWYGYHHQNEQGSGYAADQKSTQNAINGITNKVNSVIEKMNTQFTAVGKEFNKLERRMENLNKKVDDGFLDIWTYNAELLVLLENERTLDFHDSNVKNLYEKVKSQLKNNAKEIGNGCFEFYHKCNDECMESVKNGTYDYPKYSEESKLNREKIDGVKLESMGVYQILAIYSTVASSLVLLVSLGAISFWMCSNGSLQCRICI

SEQ ID NO: 1977 - protein, 565 aa, Artificial Sequence; identical to SEQ ID NO: 1914
  derived and/or modified protein sequence (wt) from hemagglutinin__InfluenzaA__ABV30536

SEQ ID NO: 1978 - protein, 565 aa, Artificial Sequence; identical to SEQ ID NO: 1921
  derived and/or modified protein sequence (wt) from hemagglutinin__InfluenzaA__ABV30547

SEQ ID NO: 1979 - protein, 565 aa, Artificial Sequence; identical to SEQ ID NO: 1914
  derived and/or modified protein sequence (wt) from hemagglutinin__InfluenzaA__ABV30558

SEQ ID NO: 1980 - protein, 565 aa, Artificial Sequence
  derived and/or modified protein sequence (wt) from hemagglutinin__InfluenzaA__ABV30569
MKVKLLILLCTFTATYADTICIGYHANNSTDTVDTVLEKNVTVTHSVNLLEDNHNGKLCLLKGIAPLQLGNCSVAGWILGNPECELLISKESWSYIVETPNPENGTCYPGYFADYEELREQLSSVSSFERFEIFPKESSWPNHTVTGVSASCSHNGKSSFYRNLLWLTGKNGLYPNLSKSYANNKEKEVLVLWGVHHPPNIGDQRALYHTENAYVSVVSSHYSRRFTPEIAKRPKVRDQEGRINYYWTLLEPGDTIIFEANGNLIAPRFAFALSRGFGSGIITSNAPMDECDAKCQTPQGAINSSLPFQNVHPVTIGECPKYVRSTKLRMVTGLRNIPSIQSRGLFGAIAGFIEGGWTGMVDGWYGYHHQNEQGSGYAADQKSTQNAINGITNKVNSVIEKMNTQFTAVGKEFNKLERRMENLNKKVDDGFLDIWTYNAELLVLLENERTLDFHDSNVKNLYEKVKSQLKNNAKEIGNGCFEFYHKCNDECMESVKNGTYDYPKYSEESKLNREKIDGVKLESMGVYQILAIYSTVASSLVLLVSLGAISFWMCSNGSLQCRICI

SEQ ID NO: 1981 - protein, 565 aa, Artificial Sequence; identical to SEQ ID NO: 1914
  derived and/or modified protein sequence (wt) from hemagglutinin__InfluenzaA__ABV30580

SEQ ID NO: 1982 - protein, 565 aa, Artificial Sequence; identical to SEQ ID NO: 1910
  derived and/or modified protein sequence (wt) from hemagglutinin__InfluenzaA__ABV30591

SEQ ID NO: 1983 - protein, 565 aa, Artificial Sequence; identical to SEQ ID NO: 1910
  derived and/or modified protein sequence (wt) from hemagglutinin__InfluenzaA__ABV30602

SEQ ID NO: 1984 - protein, 565 aa, Artificial Sequence
  derived and/or modified protein sequence (wt) from hemagglutinin__InfluenzaA__ABV30613
MKVKLLILLCTFTATYADTICIGYHANNSTDTVDTVLEKNVTVTHSVNLLEDSHNGKLCLLKGIAPLQLGNCSVAGWILGNPECELLISKESWSYIVETPNPENGTCYPGYFADYEELREQLSSVSSFERFEIFPKESSWPNHTVTGVSASCSHNGKSSFYRNLLWLTGKNGLYPNLSKSYANNKEKEVLVLWGVHHPPNIGDQRALYHTENAYVSVVSSHYSRRFTPEIAKRPKVRDQEGRINYYWTLLEPGDTIIFEANGNLIAPRFAFALSRGFGSGIITSNAPMDECDAKCQTPQGAINSSLPFQNVHPVTIGECPKYVRSTKLRMVTGLRNIPSIQSRGLFGAIAGFIEGGWTGMVDGWYGYHHQNEQGSGYAADQKSTQNAINGITNKVNSVIEKMNTQFTAVGKEFNKLERRMKNLNKKVDDGFLDIWTYNAELLVLLENERTLDFHDSNVKNLYEKVKSQLKNNAKEIGNGCFEFYHKCNDECMESVKNGTYDYPKYSEESKLNREKIDGVKLESMGVYQILAIYSTVASSLVLLVSLGAISFWMCSNGSLQCRICI

SEQ ID NO: 1985 - protein, 565 aa, Artificial Sequence; identical to SEQ ID NO: 1910
  derived and/or modified protein sequence (wt) from hemagglutinin__InfluenzaA__ABV30624

SEQ ID NO: 1986 - protein, 566 aa, Artificial Sequence
  derived and/or modified protein sequence (wt) from hemagglutinin__InfluenzaA__ABV30646
MKTIIALSYILCLVFAQKLPGNDNSTATLCLGHHAVPNGTIVKTITNDQIEVTNATELVQSSSTGEICDSPHQILDGENCTLIDALLGDPQCDGFQNKKWDLFVERSKAYSNCYPYDVPDYASLRSLVASSGTLEFNNESFNWTGVTQNGTSSACIRRSNNSFFSRLNWLTHLKFKYPALNVTMPNNEKFDKLYIWGVHHPGTYNDQIFLYAQASGRITVSTKRSQQTVIPNIGSRPRVRNIPSRISIYWTIVKPGDILLINSTGNLIAPRGYFKIRSGKSSIMRSDAPIGKCNSECITPNGSIPNDKPFQNVNRITYGACPRYVKQNTLKLATGMRNVPEKQTRGIFGAIAGFIENGWEGMVDGWYGFRHQNSEGIGQAADLKSTQAAIDQINGKLNRLIGKTNEKFHQIEKEFSEVEGRIQDLEKYVEDTKIDLWSYNAELLVALENQHTIDLTDSEMNKLFEKTKKQLRENAEDMGNGCFKIYHKCDNACIGSIRNGTYDHDVYRDEALNNRFQIKGVELKSGYKDWILWISFAISCFLLCVALLGFIMWACQKGNIRCNICI

SEQ ID NO: 1987 - protein, 566 aa, Artificial Sequence
  derived and/or modified protein sequence (wt) from hemagglutinin__InfluenzaA__ABV30657
MKTIIALSYILCLVFAQKLPGNDNSTATLCLGHHAVPNGTIVKTITNDQIEVTNATELVQSSSTGEICDSPHQILDGENCTLIDALLGDPQCDGFQNKKWDLFVERSKAYSNCYPYDVPDYASLRSLVASSGTLEFNNESFNWTGVTQNGTSSACIRRSNNSFFSRLNWLTHLKFKYPALNVTMPNNEKFDKLYIWGVHHPGTDNDQVFLYAQASGRITVSTKRSQQTVIPNIGSRPRVRNIPSRISIYWTIVKPGDILLINSTGNLIAPRGYFKIRSGKSSIMRSDAPIGKCNSECITPNGSIPNDKPFQNVNRITYGACPRYVKQNTLKLATGMRNVPEKQTRGIFGAIAGFIENGWEGMVDGWYGFRHQNSEGIGQAADLKSTQAAIDQINGKLNRLIGKTNEKFHQIEKEFSEVEGRIQDLEKYVEDTKIDLWSYNAELLVALENQHTIDLTDSEMNKLFEKTKKQLRENAEDMGNGCFKIYHKCDNACIGSIRNGTYDHDVYRDEALNNRFQIKGVELKSGYKDWILWISFAISCFLLCVALLGFIMWACQKGNIRCNICI

SEQ ID NO: 1988 - protein, 566 aa, Artificial Sequence; identical to SEQ ID NO: 1987
  derived and/or modified protein sequence (wt) from hemagglutinin__InfluenzaA__ABV45860

SEQ ID NO: 1989 - protein, 565 aa, Artificial Sequence; identical to SEQ ID NO: 1955
  derived and/or modified protein sequence (wt) from hemagglutinin__InfluenzaA__ABV45871

SEQ ID NO: 1990 - protein, 565 aa, Artificial Sequence; identical to SEQ ID NO: 1914
  derived and/or modified protein sequence (wt) from hemagglutinin__InfluenzaA__ABV45882

SEQ ID NO: 1991 - protein, 565 aa, Artificial Sequence; identical to SEQ ID NO: 1921
  derived and/or modified protein sequence (wt) from hemagglutinin__InfluenzaA__ABV45893

SEQ ID NO: 1992 - protein, 566 aa, Artificial Sequence; identical to SEQ ID NO: 1729
  derived and/or modified protein sequence (wt) from hemagglutinin__InfluenzaA__ABV45904

SEQ ID NO: 1993 - protein, 565 aa, Artificial Sequence; identical to SEQ ID NO: 1921
  derived and/or modified protein sequence (wt) from hemagglutinin__InfluenzaA__ABV45926

SEQ ID NO: 1994 - protein, 565 aa, Artificial Sequence
  derived and/or modified protein sequence (wt) from hemagglutinin__InfluenzaA__ABV45937
MKVKLLVLLCTFTATYADTICIGYHANNSTDTVDTVLEKNVTVTHSVNLLEDSHNGKLCLLKGIAPLQLGNCSVAGWILGNPECELLISKESWSYIVETPNPENGTCYPGYFADYEELREQLSSVSSFERFEIFPKESSWPNHTVTGVSASCSHNGKSSFYRNLLWLTGKNGLYPNLSKSYANNKEKEVLVLWGVHHPPNIGDQRALYHTENAYVSVVSSHYSRRFTPEIAKRPKVRDQEGRINYYWTLLEPGDTIIFETNGNLIAPRFAFALSRGFGSGIITSNAPMGECDAKCQTPQGAINSSLPFQNVHPVTIGECPKYVRSAKLRMVTGLRNIPSIQSRGLFGAIAGFIEGGWTGMVDGWYGYHHQNEQGSGYAADQKSTQNAINGITNKVNSVIEKMNTQFTAVGKEFNKLERRMENLNKKVDDGFLDIWTYNAELLVLLENERTLDFHDSNVKNLYEKVKSQLKNNAKEIGNGCFEFYHKCNDECMESVKNGTYDYPKYSEESKLNREKIDGVKLESMGVYQILAIYSTVASSLVLLVSLGAISFWMCSNGSLQCRICI

SEQ ID NO: 1995 - protein, 565 aa, Artificial Sequence; identical to SEQ ID NO: 1947
  derived and/or modified protein sequence (wt) from hemagglutinin__InfluenzaA__ABV45948

SEQ ID NO: 1996 - protein, 565 aa, Artificial Sequence; identical to SEQ ID NO: 1914
  derived and/or modified protein sequence (wt) from hemagglutinin__InfluenzaA__ABV45959

SEQ ID NO: 1997 - protein, 566 aa, Artificial Sequence
  derived and/or modified protein sequence (wt) from hemagglutinin__InfluenzaA__ABV45970
MKTIIALSYILCLVFAQKLPGNDNSTATLCLGHHAVPNGTIVKTITNDQIEVTNATELVQSSSTGEICDSPHQILDGENCTLIDALLGDPQCDGFQNKKWDLFVERSKAYSNCYPYDVPDHASLRSLVASSGTLEFNNESFNWTGVTQNGTSSACIRRSNNSFFSRLNWLTHLKFKYPALNVTMPNNEKFDKLYIWGVHHPGTDNDQIFLYAQASGRITVSTKRSQQTVIPNIGSRPRVRNIPSRISIYWTIVKPGDILLINSTGNLIAPRGYFKIQSGKSSIMRSDAPIGKCNSECITPNGSIPNDKPFQNVNRITYGACPRYVKQNTLKLATGMRNVPEKQTRGIFGAIAGFIENGWEGMVDGWYGFRHQNSEGIGQAADLKSTQAAIDQINGKLNRLIGKTNEKFHQIEKEFSEVEGRIQDLEKYVEDTKIDLWSYNAELLVALENQHTIDLTDSEMNKLFEKTKKQLRENAEDMGNGCFKIYHKCDNACIGSIRNGTYDHDVYRDEALNNRFQIKGVELKSGYKDWILWISFAISCFLLCVALLGFIMWACQKGNIRCNICI

SEQ ID NO: 1998 - protein, 566 aa, Artificial Sequence
  derived and/or modified protein sequence (wt) from hemagglutinin__InfluenzaA__ABV45981
MKTIIALSYILCLVFAQKLPGNDNSTATLCLGHHAVPNGTIVKTITNDQIEVTNATELVQSSSTGEICDSPHQILDGENCTLIDALLGDPQCDGFQNKKWDLFVERSKAYSNCYPYDVPDYASLRSLVASSGTLEFNNESFNWTGVTQNGTSSACIRRSNNSFFSRLNWLTHLKFKYPALNVTMPNNEKFDKLYIWGVHHPGTDNDQIFLYAQASGRITVSTKRSQQTVIPNIGSRPRVRNIPSRISIYWTIVKPGDILLINSTGNLIAPRGYFKIRSGKSSIMRSDAPIGKCNSECITPNGSIPNDKPFQNVNRITYGACPRYVKQNTLKLATGMRNVPEKQTRGIFGAIAGFIENGWEGMVDGWYGFRHQNSEGIGQAADLKSTQAAIDQINGKLNRLIGKTNEKFHQIEKEFSEVEGRIQDLEKYVEDTKIDLWSYNAELLVALENQHTIDLTDSEMNKLFEKTKKQLRENAEDMGNGCFKIYHKCDNACIGSIRNGTYDHDVYRDEALNNRFQIKGVELKSGYKDWIIWISFAISCFLLCVALLGFIMWACQKGNIRCNICI

SEQ ID NO: 1999 - protein, 565 aa, Artificial Sequence
  derived and/or modified protein sequence (wt) from hemagglutinin__InfluenzaA__ABV82551
MKVKLLVLLCTFTATYADTICIGYHANNSTDTVDTVLEKNVTVTHSVNLLEDSHNGKLCLLKGIAPLQLGNCSVAGWILGNPECELLISKESWSYIVETPNPENGTCYPGYFADYEELREQLSSVSSFERFEIFPKESSWPNHTVTGVSASCSHNGESSFYRNLLWLTEKNGLYPNLSKSYANNKEKEVLVLWGVHHPPNIGDQRALYHTENAYVSVVSSHYSRRFTPEIAKRPKVRDQEGRINYYWTLLEPGDTIIFEANGNLIAPRFAFALSRGFGSGIITSNAPMDKCDAKCQTPQGAINSSLPFQNVHPVTIGECPKYVRSTKLRMVTGLRNIPSIQSRGLFGAIAGFIEGGWTGMVDGWYGYHHQNEQGSGYAADQKSTQNAINGITNKVNSVIEKMNTQFTAVGKEFNKLERRMENLNKKVDDGFLDIWTYNAELLVLLENERTLDFHDSNVKNLYEKVKSQLKNNAKEIGNGCFEFYHKCNDECMESVKNGTYDYPKYSEESKLNREKIDGVKLESMGVYQILAIYSTVASSLVLLVSLGAISFWMCSNGSLQCRICI

SEQ ID NO: 2000 - protein, 566 aa, Artificial Sequence; identical to SEQ ID NO: 1928
  derived and/or modified protein sequence (wt) from hemagglutinin__InfluenzaA__ABV82562

SEQ ID NO: 2001 - protein, 566 aa, Artificial Sequence; identical to SEQ ID NO: 1928
  derived and/or modified protein sequence (wt) from hemagglutinin__InfluenzaA__ABW36168

SEQ ID NO: 2002 - protein, 565 aa, Artificial Sequence; identical to SEQ ID NO: 1914
  derived and/or modified protein sequence (wt) from hemagglutinin__InfluenzaA__ABW36179

SEQ ID NO: 2003 - protein, 565 aa, Artificial Sequence; identical to SEQ ID NO: 1957
  derived and/or modified protein sequence (wt) from hemagglutinin__InfluenzaA__ABW36190

SEQ ID NO: 2004 - protein, 565 aa, Artificial Sequence; identical to SEQ ID NO: 1914
  derived and/or modified protein sequence (wt) from hemagglutinin__InfluenzaA__ABW36201

SEQ ID NO: 2005 - protein, 565 aa, Artificial Sequence
  derived and/or modified protein sequence (wt) from hemagglutinin__InfluenzaA__ABW36212
MKVKLLVLLCTFTATYADTICIGYHANNSTDTVDTVLEKNVTVTHSVNLLEDSHNGKLCLLKGIAPLQLGNCSVAGWILGNPECELLISKESWSYIVETPNPENGTCYPGYFADYEELREQLSSVSSFERFEIFPKENSWPNHTVTGVSASCSHNGKSSFYRNLLWLTGKNGLYPNLSKSYANNKEKEVLVLWGVHHPPNIGDQRALYHTENAYVSVVSSHYSRRFTPEIAKRPKVRDQEGRINYYWTLLEPGDTIIFEANGNLIAPRFAFALSRGLGSGIITSNAPMDECDAKCQTPQGAINSSLPFQNVHPVTIGECPKYVRSAKLRMVTGLRNIPSIQSRGLFGAIAGFIEGGWTGMVDGWYGYHHQNEQGSGYAADQKSTQNAINGITNKVNSVIEKMNTQFTAVGKEFNKLERRMENLNKKVDDGFLDIWTYNAELLVLLENERTLDFHDSNVKNLYEKVKGQLKNNAKEIGNGCFEFYHKCNDECMESVKNGTYDYPKYSEESKLNREKIDGVKLESMGVYQILAIYSTVASSLVLLVSLGAISFWMCSNGSLQCRICI

SEQ ID NO: 2006 - protein, 565 aa, Artificial Sequence; identical to SEQ ID NO: 1910
  derived and/or modified protein sequence (wt) from hemagglutinin__InfluenzaA__ABW36223

SEQ ID NO: 2007 - protein, 565 aa, Artificial Sequence; identical to SEQ ID NO: 1910
  derived and/or modified protein sequence (wt) from hemagglutinin__InfluenzaA__ABW36245

SEQ ID NO: 2008 - protein, 565 aa, Artificial Sequence; identical to SEQ ID NO: 1910
  derived and/or modified protein sequence (wt) from hemagglutinin__InfluenzaA__ABW36267

SEQ ID NO: 2009 - protein, 565 aa, Artificial Sequence; identical to SEQ ID NO: 1914
  derived and/or modified protein sequence (wt) from hemagglutinin__InfluenzaA__ABW36278

SEQ ID NO: 2010 - protein, 565 aa, Artificial Sequence
  derived and/or modified protein sequence (wt) from hemagglutinin__InfluenzaA__ABW36289
MKLKLLVLLCTFTATYADTICIGYHANNSTDTVDTVLEKNVTVTHSVNLLEDSHNGKLCLLKGIAPLQLGNCSVAGWILGNPECELLISKESWSYIVETPNPENGTCYPGYFADYEELREQLSSVSSFERFEIFPKESSWPNHTVTGVSASCSHNGKSSFYRNLLWLTGKNGLYPNLSKSYANNKEKEVLVLWGVHHPPNIGDQRALYHTENAYVSVVSSHYSRRFTPEIAKRPKVRDQEGRINYYWTLLEPGDTIIFEANGNLIAPRFAFALSRGFGSGIITSNAPMDECDAKCQTPQGAINSSLPFQNVHPVTIGECPKYVRSTKLRMVTGLRNIPSIQSRGLFGAIAGFIEGGWTGMVDGWYGYHHQNEQGSGYAADQKSTQNAINGITNKVNSVIEKMNTQFTAVGKEFNKLERRMENLNKKVDDGFLDIWTYNAELLVLLENERTLDFHDSNVKNLYEKVKSQLKNNAKEIGNGCFEFYHKCNDECMESVKNGTYDYPKYSEESKLNREKIDGVKLESMGVYQILAIYSTVASSLVLLVSLGAISFWMCSNGSLQCRICI

SEQ ID NO: 2011 - protein, 565 aa, Artificial Sequence; identical to SEQ ID NO: 1921
  derived and/or modified protein sequence (wt) from hemagglutinin__InfluenzaA__ABW36300

SEQ ID NO: 2012 - protein, 566 aa, Artificial Sequence
  derived and/or modified protein sequence (wt) from hemagglutinin__InfluenzaA__ABW36311
MKAKLLVLLCALSATDADTICIGYHANNSTDTVDTVLEKNVTVTHSVNLLEDSHNGKLCRLKGIAPLQLGKCSIAGWILGNPECESLFSKKSWSYIAETPNSENGTCYPGYFADYEELREQLSSVSSFERFEIFPKERSWPKHNVTRGVTASCSHKGKSSFYRNLLWLTEKNGSYPNLSKSYVNNKEKEVLVLWGVHHPSNIEDQKTIYRKENAYVSVVSSNYNRRFTPEIAKRPKVRDQEGRINYYWTLLEPGDTIIFEANGNLIAPWYAFALSRGFGSGIITSNASMDECDTKCQTPQGAINSSLPFQNVHPVTIGECPKYVRSTKLRMVTGLRNIPSIQSRGLFGAIAGFIEGGWTGMIDGWYGYHHQNEQGSGYAADQKSTQNAINGITNKVNSVIEKMNTQFTAVGKEFNKLEKRMENLNKKVDDGFLDIWTYNAELLVLLENERTLDSHDSNVKNLYEKVKSQLKNNAKEIGNGCFEFYHKCNNECMESVKNGTYDYPKYSEESKLNREKIDGVKLESMGVYQILAIYSTVASSLVLLVSLGAISFWMCSNGSLQCRICI

SEQ ID NO: 2013 - protein, 566 aa, Artificial Sequence
  derived and/or modified protein sequence (wt) from hemagglutinin__InfluenzaA__ABW38363
MKTIIALSYILCLVFAQKLPGNDNSTATLCLGHHAVPNGTIVKTITNDQIEVTNATELVQSSSTGEICDSPHQILDGENCTLIDALLGDPQCDGFQNKKWDLFVERSKAYSNCYPYDVPDYASLRSLVASSGTLEFNNESFNWTGVTQNGTSSACKRRSNNSFFSRLNWLTHLKFKYPALNVTMPNNEKFDKLYIWGVHHPGTDNDQIFLYAQASGRITVSTKRSQQTVIPNIGSRPRVRNIPSRISIYWTIVKPGDILLINSTGNLIAPRGYFKIRSGKSSIMRSDAPIGKCNSECITPNGSIPNDKPFQNVNRITYGACPRYVKQNTLKLATGMRNVPEKQTRGIFGAIAGFIENGWEGMVDGWYGFRHQNSEGIGQAADLKSTQAAIDQINGKLNRLIGKTNEKFHQIEKEFSEVEGRIQDLEKYVEDTKIDLWSYNAELIVALENQHTIDLTDSEMNKLFERTKKQLRENAEDMGNGCFKIYHKCDNACIGSIRNGTYDHDVYRDEALNNRFQIKGVELKSGYKDWILWISFAISCFLLCVALLGFIMWACQKGNIRCNICI

SEQ ID NO: 2014 - protein, 565 aa, Artificial Sequence
  derived and/or modified protein sequence (wt) from hemagglutinin__InfluenzaA__ABW39777
MKVKLLVLLCTFTATYADTICIGYHANNSTDTVDTVLEKNVTVTHSVNLLEDSHNGKLCLLKGIAPLQLGNCSVAGWILGNPECELLISKESWSYIVETPNPENGTCYPGYFADYEELREQLSSVSSFERFEIFPKENSWPNHTVTGVSASCSHNGKSSFYRNLLWLTGKNGLYPNLSKSYANNKEKEVLVLWGVHHPPNIGDQRALYHTENAYVSVVSSHYSRRFTPEIAKRPKVRDQEGRINYYWTLLEPGDTIIFEANGNLIAPRFAFALSRGLGSGIITSNAPMDECDAKCQTPQGAINSSLPFQNVHPVTIGECPKYVRSAKLRMVTGLRNIPSIQSRGLFGAIAGFIEGGWTGMVDGWYGYHHQNEQGSGYAADQKSTQNAINGITNKVNSVIEKMNTQFTAVGKEFNKLERRMENLNKKVDDGFLDIWTYNAELLVLLENERTLDFHDSNVKNLYEKVKSQLKNNAKEIGNGCFEFYHKCNDECMESVKNGTYDYPKYSEESKLNREKIDGVKLESMGVYQILAIYSTVASSLVLLVSLGAISFWMCSNGSLQCRICI

SEQ ID NO: 2015 - protein, 565 aa, Artificial Sequence; identical to SEQ ID NO: 1914
  derived and/or modified protein sequence (wt) from hemagglutinin__InfluenzaA__ABW39806

SEQ ID NO: 2016 - protein, 565 aa, Artificial Sequence; identical to SEQ ID NO: 1921
  derived and/or modified protein sequence (wt) from hemagglutinin__InfluenzaA__ABW39817

SEQ ID NO: 2017 - protein, 565 aa, Artificial Sequence
  derived and/or modified protein sequence (wt) from hemagglutinin__InfluenzaA__ABW39828
MKVKLLVLLCTFTATYADTICIGYHANNSTDTVDTVLEKNVTVTHSVNLLEDNHNGKLCLLKGIAPLQLGNCSVAGWILGNPECELLISKESWSYIVEKPNPENGTCYPGHFADYEELREQLSSVSSFERFEIFPKESSWPNHTVTGVSASCSHNGESSFYKNLLWLTGKNGLYPNLSKSYANNKEKEVLVLWGVHHPPNIGDQMTLYHKENAYVSVVSSHYSRKFTPEIAKRPKVRDQEGRINYYWTLLEPGDTIIFEANGNLIAPRYAFALSRGFGSGIINSNAPMDECDAKCQTPQGAINSSLPFQNVHPVTIGECPKYVRSAKLRMVTGLRNIPSIQSRGLFGAIAGFIEGGWTGMVDGWYGYHHQNEQGSGYAADQKSTQNAINGITNKVNSVIEKMNTQFTAVGKEFNKLERRMENLNKKVDDGFIDVWTYNAELLVLLENERTLDFHDSNVKNLYEKVKNQLKNNAKEIGNGCFEFYHKCNDECMESVKNGTYDYPKYSEESKLSREKIDGVKLESMGVYQILAIYSTVASSLVLLVSLGAISFWMCSNGSLQCRICI

SEQ ID NO: 2018 - protein, 565 aa, Artificial Sequence
  derived and/or modified protein sequence (wt) from hemagglutinin__InfluenzaA__ABW39839
MKVKLLVLLCTFTATYADTICIGYHANNSTDTVDTVLEKNVTVTHSVNLLEDSHNGKLCLLKGIAPLQLGNCSVAGWILGNPECELLISKESWSYIVETPNPENGTCYPGYFADYEELREQLSSVSSFERFEIFPKESSWPNHTVTGVSASCSHNGKSSFYRNLLWLTGKNGLYPNLSKSYSNNKEKEVLVLWGVHHPPNIGDQRALYHTENAYVSVVSSHYSRRFTPEIAKRPKVRDQEGRINYYWTLLEPGDTIIFEANGNLIAPRFAFALSRGFGSGIITSNAPMGECDAKCQTPQGAINSSLPFQNVHPVTIGECPKYVRSAKLRMVTGLRNIPSIQSRGLFGAIAGFIEGGWTGMVDGWYGYHHQNEQGSGYAADQKSTQNAINGITNKVNSVIEKMNTQFTAVGKEFNKLERRMENLNKKVDDGFLDIWTYNAELLVLLENERTLDFHDSNVKNLYEKVKSQLKNNAKEIGNGCFEFYHKCNDECMESVRNGTYDYPKYSEESKLNREKIDGVKLESMGVYQILAIYSTVASSLVLLVSLGAISFWMCSNGSLQCRICI

SEQ ID NO: 2019 - protein, 565 aa, Artificial Sequence
  derived and/or modified protein sequence (wt) from hemagglutinin__InfluenzaA__ABW39850
MKVKLLVLLCTFTATNADTICIGYHANNSTDTVDTVLEKNVTVTHSVNLLENSHNGKLCLLKGIAPLQLGNCSVAGWILGNPECELLISKESWSYIVEKPNPENGTCYPGHFADYEELREQLSSVSSFERFEIFPKESSWPNHTVTGVSASCSHNGESSFYRNLLWLTGKNGLYPNLSKSYANNKEKEVLVLWGVHHPPNIGDQKALYHTENAYVSVVSSHYSRKFTPEIAKRPKVRDQEGRINYYWTLLEPGDTIIFEANGNLIAPRYAFALSRGFGSGIINSNAPMDKCDAKCQTPQGAINSSLPFQNVHPVTIGECPKYVRSAKLRMVTGLRNIPSIQSRGLFGAIAGFIEGGWTGMVDGWYGYHHQNEQGSGYAADQKSTQNAINGITNKVNSVIEKMNTQFTAVGKEFNKLERRMENLNKKVDDGFIDIWTYNAELLVLLENERTLDFHDSNVKNLYEKVKGQLKNNAKEIGNGCFEFYHKCNDECMESVKNGTYDYPKYSEESKLNREKIDGVKLESMGVYQILAIYSTVASSLVLLVSLGAISFWMCSNGSLQCRICI

SEQ ID NO: 2020 - protein, 565 aa, Artificial Sequence; identical to SEQ ID NO: 1945
  derived and/or modified protein sequence (wt) from hemagglutinin__InfluenzaA__ABW39861

SEQ ID NO: 2021 - protein, 566 aa, Artificial Sequence; identical to SEQ ID NO: 1928
  derived and/or modified protein sequence (wt) from hemagglutinin__InfluenzaA__ABW39872

SEQ ID NO: 2022 - protein, 565 aa, Artificial Sequence
  derived and/or modified protein sequence (wt) from hemagglutinin__InfluenzaA__ABW39883
MKVKLLVLLCTFTATYADTICIGYHANNSTDTVDTVLEKNVTVTHSVNLLEDSHNGKLCLLKGIAPLQLGNCSVAGWILGNPECELLISKESWSYIVETPNPENGTCYPGYFADYEELREQLSSVSSFERFEIFPKESSWPNHTVTGVSASCSHNGKSSFYRNLLWLTGKNGLYPNLSKSYANNKEKEVLVLWGVHHPHNIGDQRALYHTENAYVSVVSSHYSRRFTPEIAKRPKVRDQEGRINYYWTLLEPGDTIIFEANGNLIAPRFAFALSRGFGSGIITSNAPMDECDAKCQTPQGAINSSLPFQNVHPVTIGECPKYVRSTKLRMVTGLRNIPSIQSRGLFGAIAGFIEGGWTGMVDGWYGYHHQNEQGSGYAADQKSTQNAINGITNKVNSVIEKMNTQFTAVGKEFNKLERRMENLNKKVDDGFLDIWTYNAELLVLLENERTLDFHDSNVKNLYEKVKSQLKNNAKEIGNGCFEFYHKCNDECMESVKNGTYDYPKYSEESKLNREKIDGVKLESMGVYQILAIYSTVASSLVLLVSLGAISFWMCSNGSLQCRICI

SEQ ID NO: 2023 - protein, 565 aa, Artificial Sequence; identical to SEQ ID NO: 1955
  derived and/or modified protein sequence (wt) from hemagglutinin__InfluenzaA__ABW39894

SEQ ID NO: 2024 - protein, 565 aa, Artificial Sequence; identical to SEQ ID NO: 1910
  derived and/or modified protein sequence (wt) from hemagglutinin__InfluenzaA__ABW39905

SEQ ID NO: 2025 - protein, 565 aa, Artificial Sequence; identical to SEQ ID NO: 1914
  derived and/or modified protein sequence (wt) from hemagglutinin__InfluenzaA__ABW39927

SEQ ID NO: 2026 - protein, 566 aa, Artificial Sequence
  derived and/or modified protein sequence (wt) from hemagglutinin__InfluenzaA__ABW39938
MKTIIALSYILCLVFAQKIPGNDNSTATLCLGHHAVPNGTIVKTITNDQIEVTNATELVQSSSTGEICDSPHQILDGENCTLIDALLGDPQCDGFQNKKWDLFVERSKAYSNCYPYDVPDYASLRSLVASSGTLEFNNESFNWTGVTQNGTSSACIRRSNNSFFSRLNWLTHLKFKYPALNVTMPNNEKFDKLYIWGVHHPGTDNDQIFLYAQASGRITVSTKRSQQTVIPNIGSRPRVRNIPSRISIYWTIVKPGDILLINSTGNLIAPRGYFKIRSGKSSIMRSDAPIGKCNSECITPNGSIPNDKPFQNVNRITYGACPRYVKQNTLKLATGMRNVPEKQTRGIFGAIAGFIENGWEGMVDGWYGFRHQNSEGIGQAADLKSTQAAIDQINGKLNRLIGKTNEKFHQIEKEFSEVEGRIQDLEKYVEDTKIDLWSYNAELLVALENQHTIDLTDSEMNKLFEKTKKQLRENAEDMGNGCFKIYHKCDNACIGSIRNGTYDHDAYRDEALNNRFQIKGVELKSGYKDWILWISFAISCFLLCVALLGFIMWACQKGNIRCNICI

SEQ ID NO: 2027 - protein, 565 aa, Artificial Sequence; identical to SEQ ID NO: 1914
  derived and/or modified protein sequence (wt) from hemagglutinin__InfluenzaA__ABW39949

SEQ ID NO: 2028 - protein, 565 aa, Artificial Sequence; identical to SEQ ID NO: 1955
  derived and/or modified protein sequence (wt) from hemagglutinin__InfluenzaA__ABW39960

SEQ ID NO: 2029 - protein, 565 aa, Artificial Sequence; identical to SEQ ID NO: 1910
  derived and/or modified protein sequence (wt) from hemagglutinin__InfluenzaA__ABW39982

SEQ ID NO: 2030 - protein, 565 aa, Artificial Sequence; identical to SEQ ID NO: 1930
  derived and/or modified protein sequence (wt) from hemagglutinin__InfluenzaA__ABW39993

SEQ ID NO: 2031 - protein, 565 aa, Artificial Sequence; identical to SEQ ID NO: 1910
  derived and/or modified protein sequence (wt) from hemagglutinin__InfluenzaA__ABW40004

SEQ ID NO: 2032 - protein, 565 aa, Artificial Sequence; identical to SEQ ID NO: 1956
  derived and/or modified protein sequence (wt) from hemagglutinin__InfluenzaA__ABW40015

SEQ ID NO: 2033 - protein, 566 aa, Artificial Sequence; identical to SEQ ID NO: 1987
  derived and/or modified protein sequence (wt) from hemagglutinin__InfluenzaA__ABW40026

SEQ ID NO: 2034 - protein, 565 aa, Artificial Sequence; identical to SEQ ID NO: 1910
  derived and/or modified protein sequence (wt) from hemagglutinin__InfluenzaA__ABW40037

SEQ ID NO: 2035 - protein, 565 aa, Artificial Sequence
  derived and/or modified protein sequence (wt) from hemagglutinin__InfluenzaA__ABW40048
MKVKLLVLLCTFTATYADTICIGYHANNSTDTVDTVLEKNVTVTHSVNLLEDSHNGKLCLLKGIAPLQLGNCSVAGWILGNPECELLISKESWSYIVETPNPENGTCYPGYFADYEELREQLSSVSSFERFEIFPKESSWPNHTVTGVSASCSHNGKSSFYRNLLWLTGKNGLYPNLSKSYANNKEKEVLVLWGVHHPPNIGDQKALYHTENAYVSVVSSHYSRRFTPEIAKRPKVRDQEGRINYYWTLLEPGDTIIFEANGNLIAPRFAFALSRGFGSGIITSNAPMDECDAKCQTPQGAINSSLPFQNVHPVTIGECPKYVRSTKLRMVTGLRNIPSIQSRGLFGAIAGFIEGGWTGMVDGWYGYHHQNEKGSGYAADQKSTQNAINGITNKVNSVIEKMNTQFTAVGKEFNKLERRMENLNKKVDDGFLDIWTYNAELLVLLENERTLDFHDSNVKNLYEKVKSQLKNNAKEIGNGCFEFYHKCNDECMESVKNGTYDYPKYSEESKLNREKIDGVKLESMGVYQILAIYSTVASSLVLLVSLGAISFWMCSNGSLQCRICI

SEQ ID NO: 2036 - protein, 565 aa, Artificial Sequence; identical to SEQ ID NO: 1914
  derived and/or modified protein sequence (wt) from hemagglutinin__InfluenzaA__ABW40059

SEQ ID NO: 2037 - protein, 565 aa, Artificial Sequence
  derived and/or modified protein sequence (wt) from hemagglutinin__InfluenzaA__ABW40070
MKVKLLVLLCTFTATYADTICIGYHANNSTDTVDTVLEKNVTVTHSVNLLENSHNGKLCLLKGIAPLQLGNCSVAGWILGNPECELLISKESWSYIVEKPNPENGTCYPGHFADYEELREQLSSVSSFKRFEIFPKESSWPNHTVTGVSASCSHNGESSFYRNLLWLTGKNGLYPNLSKSYANNKEKEVLVLWGVHHPPNIGDQKALYHTENAYVSVVSSHYSRKFTPEIAKRPKVRDQEGRINYYWTLLEPGDTIIFEANGNLIAPRYAFALSRGFGSGIINSNAPMDKCDSKCQTPQGAINSSLPFQNVHPVTIGECPKYVRSAKLRMVTGLRNIPSIQSRGLFGAIAGFIEGGWTGMVDGWYGYHHQNEQGSGYAADQKSTQNAINGITNKVNSVIEKMNTQFTAVGKEFNKLERRMENLNKKVDDGFIDIWTYNAELLVLLENERTLDFHDSNVKNLYEKVKSQLKNNAKEIGNGCFEFYHKCNDECMESVKNGTYDYPKYSEESKLNREKIDGVKLESMGVYQILAIYSTVASSLVLLVSLGAISFWMCSNGSLQCRICI

SEQ ID NO: 2038 - protein, 566 aa, Artificial Sequence; identical to SEQ ID NO: 1928
  derived and/or modified protein sequence (wt) from hemagglutinin__InfluenzaA__ABW40081

SEQ ID NO: 2039 - protein, 565 aa, Artificial Sequence
  derived and/or modified protein sequence (wt) from hemagglutinin__InfluenzaA__ABW40092
MKVKLLILLCTFTATYADTICIGYHANNSTDTVDTVLEKNVTVTHSVNLLEDSHNGKLCLLKGIAPLQLGNCSVAGWILGNPECELLISKESWSYIVETPNPENGTCYPGYFADYEELREQLSSVSSFKRFEIFPKESSWPNHTVTGVSASCSHNGKSSFYRNLLWLTGKNGLYPNLSKSYANNKEKEVLVLWGVHHPPNIGDQRALYHTENAYVSVVSSHYSRRFTPEIAKRPKVRDQEGRINYYWTLLEPGDTIIFEANGNLIAPRFAFALSRGFGSGIITSNAPMDECDAKCQTPQGAINSSLPFQNVHPVTIGECPKYVRSTKLRMVTGLRNIPSIQSRGLFGAIAGFIEGGWTGMVDGWYGYHHQNEQGSGYAADQKSTQNAINGITNKVNSVIEKMNTQFTAVGKEFNKLERRMENLNKKVDDGFLDIWTYNAELLVLLENERTLDFHDSNVKNLYEKVKSQLKNNAKEIGNGCFEFYHKCNDECMESVKNGTYDYPKYSEESKLNREKIDGVKLESMGVYQILAIYSTVASSLVLLVSLGAISFWMCSNGSLQCRICI

SEQ ID NO: 2040 - protein, 565 aa, Artificial Sequence; identical to SEQ ID NO: 1957
  derived and/or modified protein sequence (wt) from hemagglutinin__InfluenzaA__ABW40103

SEQ ID NO: 2041 - protein, 565 aa, Artificial Sequence
  derived and/or modified protein sequence (wt) from hemagglutinin__InfluenzaA__ABW40114
MKVKLLILLCTFTATYADTICIGYHANNSTDTVDTVLEKNVTVTHSVNLLEDSHNGKLCLLKGIAPLQLGNCSVAGWILGNPECELLISKESWSYIVETPNPENGTCYPGYFADYEELREQLSSVSSFERFEIFPKESSWPNHTVTGVSTSCSHNGKSSFYRNLLWLTGKNGLYPNLSKSYANNKEKEVLVLWGVHHPPNIGNQRALYHTENAYVSVVSSHYSRRFTPEIAKRPKVRDQEGRINYYWTLLEPGDTIIFEANGNLIAPRFAFALSRGFGSGIITSNAPMDECDAKCQTPQGAINSSLPFQNVHPVTIGECPKYVRSTKLRMVTGLRNIPSIQSRGLFGAIAGFIEGGWTGMVDGWYGYHHQNEQGSGYAADQKSTQNAINGITNKVNSVIEKMNTQFTAVGKEFNKLERRMENLNKKVDDGFLDIWTYNAELLVLLENERTLDFHDSNVKNLYEKVKSQLKNNAKEIGNGCFEFYHKCNDECMESVKNGTYDYPKYSEESKLNREKIDGVKLESMGVYQILAIYSTVASSLVLLVSLGAISFWMCSNGSLQCRICI

SEQ ID NO: 2042 - protein, 565 aa, Artificial Sequence; identical to SEQ ID NO: 1910
  derived and/or modified protein sequence (wt) from hemagglutinin__InfluenzaA__ABW40125

SEQ ID NO: 2043 - protein, 566 aa, Artificial Sequence; identical to SEQ ID NO: 1928
  derived and/or modified protein sequence (wt) from hemagglutinin__InfluenzaA__ABW40136

SEQ ID NO: 2044 - protein, 565 aa, Artificial Sequence; identical to SEQ ID NO: 1945
  derived and/or modified protein sequence (wt) from hemagglutinin__InfluenzaA__ABW40147

SEQ ID NO: 2045 - protein, 565 aa, Artificial Sequence; identical to SEQ ID NO: 1914
  derived and/or modified protein sequence (wt) from hemagglutinin__InfluenzaA__ABW40158

SEQ ID NO: 2046 - protein, 565 aa, Artificial Sequence; identical to SEQ ID NO: 1914
  derived and/or modified protein sequence (wt) from hemagglutinin__InfluenzaA__ABW40180

SEQ ID NO: 2047 - protein, 566 aa, Artificial Sequence; identical to SEQ ID NO: 1928
  derived and/or modified protein sequence (wt) from hemagglutinin__InfluenzaA__ABW40191

SEQ ID NO: 2048 - protein, 565 aa, Artificial Sequence; identical to SEQ ID NO: 1930
  derived and/or modified protein sequence (wt) from hemagglutinin__InfluenzaA__ABW40202

SEQ ID NO: 2049 - protein, 565 aa, Artificial Sequence; identical to SEQ ID NO: 1910
  derived and/or modified protein sequence (wt) from hemagglutinin__InfluenzaA__ABW40213

SEQ ID NO: 2050 - protein, 565 aa, Artificial Sequence; identical to SEQ ID NO: 1910
  derived and/or modified protein sequence (wt) from hemagglutinin__InfluenzaA__ABW40224

SEQ ID NO: 2051 - protein, 565 aa, Artificial Sequence; identical to SEQ ID NO: 1914
  derived and/or modified protein sequence (wt) from hemagglutinin__InfluenzaA__ABW40235

SEQ ID NO: 2052 - protein, 566 aa, Artificial Sequence
  derived and/or modified protein sequence (wt) from hemagglutinin__InfluenzaA__ABW40246
MKTIIALSYILCLVFAQKLPGNDNSTATLCLGHHAVPNGTIVKTITNDQIEVTNATELVQSSSTGEICDSPHQILDGENCTLIDALLGDPQCDGFQNKKWDLFVERSKAYSNCYPYDVPDYASLRSLVASSGTLEFNNESFNWTGVTQNGTSSACIRRSNNSFFSRLNWLTHLKFKYPALNVTMPNNEKFDKLYIWGVHHPGTDNDQVFLYAQASGRITVSTKRSQQTVIPNIGSRPRVRNIPSRISIYWTIVKPGDILLINSTGNLIAPRGYFRIRSGKSSIMRSDAPIGKCNSECITPNGSIPNDKPFQNVNRITYGACPRYVKQNTLKLATGMRNVPEKQTRGIFGAIAGFIENGWEGMVDGWYGFRHQNSEGIGQAADLKSTQAAIDQINGKLNRLIGKTNEKFHQIEKEFSEVEGRIQDLEKYVEDTKIDLWSYNAELLVALENQHTIDLTDSEMNKLFEKTKKQLRENAEDMGNGCFKIYHKCDNACIGSIRNGTYDHDVYRDEALNNRFQIKGVELKSGYKDWILWISFAISCFLLCVALLGFIMWACQKGNIRCNICI

SEQ ID NO: 2053 - protein, 565 aa, Artificial Sequence
  derived and/or modified protein sequence (wt) from hemagglutinin__InfluenzaA__ABW40257
MKVKLLILLCTFTATYADTICIGYHANNSTDTVDTVLEKNVTVTHSVNLLEDSHNGKLCLLKGIAPLQLGNCSVAGWILGNPECELLISKESWSYIVETPNPENGTCYPGYFADYEELREQLSSVSSFERFEIFPKESSWPNHTVTGVSASCSHNGKSSFYRNLLWLTGKNGLYPNLSKSYANNKEKEVLVLWGVHHPPNIGDQRALYHTENAYVSVVSSHYSRRFTPEIAKRPKVRDQEGRINYYWTLLEPGDTIIFEANGNLIAPRFAFALSRGFGSGIITSNAPMDECDAKCQTPQGAINSSLPFQNVHPVTIGECPKYVRSTKLRMVTGLRNIPSIQSRGLFGAIAGFIEGGWTGMVDGWYGYHHQNEQGSGYAADQKSTQNAINGITNKVNSIIEKMNTQFTAVGKEFNKLERRMENLNKKVDDGFLDIWTYNAELLVLLENERTLDFHDSNVKNLYEKVKSQLKNNAKEIGNGCFEFYHKCNDECMESVKNGTYDYPKYSEESKLNREKIDGVKLESMGVYQILAIYSTVASSLVLLVSLGAISFWMCSNGSLQCRICI

SEQ ID NO: 2054 - protein, 566 aa, Artificial Sequence; identical to SEQ ID NO: 1987
  derived and/or modified protein sequence (wt) from hemagglutinin__InfluenzaA__ABW40268

SEQ ID NO: 2055 - protein, 565 aa, Artificial Sequence
  derived and/or modified protein sequence (wt) from hemagglutinin__InfluenzaA__ABW40312
MKVKLLVLLCTFTATYADTICIGYHANNSTDTVDTVLEKNVTVTHSVNLLEDSHNGKLCLLKGIAPLQLGNCSVAGWILGNPECELLISKESWSYIVETPNPENGTCYPGYFADYEELREQLSSVSSFERFEIFPKESSWPNHTVTGVSASCSHNGRSSFYRNLLWLTGKNGLYPNLSKSYANNKEKEVLVLWGVHHPPNIGDQRALYHTENAYVSVVSSHYSRRFTPEIAKRPKVRDQEGRINYYWTLLEPGDTIIFEANGNLIAPRFAFALSRGFGSGIITSNAPMDECDAKCQTPQGAINSSLPFQNVHPVTIGECPKYVRSTKLRMVTGLRNIPSIQSRGLFGAIAGFIEGGWTGMVDGWYGYHHQNEQGSGYAADQKSTQNAINGITNKVNSVIEKMNTQFTAVGKEFNKLERRMENLNKKVDDGFLDIWTYNAELLVLLENERTLDFHDSNVKNLYEKVKSQLKNNAKEIGNGCFEFYHKCNDECMESVKNGTYDYPKYSEESKLNREKIDGVKLESMGVYQILAIYSTVASSLVLLVSLGAISFWMCSNGSLQCRICI

SEQ ID NO: 2056 - protein, 566 aa, Artificial Sequence; identical to SEQ ID NO: 1928
  derived and/or modified protein sequence (wt) from hemagglutinin__InfluenzaA__ABW40323

SEQ ID NO: 2057 - protein, 565 aa, Artificial Sequence; identical to SEQ ID NO: 1956
  derived and/or modified protein sequence (wt) from hemagglutinin__InfluenzaA__ABW40334

SEQ ID NO: 2058 - protein, 565 aa, Artificial Sequence; identical to SEQ ID NO: 1956
  derived and/or modified protein sequence (wt) from hemagglutinin__InfluenzaA__ABW40345

SEQ ID NO: 2059 - protein, 565 aa, Artificial Sequence
  derived and/or modified protein sequence (wt) from hemagglutinin__InfluenzaA__ABW40356
MKVKLLVLLCTFTATYADTICIGYHANNSTDTVDTVLEKNVTVTHSVNLLEDSHNGKLCLLKGIAPLQLGNCSVAGWILGNPECELLISKESWSYIVETPNPENGTCYPGYFADYEELREQLSSVSSFERFEIFPKESSWPNHTVTGVSASCSHNGKSSFYRNLLWLTGKNGLYPNLSKSYANNKEKEVLVMWGVHHPPNIGDQRALYHTENAYVSVVSSHYSRRFTPEIAKRPKVRDQEGRINYYWTLLEPGDTIIFEANGNLIAPRFAFALSRGFGSGIITSNAPMGECDAKCQTPQGAINSSLPFQNVHPVTIGECPKYVRSAKLRMVTGLRNIPSIQSRGLFGAIAGFIEGGWTGMVDGWYGYHHQNEQGSGYAADQKSTQNAINGITNKVNSVIEKMNTQFTAVGKEFNKLERRMENLNKKVDDGFLDIWTYNAELLVLLENERTLDFHDSNVKNLYEKVKSQLKNNAKEIGNGCFEFYHKCNDECMESVKNGTYDYPKYSEESKLNREKIDGVKLESMGVYQILAIYSTVASSLVLLVSLGAISFWMCSNGSLQCRICI

SEQ ID NO: 2060 - protein, 565 aa, Artificial Sequence; identical to SEQ ID NO: 1914
  derived and/or modified protein sequence (wt) from hemagglutinin__InfluenzaA__ABW40367

SEQ ID NO: 2061 - protein, 566 aa, Artificial Sequence; identical to SEQ ID NO: 1928
  derived and/or modified protein sequence (wt) from hemagglutinin__InfluenzaA__ABW40378

SEQ ID NO: 2062 - protein, 565 aa, Artificial Sequence; identical to SEQ ID NO: 1914
  derived and/or modified protein sequence (wt) from hemagglutinin__InfluenzaA__ABW40389

SEQ ID NO: 2063 - protein, 565 aa, Artificial Sequence; identical to SEQ ID NO: 1910
  derived and/or modified protein sequence (wt) from hemagglutinin__InfluenzaA__ABW40400

SEQ ID NO: 2064 - protein, 565 aa, Artificial Sequence; identical to SEQ ID NO: 1910
  derived and/or modified protein sequence (wt) from hemagglutinin__InfluenzaA__ABW40411

SEQ ID NO: 2065 - protein, 565 aa, Artificial Sequence; identical to SEQ ID NO: 1910
  derived and/or modified protein sequence (wt) from hemagglutinin__InfluenzaA__ABW40422

SEQ ID NO: 2066 - protein, 565 aa, Artificial Sequence; identical to SEQ ID NO: 1956
  derived and/or modified protein sequence (wt) from hemagglutinin__InfluenzaA__ABW40433

SEQ ID NO: 2067 - protein, 565 aa, Artificial Sequence; identical to SEQ ID NO: 1930
  derived and/or modified protein sequence (wt) from hemagglutinin__InfluenzaA__ABW40444

SEQ ID NO: 2068 - protein, 565 aa, Artificial Sequence; identical to SEQ ID NO: 1947
  derived and/or modified protein sequence (wt) from hemagglutinin__InfluenzaA__ABW40455

SEQ ID NO: 2069 - protein, 565 aa, Artificial Sequence; identical to SEQ ID NO: 1914
  derived and/or modified protein sequence (wt) from hemagglutinin__InfluenzaA__ABW40466

SEQ ID NO: 2070 - protein, 565 aa, Artificial Sequence; identical to SEQ ID NO: 1914
  derived and/or modified protein sequence (wt) from hemagglutinin__InfluenzaA__ABW40477

SEQ ID NO: 2071 - protein, 565 aa, Artificial Sequence; identical to SEQ ID NO: 1910
  derived and/or modified protein sequence (wt) from hemagglutinin__InfluenzaA__ABW40488

SEQ ID NO: 2072 - protein, 565 aa, Artificial Sequence; identical to SEQ ID NO: 1914
  derived and/or modified protein sequence (wt) from hemagglutinin__InfluenzaA__ABW40499

SEQ ID NO: 2073 - protein, 565 aa, Artificial Sequence; identical to SEQ ID NO: 1956
  derived and/or modified protein sequence (wt) from hemagglutinin__InfluenzaA__ABW40510

SEQ ID NO: 2074 - protein, 565 aa, Artificial Sequence; identical to SEQ ID NO: 1910
  derived and/or modified protein sequence (wt) from hemagglutinin__InfluenzaA__ABW40521

SEQ ID NO: 2075 - protein, 565 aa, Artificial Sequence; identical to SEQ ID NO: 1914
  derived and/or modified protein sequence (wt) from hemagglutinin__InfluenzaA__ABW40532

SEQ ID NO: 2076 - protein, 565 aa, Artificial Sequence
  derived and/or modified protein sequence (wt) from hemagglutinin__InfluenzaA__ABW40543
MKVKLLVLLCTFTATYADTICIGYHANNSTDTVDTVLEKNVTVTHSVNLLEDRHNGKLCLLKGIAPLQLGNCSVAGWILGNPECELLTSKESWSYIVETPNPENGTCYPGYFADYEELREQLSSVSSFERFEIFPKESSWPNHTVTGVSASCSHNGKSSFYRNLLWLTGKNGLYPNLSKSYANNKEKEVLVLWGVHHPPNIGDQRALYHTENAYVSVVSSHYSRRFTPEIAKRPKVRDQEGRINYYWTLLEPGDTIIFEANGNLIAPRFAFALSRGFGSGIITSNAPMDECDAKCQTPQGAINSSLPFQNVHPVTIGECPKYVRSAKLRMVTGLRNIPSIQSRGLFGAIAGFIEGGWTGMVDGWYGYHHQNEQGSGYAADQKSTQNAINGITNKVNSVIEKMNTQFTAVGKEFNKLERRMENLNKKVDDGFLDIWTYNAELLVLLENERTLDFHDSNVKNLYEKVKSQLKNNAKEIGNGCFEFYHKCNDECMESVKNGTYDYPKYSEESKLNREKIDGVKLESMGVYQILAIYSTVASSLVLLVSLGAISFWMCSNGSLQCRICI

SEQ ID NO: 2077 - protein, 565 aa, Artificial Sequence; identical to SEQ ID NO: 2055
  derived and/or modified protein sequence (wt) from hemagglutinin__InfluenzaA__ABW40554

SEQ ID NO: 2078 - protein, 565 aa, Artificial Sequence; identical to SEQ ID NO: 1914
  derived and/or modified protein sequence (wt) from hemagglutinin__InfluenzaA__ABW40565

SEQ ID NO: 2079 - protein, 565 aa, Artificial Sequence
  derived and/or modified protein sequence (wt) from hemagglutinin__InfluenzaA__ABW40576
MKVKLLILLCTFTATYADTICIGYHANNSTDTVDTVLEKNVTVTHSVNLLEDSHNGKLCLLKGIAPLQLGNCSVAGWILGNPECELLISKESWSYIVETPNPENGTCYPGYFADYEELREQLSSVSSFERFEIFPKESSWPNHTVTGVSASCSHNGKSSFYRNLLWLTGKNGLYPNLSKSYANNKEKEVLVLWGVHHPPNIGDQRALYHTENTYVSVVSSHYSRRFTPEIAKRPKVRDQEGRINYYWTLLEPGDTIILEANGNLIAPRFAFALSRGFGSGIITSNAPMDECDAKCQTPQGAINSSLPFQNVHPVTIGECPKYVRSTKLRMVTGLRNIPSIQSRGLFGAIAGFIEGGWTGMVDGWYGYHHQNEQGSGYAADQKSTQNAINGITNKVNSVIEKMNTQFTAVGKEFNKLERRMENLNKKVDDGFLDIWTYNAELLVLLENERTLDFHDSNVKNLYEKVKSQLKNNAKEIGNGCFEFYHKCNDECMESVKNGTYDYPKYSEESKLNREKIDGVKLESMGVYQILAIYSTVASSLVLLVSLGAISFWMCSNGSLQCRICI

SEQ ID NO: 2080 - protein, 566 aa, Artificial Sequence; identical to SEQ ID NO: 1987
  derived and/or modified protein sequence (wt) from hemagglutinin__InfluenzaA__ABW40587

SEQ ID NO: 2081 - protein, 565 aa, Artificial Sequence; identical to SEQ ID NO: 1956
  derived and/or modified protein sequence (wt) from hemagglutinin__InfluenzaA__ABW40598

SEQ ID NO: 2082 - protein, 565 aa, Artificial Sequence; identical to SEQ ID NO: 1930
  derived and/or modified protein sequence (wt) from hemagglutinin__InfluenzaA__ABW40609

SEQ ID NO: 2083 - protein, 565 aa, Artificial Sequence; identical to SEQ ID NO: 1945
  derived and/or modified protein sequence (wt) from hemagglutinin__InfluenzaA__ABW40620

SEQ ID NO: 2084 - protein, 566 aa, Artificial Sequence; identical to SEQ ID NO: 1987
  derived and/or modified protein sequence (wt) from hemagglutinin__InfluenzaA__ABW40631

SEQ ID NO: 2085 - protein, 565 aa, Artificial Sequence; identical to SEQ ID NO: 1910
  derived and/or modified protein sequence (wt) from hemagglutinin__InfluenzaA__ABW40642

SEQ ID NO: 2086 - protein, 566 aa, Artificial Sequence; identical to SEQ ID NO: 1987
  derived and/or modified protein sequence (wt) from hemagglutinin__InfluenzaA__ABW40653

SEQ ID NO: 2087 - protein, 565 aa, Artificial Sequence; identical to SEQ ID NO: 1956
  derived and/or modified protein sequence (wt) from hemagglutinin__InfluenzaA__ABW40664

SEQ ID NO: 2088 - protein, 565 aa, Artificial Sequence; identical to SEQ ID NO: 1930
  derived and/or modified protein sequence (wt) from hemagglutinin__InfluenzaA__ABW40675

SEQ ID NO: 2089 - protein, 565 aa, Artificial Sequence; identical to SEQ ID NO: 2059
  derived and/or modified protein sequence (wt) from hemagglutinin__InfluenzaA__ABW71294

SEQ ID NO: 2090 - protein, 565 aa, Artificial Sequence; identical to SEQ ID NO: 1956
  derived and/or modified protein sequence (wt) from hemagglutinin__InfluenzaA__ABW71305

SEQ ID NO: 2091 - protein, 565 aa, Artificial Sequence
  derived and/or modified protein sequence (wt) from hemagglutinin__InfluenzaA__ABW71316
MKVKLLILLCTFTATYADTICIGYHANNSTDTVDTVLEKNVTVTHSVNLLEDSHNGKLCLLKGIAPLQLGNCSVAGWILGNPECELLISKESWSYIVETPNPENGTCYPGYFADYEELREQLSSVSSFERFEIFPKESSWPNHTVTGVSASCSHNGKSSFYRNLLWLTGKNGLYPNLSKSYANNKEKEVLVLWGVHHPPNIGDQRALYHTENAYVSVVSSHYSRRFTPEIAKRPKVRDQEGRINYYWTLLEPRDTIIFEANGNLIAPRFAFALSRGFGSGIITSNAPMDECDAKCQTPQGAINSSLPFQNVHPVTIGECPKYVRSTKLRMVTGLRNIPSIQSRGLFGAIAGFIEGGWTGMVDGWYGYHHQNEQGSGYAADQKSTQNAINGITNKVNSVIEKMNTQFTAVGKEFNKLERRMENLNKKVDDGFLDIWTYNAELLVLLENERTLDFHDSNVKNLYEKVKSQLKNNAKEIGNGCFEFYHKCNDECMESVKNGTYDYPKYSEESKLNREKIDGVKLESMGVYQILAIYSTVASSLVLLVSLGAISFWMCSNGSLQCRICI

SEQ ID NO: 2092 - protein, 565 aa, Artificial Sequence; identical to SEQ ID NO: 1910
  derived and/or modified protein sequence (wt) from hemagglutinin__InfluenzaA__ABW71327

SEQ ID NO: 2093 - protein, 565 aa, Artificial Sequence; identical to SEQ ID NO: 1914
  derived and/or modified protein sequence (wt) from hemagglutinin__InfluenzaA__ABW71338

SEQ ID NO: 2094 - protein, 566 aa, Artificial Sequence; identical to SEQ ID NO: 1928
  derived and/or modified protein sequence (wt) from hemagglutinin__InfluenzaA__ABW71349

SEQ ID NO: 2095 - protein, 565 aa, Artificial Sequence
  derived and/or modified protein sequence (wt) from hemagglutinin__InfluenzaA__ABW71360
MKVKLLVLLCTFTATYADTICIGYHANNSTDTVDTVLEKNVTVTHSVNLLEDRHNGKLCLLKGIAPLQLGNCSVAGWILGNPECELLISKESWSYIVETPNPENGTCYPGYFADYEELREQLSSVSSFERFEIFPKESSWPNHTVTGVSASCSHNGKSSFYRNLLWLTGKNGLYPNLSRSYANNKEKEVLVLWGVHHPPNIGDQRALYHTENAYVSVVSSHYSRRFTPEIAKRPKVRDQEGRINYYWTLLEPGDTIIFEANGNLIAPRFAFALSRGFGSGIITSNAPMDECDAKCQTPQGAINSSLPFQNVHPVTIGECPKYVRSAKLRMVTGLRNIPSIQSRGLFGAIAGFIEGGWTGMVDGWYGYHHQNEQGSGYAADQKSTQNAINGITNKVNSVIEKMNTQFTAVGKEFNKLERRMENLNKKVDDGFLDIWTYNAELLVLLENERTLDFHDSNVKNLYEKVKSQLKNNAKEIGNGCFEFYHKCDDECMESVKNGTYDYPKYSEESKLNREKIDGVKLESMGVYQILAIYSTVASSLVLLVSLGAISFWMCSNGSLQCRICI

SEQ ID NO: 2096 - protein, 565 aa, Artificial Sequence; identical to SEQ ID NO: 1930
  derived and/or modified protein sequence (wt) from hemagglutinin__InfluenzaA__ABW71371

SEQ ID NO: 2097 - protein, 565 aa, Artificial Sequence
  derived and/or modified protein sequence (wt) from hemagglutinin__InfluenzaA__ABW71382
MKVKLLILLCTFTATYADTICIGYHANNSTDTVDTVLEKNVTVTHSVNLLEDSHNGKLCLLKGIAPLQLGNCSVAGWILGNPECELLISKESWSYIVETPNPENGTCYPGYFADYEELREQLSSVSSFERFEIFPKESSWSNHTITGVSASCSHNGKSSFYRNLLWLTGKNGLYPNLSKSYANNKEKEVLVLWGVHHPPNIGDQRALYHTENAYVSVVSSHYSRRFTPEIAKRPKVRDQEGRINYYWTLLEPGDTIIFEANGNLIAPRFAFALSRGFGSGIITSNAPMDECDAKCQTPQGAINSSLPFQNVHPVTIGECPKYVRSTKLRMVTGLRNIPSIQSRGLFGAIAGFIEGGWTGMVDGWYGYHHQNEQGSGYAADQKSTQNAINGITNKVNSVIEKMNTQFTAVGKEFNKLERRMENLNKKVDDGFLDIWTYNAELLVLLENERTLDFHDSNVKNLYEKVKSQLKNNAKEIGNGCFEFYHKCNDECMESVKNGTYDYPKYSEESKLNREKIDGVKLESMGVYQILAIYSTVASSLVLLVSLGAISFWMCSNGSLQCRICI

SEQ ID NO: 2098 - protein, 565 aa, Artificial Sequence
  derived and/or modified protein sequence (wt) from hemagglutinin__InfluenzaA__ABW71393
MKVKLLVLLCTFTATYADTICIGYHANNSTDTVDTVLEKNVTVTHSVNLLEDSHNGKLCLLKGIAPLQLGNCSVAGWILGNPECELLISKESWSYIVETPNPENGTCYPGYFTDYEELREQLSSVSSFERFEIFPKESSWPNHTVTGVSASCSHNGKSSFYRNLLWLTGKNGLYPNLSKSYANNKEKEVLVLWGVHHPPNIGDQRALYHTENAYVSVVSSHYSRRFTPEIAKRPKVRDQEGRINYYWTLLEPGDTIIFEANGNLIAPRFAFALSRGFGSGIITSNAPMGECDAKCQTPQGAINSSLPFQNVHPVTIGECPKYVRSAKLRMVTGLRNIPSIQSRGLFGAIAGFIEGGWTGMVDGWYGYHHQNEQGSGYAADQKSTQNAINGITNKVNSVIEKMNTQFTAVGKEFNKLERRMENLNKKVDDGFLDIWTYNAELLVLLENERTLDFHDSNVKNLYEKVKSQLKNNAKEIGNGCFEFYHKCNDECMESVKNGTYDYPKYSEESKLNREKIDGVKLESMGVYQILAIYSTVASSLVLLVSLGAISFWMCSNGSLQCRICI

SEQ ID NO: 2099 - protein, 565 aa, Artificial Sequence; identical to SEQ ID NO: 2059
  derived and/or modified protein sequence (wt) from hemagglutinin__InfluenzaA__ABW71404

SEQ ID NO: 2100 - protein, 565 aa, Artificial Sequence; identical to SEQ ID NO: 1947
  derived and/or modified protein sequence (wt) from hemagglutinin__InfluenzaA__ABW71415

SEQ ID NO: 2101 - protein, 565 aa, Artificial Sequence
  derived and/or modified protein sequence (wt) from hemagglutinin__InfluenzaA__ABW71426
MKAKLLILLCTFTATYADTICIGYHANNSTDTVDTVLEKNVTVTHSVNLLEDSHNGKLCLLKGIAPLQLGNCSVAGWILGNPECELLISKESWSYIVETPNPENGTCYPGYFADYEELREQLSSVSSFERFEIFPKESSWPNHTVTGVSASCSHNGKSSFYRNLLWLTGKNGLYPNLSKSYANNKEKEVLVLWGVHHPPNIGDQRALYHTENAYVSVVSSHYSRRFTPEIAKRPKVRDQEGRINYYWTLLEPGDTIIFEANGNLIAPRFAFALSRGFGSGIITSNAPMDECDAKCQTPQGAINSSLPFQNVHPVTIGECPKYVRSTKLRMVTGLRNIPSIQSRGLFGAIAGFIEGGWTGMVDGWYGYHHQNEQGSGYAADQKSTQNAINGITNKVNSVIEKMNTQFTAVGKEFNKLERRMENLNKKVDDGFLDIWTYNAELLVLLENERTLDFHDSNVKNLYEKVKSQLKNNAKEIGNGCFEFYHKCNDECMESVKNGTYDYPKYSEESKLNREKIDGVKLESMGVYQILAIYSTVASSLVLLVSLGAISFWMCSNGSLQCRICI

SEQ ID NO: 2102 - protein, 565 aa, Artificial Sequence
  derived and/or modified protein sequence (wt) from hemagglutinin__InfluenzaA__ABW71448
MKVKLLVLLCTFTATYADTICIGYHANNSTDTVDTVLEKNVTVTHSVNLLEDSHNGKLCLLKGIAPLQLGNCSVAGWILGNPECELLISKESWSYIVETPNPENGTCYPGYFADYEELREQLSSVSSFERFEIFPKESSWPNHTVTGVSASCSHNGKSSFYRNLLWLTGKNGLYPNLSKSYANNKEKEVLVLWGVHHPPNIGDQRALYHTENAYVSVVSSHYSRRFTPEIAKRPKVRDQEGRINYYWTLLEPGDTIIFEANGNLIAPRFAFALSRGFGSGIITSNAPMDECDAKCQTPQGAINSSLPFQNVHPVTIGECPKYVRSTKLRMVTGLRNIPSIQSRGLFGAIAGFIEGGWTGMVDGWYGYHHQNEQGSGYAADQKSTQNAINGITNKVNSVIEKMNTQFTAVGKEFNKLERRMENLNKKVDDGFLDIWTYNAELLVLLENERTLDFHDSNVKNLYEKVKSQLKNNAKEIGNGCFEFYHKCNDECMESVKNGTYDYPKYSEESKLNREKIDGVKLESMGVYQILAIYSTIASSLVLLVSLGAISFWMCSNGSLQCRICI

SEQ ID NO: 2103 - protein, 565 aa, Artificial Sequence; identical to SEQ ID NO: 1930
  derived and/or modified protein sequence (wt) from hemagglutinin__InfluenzaA__ABW71459

SEQ ID NO: 2104 - protein, 565 aa, Artificial Sequence; identical to SEQ ID NO: 1914
  derived and/or modified protein sequence (wt) from hemagglutinin__InfluenzaA__ABW71470

SEQ ID NO: 2105 - protein, 568 aa, Artificial Sequence
  derived and/or modified protein sequence (wt) from hemagglutinin__InfluenzaA__ABW74702
MEKIVLLLAIVSLVKSDQICIGYHANNSTEQVDTIMEKNVTVTHAQDILEKTHNGKLCDLDGVKPLILRDCSVAGWLLGNPMCDEFINVPEWSYIVEKANPTNDLCYPGSFNDYEELKHLLSRINHFEKIQIIPKSSWSDHEASSGVSSACPYLGSSSFFRNVVWLIKKNSTYPTIKKSYNNTNQEDLLVLWGIHHPNDAAEQTRLYQNPTTYISIGTSTLNQRLVPKIATRSKVNGQSGRMEFFWTILKPNDAINFESNGNFIAPEYAYKIVKKGDSAIMKSELEYGNCNTKCQTPMGAINSSMPFHNIHPLTIGECPKYVKSNRLVLATGLRNSPQRESRRKKRGLFGAIAGFIEGGWQGMVDGWYGYHHSNEQGSGYAADKESTQKAIDGVTNKVNSIIDKMNTQFEAVGREFNNLERRIENLNKKMEDGFLDVWTYNAELLVLMENERTLDFHDSNVKNLYDKVRLQLRDNAKELGNGCFEFYHKCDNECIESIRNGTYNYPQYSEEARLKREEISGVKLESIGTYQILSIYSTVASSLALAIMMAGLSLWMCSNGSLQCRICI

SEQ ID NO: 2106 - protein, 568 aa, Artificial Sequence
  derived and/or modified protein sequence (wt) from hemagglutinin__InfluenzaA__ABW74703
MEKIVLLLAIVSLVKSDQICIGYHANNSTEQVDTIMEKNVTVTHAQDILEKTHNGKLCDLDGVKPLILKDCSVAGWLLGNPMCDEFINVPEWSYIVEKANPTNDLCYPGSFNDYEELKHLLSRINHFEKIQIIPKSSWSDHEASSGVSSACPYLGSPSFFRNVVWLIKKNSTYPTIKKSYNNTNQEDLLVLWGIHHPNDAAEQTRLYQNPTTYISIGTSTLNQRLVPKIATRSKVNGQSGRMEFFWTILKPNDAVNFESNGNFIAPEYAYKIVKKGDSAIMKSELEYGNCNTKCQTPMGAINSSMPFHNIHPLTIGECPKYVKSNRLVLATGLRNSPQRESRRKKRGLFGAIAGFIEGGWQGMVDGWYGYHHSNEQGSGYAADKESTQKAIDGVTNKVNSIIDKMNTQFEAVGREFNSLERRIENLNKKMEDGFLDVWTYNAELLVLMENERTLDFHDSNVKNLYDKVRLQLRDNAKELGNGCFEFYHKCDNECMESIRNGTYNYPQYSEEARLKREEISGVKLESIGTYQILSIYSTVASSLALAIMIAGLSLWMCSNGSLQCRICI

SEQ ID NO: 2107 - protein, 568 aa, Artificial Sequence
  derived and/or modified protein sequence (wt) from hemagglutinin__InfluenzaA__ABW74705
MEKIVLLLAIVSLVKSDQICIGYHANNSTEQVDTIMEKNVTVTHAQDILEKTHNGKLCDLDGVKPLILRDCSVAGWLLGNPMCDEFINVPEWSYIVEKANPTNDLCYPGSFNDYEELKHLLSRINHFEKIQIIPKSSWSDHEASSGVSSACPYLGSPSFFRNVVWLIKKNSTYPTIKKSYNNTNQEDLLVLWGIHHPNDAAEQTRLYQNPTTYISIGTSTLNQRLVPKIATRSKVNGQSGRMEFFWTILKPNDAINFESNGNFIAPEYAYKIVKKGDSAIMKSELEYGNCNTKCQTPMGAINSSMPFHNIHPLTIGECPKYVKSNRLVLATGLRNSPQRESRRKKRGLFGAIAGFIEGGWQGMVDGWYGYHHSNEQGSGYAADKESTQKAIDGVTNKVNSIIDKMNTQFEAVGREFNNLERRIENLNKKMEDGFLDVWTYNAELLVLMENERTLDFHDSNVKNLYDKVRLQLRDNAKELGNGCFEFYHKCDNECMESIRNGTYNYPQYSEEARLKREEISGVKLESIGTYQILSIYSTVASSLALAIMIAGLSLWMCSNGSLQCRICI

SEQ ID NO: 2108 - protein, 568 aa, Artificial Sequence
  derived and/or modified protein sequence (wt) from hemagglutinin__InfluenzaA__ABW74707
MEKIVLLLAIVSLVKSDQICIGYHANNSTEQVDTIMEKNVTVTHAQDILEKTHNGKLCDLDGVKPLILRDCSVAGWLLGNPMCDEFINVPEWSYIVEKANPTNDLCYPGSFNDYEELKHLLSRINHFEKIQIIPKSSWSDHEASSGVSSACPYLGSPSFFRNVVWLIKKNSTYPTIKKSYNNTNQEDLLVLWGIHHPNDAAEQTRLYQNPTTYISIGTSTLNQRLVPKMATRSKVNGQSGRMEFFWTILKPNDAINFESNGNFIAPEYAYKIVKKGDSAIMKSELEYGNCNTKCQTPMGAINSSMPFHNIHPLTIGECPKYVKSNRLVLATGLRNSPQRESRRKKRGLFGAIAGFIEGGWQGMVDGWYGYHHSNEQGSGYAADKESTQKAIDGVTNKVNSIIDKMNTQFEAVGREFNNLERRIENLNKKMEDGFLDVWTYNAELLVLMENERTLDFHDSNVKNLYDKVRLQLRDNAKELGNGCFEFYHKCDNECMESIRNGTYNYPQYSEEARLKREEISGVKLESIGTYQILSIYSTVASSLALAIMIAGLSLWMCSNGSLQCRICI

SEQ ID NO: 2109 - protein, 568 aa, Artificial Sequence
  derived and/or modified protein sequence (wt) from hemagglutinin__InfluenzaA__ABW74708
MEKIVLLLAIVSLVKSDQICIGYHANNSTEQVDTIMEKNVTVTHAQDILEKTHNGKLCDLDGVKPLILRDCSVAGWLLGNPMCDEFINVPEWSYIVEKANPTNDLCYPGSFNDYEELKHLLSRINHFEKIQIIPKSSWSDHEASSGVSSACPYLGSPSFFRNVVWLIKKNSTYPTIKKSYNNTNQEDLLVLWGIHHPNDAAEQTRLYQNPTTYISIGTSTLNQRLVPKIATRSKVNGQSGRMEFFWTILKPNDAINFESNGNFIAPEYAYKIVKKGDSAIMKSELEYGNCNTKCQTPMGAINSSMPFHNIHPLTIGECPKYVKSNRSVLATGLRNSPQRESRRKKRGLFGAIAGFIEGGWQGMVDGWYGYHHSNEQGSGYAADKESTQKAIDGVTNKVNSIIDKMNTQFEAVGREFNNLERRIENLNKKMEDGFLDVWTYNAELLVLMENERTLDFHDSNVKNLYDKVRLQLRDNAKELGNGCFEFYHKCDNECMESIRNGTYNYPQYSEEARLKREEISGVKLESIGTYQILSIYSTVASSLALAIMMAGLSLWMCSNGSLQCRICI

SEQ ID NO: 2110 - protein, 568 aa, Artificial Sequence; identical to SEQ ID NO: 2107
  derived and/or modified protein sequence (wt) from hemagglutinin__InfluenzaA__ABW74710

SEQ ID NO: 2111 - protein, 568 aa, Artificial Sequence; identical to SEQ ID NO: 2107
  derived and/or modified protein sequence (wt) from hemagglutinin__InfluenzaA__ABW74711

SEQ ID NO: 2112 - protein, 568 aa, Artificial Sequence
  derived and/or modified protein sequence (wt) from hemagglutinin__InfluenzaA__ABW74712
MEKIVLLLSIVSLVKSDQICIGYHANNSTEQVDTIMEKNVTVTHAQDILEKTHNGKLCDLDGVKPLILRDCSVAGWLLGNPMCDEFINVPEWSYIVEKANPTNDLCYPGSFNDYEELKHLLSRINHFEKIQIIPKSSWSDHEASSGVSSACPYLGSPSFFRNVVWLIKKNSTYPTIKKSYNNTNQEDLLVLWGIHHPNNEEEQTRLYQNPTTYISIGTSTLNQRLVPKIATRSKVNGQSGRMEFFWTILKPNDAINFESNGNFIAPEYAYKIVKKGDSAIMKSELEYSNCNTKCQTPMGAINSSMPFHNIHPLTIGECPKYVKSSRLVLATGLRNSPQRESRRKKRGLFGAIAGFIEGGWQGMVDGWYGYHHSNEQGSGYAADKESTQKAIDGVTNKVNSIIDKMNTQFEAVGREFNNLERRIENLNKKMEDGFLDVWTYNAELLVLMENERTLDFHDSNVKNLYDKVRLQLRDNAKELGNGCFEFYHKCDNECMESIRNGTYNYPQYSEEARLKREEISGVKLESIGTYQILSIYSTVASSLALAIMIAGLSLWMCSNGSLQCRICI

SEQ ID NO: 2113 - protein, 566 aa, Artificial Sequence
  derived and/or modified protein sequence (wt) from hemagglutinin__InfluenzaA__ABW80976
MKTIIALSYILCLVFAQKLPGNDNSTATLCLGHHAVPNGTLVKTITNDQIEVTNATELVQSSSTSRICDSPHQILDGENCTLIDALLGDPHCDGFQNKEWDLFVERSKAYSNCYPYDVPDYVSLRSLVASSGTLEFNNESFNWTGVAQNGTSSACKRRSDKSFFSRLNWLHQLKYKYPALNVTMPNNEKFDKLYIWGVHHPGTDSDQISIYAQASGRVTVSTKRSQQTVIPNIGSRPWVRGVSSGISIYWTIVKPGDILLINSTGNLIAPRGYFKIRSGKSSIMRSDAPIGKCNSECITPNGSIPNDKPFQNVNRITYGACPRYVKQNTLKLATGMRNVPEKQTRGIFGAIAGFIENGWEGMMDGWYGFRHQNSEGTGQAADLKSTQAAINQINGKLNRLIEKTNEKFHQIEKEFSEVEGRIQDLEKYVEDTKIDLWSYNAELLVALENQHTIDLTDSEMNKLFERTKKQLRENAEDMGNGCFKIYHKCDNACIGSIRNGTYDHDVYRDEALNNRFQIKGVELKSGYKDWILWISFAISCFLLCIVLLGFIMWACQKGNIRCNICI

SEQ ID NO: 2114 - protein, 566 aa, Artificial Sequence
  derived and/or modified protein sequence (wt) from hemagglutinin__InfluenzaA__ABW80977
MKTIIALSYILCLVFAQKLPGNDNSTATLCLGHHAVPNGTIVKTITNDQIEVTNATELVQSSSTGGICDSPHQILDGENCTLIDALLGDPQCDGFQNKKWDLFVERSKAYSNCYPYDVPDYASLRSLVASSGTLEFNNESFNWTGVTQNGTSSACKRRSNKSFFSRLNWLTHLKFKYPALNVTMPNNEKFDKLYIWGVHHPGTDNDQINLYAQASGRITVSTKRSQQTVIPNIGSRPRVRDVPSRISIYWTIVKPGDILLISSTGNLIAPRGYFKIRSGKSSIMRSDAPIGKCNSECITPNGSIPNDKPFQNVNRITYGACPRYVKQNTLKLATGMRNVPEKQTRGIFGAIAGFIENGWEGMVDGWYGFRHQNSEGTGQAADLKSTQAAINQINGKLNRLIGKTNEKFHQIEKEFSEVEGRIQDLEKYVEDTKIDLWSYNAELLVALENQHTIDLTDSEMNKLFERTKKQLRENAEDMGNGCFKIYHKCDNACIGSIRNGTYDHDVYRDEALNNRFQIKGVELKSGYKDWILWISFAISCFLLCVALLGFIMWACQKGNIRCNICI

SEQ ID NO: 2115 - protein, 565 aa, Artificial Sequence
  derived and/or modified protein sequence (wt) from hemagglutinin__InfluenzaA__ABW80979
MKAKLLVLLCTFTATYADTICIGYHANNSTDTVDTVLEKNVTVTHSVNLLEDSHNGKLCLLKGIAPLQLGNCSVAGWILGNPECELLISKESWSYIVETPNPENGTCYPGYFADYEELREQLSSVSSFERFEIFPKESSWPNHTVTGVSASCSHNGKSSFYRNLLWLTGKNGLYPNLSKSYVNNKEKEVLVLWGVHHPPNIGNQRALYHTENAYVSVVSSHYSRRFTPEIAKRPKVRDQEGRINYYWTLLEPGDTIIFEANGNLIAPWYAFALSRGFGSGIITSNAPMDECDAKCQTPQGAINSSLPFQNVHPVTIGECPKYVRSAKLRMVTGLRNIPSIQSRGLFGAIAGFIEGGWTGMVDGWYGYHHQNEQGSGYAADQKSTQNAINGITNKVNSVIEKMNTQFTAVGKEFNKLERRMENLNKKVDDGFLDIWTYNAELLVLLENERTLDFHDSNVKNLYEKVKSQLKNNAKEIGNGCFEFYHKCNNECMESVKNGTYDYPKYSEESKLNREKIDGVKLESMGVYQILAIYSTVASSLVLLVSLGAISFWMCSNGSLQCRICI

SEQ ID NO: 2116 - protein, 566 aa, Artificial Sequence
  derived and/or modified protein sequence (wt) from hemagglutinin__InfluenzaA__ABW81505
MKAKLLVLLCTFTATYADTICIGYHANNSTDTVDTVLEKNVTVTHSVNLLEDSHNGKLCRLKGTAPLQLGNCSIAGWILGNPECESLFSKESWSYIAETPNPKNGTCYPGYFADYEELREQLSSVSSFERFEIFPKDSSWPNHTVTKGVTASCSHNGKSSFYKNLLWLTEKNGLYPNLSKSYVNKKGKEVLVLWGVHHPSNMGDQRAIYHKENAYVSVLSSHYSRRFTPEIAKRPKVRDQEGRINYYWTLLEPGDTIIFEANGNLIAPWYAFALSRGFGSGIIISNASMGECDAKCQTPQGAINSSLPFQNVHPVTIGECPKYVRSTKLRMVTGLRNVPSIQSRGLFGAIAGFIEGGWTGMIDGWYGYHHQNEQGSGYAADQKSTQNAINGITNKVNSIIEKMNTQFTAVGKEFNKLERRMENLNKKVDDGFLDIWTYNAELLVLLENERTLDFHDSNVKNLYEKVKTQLKNNAKEIGNGCFEFYHKCNNECMESVKNGTYDYPKYSKESKLNREKIDGVKLESMGVYQILAIYSTVASSLVLLVSLGAISFWMCSNGSLQCRICI

SEQ ID NO: 2117 - protein, 565 aa, Artificial Sequence
  derived and/or modified protein sequence (wt) from hemagglutinin__InfluenzaA__ABW81506
MKVKLLVLLCTFTATYADTICIGYHANNSTDTVDTVLEKNVTVTHSVNLLEDSHNGKLCLLKGIAPLQLGNCSVAGWILGNPECELLISKESWSYIVETPNPENGTCYPGYFADYEELREQLSSVSSFERFEIFPKESSWPNHTVTGVSASCSHNGKSSFYRNLLWLTGKNGLYPNLSKSYANNKEKEVLVLWGVHHPPNIGNQRALYHTENAYVSVVSSHYSRRFTPEIAKRPKVRDQEGRINYYWTLLEPGDTIIFEANGNLIAPWYAFALSRGFGSGIITSNAPMDECDAKCQTPQGAINSSLPFQNVHPVTIGECPKYVRSAKLRMVTGLRNIPSIQSRGLFGAIAGFIEGGWTGMVDGWYGYHHQNEQGSGYAADQKSTQNAINGITNKVNSVIEKMNTQFTAVGKEFNKLERRMENLNKKVDDGFLDIWTYNAELLVLLENERTLDFHDSNVKNLYEKVKSQLKNNAKEIGNGCFEFYHKCNNECMESVKNGTYDYPKYSEESKLNREKIDGVKLESMGIYQILAIYSTVASSLVLLVSLGAISFWMCSNGSLQCRICI

SEQ ID NO: 2118 - protein, 566 aa, Artificial Sequence
  derived and/or modified protein sequence (wt) from hemagglutinin__InfluenzaA__ABW81507
MKAKLLVLLCTFTATYADTICIGYHANNSTDTVDTVLEKNVTVTHSVNLLEDSHNGKLCRLKGTVPLQLGNCSIAGWILGNPECESLFSKESWSYIAETPNPKNGTCYPGYFADYEELREQLSSVSSFERFEIFPKDSSWPNHTVTKGVTASCSHNGKSSFYKNLLWLTEKNGLYPNLSKSYVNKKGKEVLVLWGVHHPSNMGDQRAIYHKENAYVSVLSSHYSRRFTPEIAKRPKVRDQEGRINYYWTLLEPGDTIIFEANGNLIAPWYAFALSRGFGSGIIISNASMGECDAKCQTPQGAINSSLPFQNVHPVTIGECPKYVRSTKLRMVTGLRNVPSIQSRGLFGAIAGFIEGGWTGMIDGWYGYHHQNEQGSGYAADQKSTQNAINGITNKVNSIIEKMNTQFTAVGKEFNKLERRMENLNKKVDDGFLDIWTYNAELLVLLENERTLDFHDSNVKNLYEKVKTQLKNNAKEIGNGCFEFYHKCNNECMESVKNGTYDYPKYSKESKLNREKIDGVKLESMGVYQILAIYSTVASSLVLLVSLGAISFWMCSNGSLQCRICI

SEQ ID NO: 2119 - protein, 565 aa, Artificial Sequence
  derived and/or modified protein sequence (wt) from hemagglutinin__InfluenzaA__ABW81508
MKVKLLVLLCTFTATYADTICIGYHANNSTDTVDTVLEKNVTVTHSVNLLEDSHNGKLCLLKGIAPLQLGNCSVAGWILGNPECELLISKESWSYIVETPNPENGTCYPGYFADYEELREQLSSVSSFERFEIFPKESSWPNHTVTGVSASCSHNGKSSFYRNLLWLTRKNGLYPNLSKSYANNKEKEVLVLWGVHHPPNIGDQRALYHTENAYVSVVSSHYSRRFTPEIAKRPKVRDQEGRINYYWTLLEPGDTIIFEANGNLIAPRYAFALSRGFGSGIITSNAPMDECDAKCQTPQGAINSSLPFQNVHPVTIGECPKYVRSAKLRMVTGLRNIPSIQSRGLFGAIAGFIEGGWTGMVDGWYGYHHQNEQGSGYAADQKSTQNAINGITNKVNSVIEKMNTQFTAVGKEFNKLERRMENLNKKVDDGFLDIWTYNAELLVLLENERTLDFHDSNVKNLYEKVKSQLKNNAKEIGNGCFEFYHKCNDECMESVKNGTYDYPKYSEESKLNREKIDGVKLESMGVYQILAIYSTVASSLVLLVSLGAISFWMCSNGSLQCRICI

SEQ ID NO: 2120 - protein, 566 aa, Artificial Sequence; identical to SEQ ID NO: 2116
  derived and/or modified protein sequence (wt) from hemagglutinin__InfluenzaA__ABW81509

SEQ ID NO: 2121 - protein, 565 aa, Artificial Sequence
  derived and/or modified protein sequence (wt) from hemagglutinin__InfluenzaA__ABW81511
MKAKLLVLLCTFTATYADTICIGYHANNSTDTVDTVLEKNVTVTHSVNLLEDSHNGKLCLLKGIAPLQLGNCSVAGWILGNPECELLISKESWSYIVETPNPENGTCYPGYFADYEELREQLSSVSSFERFEIFPKGSSWPNHTVTGVSASCSHNGKSSFYRNLLWLTGKNGLYPNLSMSYVNNKEKEVLVLWGVHHPPNIGNQRALYHTENAYVSVVSSHYSRRFTPEIAKRPKVRDQEGRINYYWTLLEPGDSIIFEANGNLIAPWYAFALSRGFGSGIITSNAPMDECDAKCQTPQGAINSSLPFQNVHPVTIGECPKYVRSAKLRMVTGLRNIPSIQSRGLFGAIAGFIEGGWTGMVDGWYGYHHQNEQGSGYAADQKSTQNAINGITNKVNSVIEKMNTQFTAVGKEFNKLERRMENLNKKVDDGFLDIWTYNAELLVLLENERTLDFHDSNVKNLYEKVKSQLKNNAKEIGNGCFEFYHKCNNECMESVKNGTYDYPKYSEESKLNREKIDGVKLESMGVYQILAIYSTVASSLVLLVSLGAISFWMCSNGSLQCRICI

SEQ ID NO: 2122 - protein, 565 aa, Artificial Sequence; identical to SEQ ID NO: 296
  derived and/or modified protein sequence (wt) from hemagglutinin__InfluenzaA__ABW81512

SEQ ID NO: 2123 - protein, 565 aa, Artificial Sequence; identical to SEQ ID NO: 1385
  derived and/or modified protein sequence (wt) from hemagglutinin__InfluenzaA__ABW81513

SEQ ID NO: 2124 - protein, 565 aa, Artificial Sequence
  derived and/or modified protein sequence (wt) from hemagglutinin__InfluenzaA__ABW81514
MKVKLLVLLCTFTATYADTICISYHANNSTDTVDTVLEKNVTVTHSVNLLEDSHNGKLCLLKGIAPLQLGNCSVAGWILGNPECELLISKESWSYIVETPNPENGTCYPGYFADYEELREQLSSVSSFERFEIFPKESSWPNHTVTGVSASCSHNGKSSFYRNLLWLTGKNGLYPNLSKSYANNKEKEVLVLWGVHHPPNIGDQRALYHTENAYVSVVSSHYSRRFTPEIAKRPKVRDQEGRINYYWTLLEPGDTIIFEANGNLIAPRFAFALSRGFGSGIITSNAPMDECDAKCQTPQGAINSSLPFQNVHPVTIGECPKYVRSAKLRMATGLRNIPSIQSRGLFGAIAGFIEGGWTGMVDGWYGYHHQNEQGSGYAADQKSTQNAINGITNKVNSVIEKMNTQFTAVGKEFSKLERRMENLNKKVDDGFLDIWTYNAELLVLLENERTLDFHDSNVKNLYEKVKSQLKNNAKEIGNGCFEFYHKCNDECMESVKNGTYDYPKYSEESKLNREKIDGVKLESMGVYQILAIYSTVASSLVLLVSLGAISFWMCSNGSLQCRICI

SEQ ID NO: 2125 - protein, 565 aa, Artificial Sequence; identical to SEQ ID NO: 1385
  derived and/or modified protein sequence (wt) from hemagglutinin__InfluenzaA__ABW81515

SEQ ID NO: 2126 - protein, 565 aa, Artificial Sequence; identical to SEQ ID NO: 1385
  derived and/or modified protein sequence (wt) from hemagglutinin__InfluenzaA__ABW81516

SEQ ID NO: 2127 - protein, 565 aa, Artificial Sequence
  derived and/or modified protein sequence (wt) from hemagglutinin__InfluenzaA__ABW81517
MKVKLLVLLCTFTATYADTICIGYHANNSTDTVDTVLEKNVTVTHSVNLLEDSHNGKLCLLKGIAPLQLGNCSVAGWILGNPECELLISKESWSYIVETPNPENGTCYPGYFADYEELREQLSSISSFERFEIFPKESSWPNHTVTGVSASCSHNGKSSFYRNLLWLTGKNGLYPNLSKSYANNKEKEVLVLWGVHHPPNIGDQRALYHTENAYVSVVSSHYSRRFTPEIAKRPKVRDQEGRINYYWTLLEPGDTIIFEANGNLIAPRFAFALSRGFGSGIITSNAPMDECDAKCQTPQGAINSSLPFQNVHPVTIGECPKYVRSAKLRMATGLRNIPSIQSRGLFGAIAGFIEGGWTGMVDGWYGYHHQNEQGSGYAADQKSTQNAINGITNKVNSVIEKMNTQFTAVGKEFSKLERRMENLNKKVDDGFLDIWTYNAELLVLLENERTLDFHDSNVKNLYEKVKSQLKNNAKEIGNGCFEFYHKCNDECMESVKNGTYDYPKYSEESKLNREKIDGVKLESMGVYQILAIYSTVASSLVLLVSLGAISFWMCSNGSLQCRICI

SEQ ID NO: 2128 - protein, 565 aa, Artificial Sequence
  derived and/or modified protein sequence (wt) from hemagglutinin__InfluenzaA__ABW81518
MKVKLLVLLCTYTATYADTICIGYHANNSTDTVDTVLEKNVTVTHSVNLLEDSHNGKLCLLKGIAPLQLGNCSVAGWILGNPECELLISKESWSYIVETPNPENGTCYPGYFADYEELREQLSSVSSFERFEIFPKESSWPNHTVTGVSASCSHNGKSSFYRNLLWLTGKNGLYPNLSKSYANNKEKEVLVLWGVHHPPNIGDQRALYHTENAYVSVVSSHYSRRFTPEIAKRPKVRDQEGRINYYWTLLEPGDTIIFEANGNLIAPRFAFALSRGFGSGIITSNAPMDECDAKCQTPQGAINSSLPFQNVHPVTIGECPKYVRSAKLRMATGLRNIPSIQSRGLFGAIAGFIEGGWTGMVDGWYGYHHQNEQGSGYAADQKSTQNAINGITNKVNSVIEKMNTQFTAVGKEFSKLERRMENLNKKVDDGFLDIWTYNAELLVLLENERTLDFHDSNVKNLYEKVKSQLKNNAKEIGNGCFEFYHKCNDECMESVKNGTYDYPKYSEESKLNREKIDGVKLESMGVYQILAIYSTVASSLVLLVSLGAISFWMCSNGSLQCRICI

SEQ ID NO: 2129 - protein, 565 aa, Artificial Sequence
  derived and/or modified protein sequence (wt) from hemagglutinin__InfluenzaA__ABW81519
MKVKLLVLLCTFTATYADTICIGYHANNSTDTVDTVLEKNVTVTHSVNLLEDSHNGKLCLLKGIAPLQLGNCSVAGWILGNPECELLISKESWSYIVETPNPENGTCYPGYFADYEELREQLSSVSSFERFEIFPKESSWPNHTVTGVSASCSHNGKSSFYRNLLWLTGKNGLYPNLSKSYANNKEKEVLVLWGVHHPPNIGDQRALYHTENAHVSVVSSHYSRRFTPEIAKRPKVRDQEGRINYYWTLLEPGDTIIFEANGNLIAPRFAFALSRGFGSGIITSNAPMDECDAKCQTPQGAINSSLPFQNVHPVTIGECPKYVRSAKLRMATGLRNIPSIQSRGLFGAIAGFIEGGWTGMVDGWYGYHHQNEQGSGYAADQKSTQNAINGITNKVNSVIEKMNTQFTAVGKEFSKLERRMENLNKKVDDGFLDIWTYNAELLVLLENERTLDFHDSNVKNLYEKVKSQLKNNAKEIGNGCFEFYHKCNDECMESVKNGTYDYPKYSEESKLNREKIDGVKLESMGVYQILAIYSTVASSLVLLVSLGAISFWMCSNGSLQCRICI

SEQ ID NO: 2130 - protein, 565 aa, Artificial Sequence
  derived and/or modified protein sequence (wt) from hemagglutinin__InfluenzaA__ABW81520
MKVKLLVLLCTFTATYADTICIGYHANNSTDTVDTVLEKNVTVTHSVNLLEDSHNGKLCLLKGIAPLQLGSCSVAGWILGNPECELLISKESWSYIVETPNPENGTCYPGYFADYEELREQLSSVSSFERFEIFPKESSWPNHTVTGVSASCSHNGKSSFYRNLLWLTGKNGLYPNLSKSYANNKEKEVLVLWGVHHPPNIGDQRALYHTENAYVSVVSSHYSRRFTPEIAKRPKVRDQEGRINYYWTLLEPGDTIIFEANGNLIAPRFAFALSRGFGSGIITSNAPMDECDAKCQTPQGAINSSLPFQNVHPVTIGECPKYVRSAKLRMATGLRNIPSIQSRGLFGAIAGFIEGGWTGMVDGWYGYHHQNEQGSGYAADQKSTQNAINGITNKVNSVIEKMNTQFTAVGKEFSKLERRMENLNKKVDDGFLDIWTYNAELLVLLENERTLDFHDSNVKNLYEKVKSQLKNNAKEIGNGCFEFYHKCNDECMESVKNGTYDYPKYSEESKLNREKIDGVKLESMGVYQILAIYSTVASSLVLLVSLGAISFWMCSNGSLQCRICI

SEQ ID NO: 2131 - protein, 565 aa, Artificial Sequence
  derived and/or modified protein sequence (wt) from hemagglutinin__InfluenzaA__ABW81521
MKVKLLVLLCTFTATYADTICIGYHANNSTDTVDTVLEKNVTVTHSVNLLEDSHNGKLCLLKGIAPLQLGNCSVAGWILGNPECELLISKESWSYIVETPNPENGTCYPGYFADYEELREQLSSVSSFERFEIFPKESSWPNHTVTGVSASCSHNGKSSFYRNLLWLTGKNGLYPNLSKSYANNKEKEVLVLWGVHHPPNIGDQRALYHTENAYVSVVSSHYSRRFTPEIAKRPKVRDQEGRINYYWTLLEPGDTIIFEANGNLIAPRFAFALSRGFGSGIISSNAPMDECDAKCQTPQGAINSSLPFQNVHPVTIGECPKYVRSAKLRMATGLRNIPSIQSRGLFGAIAGFIEGGWTGMVDGWYGYHHQNEQGSGYAADQKSTQNAINGITNKVNSVIEKMNTQFTAVGKEFSKLERRMENLNKKVDDGFLDIWTYNAELLVLLENERTLDFHDSNVKNLYEKVKSQLKNNAKEIGNGCFEFYHKCNDECMESVKNGTYDYPKYSEESKLNREKIDGVKLESMGVYQILAIYSTVASSLVLLVSLGAISFWMCSNGSLQCRICI

SEQ ID NO: 2132 - protein, 565 aa, Artificial Sequence; identical to SEQ ID NO: 1385
  derived and/or modified protein sequence (wt) from hemagglutinin__InfluenzaA__ABW81522

SEQ ID NO: 2133 - protein, 565 aa, Artificial Sequence; identical to SEQ ID NO: 1385
  derived and/or modified protein sequence (wt) from hemagglutinin__InfluenzaA__ABW81523

SEQ ID NO: 2134 - protein, 565 aa, Artificial Sequence
  derived and/or modified protein sequence (wt) from hemagglutinin__InfluenzaA__ABW81524
MKVKLLVLLCTFTATYADTICIGYHANNSTDTIDTVLEKNVTVTHSVNLLEDSHNGKLCLLKGIAPLQLGNCSVAGWILGNPECELLISKESWSYIVETPNPENGTCYPGYFADYEELREQLSSVSSFERFEIFPKESSWPNHTVTGVSASCSHNGKSSFYRNLLWLTGKNGLYPNLSKSYANNKEKEVLVLWGVHHPPNIGDQRALYHTENAYVSVVSSHYSRRFTPEIAKRPKVRDQEGRINYYWTLLEPGDTIIFEANGNLIAPRFAFALSRGFGSGIITSNAPMDECDAKCQTPQGAINSSLPFQNVHPVTIGECPKYVRSAKLRMATGLRNIPSIQSRGLFGAIAGFIEGGWTGMVDGWYGYHHQNEQGSGYAADQKSTQNAINGITNKVNSVIEKMNTQFTAVGKEFSKLERRMENLNKKVDDGFLDIWTYNAELLVLLENERTLDFHDSNVKNLYEKVKSQLKNNAKEIGNGCFEFYHKCNDECMESVKNGTYDYPKYSEESKLNREKIDGVKLESMGVYQILAIYSTVASSLVLLVSLGAISFWMCSNGSLQCRICI

SEQ ID NO: 2135 - protein, 565 aa, Artificial Sequence
  derived and/or modified protein sequence (wt) from hemagglutinin__InfluenzaA__ABW81526
MKVKLLVLLCTFTATYADTICIGYHANNSTDTVDTVLEKNVTVTHSVNLLEDSHNGKLCLLKGIAPLQLGNCSVAGWILGNPECELLISKESWSYIVEKPNPENGTCYPGHFADYEELREQLSSVSSFERFEIFPKESSWPNHTVTGVSASCSHNGKSSFYKNLLWLTGKNGLYPNLSKSYANNKEKEVLVLWGVHHPPNIGDQKALYHTENAYVSVVSSHYSRKFTPEIAKRPKVRDQEGRINYYWTLLEPGDTIIFEANGNLIAPRYAFALSRGFGSGIINSNAPMGKCDAKCQTPQGAINSSLPFQNVHPVTIGECPKYVRSAKLRMVTGLRNIPSIQSRGLFGAIAGFIEGGWTGMVDGWYGYHHQNEQGSGYAADQKSTQNAINGITNKVNSVIEKMNTQFTAVGKEFNKLERRMENLNKKVDDGFIDIWTYNAELLVLLENERTLDLHDSNVKNLYEKVKSQLKNNAKEIGNGCFEFYHKCNDECMESVKNGTYDYPKYSEESKLNREKIDGVKLESMGVYQILAIYSTVASSLVLLVSLGAISFWMCSNGSLQCRICI

SEQ ID NO: 2136 - protein, 565 aa, Artificial Sequence
  derived and/or modified protein sequence (wt) from hemagglutinin__InfluenzaA__ABW81527
MKVKLLVLLCTFTATYADTICIGYHANNSTDTVDTVLEKNVTVTHSVNLLEDSHNGKLCLLKGIAPLQLGNCSVAGWILGNPECELLISKESWSYIVETPNPENGTCYPGYFADYEELREQLSSVSSFERFEIFPKESSWPNHTVTGVSASCSHNGKSSFYRNLLWLTGKNGLYPNLSKSYANNKEKEVLVLWGVHHPPNIGDQRALYHTENAYVSVVSSHYSRRFTPEIAKRPKVRNQEGRINYYWTLLEPGDTIIFEANGNLIAPRFAFALSRGFGSGIITSNAPMDECDAKCQTPQGAINSSLPFQNVHPVTIGECPKYVRSAKLRMATGLRNIPSIQSRGLFGAIAGFIEGGWTGMVDGWYGYHHQNEQGSGYAADQKSTQNAINGITNKVNSVIEKMNTQFTAVGKEFSKLERRMENLNKKVDDGFLDIWTYNAELLVLLENERTLDFHDSNVKNLYEKVKSQLKNNAKEIGNGCFEFYHKCNDECMESVKNGTYDYPKYSEESKLNREKIDGVKLESMGVYQILAIYSTVASSLVLLVSLGAISFWMCSNGSLQCRICI

SEQ ID NO: 2137 - protein, 565 aa, Artificial Sequence
  derived and/or modified protein sequence (wt) from hemagglutinin__InfluenzaA__ABW81528
MKVKLLVLLCTFTATYADTICIGYHANNSTDTVDTVLEKNVTVTHSVNLLEDSHNGKLCLLKGIAPLQLGNCSVAGWILGNPECELLISKESWSYIVETPNPENGTCYPGHFADYEELREQLSSVSSFERFEIFPKESSWPNHTVTGVSASCSHNGKSSFYRNLLWLTGKNGLYPNLSKSYANNKEKEVLVLWGIHHPPNIGDQRALYHTENAYVSVVSSHYSRRFTPEIAKRPKVRDQEGRINYYWTLLEPRDTIIFEANGNLIAPRFAFALSRGFGSGIITSNAPMDECDAKCQTPQGAINSSLPFQNVHPVTIGECPKYVRSAKLRMVTGLRNIPSIQSRGLFGAIAGFIEGGWTGMVDGWYGYHHQNEQGSGYAADQKSTQNAINGITNKVNSVIEKMNTQFTAVGKEFNKLERRMENLNKKVDDGFLDIWTYNAELLVLLENERTLDFHDSNVKNLYEKVKSQLKNNAKEIGNGCFEFYHKCNDECMESVKNGTYDYPKYSEESKLNREKIDGVKLESMGVYQILAIYSTVASSLVLLVSLGAISFWMCSNGSLQCRICI

SEQ ID NO: 2138 - protein, 565 aa, Artificial Sequence
  derived and/or modified protein sequence (wt) from hemagglutinin__InfluenzaA__ABW81529
MKVKLLILLCTFTATYADTICIGYHANNSTDTVDTVLEKNVTVTHSVNLLEDSHNGKLCLLKGIAPLQLGNCSVAGWILGNPECELLISRESWSYIVETPNPENGTCYPGYFADYEELREQLSSVSSFERFEIFPKESSWPNHTVTGVSASCSHNGKSSFYRNLLWLTGKNGLYPNLSKSYANNKEKEVLILWGVHHPPNIRDQMTLYHTENAYVSVVSSHYSRRFTPEITKRPKVRDQEGRINYYWTLLEPGDTIIFEANGNLIAPWYAFALSRGFGSGIITSNAPMDECDAKCQTPKGAINSSLPFQNVHPVTIGECPKYVRSAKLRMVTGLRNIPSIQSRGLFGAIAGFIEGGWTGMVDGWYGYHHQNEQGSGYAADQKSTQNAINGITNKVNSVIEKMNTQFTAVGKEFNKLERRMENLNKKVDDGFLDIWTYNAELLVLLENERTLDFHDSNVKNLYEKVKSQLKNNAKEIGNGCFEFYHKCNNECMESVKNGTYDYPKYSEESKLNREKIDGVKLESMGVYQILAIYSTVASSLVLLVSLGAISFWMCSNGSLQCRICI

SEQ ID NO: 2139 - protein, 565 aa, Artificial Sequence
  derived and/or modified protein sequence (wt) from hemagglutinin__InfluenzaA__ABW81530
MKVKLLILLCTFTATYADTICIGYHANNSTDTVDTVLEKNVTVTHSVNLLEDSHNGKLCLLKGIAPLQLGNCSVAGWILGNPECELLISKESWSYIVETPNPENGACYPGYFADYEELREQLSSVSSFERFEIFPKESSWPNHTVTGVSASCSHNGKSSFYRNLLWLTGKNGLYPNLSKSYANNKEKEVLILWGVHHPPNIGDQRTLYHTENAYVSVVSSHYSRRFTPEITKRPKVRDQEGRINYYWTLLEPGDTIIFEANGNLIAPWYAFALSRGFGSGIITSNAPMDECDAKCQTPQGAINSSLPFQNVHPVTIGECPKYVRSAKLRMVTGLRNIPSIQSRGLFGAIAGFIEGGWTGMVDGWYGYHHQNEQGSGYAADQKSTQNAINRITNKVNSVIEKMNTQFTAVGKEFNKLERRMENLNKKVDDGFLDIWTYNAELLVLLENERTLDFHDSNVKNLYEKVKSQLKNNAKEIGNGCFEFYHKCNNECMESVKNGTYDYPKYSEESKLNREKIDGVKLDSMGVYQILAIYSTVASSLVLLVSLGAISFWMCSNGSLQCRICI

SEQ ID NO: 2140 - protein, 565 aa, Artificial Sequence; identical to SEQ ID NO: 326
  derived and/or modified protein sequence (wt) from hemagglutinin__InfluenzaA__ABW81531

SEQ ID NO: 2141 - protein, 565 aa, Artificial Sequence
  derived and/or modified protein sequence (wt) from hemagglutinin__InfluenzaA__ABW81532
MKVKLLILLCTFTATYADTICIGYHANNSTDTVDTVLEKNVTVTHSVNLLEDSHNGKLCLLKGIAPLQLGNCSVAGWILGNPECELLISKESWSYIVETPNPENGACYPWYFADYEELREQLSSVSSFERFEIFPKESSWPNHTVTGVSASCSHNGKSSFYRNLLWLTGKNGLYPNLSKSYANNKEKEVLILWGVHHPPNIGNQRTLYHTENAYVSVVSSHYSRRFTPEITKRPKVRDQEGRINYYWTLLEPGDTIIFEANGNLIAPWYAFALSRGFGSGIITSNAPMDECDAKCQTPQGAINSSLPFQNVHPVTIGECPKYVRSAKLRMVTGLRNIPSIQSRGLFGAIAGFIEGGWTGMVDGWYGYHHQNEQGSGYAADQKSTQNAINGITNKVNSVIEKMNTQFTAVGKEFNKLERRMENLNKKVDDGFLDIWTYNAELLVLLENERTLDFHDSNVKNLYEKVKSQLKNNAKEIGNGCFEFYHKCNNECMESVKNGTYDYPKYSEESKLNREKIDGVKLDSMGVYQILAIYSTVASSLVLLVSLGAISFWMCSNGSLQCRICI

SEQ ID NO: 2142 - protein, 565 aa, Artificial Sequence; identical to SEQ ID NO: 1956
  derived and/or modified protein sequence (wt) from hemagglutinin__InfluenzaA__ABW86321

SEQ ID NO: 2143 - protein, 565 aa, Artificial Sequence; identical to SEQ ID NO: 1921
  derived and/or modified protein sequence (wt) from hemagglutinin__InfluenzaA__ABW86332

SEQ ID NO: 2144 - protein, 565 aa, Artificial Sequence; identical to SEQ ID NO: 1910
  derived and/or modified protein sequence (wt) from hemagglutinin__InfluenzaA__ABW86343

SEQ ID NO: 2145 - protein, 565 aa, Artificial Sequence; identical to SEQ ID NO: 1914
  derived and/or modified protein sequence (wt) from hemagglutinin__InfluenzaA__ABW86354

SEQ ID NO: 2146 - protein, 565 aa, Artificial Sequence; identical to SEQ ID NO: 1914
  derived and/or modified protein sequence (wt) from hemagglutinin__InfluenzaA__ABW86365

SEQ ID NO: 2147 - protein, 565 aa, Artificial Sequence; identical to SEQ ID NO: 1930
  derived and/or modified protein sequence (wt) from hemagglutinin__InfluenzaA__ABW86376

SEQ ID NO: 2148 - protein, 565 aa, Artificial Sequence; identical to SEQ ID NO: 1914
  derived and/or modified protein sequence (wt) from hemagglutinin__InfluenzaA__ABW86387

SEQ ID NO: 2149 - protein, 565 aa, Artificial Sequence; identical to SEQ ID NO: 1910
  derived and/or modified protein sequence (wt) from hemagglutinin__InfluenzaA__ABW86409

SEQ ID NO: 2150 - protein, 565 aa, Artificial Sequence; identical to SEQ ID NO: 1910
  derived and/or modified protein sequence (wt) from hemagglutinin__InfluenzaA__ABW86431

SEQ ID NO: 2151 - protein, 565 aa, Artificial Sequence; identical to SEQ ID NO: 1914
  derived and/or modified protein sequence (wt) from hemagglutinin__InfluenzaA__ABW86442

SEQ ID NO: 2152 - protein, 565 aa, Artificial Sequence; identical to SEQ ID NO: 1930
  derived and/or modified protein sequence (wt) from hemagglutinin__InfluenzaA__ABW86453

SEQ ID NO: 2153 - protein, 565 aa, Artificial Sequence; identical to SEQ ID NO: 1914
  derived and/or modified protein sequence (wt) from hemagglutinin__InfluenzaA__ABW86464

SEQ ID NO: 2154 - protein, 565 aa, Artificial Sequence; identical to SEQ ID NO: 1930
  derived and/or modified protein sequence (wt) from hemagglutinin__InfluenzaA__ABW86475

SEQ ID NO: 2155 - protein, 565 aa, Artificial Sequence; identical to SEQ ID NO: 1910
  derived and/or modified protein sequence (wt) from hemagglutinin__InfluenzaA__ABW86486

SEQ ID NO: 2156 - protein, 565 aa, Artificial Sequence; identical to SEQ ID NO: 1956
  derived and/or modified protein sequence (wt) from hemagglutinin__InfluenzaA__ABW86497

SEQ ID NO: 2157 - protein, 565 aa, Artificial Sequence; identical to SEQ ID NO: 1914
  derived and/or modified protein sequence (wt) from hemagglutinin__InfluenzaA__ABW86508

SEQ ID NO: 2158 - protein, 565 aa, Artificial Sequence
  derived and/or modified protein sequence (wt) from hemagglutinin__InfluenzaA__ABW86519
MKVKLLVLLCTFTATYADTICIGYHANNSTDTVDTVLEKNVTVTHSVNLLEDSHNGKLCLLKGIAPLQLGNCSVAGWILGNPECELLISKESWSYIVETPNPENGTCYPGYFADYEELREQLSSVSSFERFEIFPKESSWPNHTVTGVSASCSHNGKSSFYRNLLWLTGKNGLYPNLSKSYANNKEKEVLVLWGVHHPPNIGDQRALYHTENAYVSVVSSHYSRRFTPEIAKRPKVRNQEGRINYYWTLLEPGDTIIFEANGNLIAPRFAFALSRGFGSGIITSNAPMGECDAKCQTPQGAINSSLPFQNVHPVTIGECPKYVRSAKLRMVTGLRNIPSIQSRGLFGAIAGFIEGGWTGMVDGWYGYHHQNEQGSGYAADQKSTQNAINGITNKVNSVIEKMNTQFTAVGKEFNKLERRMENLNKKVDDGFLDIWTYNAELLVLLENERTLDFHDSNVKNLYEKVKSQLKNNAKEIGNGCFEFYHKCNDECMESVKNGTYDYPKYSEESKLNREKIDGVKLESMGVYQILAIYSTVASSLVLLVSLGAISFWMCSNGSLQCRICI

SEQ ID NO: 2159 - protein, 565 aa, Artificial Sequence; identical to SEQ ID NO: 1910
  derived and/or modified protein sequence (wt) from hemagglutinin__InfluenzaA__ABW86530

SEQ ID NO: 2160 - protein, 565 aa, Artificial Sequence
  derived and/or modified protein sequence (wt) from hemagglutinin__InfluenzaA__ABW86541
MKVKLLVLLCTFTATYADTICIGYHANNSTDTVDTVLEKNVTVTHSVNLLEDSHNGKLCLLKGIAPLQLGNCSVAGWILGNPECELLISKESWSYIVETPNPENGTCYPGYFADYEELREQLSSVSSFERFEIFPKESSWLNHTVTGVSASCSHNGKSSFYRNLLWLTGKNGLYPNLSKSYANNKEKEVLVLWGVHHPPNIGDQRALYHTENAYVSVVSSHYSRRFTPEIAKRPKVRDQEGRINYYWTLLEPGDTIIFEANGNLIAPRFAFALSRGFGSGIITSNAPMGECDAKCQTPQGAINSSLPFQNVHPVTIGECPKYVRSAKLRMVTGLRNIPSIQSRGLFGAIAGFIEGGWTGMVDGWYGYHHQNEQGSGYAADQKSTQNAINGITNKVNSVIEKMNTQFTAVGKEFNKLERRMENLNKKVDDGFLDIWTYNAELLVLLENERTLDFHDSNVKNLYEKVKSQLKNNAKEIGNGCFEFYHKCNDECMESVKNGTYDYPKYSEESKLNREKIDGVKLESMGVYQILAIYSTVASSLVLLVSLGAISFWMCSNGSLQCRICI

SEQ ID NO: 2161 - protein, 565 aa, Artificial Sequence; identical to SEQ ID NO: 1910
  derived and/or modified protein sequence (wt) from hemagglutinin__InfluenzaA__ABW86552

SEQ ID NO: 2162 - protein, 566 aa, Artificial Sequence
  derived and/or modified protein sequence (wt) from hemagglutinin__InfluenzaA__ABW86563
MKTIIALSYILCLVFAQKLPGNDNSTATLCLGHHAVPNGTIVKTITNDQIEVTNATELVQSSSTGEICDSPHQILDGENCTLIDALLGDPQCDGFQNKKWDLFVERSKAYSNCYPYDVPDYASLRSLVASSGTLEFNNESFNWTGVTQNGTSSACIRRSNNSFFSRLNWLTHLKFKYPALNVTMPNNEKFDKLYIWGVHHPGTDNDQIFLYAQASGRITVSTKRSQQTVIPNIGSRPRVRNIPSRISIYWTIVKPGDILLINSTGNLIAPRGYFKIRSGKSSIMRSDAPIGKCNSECITPNGSIPNDKPFQNVNRITYGACPRYVKQNTLKLATGMRNVPEKQTRGIFGAIAGFIENGWEGMVDGWYGFRHQNSEGIGQAADLKSTQAAIDQINGKLNRLIGKTNEKFHQIEKEFSEVEGRIQDLEKYVEDTKIDLWSYNAELLVALENQHTIDLTDSEMNKLFEKTKKQLRENAEDMGNGCFKIYHKCDNACIGSIRNGTYDHDVYRDEALNNRFQIKGVELKSGHKDWILWISFAISCFLLCVALLGFIMWACQKGNIRCNICI

SEQ ID NO: 2163 - protein, 565 aa, Artificial Sequence; identical to SEQ ID NO: 1947
  derived and/or modified protein sequence (wt) from hemagglutinin__InfluenzaA__ABW86606

SEQ ID NO: 2164 - protein, 566 aa, Artificial Sequence; identical to SEQ ID NO: 921
  derived and/or modified protein sequence (wt) from hemagglutinin__InfluenzaA__ABW91185

SEQ ID NO: 2165 - protein, 566 aa, Artificial Sequence
  derived and/or modified protein sequence (wt) from hemagglutinin__InfluenzaA__ABW91196
MKTIIALSYILCLVFAQKLPGNDNSTATLCLGHHAVPNGTIVKTITNDQIEVTNATELVQSSSTGEICNSPHQILDGENCTLIDALLGDPQCDGFQNKKWDLFVERSKAYSNCYPYDVPDYASLRSLVASSGTLEFNNESFNWTGVTQNGTSSACIRRSNNSFFSRLNWLTHLKFKYPALNVTMPNNEKFDKLYIWGVHHPGTDNDQIFLYAQASGRITVSTKRSQQTVIPNIGSRPRVRNIPSRISIYWTIVKPGDILLINSTGNLIAPRGYFKIRSGKSSIMRSDAPIGKCNSECITPNGSIPNDKPFQNVNRITYGACPRYVKQNTLKLATGMRNVPEKQTRGIFGAIAGFIENGWEGMVDGWYGFRHQNSEGIGQAADLKSTQAAIDQINGKLNRLIGKTNEKFHQIEKEFSEVEGRIQDLEKYVEDTKIDLWSYNAELLVALENQHTIDLTDSEMNKLFEKTKKQLRENAEDMGNGCFKIYHKCDNACIGSIRNGTYDHDVYRDEALNNRFQIKGVELKSGYKDWILWISFAISCFLLCVALLGFIMWACQKGNIRCNICI

SEQ ID NO: 2166 - protein, 566 aa, Artificial Sequence; identical to SEQ ID NO: 2165
  derived and/or modified protein sequence (wt) from hemagglutinin__InfluenzaA__ABW91207

SEQ ID NO: 2167 - protein, 565 aa, Artificial Sequence; identical to SEQ ID NO: 1910
  derived and/or modified protein sequence (wt) from hemagglutinin__InfluenzaA__ABW91218

SEQ ID NO: 2168 - protein, 566 aa, Artificial Sequence; identical to SEQ ID NO: 1928
  derived and/or modified protein sequence (wt) from hemagglutinin__InfluenzaA__ABW91240

SEQ ID NO: 2169 - protein, 566 aa, Artificial Sequence
  derived and/or modified protein sequence (wt) from hemagglutinin__InfluenzaA__ABW91251
MKTIIALSYILCLVFAQKLPGNDNSTATLCLGHHAVPNGTIVKTITNDQIEVTNATELVQSSSTGEICDSPHQILDGENCTLIDALLGDPQCDGFQNKKWDLFVERSKAYSNCYPYDVPDYASLRSLVASSGTLEFNNESFNWTGVTQNGTSSACIRRSNNSFFSRLNWLTHLKFKYPALNVTMPNNEKFDKLYIWGVHHPGTDNDQIFLYAQASGRITVSTKRSQQTVIPNIGSRPRVRNIPSRISIYWTIVKSGDILLINSTGNLIAPRGYFKIRSGKSSIMRSDAPIGKCNSECITPNGSIPNDKPFQNVNRITYGACPRYVKQNTLKLATGMRNVPEKQTRGIFGAIAGFIENGWEGMVDGWYGFRHQNSEGIGQAADLKSTQAAIDQINGKLNRLIGKTNEKFHQIEKEFSEVEGRIQDLEKYVEDTKIDLWSYNAELLVALENQHTIDLTDSEMNKLFEKTKKQLRENAEDMGNGCFKIYHKCDNACIGSIRNGTYDHDVYRDEALNNRFQIKGVELKSGYKDWILWISFAISCFLLCVALLGFIMWACQKGNIRCNICI

SEQ ID NO: 2170 - protein, 566 aa, Artificial Sequence; identical to SEQ ID NO: 1928
  derived and/or modified protein sequence (wt) from hemagglutinin__InfluenzaA__ABW91262

SEQ ID NO: 2171 - protein, 565 aa, Artificial Sequence; identical to SEQ ID NO: 1945
  derived and/or modified protein sequence (wt) from hemagglutinin__InfluenzaA__ABW91273

SEQ ID NO: 2172 - protein, 565 aa, Artificial Sequence
  derived and/or modified protein sequence (wt) from hemagglutinin__InfluenzaA__ABW91284
MKVKLLVLLCTFTATYADTICIGYHANNSTDTVDTVLEKNVTVTHSVNLLEDSHNGKLCLLKGIAPLQLGNCSVAGWILGNPECELLISRESWSYIVEKPNPENGTCYPGHFADYEELREQLSSVSSFERFEIFPKESSWPNHTTTGVSASCSHNGESSFYKNLLWLTGKNGLYPNLSKSYANNKEKEVLVLWGVHHPPNIGDQRALYHTENAYVSVVSSHYSRKFTPEIAKRPKVRDQEGRINYYWTLLEPGDTIIFEANGNLIAPRYAFALSRGFGSGIINSNASMGECDAKCQTPQGAINSSLPFQNVHPVTIGECPKYVRSAKLRMVTGLRNIPSIQSRGLFGAIAGFIEGGWTGMVDGWYGYHHQNEQGSGYAADQKSTQNAINGITNKVNSVIEKMNTQFTAVGKEFNKLERRMENLNKKVDDGFIDIWTYNAELLVLLENERTLDFHDSNVKNLYEKVKSQLKNNAKEIGNGCFEFYHKCNDECMESVKNGTYDYPKYSEESKLNREKIDGVKLESMGVYQILAIYSTVASSLVLLVSLGAISFWMCSNGSLQCRICI

SEQ ID NO: 2173 - protein, 565 aa, Artificial Sequence; identical to SEQ ID NO: 1945
  derived and/or modified protein sequence (wt) from hemagglutinin__InfluenzaA__ABW91295

SEQ ID NO: 2174 - protein, 565 aa, Artificial Sequence; identical to SEQ ID NO: 1914
  derived and/or modified protein sequence (wt) from hemagglutinin__InfluenzaA__ABW91306

SEQ ID NO: 2175 - protein, 565 aa, Artificial Sequence; identical to SEQ ID NO: 1914
  derived and/or modified protein sequence (wt) from hemagglutinin__InfluenzaA__ABW91317

SEQ ID NO: 2176 - protein, 565 aa, Artificial Sequence
  derived and/or modified protein sequence (wt) from hemagglutinin__InfluenzaA__ABW91328
MKVKLLILLCTFTATYADTICIGYHANNSTDTVDTVLEKNVTVTHSVNLLEDSHNGKLCLLKGIAPLQLGNCSVAGWILGNPECELLISKESWSYIVETPNPENGTCYPGYFADYEELREQLSSVSSFERFEIFPKESSWPNHTVTGVSASCSHNGKSSFYRNLLWLTGKNGLYPNLSKSYANNKEKEVLVLWGVHHPPNIGDQRALYHTENAYVSVVSSHYSRRFTPEIAKRPKVRDQEGRINYYWTLLEPGDTIIFEANGNLIAPRFAFALSRGFGSGIITSNAPMDECDAKCQTPQGAINSSLPFQNVHPVTIGECPKYVRSTKLRMVTGLRNIPSIQSRGLFGAIAGFIEGGWTGMVDGWYGYHHQNEQGSGYAADQKSTQNAINGITNKVNSVIEKMNTQFTAVGKEFNKLERRMENLNKKVDDGFLDIWTYNAELLVLLENERTLDFHDSNVKNLYEKVRSQLKNNAKEIGNGCFEFYHKCNDECMESVKNGTYDYPKYSEESKLNREKIDGVKLESMGVYQILAIYSTVASSLVLLVSLGAISFWMCSNGSLQCRICI

SEQ ID NO: 2177 - protein, 565 aa, Artificial Sequence; identical to SEQ ID NO: 1914
  derived and/or modified protein sequence (wt) from hemagglutinin__InfluenzaA__ABW91339

SEQ ID NO: 2178 - protein, 565 aa, Artificial Sequence; identical to SEQ ID NO: 1914
  derived and/or modified protein sequence (wt) from hemagglutinin__InfluenzaA__ABW91350

SEQ ID NO: 2179 - protein, 565 aa, Artificial Sequence
  derived and/or modified protein sequence (wt) from hemagglutinin__InfluenzaA__ABW91361
MKVKLLVLLCTFTATYADTICIGYHANNSTDTVDTVLEKNVTVTHSVNLLEDSHNGKLCLLKGIAPLQLGNCSVAGWILGNPECELLISKESWSYIVETPNPENGTCYPGYFADYEELREQLSSVSSFERFEIFPKESSWPNHTVTGVSASCSHNGESSFYRNLLWLTGKNGLYPNLSKSYANNKEKEVLVLWGVHHPPNIGDQRALYHTENAYVSVVSSHYSRRFTPEIAKRPKVRDQEGRINYYWTLLEPGDTIIFEANGNLIAPRFAFALSRGFGSGIITSNAPMDKCDAKCQTPQGAINSSLPFQNVHPVTIGECPKYVRSTKLRMVTGLRNIPSIQTRGLFGAIAGFIEGGWTGMVDGWYGYHHQNEQGSGYAADQKSTQNAINGITNKVNSVIEKMNTQFTAVGKEFNKLERRMENLNKKVDDGFLDIWTYNAELLVLLENERTLDFHDSNVKNLYEKVKSQLKNNAKEIGNGCFEFYHKCNDECMESVKNGTYDYPKYSEESKLNREKIDGVKLESMGVYQILAIYSTVASSLVLLVSLGAISFWMCSNGSLQCRICI

SEQ ID NO: 2180 - protein, 565 aa, Artificial Sequence; identical to SEQ ID NO: 1914
  derived and/or modified protein sequence (wt) from hemagglutinin__InfluenzaA__ABW91372

SEQ ID NO: 2181 - protein, 565 aa, Artificial Sequence; identical to SEQ ID NO: 1947
  derived and/or modified protein sequence (wt) from hemagglutinin__InfluenzaA__ABW91383

SEQ ID NO: 2182 - protein, 566 aa, Artificial Sequence; identical to SEQ ID NO: 1987
  derived and/or modified protein sequence (wt) from hemagglutinin__InfluenzaA__ABW91394

SEQ ID NO: 2183 - protein, 565 aa, Artificial Sequence; identical to SEQ ID NO: 1956
  derived and/or modified protein sequence (wt) from hemagglutinin__InfluenzaA__ABW91405

SEQ ID NO: 2184 - protein, 565 aa, Artificial Sequence
  derived and/or modified protein sequence (wt) from hemagglutinin__InfluenzaA__ABW91416
MKVKLLVLLCTFTATYADTICIGYHANNSTDTVDTVLEKNVTVTHSVNLLEDSHNGKLCLLKGIAPLQLGNCSVAGWILGNPECELLISKESWSYIVETPNPENGTCYPGYFADYEELREQLSSVSSFERFEIFPKESSWPNHTVTGVSASCSHNGKSSFYRNLLWLTGKNGLYPNLSKSYANNKEKEVLVLWGVHHPPNIGDQKALYHTENAYVSVVSSHYSRRFTPEIAKRPKVRDQEGRINYYWTLLEPGDTIIFEANGNLIAPRFAFALSRGFGSGIITSNAPMGECDAKCQTPQGAINSSLPFQNVHPVTIGECPKYVRSAKLRMVTGLRNIPSIQSRGLFGAIAGFIEGGWTGMVDGWYGYHHQNEQGSGYAADQKSTQNAINGITNKVNSVIEKMNTQFTAVGKEFNKLERRMENLNKKVDDGFLDIWTYNAELLVLLENERTLDFHDSNVKNLYEKVKSQLKNNAKEIGNGCFEFYHKCNDECMESVKNGTYDYPKYSEESKLNREKIDGVKLESMGVYQILAIYSTVASSLVLLVSLGAISFWMCSNGSLQCRICI

SEQ ID NO: 2185 - protein, 565 aa, Artificial Sequence; identical to SEQ ID NO: 2059
  derived and/or modified protein sequence (wt) from hemagglutinin__InfluenzaA__ABW91427

SEQ ID NO: 2186 - protein, 566 aa, Artificial Sequence; identical to SEQ ID NO: 1928
  derived and/or modified protein sequence (wt) from hemagglutinin__InfluenzaA__ABW91438

SEQ ID NO: 2187 - protein, 565 aa, Artificial Sequence; identical to SEQ ID NO: 1956
  derived and/or modified protein sequence (wt) from hemagglutinin__InfluenzaA__ABW91449

SEQ ID NO: 2188 - protein, 565 aa, Artificial Sequence; identical to SEQ ID NO: 1956
  derived and/or modified protein sequence (wt) from hemagglutinin__InfluenzaA__ABW91460

SEQ ID NO: 2189 - protein, 565 aa, Artificial Sequence
  derived and/or modified protein sequence (wt) from hemagglutinin__InfluenzaA__ABW91471
MKVKLLVLLCTFTATYADTICIGYHANNSTDTVDTVLEKNVTVTHSVNLLEDSHNGKLCLLKGVAPLQLGNCSVAGWILGNPECELLISKESWSYIVETPNPENGTCYPGYFADYEELREQLSSVSSFERFEIFPKESSWPNHTVTGVSASCSHNGKSSFYRNLLWLTGKNGLYPNLSKSYANNKEKEVLVLWGVHHPPNIGDQRALYHTENAYVSVVSSHYSRRFTPEIAKRPKVRDQEGRINYYWTLLEPGDTIIFEANGNLIAPRFAFALSRGFGSGIITSNAPMDECDAKCQTPQGAINSSLPFQNVHPVTIGECPKYVRSTKLRMVTGLRNIPSIQSRGLFGAIAGFIEGGWTGMVDGWYGYHHQNEQGSGYAADQKSTQNAINGITNKVNSVIEKMNTQFTAVGKEFNKLERRMENLNKKVDDGFLDIWTYNAELLVLLENERTLDFHDSNVKNLYEKVKSQLKNNAKEIGNGCFEFYHKCNDECMESVKNGTYDYPKYSEESKLNREKIDGVKLESMGVYQILAIYSTVASSLVLLVSLGAISFWMCSNGSLQCRICI

SEQ ID NO: 2190 - protein, 565 aa, Artificial Sequence
  derived and/or modified protein sequence (wt) from hemagglutinin__InfluenzaA__ABW91482
MKVKLLVLLCTFTATYADTICIGYHANNSTDTVDTVLEKNVTVTHSVNLLEDRHNGKLCLLKGIAPLQLGNCSVAGWILGNPECELLISKESWSYIVETPNPENGTCYPGYFADYEELREQLSSVSSFERFEIFPKESSWPNHTVTGVSASCSHNGRSSFYRNLLWLTGKNGLYPNLSRSYANNKEKEVLVLWGVHHPPNIGDQRALYHTENAYVSVVSSHYSRRFTPEIAKRPKVRDQEGRINYYWTLLEPGDTIIFEANGNLIAPRFAFALSRGFGSGIITSNAPMDECDAKCQTPQGAINSSLPFQNVHPVTIGECPKYVRSAKLRMVTGLRNIPSIQSRGLFGAIAGFIEGGWTGMVDGWYGYHHQNEQGSGYAADQKSTQNAINGITNKVNSVIEKMNTQFTAVGKEFNKLERRMENLNKKVDDGFLDIWTYNAELLVLLENERTLDFHDSNVKNLYEKVKSQLKNNAKEIGNGCFEFYHKCNDECMESVKNGTYDYPKYSEESKLNREKIDGVKLESMGVYQILAIYSTVASSLVLLVSLGAISFWMCSNGSLQCRICI

SEQ ID NO: 2191 - protein, 565 aa, Artificial Sequence
  derived and/or modified protein sequence (wt) from hemagglutinin__InfluenzaA__ABW91493
MKVKLLILLCTFTATYADTICIGYHANNSTDTVDTVLEKNVTVTHSVNLLEDSHNGKLCLLKGIAPLQLGNCSVAGWILGNPECELLISKESWSYIVETPNPENGTCYPGYFADYEELREQLSSVSSFERFEIFPKESSWPNHTVTGVSASCSHNGKSSFYRNLLWLTGKNGLYPNLSKSYANNKEKEVLVLWGVHHPPNIGDQRALYHTENAYVSVVSSHYSRRFTPEIAKRPKVRDQEGRINYYWTLLEPGDTIIFEANGNLIAPRFAFALSRGFGSGIITSNAPMDECDAKCQTPQGAINSSLPFQNVHPVTIGECPKYVRSTKLRMVTGLRNIPSIQSRGLFGAIAGFIEGGWTGMVDGWYGYHHQNEQGSGYAADQKSTQNAINGITNKVNSVIEKMNTQFTAVGKEFNKLEKRMENLNKKVDDGFLDIWTYNAELLVLLENERTLDFHDSNVKNLYEKVKSQLKNNAKEIGNGCFEFYHKCNDECMESVKNGTYDYPKYSEESKLNREKIDGVKLESMGVYQILAIYSTVASSLVLLVSLGAISFWMCSNGSLQCRICI

SEQ ID NO: 2192 - protein, 565 aa, Artificial Sequence; identical to SEQ ID NO: 1930
  derived and/or modified protein sequence (wt) from hemagglutinin__InfluenzaA__ABW91504

SEQ ID NO: 2193 - protein, 565 aa, Artificial Sequence
  derived and/or modified protein sequence (wt) from hemagglutinin__InfluenzaA__ABW91515
MKVKLLVLLCTFTATYADTICIGYHANNSTDTVDTVLEKNVTVTHSVNLLEDRHNGKLCLLKGIAPLQLGNCSVAGWILGNPECELLISKESWSYVVETPNPENGTCYPGYFADYEELREQLSSVSSFERFEIFPKESSWPNHTVTGVSASCSHNGKSSFYRNLLWLTGKNGLYPNLSKSYANNKEKEVLVLWGVHHPPNIGDQRALYHTENAYVSVVSSHYSRRFTPEIAKRPKVRDQEGRINYYWTLLEPGDTIIFEANGNLIAPRFAFALSRGFGSGIITSNAPMDECDAKCQTPQGAINSSLPFQNVHPVTIGECPKYVRSAKLRMVTGLRNIPSIQSRGLFGAIAGFIEGGWTGMVDGWYGYHHQNEQGSGYAADQKSTQNAINGITNKVNSVIEKMNTQFTAVGKEFNKLERRMENLNKKVDDGFLDIWTYNAELLVLLENERTLDFHDSNVKNLYEKVKSQLKNNAKEIGNGCFEFYHKCNDECMESVKNGTYDYPKYSEESKLNREKIDGVKLESMGVYQILAIYSTVASSLVLLVSLGAISFWMCSNGSLQCRICI

SEQ ID NO: 2194 - protein, 565 aa, Artificial Sequence
  derived and/or modified protein sequence (wt) from hemagglutinin__InfluenzaA__ABW91526
MKVKLLVLLCTFTATYADTICIGYHANNSTDTVDTVLEKNVTVTHSVNLLEDSHNGKLCLLKGIAPLQLGNCSVAGWILGNPECELLISKESWSYIVETPNPENGTCYPGYFADYEELREQLSSVSSFERFEIFPKESSWPNHTVTGVSASCSHNGKSSFYRNLLWLTGKNGLYPNLSKSYANNKEKEVLVLWGVHHPPNIGDQRALYHTENAYVSVVSSHYSRRFTPEIAKRPKVREQEGRINYYWTLLEPGDTIIFEANGNLIAPRFAFALSRGFGSGIITSNAPMDECDAKCQTPQGAINSSLPFQNVHPVTIGECPKYVRSTRLRMVTGLRNIPSIQSRGLFGAIAGFIEGGWTGMVDGWYGYHHQNEQGSGYAADQKSTQNAINGITNKVNSVIEKMNTQFTAVGKEFNKLERRMENLNKKVDDGFLDIWTYNAELLVLLENERTLDFHDSNVKNLYEKVKSQLKNNAKEIGNGCFEFYHKCNDECMESVKNGTYDYPKYSEESKLNREKIDGVKLESMGVYQILAIYSTVASSLVLLVSLGAISFWMCSNGSLQCRICI

SEQ ID NO: 2195 - protein, 565 aa, Artificial Sequence; identical to SEQ ID NO: 1914
  derived and/or modified protein sequence (wt) from hemagglutinin__InfluenzaA__ABW91537

SEQ ID NO: 2196 - protein, 566 aa, Artificial Sequence; identical to SEQ ID NO: 1987
  derived and/or modified protein sequence (wt) from hemagglutinin__InfluenzaA__ABW91548

SEQ ID NO: 2197 - protein, 565 aa, Artificial Sequence
  derived and/or modified protein sequence (wt) from hemagglutinin__InfluenzaA__ABW91559
MKVKLLILLCTFTATYADTICIGYHANNSTDTVDTVLEKNVTVTHSVNLLEDSHNGKLCLLKGIAPLQLGNCSVAGWILGNPECELLISKESWSYIVETPNPENGTCYPGYFADYEELREQLSSVSSFERFEIFPKESSWPNHTVTGVSASCSHNGKSSFYRNLLWLTGKNGLYPNLSKSYANNKEKEVLVLWGVHHPPNIGDQRALYHTENAYVSVVSSHYSRRFTPEIAKRPKVRDQEGRINYYWTLLEPGDTIIFEANGNLIAPRFAFALSRGFGSGIITSNAPMDECDAKCQTPQGAINSSLPFQNVHPVTIGECPKYVRSTKLRMVTGLRNIPSIQSRGLFGAIAGFIEGGWTGMVDGWYGYHHQNEQGSGYAADQKSTQNAINGITNKVNSVIEKMNTQFTAVGKEFNKLERRMENLNKKVDDGFLDIWTYNAELLVLLENERTLDFHDSNVKNLYEKVKSQLKNNAKEIGNGCFEFYHKCNDECMESVKNGTYDYPKYSEESKLYREKIDGVKLESMGVYQILAIYSTVASSLVLLVSLGAISFWMCSNGSLQCRICI

SEQ ID NO: 2198 - protein, 565 aa, Artificial Sequence; identical to SEQ ID NO: 2055
  derived and/or modified protein sequence (wt) from hemagglutinin__InfluenzaA__ABW91570

SEQ ID NO: 2199 - protein, 565 aa, Artificial Sequence; identical to SEQ ID NO: 1930
  derived and/or modified protein sequence (wt) from hemagglutinin__InfluenzaA__ABW91581

SEQ ID NO: 2200 - protein, 565 aa, Artificial Sequence; identical to SEQ ID NO: 1910
  derived and/or modified protein sequence (wt) from hemagglutinin__InfluenzaA__ABW91592

SEQ ID NO: 2201 - protein, 565 aa, Artificial Sequence; identical to SEQ ID NO: 1956
  derived and/or modified protein sequence (wt) from hemagglutinin__InfluenzaA__ABW91603

SEQ ID NO: 2202 - protein, 565 aa, Artificial Sequence
  derived and/or modified protein sequence (wt) from hemagglutinin__InfluenzaA__ABW91614
MKVKLLVLLCTFTATYADTICIGYHANNSTDTVDTVLEKNVTVTHSVNLLEDSHNGKLCLLKGIAPLQLGNCSVAGWILGNPECELLISKESWSYIVETPSPENGTCYPGYFADYEELREQLSSVSSFERFEIFPKESSWPNHTVTGVSASCSHNGKSSFYRNLLWLTGKNGLYPNLSKSYANNKEKEVLVLWGVHHPPNIGDQRALYHTENAYVSVVSSHYSRRFTPEIAKRPKVRDQEGRINYYWTLLEPGDTIIFEANGNLIAPRFAFALSRGFGSGIISSNAPMGECDAKCQTPQGAINSSLPFQNVHPVTIGECPKYVRSAKLRMVTGLRNIPSIQSRGLFGAIAGFIEGGWTGMVDGWYGYHHQNEQGSGYAADQKSTQNAINGITNKVNSVIEKMNTQFTAVGKEFNKLERRMENLNKKVDDGFLDIWTYNAELLVLLENERTLDFHDSNVKNLYEKVKSQLKNNAKEIGNGCFEFYHKCNDECMESVKNGTYDYPKYSEESKLNREKIDGVKLESMGVYQILAIYSTVASSLVLLVSLGAISFWMCSNGSLQCRICI

SEQ ID NO: 2203 - protein, 565 aa, Artificial Sequence; identical to SEQ ID NO: 1945
  derived and/or modified protein sequence (wt) from hemagglutinin__InfluenzaA__ABW91625

SEQ ID NO: 2204 - protein, 565 aa, Artificial Sequence; identical to SEQ ID NO: 1914
  derived and/or modified protein sequence (wt) from hemagglutinin__InfluenzaA__ABW91636

SEQ ID NO: 2205 - protein, 566 aa, Artificial Sequence; identical to SEQ ID NO: 1987
  derived and/or modified protein sequence (wt) from hemagglutinin__InfluenzaA__ABW91647

SEQ ID NO: 2206 - protein, 568 aa, Artificial Sequence
  derived and/or modified protein sequence (wt) from hemagglutinin__InfluenzaA__ABX10515
MEKIVLLFAIVSLVKSDQICIGYHANNSTEQVDTIMEKNVTVTHAQDILEKTHNGKLCDLDGVKPLILRDCSVAGWLLGNPMCDEFINVPEWSYIVEKANPVNDLCYPGDFNDYEELKHLLSRINHFEKIQIIPKSSWSSHEVSLGVSSACPYQGKSSFFRNVVWLIKKNSTYPTIKRSYNNTNQEDLLVLWGIHHPNDAAEQTKLYQNPTTYISVGTSTLNQRLVPRIATRSKVNGQSGRMEFFWTILKPNDAINFESNGNFIAPEYAYKIVKKGDSTIMKSELEYGNCNTKCQTPMGAINSSMPFHNIHPLTIGECPKYVKSNRLVLATGLRNSPQRERRRKKRGLFGAIAGFIEGGWQGMVDGWYGYHHSNEQGSGYAADKESTQKAIDGVTNKVNSIIDKMNTQFEAVGREFNNLERRIENLNKKMEDGFLDVWTYNAELLVLMENERTLDFHDSNVKNLYDKVRLQLKDNAKELGNGCFEFYHKCDNECMESVRNGTYDYPQYSEEARLKREEISGVKLESIGIYQILSIYSTVASSLALAIMVAGLSLWMCSNGSLQCRICI

SEQ ID NO: 2207 - protein, 566 aa, Artificial Sequence; identical to SEQ ID NO: 1856
  derived and/or modified protein sequence (wt) from hemagglutinin__InfluenzaA__ABX10525

SEQ ID NO: 2208 - protein, 565 aa, Artificial Sequence; identical to SEQ ID NO: 1914
  derived and/or modified protein sequence (wt) from hemagglutinin__InfluenzaA__ABX58239

SEQ ID NO: 2209 - protein, 565 aa, Artificial Sequence; identical to SEQ ID NO: 2014
  derived and/or modified protein sequence (wt) from hemagglutinin__InfluenzaA__ABX58250

SEQ ID NO: 2210 - protein, 565 aa, Artificial Sequence
  derived and/or modified protein sequence (wt) from hemagglutinin__InfluenzaA__ABX58261
MKVKLLILLCTFTATYADTICIGYHANNSTDTVDTVLEKNVTVTHSVNLLEDSHNGKLCLLKGIAPLQLGNCSVAGWILGNPECELLISKESWSYIVETPNPENGTCYPGYFADYEELREQLSSVSSFERFEIFPKESSWPNHTVTGVSASCSHNGKSSFYRNLLWLTGKNGLYPNLSKSYANNKEKEVLVLWGVHHPPNIGDQRALYHTENAYVSVVSSHYSRRFTPEIAKRPKVRDQEGRINYYWSLLEPGDTIIFEANGNLIAPRFAFALSRGFGSGIITSNAPMDECDAKCQTPQGAINSSLPFQNVHPVTIGECPKYVRSTKLRMVTGLRNIPSIQSRGLFGAIAGFIEGGWTGMVDGWYGYHHQNEQGSGYAADQKSTQNAINGITNKVNSVIEKMNTQFTAVGKEFNKLERRMENLNKKVDDGFLDIWTYNAELLVLLENERTLDFHDSNVKNLYEKVKSQLKNNAKEIGNGCFEFYHKCNDECMESVKNGTYDYPKYSEESKLNREKIDGVKLESMGVYQILAIYSTVASSLVLLVSLGAISFWMCSNGSLQCRICI

SEQ ID NO: 2211 - protein, 565 aa, Artificial Sequence
  derived and/or modified protein sequence (wt) from hemagglutinin__InfluenzaA__ABX58272
MKVKLLILLCTFTATYADTICIGYHANNSTDTVDTVLEKNVTVTHSVNLLEDSHNGKLCLLKGIAPLQLGNCSVAGWILGNPECELLISKESWSYIVETPNPENGTCYPGYFADYEELREQLSSVSSFERFEIFPKKSSWPNHTVTGVSASCSHNGKSSFYRNLLWLTGKNGLYPNLSKSYANNKEKEVLVLWGVHHPPNIGDQRALYHTENAYVSVVSSHYSRRFTPEIAKRPKVRDQEGRINYYWTLLEPGDTIIFEANGNLIAPRFAFALSRGFGSGIITSNAPMDECDAKCQTPQGAINSSLPFQNVHPVTIGECPKYVRSTKLRMVTGLRNIPSIQSRGLFGAIAGFIEGGWTGMVDGWYGYHHQNEQGSGYAADQKSTQNAINGITNKVNSVIEKMNTQFTAVGKEFNKLERRMENLNKKVDDGFLDIWTYNAELLVLLENERTLDFHDSNVKNLYEKVKSQLKNNAKEIGNGCFEFYHKCNDECMESVKNGTYDYPKYSEESKLNREKIDGVKLESMGVYQILAIYSTVASSLVLLVSLGAISFWMCSNGSLQCRICI

SEQ ID NO: 2212 - protein, 565 aa, Artificial Sequence; identical to SEQ ID NO: 1914
  derived and/or modified protein sequence (wt) from hemagglutinin__InfluenzaA__ABX58283

SEQ ID NO: 2213 - protein, 565 aa, Artificial Sequence; identical to SEQ ID NO: 2055
  derived and/or modified protein sequence (wt) from hemagglutinin__InfluenzaA__ABX58294

SEQ ID NO: 2214 - protein, 565 aa, Artificial Sequence; identical to SEQ ID NO: 1910
  derived and/or modified protein sequence (wt) from hemagglutinin__InfluenzaA__ABX58316

SEQ ID NO: 2215 - protein, 565 aa, Artificial Sequence; identical to SEQ ID NO: 2059
  derived and/or modified protein sequence (wt) from hemagglutinin__InfluenzaA__ABX58327

SEQ ID NO: 2216 - protein, 565 aa, Artificial Sequence; identical to SEQ ID NO: 1910
  derived and/or modified protein sequence (wt) from hemagglutinin__InfluenzaA__ABX58338

SEQ ID NO: 2217 - protein, 565 aa, Artificial Sequence
  derived and/or modified protein sequence (wt) from hemagglutinin__InfluenzaA__ABX58360
MKVKLLVLLCTFTATYADTICIGYHANNSTDTVDTVLEKNVTVTHSVNLLEDSHNGKLCLLKGIAPIQLGNCSVAGWILGNPECELLISKESWSYIVETPNPENGTCYPGYFADYEELREQLSSVSSFERFEIFPKESSWPNHTVTGVSASCSHNGKSSFYRNLLWLTGKNGLYPNLSKSYANNKEKEVLVLWGVHHPPNIGDQRALYHTENAYVSVVSSHYSRRFTPEIAKRPKVRDQEGRINYYWTLLEPGDTIIFEANGNLIAPRFAFALSRGFGSGIITSNAPMDECDAKCQTPQGAINSSLPFQNVHPVTIGECPKYVRSTKLRMVTGLRNIPSIQSRGLFGAIAGFIEGGWTGMVDGWYGYHHQNEQGSGYAADQKSTQNAINGITNKVNSVIEKMNTQFTAVGKEFNKLERRMENLNKKVDDGFLDIWTYNAELLVLLENERTLDFHDSNVKNLYEKVKSQLKNNAKEIGNGCFEFYHKCNDGCMESVKNGTYDYPKYSEESKLNREKIDGVKLESMGVYQILAIYSTVASSLVLLVSLGAISFWMCSNGSLQCRICI

SEQ ID NO: 2218 - protein, 565 aa, Artificial Sequence; identical to SEQ ID NO: 1914
  derived and/or modified protein sequence (wt) from hemagglutinin__InfluenzaA__ABX58371

SEQ ID NO: 2219 - protein, 565 aa, Artificial Sequence; identical to SEQ ID NO: 1914
  derived and/or modified protein sequence (wt) from hemagglutinin__InfluenzaA__ABX58382

SEQ ID NO: 2220 - protein, 565 aa, Artificial Sequence; identical to SEQ ID NO: 2055
  derived and/or modified protein sequence (wt) from hemagglutinin__InfluenzaA__ABX58393

SEQ ID NO: 2221 - protein, 565 aa, Artificial Sequence; identical to SEQ ID NO: 1914
  derived and/or modified protein sequence (wt) from hemagglutinin__InfluenzaA__ABX58404

SEQ ID NO: 2222 - protein, 565 aa, Artificial Sequence
  derived and/or modified protein sequence (wt) from hemagglutinin__InfluenzaA__ABX58415
MKVKLLVLLCTFTATYADTICIGYHANNSTDTVDTVLEKNVTVTHSVNLLEDRHNGKLCLLKGIAPLQLGNCSVAGWILGNPECELLISKKSWSYIVETPNPENGTCYPGYFADYEELREQLSSVSSFERFEIFPKESSWPNHTVTGVSASCSHNGKSSFYRNLLWLTGKNGLYPNLSRSYANNKEKEVLVLWGVHHPPNIGDQRALYHTENAYVSVVSSHYSRRFTPEIAKRPKVRDQEGRINYYWTLLEPGDTIIFEANGNLIAPRFAFALSRGFGSGIITSNAPMDECDAKCQTPQGAINSSLPFQNVHPVTIGECPKYVRSAKLRMVTGLRNIPSIQSRGLFGAIAGFIEGGWTGMVDGWYGYHHQNEQGSGYAADQKSTQNAINGITNKVNSVIEKMNTQFTAVGKEFNKLERRMENLNKKVDDGFLDIWTYNAELLVLLENERTLDFHDSNVKNLYEKVKSQLKNNAKEIGNGCFEFYHKCNDECMESVKNGTYDYPKYSEESKLNREKIDGVKLESMGVYQILAIYSTVASSLVLLVSLGAISFWMCSNGSLQCRICI

SEQ ID NO: 2223 - protein, 565 aa, Artificial Sequence; identical to SEQ ID NO: 1914
  derived and/or modified protein sequence (wt) from hemagglutinin__InfluenzaA__ABX58426

SEQ ID NO: 2224 - protein, 565 aa, Artificial Sequence; identical to SEQ ID NO: 1914
  derived and/or modified protein sequence (wt) from hemagglutinin__InfluenzaA__ABX58437

SEQ ID NO: 2225 - protein, 565 aa, Artificial Sequence; identical to SEQ ID NO: 1910
  derived and/or modified protein sequence (wt) from hemagglutinin__InfluenzaA__ABX58448

SEQ ID NO: 2226 - protein, 565 aa, Artificial Sequence; identical to SEQ ID NO: 1956
  derived and/or modified protein sequence (wt) from hemagglutinin__InfluenzaA__ABX58459

SEQ ID NO: 2227 - protein, 565 aa, Artificial Sequence; identical to SEQ ID NO: 2055
  derived and/or modified protein sequence (wt) from hemagglutinin__InfluenzaA__ABX58470

SEQ ID NO: 2228 - protein, 565 aa, Artificial Sequence; identical to SEQ ID NO: 1956
  derived and/or modified protein sequence (wt) from hemagglutinin__InfluenzaA__ABX58481

SEQ ID NO: 2229 - protein, 565 aa, Artificial Sequence; identical to SEQ ID NO: 1914
  derived and/or modified protein sequence (wt) from hemagglutinin__InfluenzaA__ABX58492

SEQ ID NO: 2230 - protein, 565 aa, Artificial Sequence; identical to SEQ ID NO: 1930
  derived and/or modified protein sequence (wt) from hemagglutinin__InfluenzaA__ABX58503

SEQ ID NO: 2231 - protein, 565 aa, Artificial Sequence; identical to SEQ ID NO: 1956
  derived and/or modified protein sequence (wt) from hemagglutinin__InfluenzaA__ABX58525

SEQ ID NO: 2232 - protein, 565 aa, Artificial Sequence
  derived and/or modified protein sequence (wt) from hemagglutinin__InfluenzaA__ABX58536
MKVKLLVLLCTFTATYADTICIGYHANNSTDTVDTVLEKNVTVTHSVNLLEDRHNGKLCLLKGIAPLQLGNCSVAGWILGNPECELLISKEPWSYIVETPNPENGTCYPGYFADYEELREQLSSVSSFERFEIFPKESSWPNHTVTGVSASCSHNGKSSFYRNLLWLTGKNGLYPNLSRSYANNKEKEVLVLWGVHHPPNIGDQRALYHTENAYVSVVSSHYSRRFTPEIAKRPKVRDQEGRINYYWTLLEPGDTIIFEANGNLIAPRFAFALSRGFGSGIITSNAPMDECDAKCQTPQGAINSSLPFQNVHPVTIGECPKYVRSAKLRMVTGLRNIPSIQSRGLFGAIAGFIEGGWTGMVDGWYGYHHQNEQGSGYAADQKSTQNAINGITNKVNSVIEKMNTQFTAVGKEFNKLERRMENLNKKVDDGFLDIWTYNAELLVLLENERTLDFHDSNVKNLYEKVKSQLKNNAKEIGNGCFEFYHKCNDECMESVKNGTYDYPKYSEESKLNREKIDGVKLESMGVYQILAIYSTVASSLVLLVSLGAISFWMCSNGSLQCRICI

SEQ ID NO: 2233 - protein, 565 aa, Artificial Sequence
  derived and/or modified protein sequence (wt) from hemagglutinin__InfluenzaA__ABX58547
MKVKLLILLCTFTATYADTICIGYHANNSTDTVDTVLEKNVTVTHSVNLLEDSHNGKLCLLKGIAPLQLGNCSVAGWILGNPECELLISKESWSYIVETPNPENGTCYPGYFADYEELREQLSSVSSFERFEIFPKESSWPNHTVTGVSASCSHNGKSSFYRNLLWLTGKNGLYPNLSKSYANNKEKEVLVLWGVHHPPNIGDQRALYHTENAYVSVVSSHYSRRFTPEIAKRPKVRDQEGRINYYWTLLEPGDTIIFEANGNLIAPRFAFALSRGFGSGIITSNAPMDECDAKCQTPQGAINSSLPFQNVHPVTIGECPKYVRSTKLRMVTGLRNIPSIQTRGLFGAIAGFIEGGWTGMVDGWYGYHHQNEQGSGYAADQKSTQNAINGITNKVNSVIEKMNTQFTAVGKEFNKLERRMENLNKKVDDGFLDIWTYNAELLVLLENERTLDFHDSNVKNLYEKVKSQLKNNAKEIGNGCFEFYHKCNDECMESVKNGTYDYPKYSEESKLNREKIDGVKLESMGVYQILAIYSTVASSLVLLVSLGAISFWMCSNGSLQCRICI

SEQ ID NO: 2234 - protein, 565 aa, Artificial Sequence
  derived and/or modified protein sequence (wt) from hemagglutinin__InfluenzaA__ABX58558
MKVKLLVLLCTFTATYADTICIGYHANNSTDTVDTVLEKNVTVTHSVNLLEDSHNGKLCLLKGIAPLQLGNCSVAGWILGNPECELLISKESWSYIVETPNPENGTCYPGYFADYEELREQLSSVSSFERFEIFPKESSWPNHTVTGVSASCSHNGRSSFYRNLLWLTGKNGLYPNLSKSYANNKEKEVLVLWGVHHPPNIGDQRALYHTENAYVSVVSSHYSRRFTPEIAKRPKVRDQEGRINYYWTLLEPGDTIIFEANGNLIAPRFAFALSRGFGSGIITSNAPMDKCDAKCQTPQGAINSSLPFQNVHPVTIGECPKYVRSTKLRMVTGLRNIPSIQSRGLFGAIAGFIEGGWTGMVDGWYGYHHQNEQGSGYAADQKSTQNAINGITNKVNSVIEKMNTQFTAVGKEFNKLERRMENLNKKVDDGFLDIWTYNAELLVLLENERTLDFHDSNVKNLYEKVKSQLKNNAKEIGNGCFEFYHKCNDECMESVKNGTYDYPKYSEESKLNREKIDGVKLESMGVYQILAIYSTVASSLVLLVSLGAISFWMCSNGSLQCRICI

SEQ ID NO: 2235 - protein, 565 aa, Artificial Sequence
  derived and/or modified protein sequence (wt) from hemagglutinin__InfluenzaA__ABX58569
MKVKLLILLCTFTATYADTICIGYHANNSTDTVDTVLEKNVTVTHSVNLLEDSHNGKLCLLKGIAPLQLGNCSVAGWILGNPECELLISKESWSYIVETPNPENGTCYPGYFADYEELREQLSSVSSFERFEIFPKESSWPNHTATGVSASCSHNGKSSFYRNLLWLTGKNGLYPNLSKSYANNKEKEVLVLWGVHHPPNIGDQRALYHTENAYVSVVSSHYSRRFTPEIAKRPKVRDQEGRINYYWTLLEPGDTIIFEANGNLIAPRFAFALSRGFGSGIITSNAPMDECDAKCQTPQGAINSSLPFQNVHPVTIGECPKYVRSTKLRMVTGLRNIPSIQSRGLFGAIAGFIEGGWTGMVDGWYGYHHQNEQGSGYAADQKSTQNAINGITNKVNSVIEKMNTQFTAVGKEFNKLERRMENLNKKVDDGFLDIWTYNAELLVLLENERTLDFHDSNVKNLYEKVKSQLKNNAKEIGNGCFEFYHKCNDECMESVKNGTYDYPKYSEESKLNREKIDGVKLESMGVYQILAIYSTVASSLVLLVSLGAISFWMCSNGSLQCRICI

SEQ ID NO: 2236 - protein, 565 aa, Artificial Sequence; identical to SEQ ID NO: 1910
  derived and/or modified protein sequence (wt) from hemagglutinin__InfluenzaA__ABX58580

SEQ ID NO: 2237 - protein, 565 aa, Artificial Sequence; identical to SEQ ID NO: 1914
  derived and/or modified protein sequence (wt) from hemagglutinin__InfluenzaA__ABX58591

SEQ ID NO: 2238 - protein, 565 aa, Artificial Sequence
  derived and/or modified protein sequence (wt) from hemagglutinin__InfluenzaA__ABX58602
MKVKLLVLLCTFTATYADTICIGYHANNSTDTVDTVLEKNVTVTHSVNLLEDSHNGKLCLLEGIAPLQLGNCSVAGWILGNPECELLISKESWSYIVETPNPENGTCYPGYFADYEELREQLSSVSSFERFEIFPKESSWPNHTVTGVSASCSHNGKSSFYRNLLWLTGKNGLYPNLSKSYANNKEKEVLVLWGVHHPPNIGDQRALYHTENAYVSVVSSHYSRRFTPEIAKRPKVRDQEGRINYYWTLLEPRDTIIFEANGNLIAPRFAFALSRGFGSGIITSNAPMGECDAKCQTPQGAINSSLPFQNVHPVTIGECPKYVRSAKLRMVTGLRNIPSIQSRGLFGAIAGFIEGGWTGMVDGWYGYHHQNEQGSGYAADQKSTQNAINGITNKVNSVIEKMNTQFTAVGKEFNKLERRMENLNKKVDDGFLDIWTYNAELLVLLENERTLDFHDSNVKNLYEKVKSQLKNNAKEIGNGCFEFYHKCNDECMESVKNGTYDYPKYSEESKLNREKIDGVKLESMGVYQILAIYSTVASSLVLLVSLGAISFWMCSNGSLQCRICI

SEQ ID NO: 2239 - protein, 565 aa, Artificial Sequence; identical to SEQ ID NO: 1947
  derived and/or modified protein sequence (wt) from hemagglutinin__InfluenzaA__ABX58613

SEQ ID NO: 2240 - protein, 565 aa, Artificial Sequence; identical to SEQ ID NO: 1914
  derived and/or modified protein sequence (wt) from hemagglutinin__InfluenzaA__ABX58624

SEQ ID NO: 2241 - protein, 565 aa, Artificial Sequence
  derived and/or modified protein sequence (wt) from hemagglutinin__InfluenzaA__ABX58635
MKVKLLVLLCTFTATYADTICIGYHANNSTDTVDTVLEKNVTVTHSVNLLEDSHNGKLCLLKGIAPLQLGNCSVAGWILGNPECELLISKESWSYIVETPNPENGTCYPGYFADYEELREQLSSVSSFERFEIFPKESSWPNHTVTGVSASCSHNGRSSFYRNLLWLTGKNGLYPSLSKSYANNKEKEVLVLWGVHHPPNIGDQRALYHTENAYVSVVSSHYSRRFTPEIAKRPKVRDQEGRINYYWTLLEPGDTIIFEANGNLIAPRFAFALSRGFGSGIITSNAPMDECDAKCQTPQGAINSSLPFQNVHPVTIGECPKYVRSTKLRMVTGLRNIPSIQSRGLFGAIAGFIEGGWTGMVDGWYGYHHQNEQGSGYAADQKSTQNAINGITNKVNSVIEKMNTQFTAVGKEFNKLERRMENLNKKVDDGFLDIWTYNAELLVLLENERTLDFHDSNVKNLYEKVKSQLKNNAKEIGNGCFEFYHKCNDECMESVKNGTYDYPKYSEESKLNREKIDGVKLESMGVYQILAIYSTVASSLVLLVSLGAISFWMCSNGSLQCRICI

SEQ ID NO: 2242 - protein, 565 aa, Artificial Sequence; identical to SEQ ID NO: 1910
  derived and/or modified protein sequence (wt) from hemagglutinin__InfluenzaA__ABX58679

SEQ ID NO: 2243 - protein, 565 aa, Artificial Sequence; identical to SEQ ID NO: 1956
  derived and/or modified protein sequence (wt) from hemagglutinin__InfluenzaA__ABX58701

SEQ ID NO: 2244 - protein, 565 aa, Artificial Sequence; identical to SEQ ID NO: 2014
  derived and/or modified protein sequence (wt) from hemagglutinin__InfluenzaA__ABX58712

SEQ ID NO: 2245 - protein, 567 aa, Artificial Sequence
  derived and/or modified protein sequence (wt) from hemagglutinin__InfluenzaA__ABY19417
MEKIVLLLAIISLVKSDQICIGYHANNSTEQVDTIMEKNVTVTHAQDILEKTHNGKLCDLDGVKPLILRDCSVAGWLLGNPMCDEFINVPEWSYIVEKANPANDLCYPGNFNDYEELKHLLSRINHFEKIQIIPKSSWSDHEASSGVSSACPYQGVPSFFRNVVWLIKKNNTYPTIKRSYNNTNQEDLLILWGIHHSNDAAEQTKLYQNPTTYISVGTSTLNQRLVPKIATRSKVNGQSGRMDFFWTILKPNDAINFESNGNFIAPEYAYKIVKKGDSAIMKSEVEYGNCNTKCQTPIGAINSSMPFHNIHPLTIGECPKYVKSNKLVLATGLRNSPLRERRRKRGLFGAIAGFIEGGWQGMVDGWYGYHHSNEQGSGYAADKESTQKAIDGVTNKVNSIIDKMNTQFEAVGREFNNLERRIENLNKKMEDGFLDVWTYNAELLVLMENERTLDFHDSNVKNLYDKVRLQLRDNAKELGNGCFKFYHKCDNECMESVRNGTYDYPQYSEEARLKREEISGVKLESIGTYQILSIYSTVASSLALAIMVAGLSLWMCSNGSLQCRIRI

SEQ ID NO: 2246 - protein, 567 aa, Artificial Sequence
  derived and/or modified protein sequence (wt) from hemagglutinin__InfluenzaA__ABY19418
MEKIVLLLAIISLVKSDQICIGYHANNSTEQVDTIMEKNVTVTHAQDILEKTHNGKLCDLDGVKPLILRDCSVAGWLLGNPMCDEFINVPEWSYIVEKANPANDLCYPGDFNDYEELKHLLSRINHFEKIQIIPKSSWSDHEASSGVSSACPYQGVPSFFRNVVWLIKKNNTYPTIKRSYNNTNQEDLLILWGIHHSNDAAEQTKLYQNPTTYISVGTSTLNQRLVPKIATRSKVNGQSGRMDFFWTILKPNDAINFESNGNFIAPEYAYKIVKKGDSAIMKSEVEYGNCNTKCQTPIGAINSSMPFHNIHPLTIGECPKYVKSNKLVLATGLRNSPLRERRRKRGLFGAIAGFIEGGWQGMVDGWYGFHHSNEQGSGYAADKESTQKAIDGVTNKVNSIIDKMNTQFEAVGREFNNLERRIENLNKKMEDGFLDVWTYNAELLVLMENERTLDFHDSNVKNLYDKVRLQLRDNAKELGNGCFEFYHKCDNECMESVRNGTYDYPQYSEEARLKREEISGVKLESIGTYQILSIYSTVASSLALAIMVAGLSLWMCSNGSLQCRICI

SEQ ID NO: 2247 - protein, 567 aa, Artificial Sequence
  derived and/or modified protein sequence (wt) from hemagglutinin__InfluenzaA__ABY19419
MEKIVLLLAIISLVKSDQICIGYHANNSTEQVDTIMEKNVTVTHAQDILEKTHNGKLCDLDGVKPLILRDCSVAGWLLGNPMCDEFINVPEWSYIVEKANPANDLCYPGNFNDYEELKHLLSRINHFEKIQIIPKSSWSDHEASSGVSSACPYQGVPSFFRNVVWLIKKNNTYPTIKRSYNNTNQEDLLILWGIHHSNDAAEQTKLYQNPTTYISVGTSTLNQRLVPKIATRSKVNGQSGRMDFFWTILKPNDAINFESNGNFIAPEYAYKIVKKGDSAIMKSEVEYGNCNTKCQTPIGAINSSMPFHNIHPLTIGECPKYVKSNKLVLATGLRNSPLRERRRKRGLFGAIAGFIEGGWQGMVDGWYGYHHSNEQGSGYAADKESTQKAIDGVTNKVNSIIDKMNTQFEAVGREFNNLERRIENLNKKMEDGFLDVWTYNAELLVLMENERTLDFHDSNVKNLYDKVRLQLRDNAKELGNGCFEFYHKCDNECMESVRNGTYDYPQYSEEARLKREEISGVKLESIGTYQILSIYSTVASSLALAIMVAGLSLWMCSNGSLQCRICI

SEQ ID NO: 2248 - protein, 565 aa, Artificial Sequence; identical to SEQ ID NO: 2055
  derived and/or modified protein sequence (wt) from hemagglutinin__InfluenzaA__ABY51017

SEQ ID NO: 2249 - protein, 566 aa, Artificial Sequence; identical to SEQ ID NO: 1928
  derived and/or modified protein sequence (wt) from hemagglutinin__InfluenzaA__ABY51028

SEQ ID NO: 2250 - protein, 565 aa, Artificial Sequence
  derived and/or modified protein sequence (wt) from hemagglutinin__InfluenzaA__ABY51039
MKVKLLVLLCTFTATNADTICIGYHANNSTDTVDTVLEKNVTVTHSVNLLENSHNGKLCLLKGIAPLQLGNCSVAGWILGNPECELLISKESWSYIVETPNPENGTCYPGHFADYEELREQLSSVSSFERFEIFPKESSWPNHTVTGVSASCSHNGESSFYRNLLWLTGKNGLYPNLSKSYANNKEKEVLVLWGVHHPPNIGDQKALYHTENAYVSVVSSHYSRKFTPEIAKRPKVRDQEGRINYYWTLLEPGDTIIFEANGNLIAPRYAFALSRGFGSGIINSNAPMDKCDAKCQTPQGAINSSLPFQNVHPVTIGECPKYVRSAKLRMVTGLRNIPSIQSRGLFGAIAGFIEGGWTGMVDGWYGYHHQNEQGSGYAADQKSTQNAINGITNKVNSVIEKMNTQFTAVGKEFNKLERRMENLNKKVDDGFIDIWTYNAELLVLLENERTLDFHDSNVKNLYEKVKGQLKNNAKEIGNGCFEFYHKCNDECMESVKNGTYDYPKYSEESKLNREKIDGVKLESMGVYQILAIYSTVASSLVLLVSLGAISFWMCSNGSLQCRICI

SEQ ID NO: 2251 - protein, 565 aa, Artificial Sequence
  derived and/or modified protein sequence (wt) from hemagglutinin__InfluenzaA__ABY51050
MKVKLLVLLCTFTATYADTICIGYHANNSTDTVDTVLEKNVTVTHSVNLLENSHNGKLCLLKGIAPLQLGNCSVAGWILGNPECELLISKESWSYIVEKPNPENGTCYPGHFADYEELREQLSSVSSFERFEIFPKESSWPNHTVTGVSASCSHNGESSFYRNLLWLTGKNGLYPNLSKSYANNKEKEVLVLWGVHHPPNIGDQKALYHTENAYVSVVSSHYSRKFTPEIAKRPKVRDQEGRINYYWTLLEPGDTIIFEANGNLIAPRYAFALSRGFGSGIINSNAPMDKCDSKCQTPQGAINSSLPFQNVHPVTIGECPKYVRSAKLRMVTGLRNIPSIQSRGLFGAIAGFIEGGWTGMVDGWYGYHHQNEQGSGYAADQKSTQNAINGITNKVNSVIEKMNTQFTAVGKEFNKLERRMENLNKKVDDGFIDIWTYNAELLVLLENERTLDFHDSNVKNLYEKVKSQLKNNAKEIGNGCFEFYHKCNDECMESVKNGTYDYPKYSEESKLNREKIDGVKLESMGVYQILAIYSTVASSLVLLVSLGAISFWMCSNGSLQCRICI

SEQ ID NO: 2252 - protein, 565 aa, Artificial Sequence; identical to SEQ ID NO: 2014
  derived and/or modified protein sequence (wt) from hemagglutinin__InfluenzaA__ABY51061

SEQ ID NO: 2253 - protein, 565 aa, Artificial Sequence
  derived and/or modified protein sequence (wt) from hemagglutinin__InfluenzaA__ABY51072
MKVKLLILLCTFTATYADTICIGYHANNSTDTVDTVLEKNVTVTHSVNLLEDSHNGKLCLLKGIAPLQLGNCSVAGWILGNPECELLISKESWSYIVETPNPENGTCYPGYFADYEELREQLSSVSSFERFEIFPKESSWPNHTVTGVSASCSHNGKSSFYRNLLWLTGKNGLYPNLSKSYANNKEKEVLVLWGVHHPPNIGDQRALYHTENAYVSVVSSHYSRRFTPEIAKRPKVRDQEGRINYYWTLLEPGDTIIFEANGNLIAPRFAFALSRGFGSGIITSNAPMDECDAKCQTPQGAINSSLPFQNVHPVTIGECPKYVRSTKLRMVTGLRNIPSIQSRGLFGAIAGFIEGGWTGMVDGWYGYHHQNEQGSGYAADQKSTQNAINGITNKVNSVIEKMNTQFTAVGKAFNKLERRMENLNKKVDDGFLDIWTYNAELLVLLENERTLDFHDSNVKNLYEKVKSQLKNNAKEIGNGCFEFYHKCNDECMESVKNGTYDYPKYSEESKLNREKIDGVKLESMGVYQILAIYSTVASSLVLLVSLGAISFWMCSNGSLQCRICI

SEQ ID NO: 2254 - protein, 565 aa, Artificial Sequence; identical to SEQ ID NO: 1956
  derived and/or modified protein sequence (wt) from hemagglutinin__InfluenzaA__ABY51083

SEQ ID NO: 2255 - protein, 565 aa, Artificial Sequence; identical to SEQ ID NO: 1914
  derived and/or modified protein sequence (wt) from hemagglutinin__InfluenzaA__ABY51094

SEQ ID NO: 2256 - protein, 565 aa, Artificial Sequence; identical to SEQ ID NO: 2055
  derived and/or modified protein sequence (wt) from hemagglutinin__InfluenzaA__ABY51105

SEQ ID NO: 2257 - protein, 565 aa, Artificial Sequence; identical to SEQ ID NO: 1914
  derived and/or modified protein sequence (wt) from hemagglutinin__InfluenzaA__ABY51116

SEQ ID NO: 2258 - protein, 566 aa, Artificial Sequence
  derived and/or modified protein sequence (wt) from hemagglutinin__InfluenzaA__ABY51127
MKTIIALSYILCMVFAQKLPGNDNSTATLCLGHHAVPNGTIVKTITNDQIEVTNATELVQSSSTGEICDSPHQILDGENCTLIDALLGDPQCDGFQNKKWDLFVERSKAYSNCYPYDVPDYASLRSLVASSGTLEFNNESFNWTGVTQNGTSSACIRRSNNSFFSRLNWLTHLKFKYPALNVTMPNNEKFDKLYIWGVHHPGTDNDQVFLYAQASGRITVSTKRSQQTVIPNIGSRPRVRNIPSRISIYWTIVKPGDILLINSTGNLIAPRGYFKIRSGKSSIMRSDAPIGKCNSECITPNGSIPNDKPFQNVNRITYGACPRYVKQNTLKLATGMRNVPEKQTRGIFGAIAGFIENGWEGMVDGWYGFRHQNSEGIGQAADLKSTQAAIDQINGKLNRLIGKTNEKFHQIEKEFSEVEGRIQDLEKYVEDTKIDLWSYNAELLVALENQHTIDLTDSEMNKLFEKTKKQLRENAEDMGNGCFKIYHKCDNACIGSIRNGTYDHDVYRDEALNNRFQIKGVELKSGYKDWILWISFAISCFLLCVALLGFIMWACQKGNIRCNICI

SEQ ID NO: 2259 - protein, 565 aa, Artificial Sequence
  derived and/or modified protein sequence (wt) from hemagglutinin__InfluenzaA__ABY51138
MKVKLLVLLCTFTATYADTICIGYHANNSTDTVDTVLEKNVTVTHSVNLLEDRHNGKLCLLKGIAPLQLGNCSVAGWILGNPECELLISKESWSYIVETPNPENGTCYPGYFADYEELREQLSSVSSFERFEIFPKESSWPNHTVTGVSASCSHNGKSSFYRNLLWLTGKNGLYPNLSRSYANNKEKEVLVLWGVHHPPNIGDQRALYHTENAYVSVVSSHYSRRFTPEIAKRPKVRDQEGRINYYWTLLEPGDTIIFEANGNLIAPRFAFALSRGFGSGIITSNAPMDECDAKCQTPQGAINSSLPFQNVHPVTIGECPKYVRSAKLRMVTGLRNIPSIQSRGLFGAIAGFIEGGWTGMVDGWYGYHHQNEQGSGYAADQKSTQNAINGITNKVNSVIEKMNTQFTAVGKEFNKLERRMENLNKKVDDGFLDIWTYNAELLVLLENERTLDFHDSNVKNLYEKVKIQLKNNAKEIGNGCFEFYHKCNDECMESVKNGTYDYPKYSEESKLNREKIDGVKLESMGVYQILAIYSTVASSLVLLVSLGAISFWMCSNGSLQCRICI

SEQ ID NO: 2260 - protein, 565 aa, Artificial Sequence; identical to SEQ ID NO: 1914
  derived and/or modified protein sequence (wt) from hemagglutinin__InfluenzaA__ABY51149

SEQ ID NO: 2261 - protein, 565 aa, Artificial Sequence
  derived and/or modified protein sequence (wt) from hemagglutinin__InfluenzaA__ABY51160
MKVKLLVLLCTFTATYADTICIGYHANNSTDTVDTVLEKNVTVTHSVNLLEDRHNGKLCLLKGIAPLQLGNCSVAGWILGNPECELLISKESWSYIVETPNPENGTCYPGYFADYEELREQLSSVSSFERFEIFPKESSWPNHTVTGVSASCSHNGKSSFYRNLLWLTGKNGLYPNLSKSYANNKEKEVLVLWGVHHPPNIGDQRALYHTENAYVSVVSSHYSRRFTPEIAKRPKVRDQEGRINYYWTLLEPGDTIIFEANGNLIAPRFAFALSRGFGSGIITSNAPMDKCDAKCQTPQGAINSSLPFQNVHPVTIGECPKYVRSAKLRMVTGLRNIPSIQSRGLFGAIAGFIEGGWTGMIDGWYGYHHQNEQGSGYAADQKSTQNAINGITNKVNSVIEKMNTQFTAVGKEFNKLERRMENLNKKVDDGFLDIWTYNAELLVLLENERTLDFHDSNVKNLYEKVKSQLKNNAKEIGNGCFEFYHKCNDECMESVKNGTYDYPKYSEESKLNREKIDGVKLESMGVYQILAIYSTVASSLVLLVSLGAISFWMCSNGSLQCRICI

SEQ ID NO: 2262 - protein, 565 aa, Artificial Sequence
  derived and/or modified protein sequence (wt) from hemagglutinin__InfluenzaA__ABY51171
MKVKLLVLLCTFTATYADTICIGYHANNSTDTVDTVLEKNVTVTHSVNLLEDSHNGKLCLLKGIAPLQLGNCSVAGWILGNPECELLISKESWSYIVETPNPENGTCYPGYFADYEELREQLSSVSSFERFEIFPKESSWPNHTVTGVSASCSHNGKSSFYRNLLWLTGKNGLYPNLSKSYANNKEKEVLVLWGVHHPPNIGDQRALYHTENAYVSVVSSHYSRRFTPEIAKRPKVRDQEGRINYYWTLLEPGDTIIFEANGNLIAPRFAFALSRGFGSGIITSNAPMGECDAKCQTPQGAINSSLPFQNVHPVTIGECPKYVRSAKLRMVTGLRNIPSIQSRGLFGAIAGFIEGGWTGMVDGWYGYHHQNEQGSGYAADQKSTQNAINGITNKVNSVIEKMNTQFTAVGKEFNKLERRMENLNKKVDDGFLDIWTYNAELLVLLENERTLDFHDSNVKNLYEKVKSQLKNNAKEIGNGCFEFYHKCNDECMESVKNGTYDYQKYSEESKLNREKIDGVKLESMGVYQILAIYSTVASSLVLLVSLGAISFWMCSNGSLQCRICI

SEQ ID NO: 2263 - protein, 565 aa, Artificial Sequence; identical to SEQ ID NO: 1910
  derived and/or modified protein sequence (wt) from hemagglutinin__InfluenzaA__ABY51182

SEQ ID NO: 2264 - protein, 565 aa, Artificial Sequence; identical to SEQ ID NO: 1930
  derived and/or modified protein sequence (wt) from hemagglutinin__InfluenzaA__ABY51193

SEQ ID NO: 2265 - protein, 565 aa, Artificial Sequence; identical to SEQ ID NO: 1914
  derived and/or modified protein sequence (wt) from hemagglutinin__InfluenzaA__ABY51237

SEQ ID NO: 2266 - protein, 565 aa, Artificial Sequence; identical to SEQ ID NO: 1930
  derived and/or modified protein sequence (wt) from hemagglutinin__InfluenzaA__ABY51248

SEQ ID NO: 2267 - protein, 565 aa, Artificial Sequence; identical to SEQ ID NO: 1910
  derived and/or modified protein sequence (wt) from hemagglutinin__InfluenzaA__ABY51259

SEQ ID NO: 2268 - protein, 566 aa, Artificial Sequence; identical to SEQ ID NO: 1987
  derived and/or modified protein sequence (wt) from hemagglutinin__InfluenzaA__ABY51270

SEQ ID NO: 2269 - protein, 568 aa, Artificial Sequence
  derived and/or modified protein sequence (wt) from hemagglutinin__InfluenzaA__ABY76282
MEKIVLLLAIVSLVKSDQICIGYHANNSTEHVDTIMEKNVTVTHAQDILEKAHNGRLCDLDGVKPLILRDCSVAGWLLGNPMCDEFLNVPEWSYIVEKNNPANDLCYPGNFNDYEELKHLLSRINHFEKIQIIPKSSWSDHEASSGVSSACPYQGRSSFFRNVVWLIKKNDAYPTIKRSYNNTNQEDLLVLWGIHHPNDAAEQTRLYQNPTTYISVGTSTLNQRLVPKIATRSKVNGQSGRMEFFWTILKPNDAINFESNGNFIAPENAYKIVKKGDSTIMKSELEYGNCNTKCQTPIGAINSSMPFHNIHPLTIGECPKYVKSNRLVLATGLRNSPQGERRRKKRGLFGAIAGFIEGGWQGMVDGWYGYHHSNEQGSGYAADKESTQKAIDGVTNKVNSIIDKMNTQFEAVGREFNNLERRIENLNKKMEDGFLDVWTYNAELLVLMENERTLDFHDSNVKNLYDKVRLQLRDNAKELGNGCFEFYHRCDNECMESVRNGTYDYPQYSEEARLKREEISGVKLESIGTYQILSIYSTVASSLALAIMVAGLSLWMCSNGSLQCRICI

SEQ ID NO: 2270 - protein, 566 aa, Artificial Sequence
  derived and/or modified protein sequence (wt) from hemagglutinin__InfluenzaA__ABY81349
MKAKLLVLLCALSATDADTICIGYHANNSTDTVDTVLEKNVTVTHSVNLLEDSHNGKLCRLKGIAPLQLGKCSIAGWILGNPECESLFSKKSWSYIAETPNSENGTCYPGYFADYEELREQLSSVSSFERFEIFPKERSWPKHNVTRGVTAACSHKGKSSFYRNLLWLTEKNGSYPNLSKSYVNNKEKEVLVLWGVHHPSNIKDQKTIYQKENAYVSVVSSNYNRRFTPEIAKRPKVRDQEGRINYYWTLLEPGDTIIFEANGNLIAPWYAFALSRGFGSGIITSNASMDECDTKCQTPQGAINSSLPFQNVHPVTIGECPKYVRSTKLRMVTGLRNIPSIQSRGLFGAIAGFIEGGWTGMIDGWYGYHHQNEQGSGYAADQKSTQNAINGITNKVNSVIEKMNTQFTAVGKEFNKLEKRMENLNKKVDDGFLDIWTYNAELLVLLENERTLDFHDSNVKNLYEKVKSQLKNNAKEVGNGCFEFYHKCNNECMESVKNGTYDYPKYSEESKLNREKIDGVKLESMGVYQILAIYSTVASSLVLLVSLGAISFWMCSNGSLQCRICI

SEQ ID NO: 2271 - protein, 566 aa, Artificial Sequence; identical to SEQ ID NO: 1928
  derived and/or modified protein sequence (wt) from hemagglutinin__InfluenzaA__ABY81371

SEQ ID NO: 2272 - protein, 565 aa, Artificial Sequence; identical to SEQ ID NO: 1914
  derived and/or modified protein sequence (wt) from hemagglutinin__InfluenzaA__ABY81382

SEQ ID NO: 2273 - protein, 565 aa, Artificial Sequence; identical to SEQ ID NO: 1956
  derived and/or modified protein sequence (wt) from hemagglutinin__InfluenzaA__ABY81393

SEQ ID NO: 2274 - protein, 565 aa, Artificial Sequence
  derived and/or modified protein sequence (wt) from hemagglutinin__InfluenzaA__ABY81415
MKVKLLVLLCTFTATYADTICIGYHANNSTDTVDTVLEKNVTVTHSVNLLEDSHNGKLCLLKGIAPLQLGNCSVAGWILGNPECELLISKESWSYIVETPSPENGTCYPGYFADYEELREQLSSVSSFERFEIFPKESSWPNHTVTGVSASCSHNGKSSFYRNLLWLTGKNGLYPNLSKSYANNKEKEVLVLWGVHHPPNIGDQRALYHTENAYVSVVSSHYSRRFTPEIAKRPKVRDQEGRINYYWTLLEPGDTIIFEANGNLIAPRFAFALSRGFGSGIITSNAPMGECDAKCQTPQGAINSSLPFQNVHPVTIGECPKYVRSAKLRMVTGLRNIPSIQSRGLFGAIAGFIEGGWTGMVDGWYGYHHQNEQGSGYAADQKSTQNAINGITNKVNSVIEKMNTQFTAVGKEFNKLERRMENLNKKVDDGFLDIWTYNAELLVLLENERTLDFHDSNVKNLYEKVKSQLKNNAKEIGNGCFEFYHKCNDECMESVKNGTYDYPKYSEESKLNREKIDGVKLESMGVYQILAIYSTVASSLVLLVSLGAISFWMCSNGSLQCRICI

SEQ ID NO: 2275 - protein, 566 aa, Artificial Sequence; identical to SEQ ID NO: 1928
  derived and/or modified protein sequence (wt) from hemagglutinin__InfluenzaA__ACA24502

SEQ ID NO: 2276 - protein, 565 aa, Artificial Sequence
  derived and/or modified protein sequence (wt) from hemagglutinin__InfluenzaA__ACA24513
MKVKLLILLCTFTATYADTICIGYHANNSTDTVDTVLEKNVTVTHSVNLLEDSHNGKLCLLKGIAPLQLGNCSVAGWILGNPECELLISKESWSYIVETPNPENGTCYPGYFADYEELREQLNSVSSFERFEIFPKESSWPNHTVTGVSASCSHNGKSSFYRNLLWLTGKNGLYPNLSKSYANNKEKEVLVLWGVHHPPNIGDQRALYHTENAYVSVVSSHYSRRFTPEIAKRPKVRDQEGRINYYWTLLEPRDTIIFEANGNLIAPRFAFALSRGFGSGIITSNAPMDECDAKCQTPQGAINSSLPFQNVHPVTIGECPKYVRSTKLRMVTGLRNIPSIQSRGLFGAIAGFIEGGWTGMVDGWYGYHHQNEQGSGYAADQKSTQNAINGITNKVNSVIEKMNTQFTAVGKEFNKLERRMENLNKKVDDGFLDIWTYNAELLVLLENERTLDFHDSNVKNLYEKVKSQLKNNAKEIGNGCFEFYHKCNDECMESVKNGTYDYPKYSEESKLNREKIDGVKLESMGVYQILAIYSTVASSLVLLVSLGAISFWMCSNGSLQCRICI

SEQ ID NO: 2277 - protein, 565 aa, Artificial Sequence; identical to SEQ ID NO: 1914
  derived and/or modified protein sequence (wt) from hemagglutinin__InfluenzaA__ACA24524

SEQ ID NO: 2278 - protein, 566 aa, Artificial Sequence
  derived and/or modified protein sequence (wt) from hemagglutinin__InfluenzaA__ACA24689
MKTIIALSYILCLVFAQKLPGIDNSTATLCLGHHAVPNGTIVKTITNDQIEVTNATELVQNSSTGGICDSPHQIIDGENCTLIDALLGDPQCDGFQNKKWDLFVERSKAYSNCYPYDVPDYASLRSLVASSGTLEFNNESFNWTGVTQNGTSSACKRGSNNSFFSRLNWLTHSKFKYPALNVTMPNNEEFDKLYIWGVHHPGTDNDQIFLYAQASGRITVSTKRSQQTVIPNIGSRPRVRNIPSRISIYWTIVKPGDILLINSTGNLIAPRGYFKIRSGKSSIMRSDAPIGKCNSECITPNGSIPNDKPFQNVNRITYGACPRYVKQNTLKLATGMRNVPEKQTRGIFGAIAGFIENGWEGMVDGWYGFRHQNSEGIGQAADLKSTQAAIDQINGKLNRLIGKTNEKFHQIEKEFSEVEGRIQDLEKYVEDTKIDLWSYNAELLVALENQHTIDLTDSEMNKLFEKTKKQLRENAEDMGNGCFKIYHKCDNACIGSIRNGTYDHYVYRDEALNNRFQIKGIELKSGYKDWILWISFAISCFLLCVALLGFIMWACQKGNIRCNICI

SEQ ID NO: 2279 - protein, 566 aa, Artificial Sequence
  derived and/or modified protein sequence (wt) from hemagglutinin__InfluenzaA__ACA24700
MKTIIALSYILCLVFAQKLPGIDNSTATLCLGHHAVPNGTIVKTITNDQIEVTNATELVQNSSTGGICDSPHQILDGENCTLIDALLGDPQCDGFQNKKWDLFVERSQAYSNCYPYDVPDYASLRSLVASSGTLEFNNESFNWTGVTQNGTSSACKRGSNNSFFSRLNWLTHSKFKYPALNVTMPNNEEFDKLYIWGVHHPGTDNDQIFLYAQASGRITVSTKRSQQTVIPNIGSRPRVRNIPSRISIYWTIVKPGDILLINSTGNLIAPRGYFKIRSGKSSIMRSDAPIGKCNSECITPNGSIPNDKPFQNVNRITYGACPRYVKQNTLKLATGMRNVPEKQTRGIFGAIAGFIENGWEGMVDGWYGFRHQNSEGIGQAADLKSTQAAIDQINGKLNRLIGKTNEKFHQIEKEFSEVEGRIQDLEKYVEDTKIDLWSYNAELLVALENQHTIDLTDSEMNKLFEKTKKQLRENAEDMGNGCFKIYHKCDNACIGSIRNGTYDHDVYRDEALNNRFQIKGVELKSGYKDWILWISFAISCFLLCVALLGFIMWACQKGNIRCNICI

SEQ ID NO: 2280 - protein, 565 aa, Artificial Sequence
  derived and/or modified protein sequence (wt) from hemagglutinin__InfluenzaA__ACA28846
MKVKLLVLLCTFTATYADTICIGYHANNSTDTVDTVLEKNVTVTHSVNLLENSHNGKLCLLKGIAPLQLGNCSVAGWILGNPECELLISKESWSYIVEKPNPENGTCYPGHFADYEELREQLSSVSSFERFEIFPKESSWPNHTVTGVSASCSHNGESSFYRNLLWLTGKNGLYPNLSKSYANNKEKEVLVLWGVHHPPNIGIQKALYHTENAYVSVVSSHYSRKFTPEIAKRPKVRDQEGRINYYWTLLEPGDTIIFEANGNLIAPRYAFALSRGFGSGIINSNAPMDKCDAKCQTPQGAINSSLPFQNVHPVTIGECPKYVRSAKLRMVTGLRNIPSIQSRGLFGAIAGFIEGGWTGMVDGWYGYHHQNEQGSGYAADQKSTQNAINGITNKVNSVIEKMNTQFTAVGKEFNKLERRMENLNKKVDDGFIDIWTYNAELLVLLENERTLDFHDSNVKNLYEKVKSQLKNNAKEIGNGCFEFYHKCNDECMESVKNGTYDYPKYSEESKLNREKIDGVKLESMGVYQILAIYSTVASSLVLLVSLGAISFWMCSNGSLQCRICI

SEQ ID NO: 2281 - protein, 566 aa, Artificial Sequence
  derived and/or modified protein sequence (wt) from hemagglutinin__InfluenzaA__ACA33749
MKTIIALSYILCLVFAQKLPGNDNSTATLCLGHHAVPNGTIVKTITNDQIEVTNATELVQSSSTGEICDSPHQILDGENCTLIDALLGDPQCDGFQNKKWDLFVERSKAYSNCYPYDVPDYASLRSLVASSGTLEFNNESFNWTGVTQNGTSSSCIRRSNNSFFSRLNWLTHLKFKYPALNVTMPNNEKFDKLYIWGVHHPGTDNDQIFLYAQASGRITVSTKRSQQTVIPNIGSRPRVRNIPSRISIYWTIVKPGDILLINSTGNLIAPRGYFKIRSGKSSIMRSDAPIGKCNSECITPNGSIPNDKPFQNVNRITYGACPRYVKQNTLKLATGMRNVPEKQTRGIFGAIAGFIENGWEGMVDGWYGFRHQNSEGIGQAADLKSTQAAIDQINGKLNRLIGKTNEKFHQIEKEFSEVEGRIQDLEKYVEDTKIDLWSYNAELLVALENQHTIDLTDSEMNKLFEKTKKQLRENAEDMGNGCFKIYHKCDNACIGSIRNGTYDHDVYRDEALNNRFQIKGVELKSGYKDWILWISFAISCFLLCVALLGFIMWACQKGNIRCNICI

SEQ ID NO: 2282 - protein, 565 aa, Artificial Sequence; identical to SEQ ID NO: 1910
  derived and/or modified protein sequence (wt) from hemagglutinin__InfluenzaA__ACA96519

SEQ ID NO: 2283 - protein, 552 aa, Artificial Sequence
  derived and/or modified protein sequence (wt) from hemagglutinin__InfluenzaA__ACC55270
MNTQILAFIACVLTGVKGDKICLGHHAVANGTKVNTLTERGIEVVNATETVETTNIKKICTQGKRPTDLGQCGLLGTLIGPPQCDQFLEFSSDLIIERREGTDICYPGRFTNEESLRQILRRSGGIGKESMGFTYSGIRTNGATSACTRSGSSFYAEMKWLLSNSDNAAFPQMTKAYRNPRNKPALIIWGVHHSESVSEQTKLYGSGNKLITVRSSKYQQSFTPNPGARRIDFHWLLLDPNDTVTFTFNGAFIAPDRTSFFRGESLGVQSDAPLDSSCRGDCFHSGGTIVSSLPFQNINSRTVGKCPRYVKQKSLLLATGMRNVPEKPKPRGLFGAIAGFIENGWEGLINGWYGFRHQNAQGEGTAADYKSTQSAIDQITGKLNRLIGKTNQQFELIDNEFNEIEQQIGNVINWTRDAMTEIWSYNAELLVAMENQHTIDLADSEMSKLYERVKKQLRENAEEDGTGCFEIFHKCDDQCMESIRNNTYDHTQYRTESLQNRIQIDPVKLSSGYKDIILWFSFGASCFLLLAIAMGLVFICIKNGNMQCTICI

SEQ ID NO: 2284 - protein, 565 aa, Artificial Sequence; identical to SEQ ID NO: 1914
  derived and/or modified protein sequence (wt) from hemagglutinin__InfluenzaA__ACC61964

SEQ ID NO: 2285 - protein, 565 aa, Artificial Sequence
  derived and/or modified protein sequence (wt) from hemagglutinin__InfluenzaA__ACC61975
MKVKLLVLLCTFTASYADTICIGYHANNSTDTVDTVLEKNVTVTHSVNLLEDSHNGKLCLLKGIAPLQLGNCSVAGWILGNPECELLISKESWSYIVEVPNPENGTCYPGYFADYEELREQLSSISSFERFEIFPKESSWPNHTVTGVSASCSHNGKSSFYRNLLWLTGKNGLYPNLSKSYANNKEKEVLVLWGVHHPPNIGDQRALYHTENAYVSVVSSHYSRRFTPEIAKRPKVRDQEGRINYYWTLLEPGDTIIFEANGNLIAPRFAFALSRGLGSGIITSNAPMDECDAKCQTPQGAINSSLPFQNVHPVTIGECPKYVRSAKLRMVTGLRNIPSIQSRGLFGAIAGFIEGGWTGMVDGWYGYHHQNEQGSGYAADQKSTQNAINGITNKVNSVIEKMNTQFTAVGKEFNKLERRMENLNKKVDDGFLDIWTYNAELLVLLENERTLDFHDSNVKNLYEKVKSQLKNNAKEIGNGCFEFYHKCNNECMESVKNGTYDYPKYSEESKLNREKIDGVKLESMGVYQILAIYSTVASSLVLLVSLGAISFWMCSNGSLQCRICI

SEQ ID NO: 2286 - protein, 565 aa, Artificial Sequence; identical to SEQ ID NO: 1910
  derived and/or modified protein sequence (wt) from hemagglutinin__InfluenzaA__ACC61986

SEQ ID NO: 2287 - protein, 565 aa, Artificial Sequence
  derived and/or modified protein sequence (wt) from hemagglutinin__InfluenzaA__ACD37430
MKAKLLVLLCTFTATYADTICIGYHANNSTDTVDTVLEKNVTVTHSVNLLEDSHNGKLCLLKGIAPLQLGNCSVAGWILGNPECELLISKESWSYIVETPNPENGTCYPGYFADYEELREQLSSVSSFERFEIFPKESSWPTHTVTGVSASCSHNGKSSFYRNLLWLTGKNGLYPNLSKSYVNNKEKEVLVLWGVHHPPNIGDQRALYHTENAYVSVVSSHYSRRFTPEIAKRPKVRDQEGRINYYWTLLEPGDTIIFEANGNLIAPWYAFALSRGFGSGIITSNAPMDECDAKCQTPQGAINSSLPFQNVHPVTIGECPKYVRSAKLRMVTGLRNIPSIQSRGLFGAIAGFIEGGWTGMVDGWYGYHHQNEQGSGYAADQKSTQNAINGITNKVNSVIEKMNTQFTAVGKEFNKLERRMENLNKKVDDGFLDIWTYNAELLVLLENERTLDFHDSNVKNLYEKVKSQLKNNAKEIGNGCFEFYHKCNNECMESVKNGTYDYPKYSEESKLNREKIDGVKLESMGVYQILAIYSTVASSLVLLVSLGAISFWMCSNGSLQCRICI

SEQ ID NO: 2288 - protein, 565 aa, Artificial Sequence
  derived and/or modified protein sequence (wt) from hemagglutinin__InfluenzaA__ACD37507
MKAKLLVLLCTFAATYADTICIGYHANNSTDTVDTVLEKNVTVTHSVNLLENSHNGKLCLLKGIAPLQLGNCSVAGWILGNPECELLISKESWSYIVEKPNPENGTCYPGHFADYEELREQLSSVSSFERFEIFPKESSWPNHTVTGVSASCSHNGESSFYRNLLWLTGKNGLYPNLSKSYANNKEKEVLVLWGVHHPPNIGNQKALYHTENAYVSVVSSHYSRKFTPEIAKRPKVRDQEGRINYYWTLLEPGDTIIFEANGNLIAPRYAFALSRGFGSGIINSNAPMDKCDAKCQTPQGAINSSLPFQNVHPVTIGECPKYVRSAKLRMVTGLRNIPSIQSRGLFGAIAGFIEGGWTGMVDGWYGYHHQNEQGSGYAADQKSTQNAINGITNKVNSVIEKMNTQFTAVGKEFNKLERRMENLNKKVDDGFIDIWTYNAELLVLLENERTLDFHDSNVKNLYEKVKSQLKNNAKEIGNGCFEFYHKCNDECMESVKNGTYDYPKYSEESKLNREKIDGVKLESMGVYQILAIYSTVASSLVLLVSLGAISFWMCSNGSLQCRICI

SEQ ID NO: 2289 - protein, 565 aa, Artificial Sequence; identical to SEQ ID NO: 2055
  derived and/or modified protein sequence (wt) from hemagglutinin__InfluenzaA__ACD56113

SEQ ID NO: 2290 - protein, 565 aa, Artificial Sequence; identical to SEQ ID NO: 1914
  derived and/or modified protein sequence (wt) from hemagglutinin__InfluenzaA__ACD56124

SEQ ID NO: 2291 - protein, 566 aa, Artificial Sequence; identical to SEQ ID NO: 1987
  derived and/or modified protein sequence (wt) from hemagglutinin__InfluenzaA__ACD56258

SEQ ID NO: 2292 - protein, 566 aa, Artificial Sequence; identical to SEQ ID NO: 1729
  derived and/or modified protein sequence (wt) from hemagglutinin__InfluenzaA__ACD56269

SEQ ID NO: 2293 - protein, 565 aa, Artificial Sequence
  derived and/or modified protein sequence (wt) from hemagglutinin__InfluenzaA__ACD56280
MKVKLLILLCTFTATYADTICIGYHANNSTDTVDTVLEKNVTVTHSVNLLEDSHNGKLCLLKGIAPLQLGNCSVAGWILGNPECELLISKESWSYIVETPNPGNGTCYPGYFADYEELREQLSSVSSFERFEIFPKESSWPNHTVTGVSASCSHNGKSSFYRNLLWLTGKNGLYPNLSKSYANNKEKEVLVLWGVHHPPNIGDQRALYHTENAYVSVVSSHYSRRFTPEIAKRPKVRDQEGRINYYWTLLEPGDTIIFEANGNLIAPRFAFALSRGFGSGIITSNAPMDECEAKCQTPQGAINSSLPFQNVHPVTIGECPKYVRSTKLRMVTGLRNIPSIQSRGLFGAIAGFIEGGWTGMVDGWYGYHHQNEQGSGYAADQKSTQNAINGITNKVNSVIEKMNTQFTAVGKEFNKLERRMENLNKKVDDGFLDIWTYNAELLVLLENERTLDFHDSNVKNLYEKVKSQLKNNAKEIGNGCFEFYHKCNDECMESVKNGTYDYPKYSEESKLNREKIDGVKLESMGVYQILAIYSTVASSLVLLVSLGAISFWMCSNGSLQCRICI

SEQ ID NO: 2294 - protein, 562 aa, Artificial Sequence
  derived and/or modified protein sequence (wt) from hemagglutinin__InfluenzaA__ACD56324
MAIIYLILLFTAVRGDQICIGYHANNSTEKVDTILERNVTVTHAKNILEKTHNGRLCKLNGIPPLELGDCSIAGWLLGNPECDRLLRVPEWSYIMEKENPRNGLCYPGSFNDYEELKHLLSSVKHFEKVRILPKDRWTQHTTTGSSRACAVSGNPSFFRNMVWLTKKESNYPVAKGSYNNTSGEQMLIIWGVHHPIDETEQRTLYQNVGTYVSVGTSTLNKRSTPDIATRPKVNGLGSRMEFSWTLLDMWDTINFESTGNLIAPEYGFKISKRGSSGIMKTERTLENCETKCQTPLGAINTTLPFHNVHPLTIGECPKYVKSEKLVLATGLRNVPQIEPRGLFGAIAGFIEGGWQGMVDGWYGYHHSNDQGSGYAADKESTQKAFDGITNKVNSVIEKMNTQFEAVGKEFSNLERRLENLNKKMEDGFLDVWTYNAELLVLMENERTLDFHDSNVKNLYDKVRMQLRDNVKELGNGCFEFYHKCDDECMNSVKNGTYDYPKYEEESKLNRNEIKGVKLSSMGVYQILAIYATVAGSLSLAIMMAGISFWMCSNGSLQCRICI

SEQ ID NO: 2295 - protein, 562 aa, Artificial Sequence
  derived and/or modified protein sequence (wt) from hemagglutinin__InfluenzaA__ACD85187
MAIIYLILLFTAVRGDQICIGYHANNSTEKVDTILERNVTVTHAKDILEKTHNGKLCKLNGIPPLELGDCSIAGWLLGNPECDRLLRVPEWSYIMEKENPRYSLCYPGSFNDYEELKHLLSSVKHFEKVKILPKDRWTQHTTTGGSKACAVSGKPSFFRNMVWLTKKGPNYPVAKGSYNNTSGEQMLIIWGVHHPKDEAEQRALYQEVGTYVSASTSTLNKRSTPEIAARPEVNGLGSRMEFSWTLLDVWDTINFESTGNLVAPEYGFKISKRGSSGIMKTEGTLGNCETKCQTPLGAINTTLPFHNVHPLTIGECPKYVKSEKLVLATGLRNVPQIESRGLFGAIAGFIEGGWQGMVDGWYGYHHSNDQGSGYAADKESTQKAFDGITNKVNSVIEKMNTQFEAVGKEFNNLEKRLENLNKKMEDGFLDVWTYNAELLVLMENERTLDFHDSNVKNLYDKVRMQLRDNVKELGNGCFEFYHKCDDECMNSVKNGTYDYPKYEEESKLNRNEIKGVKLSSMGVYQILAIYATVAGSLSLAIMMAGISFWMCSNGSLQCRICI

SEQ ID NO: 2296 - protein, 562 aa, Artificial Sequence
  derived and/or modified protein sequence (wt) from hemagglutinin__InfluenzaA__ACD85198
MAIIYLILLFTAVRGDQICIGYHANNSTEKVDTILERNVTVTHAKDILEKTHNGKLCKLNGIPPLELGDCSIAGWLLGNPECDRLLRVPEWSYIMEKENPRYSLCYPGSFNDYEELKHLLSSVKHFEKVKILPKDGWTQHTTTGGSKACAVSGKPSFFRNMVWLTKKGPNYPVAKRSYNNTSGEQMLIIWGVHHPTDEAEQRALYQEVGTYVSASTSTLNKRSTPEIAARPEVNGLRSRMEFSWTLLDVWDTINFESTGNLVAPEYGFKISKRGSSGIMKTEGTLGNCETKCQTPLGAINTTLPFHNVHPLTIGECPKYVKSEKLVLATGLRNVPQIESRGLFGAIAGFIEGGWQGMVDGWYGYHHSNDQGSGYAADKESTQKAFDRITNKVNSVIEKMNTQFEAVGKEFSNLEKRLENLNKKMEDGFLDVWTYNAELLVLMENERTLGFHDSNVKNLYDKVRMQLRDNVKELGNGCFEFYHKCDDECMNSVKNGTYDYPKYEEESKLKRNEIKGVKLSSMGVYQILAIYATVAGSLSLAIMMAGISFWMCSNGSLQCRICI

SEQ ID NO: 2297 - protein, 562 aa, Artificial Sequence
  derived and/or modified protein sequence (wt) from hemagglutinin__InfluenzaA__ACD85209
MAIIYLILLFTAVRGDQICIGYHANNSTEKVDTILERNVTVTHAKDILEKTHNGKLCKLNGIPPLELGDCSIAGWLLGNPECDRLLSVPEWSYIMEKENPRDGLCYPGSFNDYEELKHLLSSVKHFEKVKILPKDRWTQHTTTGGSRACAVSGNPSFFRNMVWLTQKGSNYPVAKGSYNNTSGEQMLIIWGVHHPNDETEQRTLYQNVGTYVSVGTSTLNKRSTPDIATRPKVNGQGGRMEFSWTLLDMWDTINFESTGNLIAPEYGFKISKRGSSGIMKTEGTLENCETKCQTPLGAINTTLPFHNVHPLTIGECPKYVKSEKLVLATGLRNVPQIESRGLFGAIAGFIEGGWQGMVDGWYGYHHSNDQGSGYAADKESTQKAFDGITNKVNSVIEKMNTQFEAVGKEFSNLERRLENLNKKMEDGFLDVWTYNAELLVLMENERTLDFHDSNVKNLYDKVRMQLRDNVKELGNGCFEFYHKCDDECMNSVKNGTYDYPKYEEESKLNRNEIKGVKLSSMGVYQILAIYATVAGSLSLAIMMAGISFWMCSNGSLQCRICI

SEQ ID NO: 2298 - protein, 562 aa, Artificial Sequence
  derived and/or modified protein sequence (wt) from hemagglutinin__InfluenzaA__ACD85220
MAIIYLILLFTAVRGDQICIGYHANNSTEKVDTILERNVTVTHAKDILEKTHNGKLCKLNGIPPLELGDCSIAGWLLGNPECDRLLRVPEWSYIMEKENPKYSLCYPGSFNDYEELKHLLSSVKHFEKVKILPKDRWTQHTTTGGSKACAVSGEPSFFRNMVWLTKKGPNYPVAKGSYNNTSGEQMLIIWGVHHPKDEAEQRALYQNVGTYVSASTSTLNKRSTPEIAARPEVNGLGSRMEFSWTLLDVWDTINFESTGNLVAPEYGFKISKRGSSGIMKTEGTLGNCETKCQTPLGAINTTLPFHNVHPLTIGECPKYVKSEKLVLATGLRNVPQIESRGLFGAIAGFIEGGWQGMVDGWYGYHHSNDQGSGYAADKESTQKAFDGITNKVNSVIEKMNTQFEAVGKEFNNLEKRLENLNKKMEDGFLDVWTYNAELLVLMENERTLDFHDSNVKNLYDKVRMQLRDNVKELGNGCFEFYHKCDDECMNSVKNGTYDYPKYEKESKLNRNEIKGVKLSSMGVYQILAIYATVAGSLSLAIMMAGISFWMCSNGSLQCRICI

SEQ ID NO: 2299 - protein, 562 aa, Artificial Sequence
  derived and/or modified protein sequence (wt) from hemagglutinin__InfluenzaA__ACD85242
MAIIYLILLFATVRGDQICIGYHANNSTEKVDTILERNVTVTHAKDILEKTHNGKLCKLNGIPPLELGDCSIAGWLLGNPECDRLLRVPEWSYIMEKENPRYSLCYPGSLNDYEELKHLLSSVKHFEKVRILPKDRWTQHTTTGGSKACAVSGKPSFFRNMVWLTKKGPNYPVAKGSYNNTSGEQMLIIWGVHHPKDEAEQRALYQEVGTYVSASTSTLNKRSIPEIAARPEVNGLGSRMEFSWTLLDVWDTINFESTGNLVAPEYGFKISKRGSSGIMKTEGTLGNCETKCQTPLGAINTTLPFHNVHPLTIGECPKYVKSEKLVLATGLRNVPQIESRGLFGAIAGFIEGGWQGMVDGWYGYHHSNDQGSGYAADKESTQKAFDGITNKVNSMIEKMNTQFEAVGKEFNNLEKRLENLDKKMEDGFLDVWTYNAELLVLMENERTLDFHDSNVKNLYEKVRMQLRDNVKELGNGCFEFYHKCDNECMNSVKNGTYDYPKYEEESKLKRNEIKGVKLSSMGVYQILAIYATVAGSLSLAIMVAGISFWMCSNGSLQCRICI

SEQ ID NO: 2300 - protein, 562 aa, Artificial Sequence
  derived and/or modified protein sequence (wt) from hemagglutinin__InfluenzaA__ACD85253
MAIIYLILLFATVRGDQICIGYHANNSTEKVDTILERNVTVTHAKDILEKTHNGKLCKLNGIPPLELGDCSIAGWLLGNPECDRLLRVPEWSYIMEKENPRYNLCYPGSLNEYEELKHLLSSVKHFEKVRILPKDRWTQHTTTGGSKACAVSGEPSFFRNMVWLTKKGPNYPVAKGSYNNTSGEQMLIIWGVHHPNDEAEQRALYQKVGTYVSASTSTLNKRSIPEIAARPKVNGLGSRMEFFWTLLDVWDTINFESTGNLVVPEYGFKISKRGSSGIMKTEGTLGNCETKCQTPLGAINTTLPFHNVHPLTIGECPKYVKSEKLVLATGLRNVPQIESRGLFGAIAGFIEGGWQGMVDGWYGYHHSNDQGSGYAADKESTQKAFDGITNKVNSVIEKMNTQFETVGKEFNNLEKRLENLNKKMEDGFLDVWTYNAELLVLMENERTLDFHDSNVKNLYEKVRMQLRDNVKELGNGCFEFYHKCDDECMNSVKNGTYDYPKYEEESKLKRNEIKGVKLSSMGVYQILAIYATVAGSLSLAIMVAGISFWMCSNGSLQCRICI

SEQ ID NO: 2301 - protein, 566 aa, Artificial Sequence
  derived and/or modified protein sequence (wt) from hemagglutinin__InfluenzaA__ACD85440
MKTIIALSYILCLVFAQKLPGNDNSTATLCLGHHAVPNGTIVKTITNDQIEVTNATELVQSSSTGEICDSPHQILDGENCTLIDALLGDPQCDGFQNKKWDLFVERSKAYSNCYPYDVPDYASLRSLVASSGTLEFNNESFNWTGVTQNGTSSACIRRSNNSFFSRLNWLTHLKFKYPALNVTMPNNEKFDKLYIWGVHHPGTDNDQIFLYAQASGRITVSTKRSQQTVIPNIGSRPRVRNIPSRISIYWTIVKPGDILLINSTGNLIAPRGYFKIRSGKSSIMRSDAPIGKCNSECITPNGSIPNDKPFQNVNRITYGACPRYVKQNTLKLATGMRNVPEKQTRGIFGAIAGFIENGWEGMVDGWYGFRHQNSEGIGQAADLKSTQAAIDQINGKLNRLIGKTNEKFHQIEKEFSEVEGRIQDLEKYVEDTKIDLWSYNAELLVALENQHTIDLTDSEMNKLFEKTKKQLRENAEDLGNGCFKIYHKCDNACIGSIRNGTYDHDVYRDEALNNRFQIKGVELKSGYKDWILWISFAISCFLLCVALLGFIMWACQKGNIRCNICI

SEQ ID NO: 2302 - protein, 566 aa, Artificial Sequence; identical to SEQ ID NO: 2301
  derived and/or modified protein sequence (wt) from hemagglutinin__InfluenzaA__ACD85451

SEQ ID NO: 2303 - protein, 566 aa, Artificial Sequence; identical to SEQ ID NO: 2301
  derived and/or modified protein sequence (wt) from hemagglutinin__InfluenzaA__ACD85462

SEQ ID NO: 2304 - protein, 566 aa, Artificial Sequence; identical to SEQ ID NO: 1928
  derived and/or modified protein sequence (wt) from hemagglutinin__InfluenzaA__ACD85473

SEQ ID NO: 2305 - protein, 566 aa, Artificial Sequence
  derived and/or modified protein sequence (wt) from hemagglutinin__InfluenzaA__ACD85484
MKTIIALSYILCLVFAQKLPGNDNSTATLCLGHHAVPNGTIVKTITNDQIEVTNATELVQSSSTGEICDSPHQILDGENCTLIDALLGDPQCDGFQNKKWDLFVERSKAYSNCYPYDVPDYASLRSLVASSGTLEFNNESFNWTGVTQNGTSSACIRRSNNSFFSRLNWLTHLKFKYPALNVTMPNNEEFDKLYIWGVHHPGTDNDQIFLYAQASGRITVSTKRSQQTVIPNIGSRPRVRNIPSRISIYWTIVKPGDILLINSTGNLIAPRGYFKIRSGKSSIMRSDAPIGKCNSECITPNGSIPNDKPFQNVNRITYGACPRYVKQNTLKLATGMRNVPEKQTRGIFGAIAGFIENGWEGMVDGWYGFRHQNSEGIGQAADLKSTQAAIDQINGKLNRLIGKTNEKFHQIEKEFSEVEGRIQDLEKYVEDTKIDLWSYNAELLVALENQHTIDLTDSEMNKLFEKTKKQLRENAEDMGNGCFKIYHKCDNACIGSIRNGTYDHDVYRDEALNNRFQIKGVELKSGYKDWILWISFAISCFLLCVALLGFIMWACQKGNIRCNICI

SEQ ID NO: 2306 - protein, 566 aa, Artificial Sequence; identical to SEQ ID NO: 1928
  derived and/or modified protein sequence (wt) from hemagglutinin__InfluenzaA__ACD85495

SEQ ID NO: 2307 - protein, 566 aa, Artificial Sequence
  derived and/or modified protein sequence (wt) from hemagglutinin__InfluenzaA__ACD85528
MKTIIALSYILCLVFAQKLPGNDNSTATLCLGHHAVPNGTIVKTITNDQIEVTNATELVQSSSTGEICDSPHQILDGENCTLIDALLGDPQCDGFQNKKWDLFVERSKAYSNCYPYDVPDYVSLRSLVASSGTLEFNNESFNWTGVTQNGTSSACIRRSNKSFFSRLNWLTHLKFKYPALNVTMPNNENFDKLYIWGVHHPGTDNDQIFLYAQASGRITVSTKRSQQTVIPNIGSRPRVRNIPSRISIYWTIVKPGDILLINSTGNLIAPRGYFKIRSGKSSIMRSDAPIGKCNSECITPNGSIPNDKPFQNVNRITYGACPRYVKQNTLKLATGMRNVPEKQTRGIFGAIAGFIENGWEGMVDGWYGFRHQNSEGIGQAADLKSTQAAIDQINGKLNRLIGKTNEKFHQIEKEFSEVEGRIQDLEKYVEDTKIDLWSYNAELLVALENQHTIDLTDSEMNKLFEKTKKQLRENAEDLGNGCFKIYHKCDNACIGSIRNGTYDHDVYRDEALNNRFQIKGVELKSGYKDWILWISFAISCFLLCVALLGFIMWACQKGNIRCNICI

SEQ ID NO: 2308 - protein, 566 aa, Artificial Sequence
  derived and/or modified protein sequence (wt) from hemagglutinin__InfluenzaA__ACD85539
MKTIIALSYILCLVFAQKLPGNDNSTATLCLGHHAVPNGTIVKTITNDQIEVTNATELVQSSSTGEICDSPHQILDGENCTLIDALLGDPQCDGFQNKKWDLFVERSKAYSNCYPYDVPDYASLRSLVASSGTLEFNNESFNWTGVTQNGTSSACIRRTNNSFFSRLNWLTHLKFKYPALNVTMPNNEKFDKLYIWGVHHPGTDNDQIFLYAQASGRITVSTKRSQQTVIPNIGSRPRVRNIPSRISIYWTIVKPGDILLINSTGNLIAPRGYFKIRSGKSSIMRSDAPIGKCNSECITPNGSIPNDKPFQNVNRITYGACPRYVKQNTLKLATGMRNVPEKQTRGIFGAIAGFIENGWEGMVDGWYGFRHQNSEGIGQAADLKSTQAAIDQINGKLNRLIGKTNEKFHQIEKEFSEVEGRIQDLEKYVEDTKIDLWSYNAELLVALENQHTIDLTDSEMNKLFEKTKKQLRENAEDMGNGCFKIYHKCDNACIGSIRNGTYDHDVYRDEALNNRFQIKGVELKSGYKDWILWISFAISCFLLCVALLGFIMWACQKGNIRCNICI

SEQ ID NO: 2309 - protein, 566 aa, Artificial Sequence
  derived and/or modified protein sequence (wt) from hemagglutinin__InfluenzaA__ACD85550
MKTIIALSYILCLVFAQKLPGNDNSTATLCLGHHAVPNGTIVKTITNDQIEVTNATELVQSSSTGEICDSPHQILDGENCTLIDALLGDPQCDGFQNKKWDLFVERSKAYSNCYPYDVPDYASLRSLVASSGTLEFNNESFNWTGVTQNGTSSACIRRSNNSFFSRLNWLTHLKFKYPALNVTMPNNEKFDKLYIWGVHHPGTDNDQIFLYAQASGRITVSTKRSQQTVIPNIGSRPRVRNIPSRISIYWTIVKPGDILLINSTGNLIAPRGYFKIRSGKSSIMRSDAPIGKCNSECITPNGSIPNDKPFQNVNRITYGACPRYVKQNTLKLATGMRNVPEKQTRGIFGAIAGFIENGWEGMVDGWYGFRHQNSEGIGQAADLKSTQAAIDQINGKLNRLIGKTNEKFHQIEKEFSEVEGRIQDLEKYVEDTKIDLWSYNAELLVALENQHTIDLTDSEMNKLFEKTKKQLRENAEDLGNGCFKIYHKCDNACIGSIRNGTYDHDVYRDEALNNRFQIKGVELKSGYKDWILWISFAMSCFLLCVALLGFIMWACQKGNIRCNICI

SEQ ID NO: 2310 - protein, 566 aa, Artificial Sequence; identical to SEQ ID NO: 1928
  derived and/or modified protein sequence (wt) from hemagglutinin__InfluenzaA__ACD85561

SEQ ID NO: 2311 - protein, 566 aa, Artificial Sequence
  derived and/or modified protein sequence (wt) from hemagglutinin__InfluenzaA__ACD85572
MKTIIALSYILCLVFAQKLPGNDNSTATLCLGHHAVPNGTIVKTITNDQIEVTNATELVQSSSTGEICDSPHQILDGENCTLIDALLGDPQCDGFQNKKWDLFVERSKAYSNCYPYDVPDYASLRSLVASSGTLEFNNESFNWTGVTQNGTSSACIRRSNNSFFSRLNWLTHLKFKYPALNVTMPNNEKFDKLYIWGVHHPGTDNDQIFLYAQASGRITVSTKRSQQTVIPNTGSRPRVRNIPSRISIYWTIVKPGDILLINSTGNLIAPRGYFKIRSGKSSIMRSDAPIGKCNSECITPNGSIPNDKPFQNVNRITYGACPRYVKQNTLKLATGMRNVPEKQTRGIFGAIAGFIENGWEGMVDGWYGFRHQNSEGIGQAADLKSTQAAIDQINGKLNRLIGKTNEKFHQIEKEFSEVEGRIQDLEKYVEDTKIDLWSYNAELLVALENQHTIDLTDSEMNKLFEKTKKQLRENAEDMGNGCFKIYHKCDNACIGSIRNGTYDHDVYRDEALNNRFQIKGVELKSGYKDWILWISFAISCFLLCVALLGFIMWACQKGNIRCNICI

SEQ ID NO: 2312 - protein, 566 aa, Artificial Sequence; identical to SEQ ID NO: 2308
  derived and/or modified protein sequence (wt) from hemagglutinin__InfluenzaA__ACD85583

SEQ ID NO: 2313 - protein, 566 aa, Artificial Sequence
  derived and/or modified protein sequence (wt) from hemagglutinin__InfluenzaA__ACD93579
MKTIIALSYILCLVFAQKLPGNDNSTATLCLGHHAVPNGTIVKTITNDQIEVTNATELVQSSSTGEICDSPHQILDGENCTLIDALLGDPQCDGFQNKKWDLFVERSKAYSNCYPYDVPDYASLRSLVASSGTLEFNNESFNWTGVTQNGTSSACIRRSNNSFFSRLNWLTHLKFKYPALNVTMPNNEKFDKLYIWGVHHPGTDNDQIFLYAQASGRITVSTKRSQQTVIPNIGSRPRVRNIPSRISIYWTIVKPGDILLINSTGNLIAPRGYFKIRSGKSSIMRSDAPIGKCNSECITPNGSIPNDKPFQNVNRITYGACPRYVKQNTLKLATGMRNVPEKQTRGIFGAIAGFIENGWEGMVDGWYGFRHQNSEGIGQAADLKSTQAAIDQINGKLNRLIGKTNEKFHQIEKEFSEVEGRIQDLEKYVEDTKIDLWSYNAELLVALENQHTIDLTDSEMNKLFEKTKKQLRENAEDMGNGCFKIYHKCDNTCIGSIRNGTYDHDVYRDEALNNRFQIKGVELKSGYKDWILWISFAISCFLLCVALLGFIMWACQKGNIRCNICI

SEQ ID NO: 2314 - protein, 566 aa, Artificial Sequence; identical to SEQ ID NO: 630
  derived and/or modified protein sequence (wt) from hemagglutinin__InfluenzaA__ACF09402

SEQ ID NO: 2315 - protein, 566 aa, Artificial Sequence
  derived and/or modified protein sequence (wt) from hemagglutinin__InfluenzaA__ACF22159
MKTIIALSYILCLVFAQKLPGNDNSTATLCLGHHAVPNGTIVKTITNDQIEVTNATELVQNSSTGGICDSPHQILDGENCTLIDALLGDPQCDGFQNKKWDLFVERSKAYSNCYPYDVPDYASLRSLVASSGTLEFNNESFNWTGVTQNGTSSACKRRSNKSFFSRLNWLTHLKYKYPALNVTMPNNEKFDKLYIWGVHHPGTDSDQISLYAQASGRITVSTKRSQQTVIPNIGFRPRVRDVSSRISIYWTIVKPGDILLINSTGNLIAPRGYFKIRSGKSSIMRSDAPIGKCNSECITPNGSIPNDKPFQNVNRITYGACPRYVKQNTLKLATGMRNVPEKQTRGIFGAIAGFIENGWEGMVDGWYGFRHQNSEGTGQAADLKSTQAAINQINGKLNRLIGKTNEKFHQIEKEFSEVEGRIQDLEKYVEDTKIDLWSYNAELLVALENQHTIDLTDSEMNKLFERTKKQLRENAEDMGNGCFKIYHKCDNACIESIRNGTYDHDVYRDEALNNRFQIKGVELKSGYKDWILWISFAISCFLLCVALLGFIMWACQKGNIRCNICI

SEQ ID NO: 2316 - protein, 566 aa, Artificial Sequence
  derived and/or modified protein sequence (wt) from hemagglutinin__InfluenzaA__ACF22188
MKTIIALSYIFCLALGQDLPGNDNSTATLCLGHHAVPNGTLVKTITDDQIEVTNATELVQSSSTGKICNNPHRILDGIDCTLIDALLGDPHCDVFQNETWDLFVERSKAFSNCYPYDVPDYASLRSLVASSGTLEFITEGFTWTGVTQNGGSNACKRGPGSGFFSRLNWLTKSGSTYPVLNVTMPNNDNFDKLYIWGVHHPSTNQEQTSLYVQASGRVTVSTRRSQQTIIPNIWSRPWVRGLSSRISIYWTIVKPGDVLVINSNGNLIAPRGYFKMRTGKSSIMRSDAPIDTCISECITPNGSIPNDKPFQNVNKITYGACPKYVKQNTLKLATGMRNVPEKQTRGLFGAIAGFIENGWEGMIDGWYGFRHQNSEGTGQAADLKSTQAAIDQINGKLNRVIEKTNEKFHQIEKEFSEVEGRIQDLEKYVEDTKIDLWSYNAELLVALENQHTIDLTDSEMNKLFEKTRRQLRENAEDMGNGCFKIYHKCDNACIESIRNGNYDHDVYRDEALNNRFQIKGVELKSGYKDWILWISFAISCFLLCVVLLGFIMWACQRGNIRCNICI

SEQ ID NO: 2317 - protein, 566 aa, Artificial Sequence; identical to SEQ ID NO: 2316
  derived and/or modified protein sequence (wt) from hemagglutinin__InfluenzaA__ACF22199

SEQ ID NO: 2318 - protein, 566 aa, Artificial Sequence
  derived and/or modified protein sequence (wt) from hemagglutinin__InfluenzaA__ACF22210
MKTIIALSYIFCLALGQDLPGNDNSTATLCLGHHAVPNGTLVKTITDDQIEVTNATELVQSSSTGKICNNPHRILDGIDCTLIDALLGDPHCDVFQNETWDLFVERSKAFSNCYPYDVPDYASLRSLVASSGTLEFITEGFTWTGVTQNGGSNACKRGPGSGFFSRLNWLTKSGSTYPVLNVTMPNNDNFDKLYIWGVHHPSTNQEQTSLYVQASGRVTVSTRRSQQTIIPNIGSRPWVRGLSSRISIYWTIVKPGDVLVINSNGNLIAPRGYFKMRTGKSSIMRSDAPIDTCISECITPNGSIPNDKPFQNVNKITYGACPKYVKQNTLKLATGMRNVPEKQTRGLFGAIAGFIENGWEGMIDGWYGFRHQNSEGTGQAADLKSTQAAIDQINGKLNRVIEKTNEKFHQIEKEFSEVEGRIQDLEKYVEDTKIDLWSYNAELLVALENQHTIDLTDSEMNKLFEKTRRQLRENAEDMGNGCFKIYHKCDNACIESIRNGTYDHDVYRDEALNNRFQIKGVELKSGYKDWILWISFAISCFLLCVVLLGFIMWACQRGNIRCNICI

SEQ ID NO: 2319 - protein, 566 aa, Artificial Sequence; identical to SEQ ID NO: 2318
  derived and/or modified protein sequence (wt) from hemagglutinin__InfluenzaA__ACF22221

SEQ ID NO: 2320 - protein, 566 aa, Artificial Sequence; identical to SEQ ID NO: 2318
  derived and/or modified protein sequence (wt) from hemagglutinin__InfluenzaA__ACF22232

SEQ ID NO: 2321 - protein, 566 aa, Artificial Sequence; identical to SEQ ID NO: 2318
  derived and/or modified protein sequence (wt) from hemagglutinin__InfluenzaA__ACF22243

SEQ ID NO: 2322 - protein, 566 aa, Artificial Sequence; identical to SEQ ID NO: 2318
  derived and/or modified protein sequence (wt) from hemagglutinin__InfluenzaA__ACF22254

SEQ ID NO: 2323 - protein, 566 aa, Artificial Sequence; identical to SEQ ID NO: 2318
  derived and/or modified protein sequence (wt) from hemagglutinin__InfluenzaA__ACF22265

SEQ ID NO: 2324 - protein, 566 aa, Artificial Sequence; identical to SEQ ID NO: 2318
  derived and/or modified protein sequence (wt) from hemagglutinin__InfluenzaA__ACF22276

SEQ ID NO: 2325 - protein, 566 aa, Artificial Sequence; identical to SEQ ID NO: 2318
  derived and/or modified protein sequence (wt) from hemagglutinin__InfluenzaA__ACF22287

SEQ ID NO: 2326 - protein, 566 aa, Artificial Sequence; identical to SEQ ID NO: 2318
  derived and/or modified protein sequence (wt) from hemagglutinin__InfluenzaA__ACF22298

SEQ ID NO: 2327 - protein, 566 aa, Artificial Sequence; identical to SEQ ID NO: 2318
  derived and/or modified protein sequence (wt) from hemagglutinin__InfluenzaA__ACF22320

SEQ ID NO: 2328 - protein, 566 aa, Artificial Sequence; identical to SEQ ID NO: 2318
  derived and/or modified protein sequence (wt) from hemagglutinin__InfluenzaA__ACF22342

SEQ ID NO: 2329 - protein, 566 aa, Artificial Sequence
  derived and/or modified protein sequence (wt) from hemagglutinin__InfluenzaA__ACF22364
MKTIIALSYIFCLALGQDLPGNDNSTATLCLGHHAVPNGTLVKTITDDQIEVTNATELVQSSSTGKICNNPHRILDGIDCTLIDALLGDPHCDVFQNETWDLFVERSKAFSNCYPYDVPDYASLRSLVASSGTLEFITEGFTWTGVTQNGGSNACKRGPGSGFFSRLNWLTKSGSTYPVLNVTMPNNDNFDKLYIWGVHHPSTNQEQTSLYVQASGRVTVSTRRSQQTIIPNIESRPWVRGLSSRISIYWTIVKPGDVLVINSNGNLIAPRGYFKMRTGKSSIMRSDAPIDTCISECITPNGSIPNDKPFQNVNKITYGACPKYVKQNTLKLATGMRNVPEKQTRGLFGAIAGFIENGWEGMIDGWYGFRHQNSEGTGQAADLKSTQAAIDQINGKLNRVIEKTNEKFHQIEKEFSEVEGRIQDLEKYVEDTKIDLWSYNAELLVALENQHTIDLTDSEMNKLFEKTRRQLRENAEDMGNGCFKIYHKCDNACIESIRNGTYDHDVYRDEALNNRFQIKGVELKSGYKDWILWISFAISCFLLCVVLLGFIMWACQRGNIRCNICI

SEQ ID NO: 2330 - protein, 566 aa, Artificial Sequence; identical to SEQ ID NO: 2308
  derived and/or modified protein sequence (wt) from hemagglutinin__InfluenzaA__ACF22408

SEQ ID NO: 2331 - protein, 566 aa, Artificial Sequence; identical to SEQ ID NO: 1928
  derived and/or modified protein sequence (wt) from hemagglutinin__InfluenzaA__ACF41669

SEQ ID NO: 2332 - protein, 565 aa, Artificial Sequence; identical to SEQ ID NO: 1914
  derived and/or modified protein sequence (wt) from hemagglutinin__InfluenzaA__ACF41680

SEQ ID NO: 2333 - protein, 562 aa, Artificial Sequence
  derived and/or modified protein sequence (wt) from hemagglutinin__InfluenzaA__ACF41691
MAIIYLILLFTAVRGDQICIGYHANNSTEKVDTILERNVTVTHAKDILEKTHNGKLCKLNGIPPLELGDCSIAGWLLGNPECDRLLRVPEWSYIMEKENPRYSLCYPGSFNDYEELKHLLSSVKHFEKVKILPKDGWTQHETDGGSKACAVSGKPSFFRNMVWLTKKGPNYPVAKRSYNNTSGEQMLIIWGVHHPNDEAEQRALYQEVGTYVSASTSTLNKRSTPEIAARPKVSGLGSRMEFSWTLLDVWDTISFESTGNLVAPEYGFKISKRGSSGIMKTEGTLGNCETKCQTPLGAINTTLPFHNVHPLTIGECPKYVKSEKLVLATGLRNVPQIESRGLFGAIAGFIEGGWQGMVDGWYGYHHSNDQGSGYAADKESTQKAFDRITNKVNSVIEKMNTQFEAVGKEFSNLEKRLENLNKKMEDGFLDVWTYNAELLVLMENERTLDFHDSNVKNLYDKVRMQLRDNVKELGNGCFEFYHKCDDECMNSVKNGTYDYPKYEEESKLKRNEIKGVELSSMGVYQILAIYATVAGSLSLAIMIAGISFWMCSNGSLQCRICI

SEQ ID NO: 2334 - protein, 566 aa, Artificial Sequence; identical to SEQ ID NO: 2316
  derived and/or modified protein sequence (wt) from hemagglutinin__InfluenzaA__ACF41735

SEQ ID NO: 2335 - protein, 566 aa, Artificial Sequence
  derived and/or modified protein sequence (wt) from hemagglutinin__InfluenzaA__ACF41790
MKTIIALSYIFCLALGQDLPGNDNSTATLCLGHHAVPNGTLVKTITDDQIEVTNATELVQSSSTGKICNNPHRILDGIDCTLIDALLGDPHCDVFQNETWDLFVERSKAFSNCYPYDVPDYASLRSLVASSGTLEFITEDFTWTGVTQNGGSNACKRGPGSGFFSRLNWLTKSGSTYPVLDVTMPNNDNFDKLYIWGVHHPSTNQEQTSLYVQASGRVTVSTRRSQQTIIPNIGSRPWVRGLSSRISIYWTIVKPGDVLVINSNGNLIAPRGYFKMRTGKSSIMRSDAPIDTCISECITPNGSIPNDKPFQNVNKITYGACPKYVKQNTLKLATGMRNVPEKQTRGLFGAIAGFIENGWEGMIDGWYGFRHQNSEGTGQAADLKSTQAAIDQINGKLNRVIEKTNEKFHQIEKEFSEVEGRIQDLEKYVEDTKIDLWSYNAELLVALENQHTIDLTDSEMNKLFEKTRRQLRENAEDMGNGCFKIYHKCDNACIESIRNGTYDHDVYRDEALNNRFQIKGVELKSGYKDWILWISFAISCFLLCVVLLGFIMWACQRGNIRCNICI

SEQ ID NO: 2336 - protein, 566 aa, Artificial Sequence
  derived and/or modified protein sequence (wt) from hemagglutinin__InfluenzaA__ACF41823
MKTIIALSYIFCLALGQDLPGNDNSTATLCLGHHAVPNGTLVKTITDDQIEVTNATELVQSSSTGKICNNPHRILDGIDCTLIDALLGDPHCDVFQNETWDLFVERSKAFSNCYPYDVPDYASLRSLVASSGTLEFITEGFTWTGVTQNGGSNACKRGPGSGFFSRLNWLTKSGSTYPVLNVTMPNNDNFDKLYIWGVHHPSTNQEQTSLYVQASGRVTVSTRRSRQTIIPNIGSRPWVRGLSSRISIYWTIVKPGDVLVINSNGNLIAPRGYFKMRTGKSSIMRSDAPIDTCISECITPNGSIPNDKPFQNVNKITYGACPKYVKQNTLKLATGMRNVPEKQTRGLFGAIAGFIENGWEGMIDGWYGFRHQNSEGTGQAADLKSTQAAIDQINGKLNRVIEKTNEKFHQIEKEFSEVEGRIQDLEKYVEDTKIDLWSYNAELLVALENQHTIDLTDSEMNKLFEKTRRQLRENAEDMGNGCFKIYHKCDNACIESIRNGTYDHNVYRDEALNNRFQIKGVELKSGYKDWILWISFAISCFLLCVVLLGFIMWACQRGNIRCNICI

SEQ ID NO: 2337 - protein, 565 aa, Artificial Sequence
  derived and/or modified protein sequence (wt) from hemagglutinin__InfluenzaA__ACF41834
MKANLLVLLCALAAADADTICIGYHANNSTDTVDTVLEKNVTVTHSVNLLEDSHNGKLCRLKGIAPLQLGKCNIAGWLLGNPECDPLLPVRSWSYIVETPNSENGICYPGDFIDYEELREQLSSVSSFERFEIFPKESSWPNHNTNGVTAACSHEGKSSFYRNLLWLTEKEGSYPNLKNSYVNKKGKEVLVLWGIHHPSNSKEQQNLYQNENAYVSVVTSNYNRRFTPEIAERPKVRDQAGRMNYYWTLLKPGDTIIFEANGNLIAPMYAFALSRGFGSGIITSNASMHECNTKCQTPLGAINSSLPYQNIHPVTIGECPKYVRSAKLRMVTGLRNIPSIQSRGLFGAIAGFIEGGWTGMIDGWYGYHHQNEQGSGYAADQKSTQNAINGITNKVNTVIEKMNIQFTAVGKEFNKLEKRMENLNKKVDDGFLDIWTYNAELLVLLENERTLDFHDSNVKNLYEKVKSQLKNNAKEIGNGCFEFYHKCDNECMESVRNGTYDYPKYSEESKLNREKVDGVKLESMGIYQILAIYSTVASSLVLLVSLGAISFWMCSNGSLQCRICI

SEQ ID NO: 2338 - protein, 566 aa, Artificial Sequence
  derived and/or modified protein sequence (wt) from hemagglutinin__InfluenzaA__ACF41856
MKTIIALSYILCLVFAQKLPGNDNSTATLCLGHHAVPNGTLVKTITNDQIEVTNATELVQSSSTGRICDSPHRILDGKNCTLIDALLGDPHCDGFQNKEWDLFVERSKAYSNCYPYDVPDYASLRSLVASSGTLEFINEDFNWTGVAQDGGSYACKRGSVNSFFSRLNWLHKSEYKYPALNVTMPNNGKFDKLYIWGVHHPSTDRDQTSLYVRASGRVTVSTKRSQQTVTPNIGSRPWVRGQSSRISIYWTIVKPGDILLINSTGNLIAPRGYFKIRNGKSSIMRSDAPIGTCSSECITPNGSIPNDKPFQNVNRITYGACPRYVKQNTLKLATGMRNVPEKQTRGIFGAIAGFIENGWEGMVDGWYGFRHQNSEGTGQAADLKSTQAAIDQINGKLNRLIEKTNEKFHQIEKEFSEVEGRIQDLEKYVEDTKIDLWSYNAELLVALENQHTIDLTDSEMNKLFEKTRKQLRENAEDMGNGCFKIYHKCDNACIGSIRNGTYDHDVYRDEALNNRFQIKGVELKSGYKDWILWISFAISCFLLCVVLLGFIMWACQKGNIRCNICI

SEQ ID NO: 2339 - protein, 565 aa, Artificial Sequence
  derived and/or modified protein sequence (wt) from hemagglutinin__InfluenzaA__ACF41867
MKAKLLVLLCTFTATYADTICIGYHANNSTDTVDTVLEKNVTVTHSVNLLEDSHNGKLCLLKGIAPLQLGNCSVAGWILGNPECESLISKESWSYIVETPNPENGTCYPGYFADYEELREQLSSVSSFERFEIFPKESSWPNHTVTGVTASCSHNGKSSFYRNLLWLTEKNGLYPNLSNSYVNNKEKEVLVLWGVHHPSNIRDQRAIYHTENAYVSVVSSHYSRRFTPEIAKRPKVRGQEGRINYYWTLLEPGDTIIFEANGNLIAPWYAFALSRGFGSGIITSNAPMNECDAKCQTPQGAINSSLPFQNVHPVTIGECPKYVRSTKLRMVTGLRNIPSIQSRGLFGAIAGFIEGGWTGMMDGWYGYHHQNEQGSGYAADQKSTQNAINGITNKVNSVIEKMNTQFTAVGKEFNKLERRMENLNKKVDDGFLDIWTYNAELLVLLENERTLDFHDSNVKNLYEKVKSQLKNNAKEIGNGCFEFYHKCNNECMESVKNGTYDYPKYSEESKLNREKIDGVKLESMGVYQILAIYSTVASSLVLLVSLGAISFWMCSNGSLQCRICI

SEQ ID NO: 2340 - protein, 565 aa, Artificial Sequence; identical to SEQ ID NO: 2115
  derived and/or modified protein sequence (wt) from hemagglutinin__InfluenzaA__ACF41878

SEQ ID NO: 2341 - protein, 566 aa, Artificial Sequence
  derived and/or modified protein sequence (wt) from hemagglutinin__InfluenzaA__ACF41922
MKAKLLVLLCAFTATYADTICIGYHANNSTDTVDTVLEKNVTVTHSVNLLEDSHNGKLCRLKGIAPLQLGNCSVAGWILGNPKCESLFSKESWSYIAETPNPENGTCYPGYFADYEELREQLSSVSSFERFEIFPKESSWPNHTVTKGVTASCSHNGKSSFYRNLLWLTEKNGLYPNLSKSYVNNKEKEVLVLWGVHHPSNIRDQRAIYHTENAYVSVVSSHYSRRFTPEIAKRPKVRDQEGRINYYWTLLEPGDTIIFEANGNLIAPWYAFALSRGFGSGIITSNASMDECDAKCQTPQGAINSSLPFQNVHPVTIGECPKYVRSTKLRMVTGLRNIPSIQSRGLFGAIAGFIEGGWTGMIDGWYGYHHQNEQGSGYAADQKSTQNAINGITNKVNSVIEKMNTQFTAVGKEFNKLERRMENLNKKVDDGFLDIWTYNAELLVLLENGRTLDFHDSNVKNLYEKVKSQLKNNAKEIGNGCFEFYHKCNNECMESVKNGTYDYPKYSEESKLNRGKIDGVKLESMGVYQILAIYSTVASSLVLLVSLGAISFWMCSNGSLQCRICI

SEQ ID NO: 2342 - protein, 562 aa, Artificial Sequence
  derived and/or modified protein sequence (wt) from hemagglutinin__InfluenzaA__ACF54389
MAIIYLILLFATVRGDQICIGYHANNSTEKVDTILERNVTVTHAKDILEKTHNGKLCKLNGIPPLELGDCSIAGWLLGNPECDRLLRVPEWSYIMEKENPRYSLCYPGSLNDYEELKHLLSSVKHFEKVRILPKDRWTQHTTTGGSKACAVSGKPSFFRNMVWLTKKGTNYPVAKGSYNNTSGEQMLIIWGVHHPIDEAEQRALYQEVGTYVSASTSTLNKRSIPEIAARPEVNGLGSRMEFSWTLLDVWDTINFESTGNLVAPEYGFKISKRGSSGIMKTEGTLGNCETKCQTPLGAINTTLPFHNVHPLTIGECPKYVKSEKLVLATGLRNVPQIESRGLFGAIAGFIEGGWQGMVDGWYGYHHSNEQGSGYAADKESTQKAFDGITNKVNSVIEKMNTQFEAVGKEFNNLEKRLENLNKKMEDGFLDVWTYNAELLVLMENERTLDFHDSNVKNLYEKVRMQLRDNVKELGNGCFEFYHKCDDECMNSVKNGTYDYPKYEEESKLKRNEIKGVKLSSMGVYQILAIYATVAGSLSLAIMVAGISFWMCSNGSLQCRICI

SEQ ID NO: 2343 - protein, 566 aa, Artificial Sequence; identical to SEQ ID NO: 2316
  derived and/or modified protein sequence (wt) from hemagglutinin__InfluenzaA__ACF54400

SEQ ID NO: 2344 - protein, 566 aa, Artificial Sequence; identical to SEQ ID NO: 2318
  derived and/or modified protein sequence (wt) from hemagglutinin__InfluenzaA__ACF54411

SEQ ID NO: 2345 - protein, 566 aa, Artificial Sequence; identical to SEQ ID NO: 2318
  derived and/or modified protein sequence (wt) from hemagglutinin__InfluenzaA__ACF54422

SEQ ID NO: 2346 - protein, 566 aa, Artificial Sequence; identical to SEQ ID NO: 2329
  derived and/or modified protein sequence (wt) from hemagglutinin__InfluenzaA__ACF54433

SEQ ID NO: 2347 - protein, 566 aa, Artificial Sequence; identical to SEQ ID NO: 2318
  derived and/or modified protein sequence (wt) from hemagglutinin__InfluenzaA__ACF54444

SEQ ID NO: 2348 - protein, 566 aa, Artificial Sequence; identical to SEQ ID NO: 2336
  derived and/or modified protein sequence (wt) from hemagglutinin__InfluenzaA__ACF54466

SEQ ID NO: 2349 - protein, 562 aa, Artificial Sequence
  derived and/or modified protein sequence (wt) from hemagglutinin__InfluenzaA__ACF54477
MAIIYLILLFTAVRGDQICIGYHANNSTEKVDTILERNVTVTHAKDILEKTHNGKLCKLNGIPPLELGDCSIAGWLLGNPECDRLLSVPEWSYIMEKENPRDGLCYPGSFNDYEELKHLLSSVKHFEKVKILPKDRWTQHTTTGGSRACAVSGNPSFFRNMVWLTKKGSNYPVAKGSYNNTSGEQMLIIWGVHHPNDETEQRTLYQNVGTYVSVGTSTLNKRSTPDIATRPKVNGLGSRMEFSWTLLDMWDTINFESTGNLIAPEYGFKISKRGSSGIMKTEGTLENCETKCQTPLGAINTTLPFHNVHPLTIGECPKYVKSEKLVLATGLRNVPQIESRGLFGAIAGFIEGGWQGMVDGWYGYHHSNDQGSGYAADKESTQKAFDGITNKVNSVIEKMNTQFEAVGKEFSNLERRLENLNKKMEDGFLDVWTYNAELLVLMENERTLDFHDSNVKNLYDKVRMQLRDNVKELGNGCFEFYHKCDDECMNSVKNGTYDYPKYEEESKLNRNEIKGVKLSSMGVYQILAIYATVAGSLSLAIMMAGISFWMCSNGSLQCRICI

SEQ ID NO: 2350 - protein, 562 aa, Artificial Sequence
  derived and/or modified protein sequence (wt) from hemagglutinin__InfluenzaA__ACF54499
MAIIYLILLFTAVRGDQICIGYHANNSTETVDTILERNVTVTHAKDILEKTHNGKLCKLNGIPPLELGDCSIAGWLLGNPECDRLLSVPEWSYIMEKENPRDGLCYPGSFNDYEELKHLLSSVKHFEKVKILPKDRWTQHTTTGGSRACAVSGNPSFFRNMVWLTKKGSNYPVAKGSYNNTSGEQMLIIWGVHHPNDETEQRTLYQNVGTYVSVGTSTLNKRSTPDIATRPKVNGLGSRMEFSWTLLDMWDTINFESTGNLIAPEYGFKISKRGSSGIMKTEGTLENCETKCQTPLGAINTTLPFHNVHPLTIGECPKYVKSEKLVLATGLRNVPQIESRGLFGAIAGFIEGGWQGMVDGWYGYHHSNDQGSGYAADKESTQKAFDGITNKVNSVIEKMNTQFEAVGKEFSNLERRLENLNKKMEDGFLDVWTYNAELLVLMENERTLDFHDSNVKNLYDKVRMQLRDNVKELGNGCFEFYHKCDDECMNSVKNGTYDYPKYEEESKLNRNEIKGVKLSSMGVYQILAIYATVAGSLSLAIMMAGISFWMCSNGSLQCRICI

SEQ ID NO: 2351 - protein, 562 aa, Artificial Sequence; identical to SEQ ID NO: 2350
  derived and/or modified protein sequence (wt) from hemagglutinin__InfluenzaA__ACF54510

SEQ ID NO: 2352 - protein, 562 aa, Artificial Sequence; identical to SEQ ID NO: 2350
  derived and/or modified protein sequence (wt) from hemagglutinin__InfluenzaA__ACF54521

SEQ ID NO: 2353 - protein, 566 aa, Artificial Sequence
  derived and/or modified protein sequence (wt) from hemagglutinin__InfluenzaA__ACF54532
MKTIIALSYILCLVFAQKLPGNDNSTATLCLGHHAVPNGTIVKTITNDQIEVTNATELVQSSSTGEICDSPHQILDGENCTLIDALLGDPQCDGFQNKKWDLFVERSKAYSNCYPYDVPDYASLRSLVASSGTLEFNNESFNWTGVTQNGTSSACIRRSNNSFFSRLNWLTHLKFKYPALNVTMPNNEKFDKLYIWGVHHPGTDNDQIFLYAQASGRITVSTKRSQQTVIPNIGSRPRVRNIPSRISIYWTIVKPGDILLINSTGNLIAPRGYFKIRSGKSSIMRSDAPIGKCNSECITPNGSIPNDKPFQNVNRITYGACPRYVKQNTLKLATGMRNVPEKQTRGIFGAIAGFIENGWEGMVDGWYGFRHQNSEGIGQAADLKSTQAAIDQINGKLNRLIGKTNEKFHQIEKEFSEVEGRIQDLEKYVEDTKIDLWSYNAELLVALENQHTIDLTDSEMNKLFEKTKKQLRENAEDMGNGCFKIYHKCDNACIGSIRNGTYDHDVYRDEALNNRFQIKGVELTSGYKDWILWISFAISCFLLCVALLGFIMWACQKGNIRCNICI

SEQ ID NO: 2354 - protein, 566 aa, Artificial Sequence
  derived and/or modified protein sequence (wt) from hemagglutinin__InfluenzaA__ACF54543
MKTIIALSYILCLVFAQKLPGNDNSTATLCLGHHAVPNGTIVKTITNDQIEVTNATELVQSSSTGEICDSPHQILDGENCTLIDALLGDPQCDGFQNKKWDLFVERSKAYSNCYPYDVPDYVSLRSLVASSGTLEFNNESFNWTGVTQNGTSSACIRRSNNSFFSRLNWLTHLKFKYPALNVTMPNNENFDKLYIWGVHHPGTDNDQIFLYAQASGRITVSTKRSQQTVIPNIGSRPRVRNIPSRISIYWTIVKPGDILLINSTGNLIAPRGYFKIRSGKSSIMRSDAPIGKCNSECITPNGSIPNDKPFQNVNRITYGACPRYVKQNTLKLATGMRNVPEKQTRGIFGAIAGFIENGWEGMVDGWYGFRHQNSEGIGQAADLKSTQAAIDQINGKLNRLIGKTNEKFHQIEKEFSEVEGRIQDLEKYVEDTKIDLWSYNAELLVALENQHTIDLTDSEMNKLFEKTKKQLRENAEDLGNGCFKIYHKCDNACIGSIRNGTYDHDVYRDEALNNRFQIKGVELKSGYKDWILWISFAISCFLLCVALLGFIMWACQKGNIRCNICI

SEQ ID NO: 2355 - protein, 566 aa, Artificial Sequence
  derived and/or modified protein sequence (wt) from hemagglutinin__InfluenzaA__ACF54565
MKTIIALSYILCLVFSQKLPGNDNSTATLCLGHHAVPNGTIVKTITNDQIEVTNATELVQSSSTGGICDSPHQILDGENCTLIDALLGDPQCDGFQNKKWDLFVERSKAYSNCYPYDVPDYASLRSLVASSGTLEFNNESFNWAGVTQNGTSSACKRRSNKSFFSRLNWLTHLKYKYPALNVTMPNNEKFDKLYIWGVHHPVTDSDQISLYAQASGRITVSTKRSQQTVIPNIGYRPRVRDISSRISIYWTIVKPGDILLINSTGNLIAPRGYFKIRSGKSSIMRSDAPIGKCNSECITPNGSIPNDKPFQNVNRITYGACPRYVKQNTLKLATGMRNVPEKQTRGIFGAIAGFIENGWEGMVDGWYGFRHQNSEGTGQAADLKSTQAAINQINGKLNRLIGKTNEKFHQIEKEFSEVEGRIQDLEKYVEDTKIDLWSYNAELLVALENQHTIDLTDSEMNKLFERTKKQLRENAEDMGNGCFKIYHKCDNACIESIRNGTYDHDVYRDEALNNRFQIKGVELKSGYKDWILWISFAISCFLLCVALLGFIMWACQKGNIRCNICI

SEQ ID NO: 2356 - protein, 566 aa, Artificial Sequence
  derived and/or modified protein sequence (wt) from hemagglutinin__InfluenzaA__ACF54576
MKTIIALSYILCLVFAQKLPGNDNSTATLCLGHHAVPNGTIVKTITNDQIEVTNATELVQSSSTGGICDSPHQILDGENCTLIDALLGDPQCDGFQNKKWDLFVERSKAYSNCYPYDVPDYASLRSLVASSGTLEFNDESFNWTGVTQNGTSSSCKRRSNNSFFSRLNWLTQLKFKYPALNVTMPNNEKFDKLYIWGVHHPVTDNDQIFLYAQASGRITVSTKRSQQTVIPNIGSRPRIRNIPSRISIYWTIVKPGDILLINSTGNLIAPRGYFKIRSGKSSIMRSDAPIGKCNSECITPNGSIPNDKPFQNVNRITYGACPRYVKQNTLKLATGMRNVPEKQTRGIFGAIAGFIENGWEGMVDGWYGFRHQNSEGIGQAADLKSTQAAINQINGKLNRLIGKTNEKFHQIEKEFSEVEGRIQDLEKYVEDTKIDLWSYNAELLVALENQHTIDLTDSEMNKLFERTKKQLRENAEDMGNGCFKIYHKCDNACIGSIRNGTYDHDVYRDEALNNRFQIKGVELKSGYKDWILWISFAISCFLLCVALLGFIMWACQKGNIRCNICI

SEQ ID NO: 2357 - protein, 565 aa, Artificial Sequence
  derived and/or modified protein sequence (wt) from hemagglutinin__InfluenzaA__ACF54598
MKAKLLVLLYAFVATDADTICIGYHANNSTDTVDTIFEKNVAVTHSVNLLEDRHNGKLCKLKGIAPLQLGKCNIIGWLLGNPECDSLLPARSWSYIVETPNSENGACYPGDFIDYEELREQLSSVSSLERFEIFPKESSWPNHTFNGVTASCSHRGKSSFYRNLLWLTKKGDSYPKLTNSYVNNKGKEVLVLWGVHHPSSSDEQQSLYSNGNAYVSVASSNYNRRFTPEIAARPKVKDQHGRMNYYWTLLEPGDTIIFEATGNLIAPWYAFALSRGFESGIITSNASMHECNTKCQTPQGSINSNLPFQNIHPVTIGECPKYVRSTKLRMVTGLRNIPSIQYRGLFGAIAGFIEGGWTGMIDGWYGYHHQNEQGSGYAADQKSTQNAINGITNKVNSIIEKMNTQFTAVGKEFNNLEKRMENLNKKVDDGFLDIWTYNAELLVLLENGRTLDFHDLNVKNLYEKVKSQLKNNAKEIGNGCFEFYHKCDNECMESVRNGTYDYPKYSEESKLNREKIDGVKLESMGVYQILAIYSTVASSLVLLVSLGAISFWMCSNGSLQCRICI

SEQ ID NO: 2358 - protein, 567 aa, Artificial Sequence
  derived and/or modified protein sequence (wt) from hemagglutinin__InfluenzaA__ACG50699
MEKIVLLLAIVSLVKSDQICIGYHANNSTEQVDTIMEKNVTVTHAQDILEKTHNGKLCDLDGVKPLILRDCSVAGWLLGNPMCDEFINVPEWSYMVEKANPANDLCYPGNFNDYEELKHLLSRINHFEKIQIIPKSSWSDHEASLGVSSACPYQGSSSFFRNVVWLIKKNNAYPTIKRSYNNTNQEDLLVLWGIHHPNDEAEQTRLYQNPTTYISVGTSTLNQRLIPKIATRSKVNGQSGRMDFFWTILKPNDAINFESNGNFIAPEYAYKIVKKGDSAIMKSEVEYGNCNTKCQTPMGAINSSMPFHNIHPLTIGECPKYVKSNKLVLATGLRNSPQRERRRKRGLFGAIAGFIEGGWQGMVDGWYGYHHSNEQGSGYAADKESTQKAIDGVTNKVNSIIDKMNTQFEAVGREFNNLERRIENLNKKMEDGFLDVWTYNAELLVLMENERTLDFHDSNVKNLYDKVRLQLRDNAKELGNGCFEFYHKCDNECMESVRNGTYDYPQYSEEARLKREEISGVKLESIGTYQILSIYSTVASSLALAIMVAGLSLWMCSNGSLQCRICI

SEQ ID NO: 2359 - protein, 566 aa, Artificial Sequence; identical to SEQ ID NO: 1928
  derived and/or modified protein sequence (wt) from hemagglutinin__InfluenzaA__ACG70142

SEQ ID NO: 2360 - protein, 566 aa, Artificial Sequence; identical to SEQ ID NO: 1928
  derived and/or modified protein sequence (wt) from hemagglutinin__InfluenzaA__ACG70153

SEQ ID NO: 2361 - protein, 566 aa, Artificial Sequence
  derived and/or modified protein sequence (wt) from hemagglutinin__InfluenzaA__ACG80410
MKTIIALSYILCLVFAQKLPGNDNSTATLCLGHHAVPNGTIVRTITNDQIEVTNATELVQSSSTGEICDSPHQILDGENCTLIDALLGDPQCDGFQNKKWDLFVERSKAYSNCYPYDVPDYASLRSLVASSGTLEFNNESFNWTGVTQNGTSSACIRRSNNSFFSRLNWLTHLRFKYPALNVTMPNNEQFDKLYIWGVHHPGTDNDQIFLYAQASGRITVSTKRSQQTVIPNIGSRPRVRNIPSRISIYWTIVKPGDILLINSTGNLIAPRGYFKIRNGKSSIMRSDAPIGKCNSECITPNGSIPNDKPFQNVNRITYGACPRYVKQNTLKLATGMRNVPEKQTRGIFGAIAGFIENGWEGMVDGWYGFRHQNSEGRGQAADLKSTQAAIDQINGKLNRLIGKTNEKFHQIEKEFSEVEGRIQDLEKYVEDTKIDLWSYNAELLVALENQHTIDLTDSEMNKLFEKTKKQLRENAEDMGNGCFKIYHKCDNACIGSIRNGTYDHDVYRDEALNNRFQIKGVELKSGYKDWILWISFAISCFLLCVALLGFIMWACQKGNIRCNICI

SEQ ID NO: 2362 - protein, 566 aa, Artificial Sequence
  derived and/or modified protein sequence (wt) from hemagglutinin__InfluenzaA__ACG80420
MQTIIALSYILCLVFAQKLPGNDNSTATLCLGHHAVPNGTIVRTITNDQIEVTNATELVQSSSTGEICDSPHQILDGENCTLIDALLGDPQCDGFQNKKWDLFVERSKAYSNCYPYDVPDYASLRSLVASSGTLEFNNESFNWTGVTQNGTSSACIRRSNNSFFSRLNWLTHLRFKYPALNVTMPNNEQFDKLYIWGVHHPGTDNDQIFLYAQASGRITVSTKRSQQTVIPNIGSRPRVRNIPSRISIYWTIVKPGDILLINSTGNLIAPRGYFKIRNGKSSIMRSDAPIGKCNSECITPNGSIPNDKPFQNVNRITYGACPRYVKQNTLKLATGMRNVPEKQTRGIFGAIAGFIENGWEGMVDGWYGFRHQNSEGRGQAADLKSTQAAIDQINGKLNRLIGKTNEKFHQIEKEFSEVEGRIQDLEKYVEDTKIDLWSYNAELLVALENQHTIDLTDSEMNKLFEKTKKQLRENAEDMGNGCFKIYHKCDNACIGSIRNGTYDHDVYRDEALNNRFQIKGVELKSGYKDWILWISFAISCFLLCVALLGFIMWACQKGNIRCNICI

SEQ ID NO: 2363 - protein, 566 aa, Artificial Sequence; identical to SEQ ID NO: 2361
  derived and/or modified protein sequence (wt) from hemagglutinin__InfluenzaA__ACG80426

SEQ ID NO: 2364 - protein, 566 aa, Artificial Sequence; identical to SEQ ID NO: 2361
  derived and/or modified protein sequence (wt) from hemagglutinin__InfluenzaA__ACG80430

SEQ ID NO: 2365 - protein, 566 aa, Artificial Sequence
  derived and/or modified protein sequence (wt) from hemagglutinin__InfluenzaA__ACG80436
MKTIIALSYILCLVFAQKFPGNDNSTATLCLGHHAVPNGTIVKTITNDQIEVTNATELVQSSSTGEICDSPHQILDGENCTLIDALLGDPQCDGFQNKKWDLFVERSKAYSNCYPYDVPDYASLRSLVASSGTLEFNNESFNWTGVTQNGTSSACIRRSNNSFFSRLNWLTHLRFKYPALNVTMPNNENFDKLYIWGVHHPGTDNDQIFLYAQASGRITVSTKRSQQTVIPNIGSRPRVRNIPSRISIYWTIVKPGDILLINSTGNLIAPRGYFKIRSGKSSIMRSDAPIGKCNSECITPNGSIPNDKPFQNVNRITYGACPRYVKQNTLKLATGMRNVPEKQTRGIFGAIAGFIENGWEGMVDGWYGFRHQNSEGIGQAADLKSTQAALDQINGKLNRLIGKTNEKFHQIEKEFSEVEGRIQDLEKYVEDTKIDLWSYNAELLVALENQHTIDLTDSEMNKLFEKTKKQLRENAEDMGNGCFKIYHKCDNACIGSIRNGTYDHNVYRDEALNNRFQIKGVELKSGYKDWILWISFAISCFLLCVALLGFIMWACQKGNIRCNICI

SEQ ID NO: 2366 - protein, 566 aa, Artificial Sequence
  derived and/or modified protein sequence (wt) from hemagglutinin__InfluenzaA__ACG80445
MKTIIALSYILCLVFAQKLPGNDNSTATLCLGHHAVPNGTIVRTITNDQIEVTNATELVQSSSTGEICDSPHQILDGENCTLIDALLGDPQCDGFQNKKWDLFVERSKAYSNCYPYDVPDYASLRSLVASSGTLEFNNESFNWTGVTQNGTSSACIRRSNNSFFSRLNWLTHLRFKYPALNVTMPNNEQFDKLYIWGVHHPGTDNDQIFLYAQASGRITVSTKRSQQTVIPNIGSRPRVRNIPSRISIYWTIVKPGDILLINSTGNLIAPRGYFKIRNGKSSIMRSDAPIGKCNSECITPNGSIPNDKPFQNVNRITYGACPRYVKQNTLKLATGMRNVPEKQTRGIFGAIAGFIENGWEGMVDGWYGFRHQNSEGRGQAADLKSTQAAIDQINGKLNRLIGKTNEKFHQIEKEFSEVEGRIQDLEKYVEDTKIDLWSYNAELLVALENQHTIDLTDSEMNKLFEKTKNQLRENAEDMGNGCFKIYHKCDNACIGSIRNGTYDHDVYRDEALNNRFQIKGVELKSGYKDWILWISFAISCFLLCVALLGFIMWACQKGNIRCNICI

SEQ ID NO: 2367 - protein, 566 aa, Artificial Sequence; identical to SEQ ID NO: 2361
  derived and/or modified protein sequence (wt) from hemagglutinin__InfluenzaA__ACG80454

SEQ ID NO: 2368 - protein, 566 aa, Artificial Sequence; identical to SEQ ID NO: 2361
  derived and/or modified protein sequence (wt) from hemagglutinin__InfluenzaA__ACG80463

SEQ ID NO: 2369 - protein, 566 aa, Artificial Sequence
  derived and/or modified protein sequence (wt) from hemagglutinin__InfluenzaA__ACG80472
MKTIIALSYILCLVFAQKLPGNDNSTATLCLGHHAVPNGTIVRTITNDQIEVTNATELVQSSSTGEICDSPHQILDGENCTLIDALLGDPQCDGFQNKKWDLFVERSKAYSNCYPYDVPDYASLRSLVASSGTLEFNNESFNWTGVTQNGTSSACIRRSNNSFFSRLNWLTHLRFKYPALNVTMPNNEQFDKLYIWGVHHPGTDNDQIFLYAQASGRITVSTKRSQQTVIPNIGSRPRVRNIPSRISIYWTIVKPGDILLINSTGNLIAPRGYFKIRSGKSSIMRSDAPIGKCNSECITPNGSIPNDKPFQNVNRITYGACPRYVKQNTLKLATGMRNVPEKQTRGIFGAIAGFIENGWEGMVDGWYGFRHQNSEGIGQAADLKSTQAALDQINGKLNRLIGKTNEKFHQIEKEFSEVEGRIQDLEKYVEDTKIDLWSYNAELLVALENQHTIDLTDSEMNKLFEKTKKQLRENAEDMGNGCFKIYHKCDNACIGSIRNGTYDHNVYRDEALNNRFQIKGVELKSGYKDWILWISFAISCFLLCVALLGFIMWACQKGNIRCNICI

SEQ ID NO: 2370 - protein, 566 aa, Artificial Sequence
  derived and/or modified protein sequence (wt) from hemagglutinin__InfluenzaA__ACH69558
MKTIIALSYILCLVFAQKLPGNDNSTATLCLGHHAVPNGTIVKTITNDQIEVTNATELVQSSSTGGICNSPHQILDGENCTLIDALLGDPQCDGFQNKKWDLFVERSKAYSNCYPYDVPDYASLRSLVASSGTLEFNNESFNWTGVTQNGTSSACKRRSNNSFFSRLNWLTHLRFKYPALNVTMPNNEKFDKLYIWGVHHPGTDNDQIFLYAQASGRITVSTKRSQQTVIPNIGSRPRVRNIPSRISIYWTIVKPGDILLINSTGNLIAPRGYFKIRSGKSSIMRSDAPIGKCNSECITPNGSIPNDKPFQNVNRITYGACPRYVKQNTLKLATGMRNVPEKQTRGIFGAIAGFIENGWEGMVDGWYGFRHQNSEGIGQAADLKSTQAAINQINGKLNRLIGKTNEKFHQIEKEFSEVEGRIQDLEKYVEDTKIDLWSYNAELLVALENQHTIDLTDSEMNKLFERTKKQLRENAEDMGNGCFKIYHKCDNACIGSIRNGTYDHDVYRDEALNNRFQIKGVELKSGYKDWILWISFAISCFLLCVALLGFIMWACQKGNIRCNICI

SEQ ID NO: 2371 - protein, 566 aa, Artificial Sequence
  derived and/or modified protein sequence (wt) from hemagglutinin__InfluenzaA__ACH69569
MKTIIALSYILCLVFAQKLPGNDNSTATLCLGHHAVPNGTIVKTITNDQIEVTNATELVQSSSTGGICNSPHQILDGENCTLIDALLGDPQCDGFQNKKWDLFVERSKAYSNCYPYDVPDYASLRSLVASSGTLEFNNESFNWTGVTQNGTSSACKRRSNNSFFSRLNWLTHLKFKYPALNVTMPNNEKFDKLYIWGVHHPGTDNDQIFLYAQASGRITVSTKRSQQTVIPNIGSRPRVRNIPSRISIYWTIVKPGDILLINSTGNLIAPRGYFKIRSGKSSIMRSDAPIGKCNSECITPNGSIPNDKPFQNVNRITYGACPRYVKQNSLKLATGMRNVPEKQTRGIFGAIAGFIENGWEGMVDGWYGFRHQNSEGIGQAADLKSTQAAINQINGKLNRLIGKTNEKFHQIEKEFSEVEGRIQDLEKYVEDTKIDLWSYNAELLVALENQHTIDLTDSEMNKLFERTKKQLRENAEDMGNGCFKIYHKCDNACIGSIRNGTYDHDVYRDEALNNRFQIKGVELKSGYKDWILWISFAISCFLLCVALLGFIMWACQKGNIRCNICI

SEQ ID NO: 2372 - protein, 566 aa, Artificial Sequence
  derived and/or modified protein sequence (wt) from hemagglutinin__InfluenzaA__ACH69580
MKTIIALSYILCLVFAQKLPGNDNSTATLCLGHHAVPNGTIVKTITNDQIEVTNATELVQSSSTGGICDSPHQILDGENCTLIDALLGDPQCDDFQNKKWDLFVERSKAYSNCYPYDVPDYASLRSLVASSGTLEFNNESFNWTGVTQNGTSSACKRRSNNSFFSRLNWLTHLKFKYPALNVTMPNNEKFDKLYIWGVHHPGTDNDQIFLYAQASGRITVSTKRSQQTVIPNIGSRPRVRNIPSRISIYWTIVKPGDILLINSTGNLIAPRGYFKIRSGKSSIMRSDAPIGKCNSECITPNGSIPNDKPFQNVNRITYGACPRYVKQNTLKLATGMRNVPEKQTRGIFGAIAGFIENGWEGMVDGWYGFRHQNSEGIGQAADLKSTQAAINQINGKLNRLIGKTNEKFHQIEKEFSEVEGRIQDLEKYVEDTKIDLWSYNAELLVALENQHTIDLTDSEMNKLFERTKKQLRENAEDMGNGCFKIYHKCDNACIGSIRNGTYDHDVYRDEALNNRFQIKGVELKSGYKDWILWISFAISCFLLCVALLGFIMWACQKGNIRCNICI

SEQ ID NO: 2373 - protein, 566 aa, Artificial Sequence
  derived and/or modified protein sequence (wt) from hemagglutinin__InfluenzaA__ACH69591
MKTIIALSYILCLAFAQKLPGNDNSTATLCLGHHAVPNGTLVKTITNDQIEVTNATELVQSSSTGRICDSPHQILDGENCTLIDALLGDPHCDGFQNKEWDLFVERSKAYSNCYPYDVPDYASLRSLVASSGTLEFNNESFNWTGVAQNGTSSACKRRSINSFFSRLNWLHQLKYRYPALNVTMPNNDKFDKLYIWGVHHPSTDSDQISVYAQASGRVTVSTKRSQQTVIPNIGSRPWVRGISSRISIYWTIVKPGDILLINSTGNLIAPRGYFKIRSGKSSIMRSDAPIGKCNSECITPNGSIPNDKPFQNVNRITYGACPRYVKQNTLKLATGMRNVPEKQTRGIFGAIAGFIENGWEGMMDGWYGFRHQNSEGTGQAADLKSTQAAINQINGKLNKLIEKTNEKFHQIENEFSEVEGRIQDLEKYVEDTKIDLWSYNAELLVALENQHTIDLTDSEMNKLFERTRKQLRENAEDMGNGCFKIYHKCDNACIGSIRNGTYDHDVYRDEALNNRFQIKGVELKSGYKDWILWISFAISCFLLCVVLLGFIMWACQKGNIRCNICI

SEQ ID NO: 2374 - protein, 566 aa, Artificial Sequence
  derived and/or modified protein sequence (wt) from hemagglutinin__InfluenzaA__ACH69602
MKTIIALSYILCLAFAQKLPGNDNSTATLCLGHHAVPNGTLVKTITNDQIEVTNATELVQSSSTGRICDSPHQILDGENCTLIDALLGDPHCDGFQNKEWDLFVERSKAYSNCYPYDVPDYASLRSLVASSGTLEFNNESFNWTGVAQNGTSSACKRRSINSFFSRLNWLHQLKYRYPALNVTMPNNDKFDKLYIWGVHHPSTDSDQISVYAQASGRVTVSTKRSQQTVIPNIGSRPWVRGISSRISIYWTIVKPGDILLINSTGNLIAPRGYFKIRSGKSSIMRSDAPIGKCNSECITPNGSIPNDKPFQNVNRITYGACPRYVKQNTLKLATGMRNVPEKQTRGIFGAIAGFIENGWEGMMDGWYGFRHQNSEGTGQAADLKSTQAAINQINGKLNKLIEKTNEKFHQIEKEFSEVEGRIQDLEKYVEDTKIDLWSYNAELLVALENQHTIDLTDSEMNKLFERTRKQLRENAEDMGNGCFKIYHKCDNACIGSIRNGTYDHDVYRDEALNNRFQIKGVELKSGYKDWILWISFAISCFLLCVVLLGFIMWACQKGNIRCNICI

SEQ ID NO: 2375 - protein, 566 aa, Artificial Sequence
  derived and/or modified protein sequence (wt) from hemagglutinin__InfluenzaA__ACH69613
MKTIIALSYILCLAFAQKLPGNDNSTPTLCLGHHAVPNGTLVKTITNDQIEVTNATELVQSSSTGGICDSPHQIIDGENCTLIDALLGDPHCDGFQNKEWDLFVERSKAYSNCYPYDVPDYASLRSLVASSGTLEFNNESFNWTGVAQNGTSSACKRRSINSFFSRLNWLHQLKYRYPALNVTMPNNDKFDKLYIWGVHHPSTDSDQISVYAQASGRVTVSTKRSQQTVIPNIGSRPWVRGISSRISIYWTIVKPGDILLINSTGNPIAPRGYFKIRSGKSSIMRSDAPIGKCNSECITPNGSIPNDKPFQNVNRITYGACPRYVKQNTLKLATGMRNVPEKQTRGIFGAIAGFIENGWEGMMDGWYGLRHQNSEGTGQAADLKSTQAAINQINGKLNKLIEKTNEKFHQIENEFSEVEGRIQDLEKYVEDTKIDLWSYNAELLVALENQHTIDLTDSEMNKLFERTRKQLRENAEDMGNGCFKIYHKCDNACIGSIRNGTYDHDVYRDEALNNRFQIKGVELKSGYKDWILWISFAISCFLLCVVLLGFIMWACQKGNIRCNICI

SEQ ID NO: 2376 - protein, 566 aa, Artificial Sequence; identical to SEQ ID NO: 630
  derived and/or modified protein sequence (wt) from hemagglutinin__InfluenzaA__ACH82060

SEQ ID NO: 2377 - protein, 566 aa, Artificial Sequence; identical to SEQ ID NO: 2316
  derived and/or modified protein sequence (wt) from hemagglutinin__InfluenzaA__ACI06123

SEQ ID NO: 2378 - protein, 566 aa, Artificial Sequence; identical to SEQ ID NO: 2316
  derived and/or modified protein sequence (wt) from hemagglutinin__InfluenzaA__ACI06126

SEQ ID NO: 2379 - protein, 566 aa, Artificial Sequence; identical to SEQ ID NO: 2316
  derived and/or modified protein sequence (wt) from hemagglutinin__InfluenzaA__ACI06127

SEQ ID NO: 2380 - protein, 566 aa, Artificial Sequence; identical to SEQ ID NO: 2316
  derived and/or modified protein sequence (wt) from hemagglutinin__InfluenzaA__ACI06129

SEQ ID NO: 2381 - protein, 566 aa, Artificial Sequence; identical to SEQ ID NO: 2316
  derived and/or modified protein sequence (wt) from hemagglutinin__InfluenzaA__ACI06130

SEQ ID NO: 2382 - protein, 566 aa, Artificial Sequence; identical to SEQ ID NO: 2316
  derived and/or modified protein sequence (wt) from hemagglutinin__InfluenzaA__ACI06132

SEQ ID NO: 2383 - protein, 566 aa, Artificial Sequence; identical to SEQ ID NO: 2318
  derived and/or modified protein sequence (wt) from hemagglutinin__InfluenzaA__ACI06133

SEQ ID NO: 2384 - protein, 566 aa, Artificial Sequence; identical to SEQ ID NO: 2318
  derived and/or modified protein sequence (wt) from hemagglutinin__InfluenzaA__ACI06134

SEQ ID NO: 2385 - protein, 566 aa, Artificial Sequence; identical to SEQ ID NO: 2318
  derived and/or modified protein sequence (wt) from hemagglutinin__InfluenzaA__ACI06135

SEQ ID NO: 2386 - protein, 566 aa, Artificial Sequence; identical to SEQ ID NO: 2318
  derived and/or modified protein sequence (wt) from hemagglutinin__InfluenzaA__ACI06136

SEQ ID NO: 2387 - protein, 566 aa, Artificial Sequence; identical to SEQ ID NO: 2318
  derived and/or modified protein sequence (wt) from hemagglutinin__InfluenzaA__ACI06137

SEQ ID NO: 2388 - protein, 566 aa, Artificial Sequence; identical to SEQ ID NO: 2318
  derived and/or modified protein sequence (wt) from hemagglutinin__InfluenzaA__ACI06138

SEQ ID NO: 2389 - protein, 566 aa, Artificial Sequence; identical to SEQ ID NO: 2318
  derived and/or modified protein sequence (wt) from hemagglutinin__InfluenzaA__ACI06139

SEQ ID NO: 2390 - protein, 566 aa, Artificial Sequence; identical to SEQ ID NO: 2318
  derived and/or modified protein sequence (wt) from hemagglutinin__InfluenzaA__ACI06140

SEQ ID NO: 2391 - protein, 566 aa, Artificial Sequence; identical to SEQ ID NO: 2318
  derived and/or modified protein sequence (wt) from hemagglutinin__InfluenzaA__ACI06141

SEQ ID NO: 2392 - protein, 566 aa, Artificial Sequence; identical to SEQ ID NO: 2318
  derived and/or modified protein sequence (wt) from hemagglutinin__InfluenzaA__ACI06142

SEQ ID NO: 2393 - protein, 566 aa, Artificial Sequence; identical to SEQ ID NO: 2318
  derived and/or modified protein sequence (wt) from hemagglutinin__InfluenzaA__ACI06143

SEQ ID NO: 2394 - protein, 566 aa, Artificial Sequence
  derived and/or modified protein sequence (wt) from hemagglutinin__InfluenzaA__ACI06144
MKTIIALSYIFCLALGQDLPGNDNSTATLCLGHHAVPNGTLVKTITDDQIEVTNATELVQSSSTGKICNNPHRILDGIDCTLIDALLGDPHCDVFQNETWDLFVERSKAFSNCYPYDVPDYASLRSLVASSGTLEFITEGFTWTGVTQNGGSNACKRGPGSGFFSRLNWLTKSGSTYPVLNVTMPNNDNFDKLYIWGVHHPSTNQEQTSLYVQASGRVTVSTRRSQQTIIPNIGSRPWVRGLSSRISIYWTIVKPGDVLVINSNGNLIAPRGYFKMRTGKSSIMRSDAPIDTCISECITPNGSIPNDKPFQNVNKITYGACPKYVKQNTLKLATGMRNVPEKQTRGLFGAIAGFIENGWEGMIDGWYGFRHQNSEGTGQAADLKSTQAAIDQINGKLNRVIEKTNEKFHQIEKEFSEVEGRIQDLEKYVEDTKIDLWSYNAELLVALENQHTIDLTDSEMNRLFEKTRRQLRENAEDMGNGCFKIYHKCDNACIESIRNGTYDHDVYRDEALNNRFQIKGVELKSGYKDWILWISFAISCFLLCVVLLGFIMWACQRGNIRCNICI

SEQ ID NO: 2395 - protein, 566 aa, Artificial Sequence; identical to SEQ ID NO: 2318
  derived and/or modified protein sequence (wt) from hemagglutinin__InfluenzaA__ACI06145

SEQ ID NO: 2396 - protein, 566 aa, Artificial Sequence
  derived and/or modified protein sequence (wt) from hemagglutinin__InfluenzaA__ACI06146
MKTIIALSYIFCLALGQDLPGNDNSTATLCLGHHAVPNGTLVKTITDDQIEVTNATELVQSSSTGKICNNPHRILDGIDCTLIDALLGDPHCDVFQNETWDLFVERSKAFSNCYPYDVPDYASLRSLVASSGTLEFITEGFTWTGVTQNGGSNACKRGPGSGFFSRLNWLTKSGSTYPVLNVTMPNNDNFDKLYIWGVHHPSTNQEQTSLYVQASGRVTVSTRRSQQTIIPNIGSSPWVRGLSSRISIYWTIVKPGDVLVINSNGNLIAPRGYFKMRTGKSSIMRSDAPIDTCISECITPNGSIPNDKPFQNVNKITYGACPKYVKQNTLKLATGMRNVPEKQTRGLFGAIAGFIENGWEGMIDGWYGFRHQNYEGTGQAADLKSTQAAIDQINGKLNRVIEKTNEKFHQIEKEFSEVEGRIQDLEKYVEDTKIDLWSYNAELLVALENQHTIDLTDSEMNKLFEKTRRQLRENAEDMGNGCFKIYHKCDNACIESIRNGTYDHDVYRDEALNNRFQIKGVELKSGYKDWILWISFAISCFLLCVVLLGFIMWACQRGNIRCNICI

SEQ ID NO: 2397 - protein, 566 aa, Artificial Sequence; identical to SEQ ID NO: 2318
  derived and/or modified protein sequence (wt) from hemagglutinin__InfluenzaA__ACI06147

SEQ ID NO: 2398 - protein, 566 aa, Artificial Sequence; identical to SEQ ID NO: 2318
  derived and/or modified protein sequence (wt) from hemagglutinin__InfluenzaA__ACI06148

SEQ ID NO: 2399 - protein, 566 aa, Artificial Sequence
  derived and/or modified protein sequence (wt) from hemagglutinin__InfluenzaA__ACI06149
MKTIIALSYIFCLALGQDLPGNDNSTATLCLGHHAVPNGTLVKTITDDQIEVTNATELVQSSSTGKICNNPHRILDGIDCTLIDALLGDPHCDVFQNETWDLFVERSKAFSNCYPYDVPDYASLRSLVASSGTLEFITEGFTWTGVTQNGGSNACKRGPGSGFFSRLNWLTKSGSTYPVLNVTMPNNDNFDKLYIWGVHHPSTNQEQTSLYVQASGRVTVSTRRSRQTIIPNIGSRPWVRGLSSRISIYWTIVKPGDVLVINSNGNLIAPRGYFKMRTGKSSIMRSDAPIDTCISECITPNGSIPNDKPFQNVNKITYGACPKYVKQNTLKLATGMRNVPEKQTRGLFGAIAGFIENGWEGMIDGWYGFRHQNSEGTGQAADLKSTQAAIDQINGKLNRVIEKTNEKFHQIEKEFSEVEGRIQDLEKYVEDTKIDLWSYNAELLVALENQHTIDLTDSEMNKLFEKTRRQLRENAEDMGNGCFKIYHKCDNACIESIRNGTYDHDVYRDEALNNRFQIKGVELKSGYKDWILWISFAISCFLLCVVLLGFIMWACQRGNIRCNICI

SEQ ID NO: 2400 - protein, 566 aa, Artificial Sequence; identical to SEQ ID NO: 2329
  derived and/or modified protein sequence (wt) from hemagglutinin__InfluenzaA__ACI06151

SEQ ID NO: 2401 - protein, 566 aa, Artificial Sequence; identical to SEQ ID NO: 2329
  derived and/or modified protein sequence (wt) from hemagglutinin__InfluenzaA__ACI06152

SEQ ID NO: 2402 - protein, 566 aa, Artificial Sequence
  derived and/or modified protein sequence (wt) from hemagglutinin__InfluenzaA__ACI06153
MKTIIALSYIFCLALGQDLPGNDNSTATLCLGHHAVPNGTLVKTITDDQIEVTNATELVQSSSTGKICNNPHRILDGIDCTLIDALLGDPHCDVFQNETWDLFVERSKAFSNCYPYDVPDYASLRSLVASSGTLEFITEGFTWTGVTQNGGSNACKRGPGSGFFSRLNWLTKSGSTYPVLNVTMPNNDNFDKLYIWGVHHPSTNQEQTSLYVQASGRVTVSTRRSQQTIIPNIGSRPWVRGLSSRISIYWTIVKPGDELVINSNGNLIAPRGYFKMRTGKSSIMRSDAPIDTCISECITPNGSIPNDKPFQNVNKITYGACPKYVKQNTLKLATGMRNVPEKQTRGLFGAIAGFIENGWEGMIDGWYGFRHQNSEGTGQAADLKSTQAAIDQINGKLNRVIEKTNEKFHQIEKEFSEVEGRIQDLEKYVEDTKIDLWSYNAELLVALENQHTIDLTDSEMNKLFEKTRRQLRENAEDMGNGCFKIYHKCDNACIESIRNGTYDHDVYRDEALNNRFQIKGVELKSGYKDWILWISFAISCFLLCVVLLGFIMWACQRGNIRCNICI

SEQ ID NO: 2403 - protein, 566 aa, Artificial Sequence
  derived and/or modified protein sequence (wt) from hemagglutinin__InfluenzaA__ACI06155
MKTIIALSYIFCLALGQDLPGNDNSTATLCLGHHAVPNGTLVKTITDDQIEVTNATELVQSSSTGKICNNPHRILDGIDCTLIDALLGDPHCDVFQNETWDLFVERSKAFSNCYPYDVPDYASLRSLVASSGTLEFITEGFTWTGVTQNGGSNACKRGPGSGFFSRLNWLTKSGSTYPVLNVTMPNNDNFDKLYIWGVHHPSTNQEQTSLYVQASGRVTVSTRRSQQTIIPNIESRPWVRGLSSRISIYWTIVKPGDVLVINSNGNLIAPRGYFKMRTGKSSIVRSDAPIDTCISECITPNGSIPNDKPFQNVNKITYGACPKYVKQNTLKLATGMRNVPEKQTRGLFGAIAGFIENGWEGMIDGWYGFRHQNSEGTGQAADLKSTQAAIDQINGKLNRVIEKTNEKFHQIEKEFSEVEGRIQDLEKYVEDTKIDLWSYNAELLVALENQHTIDLTDSEMNKLFEKTRRQLRENAEDMGNGCFKIYHKCDNACIESIRNGTYDHDVYRDEALNNRFQIKGVELKSGYKDWILWISFAISCFLLCVVLLGFIMWACQRGNIRCNICI

SEQ ID NO: 2404 - protein, 566 aa, Artificial Sequence; identical to SEQ ID NO: 2329
  derived and/or modified protein sequence (wt) from hemagglutinin__InfluenzaA__ACI06156

SEQ ID NO: 2405 - protein, 566 aa, Artificial Sequence; identical to SEQ ID NO: 2329
  derived and/or modified protein sequence (wt) from hemagglutinin__InfluenzaA__ACI06157

SEQ ID NO: 2406 - protein, 566 aa, Artificial Sequence; identical to SEQ ID NO: 2329
  derived and/or modified protein sequence (wt) from hemagglutinin__InfluenzaA__ACI06158

SEQ ID NO: 2407 - protein, 566 aa, Artificial Sequence; identical to SEQ ID NO: 2329
  derived and/or modified protein sequence (wt) from hemagglutinin__InfluenzaA__ACI06159

SEQ ID NO: 2408 - protein, 566 aa, Artificial Sequence; identical to SEQ ID NO: 2318
  derived and/or modified protein sequence (wt) from hemagglutinin__InfluenzaA__ACI06160

SEQ ID NO: 2409 - protein, 566 aa, Artificial Sequence
  derived and/or modified protein sequence (wt) from hemagglutinin__InfluenzaA__ACI06161
MKTIIALSYIFCLALGQDLPGNDNSTATLCLGHHAVPNGTLVKTITDDQIEVTNATELVQSSSTGKICNNPHRILDGIDCTLIDALLGDPHCDVFQNETWDLFVERSKAFSNCYPYDVPDYASLRSLVASSGTLEFITEGFTWTGVTQNGGSNACKRGPGSGFFSRLNWLTKSGSTYPVLNVTMPNNDNFDKLYIWGVHHPSTNQEQTSLYVQASGRVTVSTRRSQQTIIPNIESRPWVRGLSSRISIYWTIVKPGDVLVINSNGNLIAPRGYFKMRTGKSSIMRSDAPIDTCISECITPNGSIPNDKPFQNVNKITYGACPKYVKQNTLKLATGMRNVPEKQTRGLFGAIAGFIENGWEGMIDGWYGFRHQNSEGTGQAADLKSTQAAIDQINGKLNRVIEKTNEKFHQIEKEFSEVEGRIQDLEKYVEDTKIDLWSYNAELLVALENQHTIDLTDSEMNKLFEKTRRQLRENAEDMGNGCFKIYHKCDNACIESIRKGTYDHDVYRDEALNNRFQIKGVELKSGYKDWILWISFAISCFLLCVVLLGFIMWACQRGNIRCNICI

SEQ ID NO: 2410 - protein, 566 aa, Artificial Sequence
  derived and/or modified protein sequence (wt) from hemagglutinin__InfluenzaA__ACI06162
MKTIIALSYIFCLALGQDLPGNDNSTATLCLGHHAVPNGTLVKTITDDQIEVTNATELVQSSSTGKICNNPHRILDGIDCTLIDALLGDPHCDVFQNETWDLFVERSKAFSNCYPYDVPDYASLRSLVASSGTLEFITEGFTWTGVTQNGGSNACKRGPGSGFFSRLNWLTKSGSTYPVLNVTMPNNDNFDKLYIWGVHHPSTNQEQTSLYVQASGRVTVSTRRSQQTIIPNIESRPWVRGLSSRISIYWTIVNPGDVLVINSNGNLIAPRGYFKMRTGKSSIMRSDAPIDTCISECITPNGSIPNDKPFQNVNKITYGACPKYVKQNTLKLATGMRNVPEKQTRGLFGAIAGFIENGWEGMIDGWYGFRHQNSEGTGQAADLKSTQAAIDQINGKLNRVIEKTNEKFHQIEKEFSEVEGRIQDLEKYVEDTKIDLWSYNAELLVALENQHTIDLTDSEMNKLFEKTRRQLRENAEDMGNGCFKIYHKCDNACIESIRNGTYDHDVYRDEALNNRFQIKGVELKSGYKDWILWISFAISCFLLCVVLLGFIMWACQRGNIRCNICI

SEQ ID NO: 2411 - protein, 566 aa, Artificial Sequence
  derived and/or modified protein sequence (wt) from hemagglutinin__InfluenzaA__ACI06163
MKTIIALSYIFCLALGQDLPGNDNSTATLCLGHHAVPNGTLVKTITDDQIEVTNATELVQSSSTGKICNNPHRILDGIDCTLIDALLGDPHCDVFQNETWDLFVERSKAFSNCYPYDVPDYASLRSLVASSGTLEFITEGFTWTGVTQNGGSNACKRGPGSGFFSRLNWLTKSGSTYPVLNVTMPNNDNFDKLYIWGVHHPSTNQEQTSLYVQASGRVTVSTRRSQQTIIPNIGSRPWVRGLSSRISIYWTIVKPGDVLVINSNGNLIAPRGYFKMRTGKSSIMRSDAPIDTCISECITPNGSIPNDKPFQNVNKITYGACPKYVKQNTLKLATGMRNVPEKQTRGLFGAIAGFIENGWEGMIDGWYGFRHQNSEGTGQAADLKSTQAAIDQINGKLNRVIEKTNEKFHQIEKEFSEVEGRIQDLEKYVEDTKIDLWSYNAELLVALENQHTIDLTDSEMNKLFEKTRRQLRENAEDMGNGCFKIYHKCDNACIESIRKGTYDHDVYRDEALNNRFQIKGVELKSGYKDWILWISFAISCFLLCVVLLGFIMWACQRGNIRCNICI

SEQ ID NO: 2412 - protein, 566 aa, Artificial Sequence
  derived and/or modified protein sequence (wt) from hemagglutinin__InfluenzaA__ACI06164
MKTIIALSYIFCLALGQDLPGNDNSTATLCLGHHAVPNGTLVKTITDDQIEVTNATELVQSSSTGKICNNPHRILDGIDCTLIDALLGDPHCDVFQNETWDLFVERSKAFSNCYPYDVPDYASLRSLVASSGTLEFITEGFTWTGVTQNGGSNACKRGPGSGFFSRLNWLTKSGSTYPVLNVTMPNNDNFDKLYIWGVHHPSTNQEQTSLYVQASGRVTVSTRRSQQTIIPNIGSRPWVRGLSSRINIYWTIVKPGDVLVINSNGNLIAPRGYFKMRNGKSSIMRSDAPIDTCISECITPNGSIPNDKPFQNVNKITYGACPKYVKQNTLKLATGMRNVPEKQTRGLFGAIAGFIENGWEGMIDGWYGFRHQNSEGTGQAADLKSTQAAIDQINGKLNRVIEKTNEKFHQIEKEFSEVEGRIQDLEKYVEDTKIDLWSYNAELLVALENQHTIDLTDSEMNKLFEKTRRQLRENAEDMGNGCFKIYHKCDNACIESIRNGTYDHDVYRDEALNNRFQIKGVELKSGYKDWILWISFAISCFLLCVVLLGFIMWACQRGNIRCNICI

SEQ ID NO: 2413 - protein, 566 aa, Artificial Sequence
  derived and/or modified protein sequence (wt) from hemagglutinin__InfluenzaA__ACI06165
MKTIIALSYIFCLALGQDLPGNDNSTATLCLGHHAVPNGTLVKTITDDQIEVTNATELVQSSSTGKICNNPHRILDGIDCTLIDALLGDPHCDVFQNETWDLFVERSKAFSNCYPYDVPDYASLRSLVASSGTLEFITEGFTWTGVTQNGGSNACKRGPGSGFFSRLNWLTKSGSTYPVLNVTMPNNDNFDKLYIWGVHHPSTNQEQTSLYVQASGRVTVSTRRSQQTIIPNIGSRPWVRGLSSRISIYWTIVKPGDVLVINSNGNLIAPRGYFKMRNGKSSIMRSDAPIDTCISECITPNGSIPNDKPFQNVNKITYGACPKYVKQNTLKLATGMRNVPEKQTRGLFGAIAGFIENGWEGMIDGWYGFRHQNSEGTGQAADLKSTQAAIDQINGKLNRVIEKTNEKFHQIEKEFSEVEGRIQDLEKYVEDTKIDLWSYNAELLVALENQHTIDLTDSEMNKLFEKTRRQLRENAEDMGNGCFKIYHKCDNACIESIRNGTYDHDVYRDEALNNRFQIKGVELKSGYKDWILWISFAISCFLLCVVLLGFIMWACQRGNIRCNICI

SEQ ID NO: 2414 - protein, 566 aa, Artificial Sequence
  derived and/or modified protein sequence (wt) from hemagglutinin__InfluenzaA__ACI06166
MKTIIALSYIFCLALGQDLPGNDNSTATLCLGHHAVPNGTLVKTITDDQIEVTNATELVQSSSTGKICNNPHRILDGIDCTLIDALLGDPHCDVFQNETWDLFVERSKAFSNCYPYDVPDYASLRSLVASSGTLEFITEGFTWTGVTQNGGSNACKRGPGSGFFSRLNWLTKSGSTYPVLNVTMPNNDNFDKLYIWGVHHPSTNQEQTSLYVQASGRVTVSTRRSQQTIIPNIGSRPWIRGLSSRINIYWTIVKPGDVLVINSNGNLIAPRGYFKMRNGKSSIMRSDAPIDTCISECITPNGSIPNDKPFQNVNKITYGACPKYVKQNTLKLATGMRNVPEKQTRGLFGAIAGFIENGWEGMIDGWYGFRHQNSEGTGQAADLKSTQAAIDQINGKLNRVIEKTNEKFHQIEKEFSEVEGRIQDLEKYVEDTKIDLWSYNAELLVALENQHTIDLTDSEMNKLFEKTRRQLRENAEDMGNGCFKIYHKCDNACIESIRNGTYDHDVYRDEALNNRFQIKGVELKSGYKDWILWISFAISCFLLCVVLLGFIMWACQRGNIRCNICI

SEQ ID NO: 2415 - protein, 566 aa, Artificial Sequence; identical to SEQ ID NO: 2399
  derived and/or modified protein sequence (wt) from hemagglutinin__InfluenzaA__ACI06167

SEQ ID NO: 2416 - protein, 566 aa, Artificial Sequence
  derived and/or modified protein sequence (wt) from hemagglutinin__InfluenzaA__ACI06168
MKTIIALSYIFCLALGQDLPGNDNSTATLCLGHHAVPNGTLVKTITDDQIEVTNATELVQSSSTGKICNNPHRILDGIDCTLIDALLGDPHCDVFQNETWDLFVERSKAFSNCYPYDVPDYASLRSLVASSGTLEFITEGFTWTGVTQNGGSNACKRGPGSGFFSRLNWLTKSGSTYPVLNVTMPNNDNFDKLYIWGVHHPSTNQEQTSLYVQASGRVTVSTRRSQQTIIPNIGSRPWVRGLSSRISIYWTIVKPGDVLVINSNGNLIAPRGYFKMRTGKSSIMRSDAPIDTCISECITPNGSIPNDKPFQNVNKITYGACPKYVKQNTLKLATGMRNVPEKQTRGLFGAIAGFIENGWEGMIDGWYGFRHQNSEGTGQAADLKSTQAAIDQINGKLNRVIEKTNEKFHQIEKEFSEVEGRIQDLEKYVEDTKIDLWSYNAELLVALENQHTIDLTDSEMNKLFEKTRKQLRENAEDMGNGCFKIYHKCDNACIESIRNGTYDHDVYRDEALNNRFQIKGVELKSGYKDWILWISFAISCFLLCVVLLGFIMWACQRGNIRCNICI

SEQ ID NO: 2417 - protein, 566 aa, Artificial Sequence; identical to SEQ ID NO: 2318
  derived and/or modified protein sequence (wt) from hemagglutinin__InfluenzaA__ACI06169

SEQ ID NO: 2418 - protein, 566 aa, Artificial Sequence; identical to SEQ ID NO: 2335
  derived and/or modified protein sequence (wt) from hemagglutinin__InfluenzaA__ACI06171

SEQ ID NO: 2419 - protein, 566 aa, Artificial Sequence; identical to SEQ ID NO: 2335
  derived and/or modified protein sequence (wt) from hemagglutinin__InfluenzaA__ACI06172

SEQ ID NO: 2420 - protein, 566 aa, Artificial Sequence
  derived and/or modified protein sequence (wt) from hemagglutinin__InfluenzaA__ACI06173
MKTIIALSYIFCLALGQDLPGNDNSTATLCLGHHAVPNGTLVKTITDDQIEVTNATELVQSSSTGKICNNPHRILDGIDCTLIDALLGDPHCDVFQNETWDLFVERSKAFSNCYPYDVPDYASLRSLVASSGTLEFITEGFTWTGVTQNGGSNACKRGPGSGFFSRLNWLTKSGSTYPVLNVTMPNNDNFDKLYIWGVHHPSTNQEQTSLYVQASGRVTVSTRRSQQTIIPNIGSRPWVRGLSSRISIYWTIVKPGDVLEINSNGNLIAPRGYFKMRTGKSSIMRSDAPIDTCISECITPNGSIPNDKPFQNVNKITYGACPKYVKQNTLKLATGMRNVPEKQTRGLFGAIAGFIENGWEGMIDGWYGFRHQNSEGTGQAADLKSTQAAIDQINGKLNRVIEKTNEKFHQIEKEFSEVEGRIQDLEKYVEDTKIDLWSYNAELLVALENQHTIDLTDSEMNKLFEKTRRQLRENAEDMGNGCFKIYHKCDNACIESIRNGTYDHDVYRDEALNNRFQIKGVELKSGYKDWILWISFAISCFLLCVVLLGFIMWACQRGNIRCNICI

SEQ ID NO: 2421 - protein, 566 aa, Artificial Sequence; identical to SEQ ID NO: 2335
  derived and/or modified protein sequence (wt) from hemagglutinin__InfluenzaA__ACI06174

SEQ ID NO: 2422 - protein, 566 aa, Artificial Sequence; identical to SEQ ID NO: 2336
  derived and/or modified protein sequence (wt) from hemagglutinin__InfluenzaA__ACI06175

SEQ ID NO: 2423 - protein, 566 aa, Artificial Sequence; identical to SEQ ID NO: 2336
  derived and/or modified protein sequence (wt) from hemagglutinin__InfluenzaA__ACI06176

SEQ ID NO: 2424 - protein, 566 aa, Artificial Sequence; identical to SEQ ID NO: 2336
  derived and/or modified protein sequence (wt) from hemagglutinin__InfluenzaA__ACI06177

SEQ ID NO: 2425 - protein, 562 aa, Artificial Sequence
  derived and/or modified protein sequence (wt) from hemagglutinin__InfluenzaA__ACI25724
MAIIYLILLFATVRGDQICIGYHANNSTEKVDTILERNVTVTHAKDILEKTHNGKLCKLNGIPPLELGDCSIAGWLLGNPECDRLLRVPEWSYIMERENPRYSLCYPGSLNDYEELKHLLSSVKHFEKVRILPKDRWTQHTTTGGSKACAVSGKPSFFRNMVWLTKKGPNYPVAKGSYNNTSGEQMLIIWGVHHPKDEAEQRALYQEVGTYVSASTSTLNKRSIPEIAARPEVNGLGSRMEFSWTLLDVWDTINFESTGNLVAPEYGFKISKRGSSGIMKTEGTLGNCETKCQTPLGAINTTLPFHNVHPLTIGECPKYVKSEKLVLATGLRNVPQIESRGLFGAIAGFIEGGWQGMVDGWYGYHHSNDQGSGYAADKESTQKAFDGITNKVNSVIEKMNTQFEAVGKEFNNLEKRLENLNKKMEDGFLDVWTYNAELLVLMENERTLDFHDSNVKNLYEKVRMQLRDNVKELGNGCFEFYHKCDDECMNSVKNGTYDYPKYEEESKLKRNEIKGVKLSSMGVYQILAIYATVAGSLSLAIMVAGISFWMCSNGSLQCRICI

SEQ ID NO: 2426 - protein, 566 aa, Artificial Sequence
  derived and/or modified protein sequence (wt) from hemagglutinin__InfluenzaA__ACI25746
MKTIIALSYIFCLALGQYLPGNDNSTATLCLGHHAVPNGTLVKTITDDQIEVTNATELVQSSSTGKICNNPHRILDGIDCTLIDALLGDPHCDVFQNETWDLFVERSKAFSNCYPYDVPDYASLRSLVASSGTLEFITEGFTWTGVTQNGGSNACKRGPGSGFFSRLNWLTKSGSTYPVLNVTMPNNDNFDKLYIWGVHHPSTNQEQTSLYVQASGRVTVSTRRSQQTIIPNIGSRPWVRGLSSRISIYWTIVKPGDVLVIDSNGNLIAPRGYFKMRTGKSSIMRSDAPIDTCISECITPNGSIPNDKPFQNVNKITYGACPKYVKQNTLKLATGMRNVPEKQTRGLFGAIAGFIENGWEGMIDGWYGFRHQNSEGTGQAADLKSTQAAIDQINGKLNRVIEKTNEKFHQIEKEFSEVEGRIQDLEKYVEDTKIDLWSYNAELLVALENQHTIDLTDSEMNKLFEKTRRQLRENAEDMGNGCFKIYHKCDNACIESIRNGTYDHDVYRDEALNNRFQIKGVELKSGYKDWILWISFAISCFLLCVVLLGFIMWACQRGNIRCNICI

SEQ ID NO: 2427 - protein, 566 aa, Artificial Sequence
  derived and/or modified protein sequence (wt) from hemagglutinin__InfluenzaA__ACI25757
MKTIIALSYIFCLALGQDLPGNDNSTATLCLGHHAVPNGTLVKTITDDQIEVTNATELVQSSSTGKICNNPHRILDGIDCTLIDALLGDPHCDVFQNETWDLFVERSKAFSNCYPYDVPDYASLRSLVASSGTLEFITEGFTWTGVTQNGGSNACKRGPGSGFFSRLNWLTKSGSTYLVLNVTMPNNDNFDKLYIWGVHHPSTNQEQTSLYVQASGRVTVSTRRSQQTIIPNIGSRPWVRGLSSRISIYWTIVKPGDVLVINSNGNLIAPRGYFKMRTGKSSIMRSDAPIDTCISECITPNGSIPNDKPFQNVNKITYGACPKYVKQNTLKLATGMRNVPEKQTRGLFGAIAGFIENGWEGMIDGWYGFRHQNSEGTGQAADLKSTQAAIDQINGKLNRVIEKTNEKFHQIEKEFSEVEGRIQDLEKYVEDTKIDLWSYNAELLVALENQHTIDLTDSEMNKLFEKTRRQLRENAEDMGNGCFKIYHKCDNACIESIRNGTYNHDVYRDEALNNRFQIKGVELKSGYKDWILWISFAISCFLLCVVLLGFIMWACQRGNIRCNICI

SEQ ID NO: 2428 - protein, 566 aa, Artificial Sequence; identical to SEQ ID NO: 2316
  derived and/or modified protein sequence (wt) from hemagglutinin__InfluenzaA__ACI25768

SEQ ID NO: 2429 - protein, 566 aa, Artificial Sequence
  derived and/or modified protein sequence (wt) from hemagglutinin__InfluenzaA__ACI25779
MKTIIALSYIFCLALGQDLPGNDNSTATLCLGHHAVPNGTLVKTITDDQIEVTNATELVQSSSTGKICNNPHRILDGIDCTLIDALLGDPHCDVFQNETWDLFVERSKAFSNCYPYDVPDYASLRSLVASSGTLEFITEGFTWTGVTQNGGSNACKRGPGSGFFSRLNWLTKSGSTYPVLNVTMPNNDNFDKLYIWGVHHPSTNQEQTSLYVQASGRVTVSTRRSQQTIIPNIWSRPWVRGLSSRISIYWTIVKPGDVLVINSNGNLIAPRGYFKMRTGKSSIMRSDAPIDTCISECITPNGSIPNDKPFQNVNKITYGACPKYVKQNTLKLATGMRNVPEKQTRGLFGAIAGFIENGWEGMIDGWYGFRHQNSEGTGQAADLKSTQAAIDQINGKLNRVIEKTNEKFHQIEKEFSEVEGRIQDLEKYVEDTKIDLWSYNAELLVALENQHTIDLTDSEMNKLFEKTRRQLRENAEDMGNGCFKIYHKCDNACIESIRNGTYDHDVYRDEALNNRFQIKGVELKSGYKDWILWISFAISCFLLCVVLLGFIMWACQRGNIRCNICI

SEQ ID NO: 2430 - protein, 566 aa, Artificial Sequence
  derived and/or modified protein sequence (wt) from hemagglutinin__InfluenzaA__ACI25790
MKTIIALSYIFCLALGQDLPGNDNSTATLCLGHHAVPNGTLVKTITDDQIEVTNATELVQSSSTGKICNNPHRILDGIDCTLIDALLGDPHCDVFQNETWDLFVERSKAFSNCYPYDVPDYASLRSLVASSGTLEFITEGFTWTGVTQNGGSNACKRGPGSGFFSRLNWLTKSGSTYPVLNVTMPNNDNFDKLYIWGVHHPSTNQEQTSLYVQASGRVTVSTRRSQQTIIPNIWSRPWVRGLSSRISIYWTIVKPGDVLVINSNGNLIAPRGYFKMRTGKSSIMRSDAPIDTCISECITPNGSIPNDKPFQNVNKITYGACPKYVKQNTLKLATGMRNVPEKQTRGLFGAIAGFIENGWEGMIDGWYGFRHQNSEGTGQAADLKSTQAAIDQINGKLNRVIEKTNEKFHQIEKEFSEVEGRIQDLEKYVEDTKIDLWSYNAELLVALENQHTIDLTDSEMNKLFEKTRRQLRENAEDMGNGCFKIYHKCDNACIESIRSGTYDHDVYRDEALNNRFQIKGVELKSGYKDWILWISFAISCFLLCVVLLGFIMWACQRGNIRCNICI

SEQ ID NO: 2431 - protein, 566 aa, Artificial Sequence
  derived and/or modified protein sequence (wt) from hemagglutinin__InfluenzaA__ACI25801
MKTIIALSYIFCLALGQDLPGNDNSTATLCLGHHAVPNGTLVKTITDDQIEVTNATELVQSSSTGKICNNPHRILDGINCTLIDALLGDPHCDVFQNETWDLFVERSKAFSNCYPYDVPDYASLRSLVASSGTLEFITEDFTWTGVTQNGGSNACKRGPGSGFFSRLNWLTKSGSTYPVLDVTMPNNDNFDKLYIWGVHHPSTNQEQTSLYVQASGRVTVSTRRSQQTIIPNIGSRPWVRGLSSRISIYWTIVKPGDVLVINSNGNLIAPRGYFKMRTGKSSIMRSDAPIDTCISECITPNGSIPNDKPFQNVNKITYGACPKYVKQNTLKLATGMRNVPEKQTRGLFGAIAGFIENGWEGMIDGWYGFRHQNSEGTGQAADLKSTQAAIDQINGKLNRVIEKTNEKFHQIEKEFSEVEGRIQDLEKYVEDTKIDLWSYNAELLVALENQHTIDLTDSEMNKLFEKTRRQLRENAEDMGNGCFKIYHKCDNACIESIRNGTYDHDVYRDEALNNRFQIKGVELKSGYKDWILWISFAISCFLLCVVLLGFIMWACQRGNIRCNICI

SEQ ID NO: 2432 - protein, 562 aa, Artificial Sequence; identical to SEQ ID NO: 2350
  derived and/or modified protein sequence (wt) from hemagglutinin__InfluenzaA__ACI26274

SEQ ID NO: 2433 - protein, 565 aa, Artificial Sequence
  derived and/or modified protein sequence (wt) from hemagglutinin__InfluenzaA__ACI26307
MKTIIALSYILCLVFTQKLPGNDNSTATLCLGHHAVPNGTIVKTITNDQIEVTNATELVQSSSTGEICDSPHQILDGENCTLIDALLGDPQCDGFQNKKWDLFVERSKAYSNCYPYDVPDYASLRSLVASSGTLEFNNESFNWTGVTQNGTSSACIRRSNNSFFSRLNWLTHLKFKYPALNVTMPNNEKFDKLYIWGVHHPVTDNDQIFLYAQSGRITVSTKRSQQTVIPNIGSRPRVRNSPSRISIYWTIVKPGDILLINSTGNLIAPRGYFKIRSGKSSIMRSDAPIGKCNSECITPNGSIPNDKPFQNVNRITYGACPRYVKQNTLKLATGMRNVPEKQTRGIFGAIAGFIENGWEGMVDGWYGFRHQNSEGIGQAADLKSTQAAIDQINGKLNRLIGKTNEKFHQIEKEFSEVEGRIQDLEKYVEDTKIDLWSYNAELLVALENQHTIDLTDSEMNKLFEKTKKQLRENAEDMGNGCFKIYHKCDNACIGSIRNGTYDHDVYRDEALNNRFQIKGVELKSGYKDWILWISFAISCFLLCVALLGFIMWACQKGNIRCNICI

SEQ ID NO: 2434 - protein, 566 aa, Artificial Sequence
  derived and/or modified protein sequence (wt) from hemagglutinin__InfluenzaA__ACI26362
MKTIIALSYILCLVFAQKLPGNDNSTATLCLGHHAVPNGTIVKTITNDQIEVTNATELVQSSSTGEICDSPHQILDGENCTLIDALLGDPQCDGFQNKKWDLFVERSKAYSNCYPYDVPDYASLRSLVASSGTLEFNNESFNWTGVTQNGTSSACIRRSNNSFFSRLNWLTHLKFKYPALNVTMPNNEQFDKLYIWGVHHPGTDNDQIFLYAQASGRITVSTKRSQQTVIPNIGSRPRVRNIPSRISIYWTIVKPGDILLINSTGNLIAPRGYFKIRSGKSSIMRSDAPIGKCNSECITPNGSIPNDKPFQNVNRITYGACPRYVKQNTLKLATGMRNVPEKQTRGIFGAIAGFIENGWEGMVDGWYGFRHQNSEGRGQAADLKSTQAAIDQINGKLNRLIGKTNEKFHQIEKEFSEVEGRIQDLEKYVEDTKIDLWSYNAELLVALENQHTIDLTDSEMNKLFEKTKKQLRENAEDMGNGCFKIYHKCDNACIGSIRNGTYDHDVYRDEALNNRFQIKGVELKSGYKDWILWISFAISCFLLCVALLGFIMWACQKGNIRCNICI

SEQ ID NO: 2435 - protein, 566 aa, Artificial Sequence
  derived and/or modified protein sequence (wt) from hemagglutinin__InfluenzaA__ACI26373
MKTIIALSYILCLVFAQKLPGNDNSTATLCLGHHAVPNGTIVKTITNDQIEVTNATELVQSSSTGEICDSPHQILDGENCTLIDALLGDPQCDGFQNKKWDLFVERSKAYSNCYPYDVPDYASLRSLVASSGTLEFNNESFNWAGVTQNGTSSACIRKSNNSFFSRLNWLTHLKFKYPALNVTMPNNEQFDKLYIWGVHHPGTDNDQIFLYAQASGRITVSTKRSQQTVIPNIGSRPRVRNIPSRISIYWTIVKPGDILLINSTGNLIAPRGYFKIRSGKSSIMRSDAPIGKCNSECITPNGSIPNDKPFQNVNRITYGACPRYVKQNTLKLATGMRNVPEKQTRGIFGAIAGFIENGWEGMVDGWYGFRHQNSEGRGQAADLKSTQAAIDQINGKLNRLIGKTNEKFHQIEKEFSEVEGRIQDLEKYVEDTKIDLWSYNAELLVALENQHTIDLTDSEMNKLFEKTKKQLRENAEDMGNGCFKIYHKCDNACIGSIRNGTYDHDVYRDEALNNRFQIKGVELKSGYKDWILWISFAISCFLLCVALLGFIMWACQKGNIRCNICI

SEQ ID NO: 2436 - protein, 566 aa, Artificial Sequence; identical to SEQ ID NO: 2301
  derived and/or modified protein sequence (wt) from hemagglutinin__InfluenzaA__ACI26395

SEQ ID NO: 2437 - protein, 566 aa, Artificial Sequence
  derived and/or modified protein sequence (wt) from hemagglutinin__InfluenzaA__ACI26406
MKTIIALSYILCLVFAQKLPGNDNSTATLCLGHHAVPNGTIVKTITNDQIEVTNATELVQSSSTGEICDSPHQILDGENCTLIDALLGDPQCDGFQNKKWDLFVERSKAYSNCYPYDVPDYASLRSLVASSGTLEFNNESFNWTGVTQNGTSSACIRRSNNSFFSRLNWLTHLKFKHPALNVTMPNNEKFDKLYIWGVHHPGTDNDQIFLYAQASGRITVSTKRSQQTVIPNIGSRPRVRNIPSRISIYWTIVKPGDILLINSTGNLIAPRGYFKIRSGKSSIMRSDAPIGKCNSECITPNGSIPNDKPFQNVNRITYGACPRYVKQNTLKLATGMRNVPEKQTRGIFGAIAGFIENGWEGMVDGWYGFRHQNSEGIGQAADLKSTQAAIDQINGKLNRLIGKTNEKFHQIEKEFSEVEGRIQDLEKYVEDTKIDLWSYNAELLVALENQHTIDLTDSEMNKLFEKTKKQLRENAEDMGNGCFKIYHKCDNACIGSIRNGTYDHDVYRDEALNNRFQIKGVELKSGYKDWILWISFAISCFLLCVALLGFIMWACQKGNIRCNICI

SEQ ID NO: 2438 - protein, 566 aa, Artificial Sequence; identical to SEQ ID NO: 1928
  derived and/or modified protein sequence (wt) from hemagglutinin__InfluenzaA__ACI26417

SEQ ID NO: 2439 - protein, 566 aa, Artificial Sequence
  derived and/or modified protein sequence (wt) from hemagglutinin__InfluenzaA__ACI26428
MKTIIALSYILCLVFAQKLPGNDNSTATLCLGHHAVPNGTIVKTITNDQIEVTNATELVQISSTGGICDSPHQILDGENCTLIDALLGDPQCDGFQNKKWDLFVERSKAYSNCYPYDVPDYASLRSLVASSGTLEFNNESFNWTGVTQNGTSSSCKRRSNNSFFSRLNWLTHLKFKYPALNVTMPNNEKFDKLYIWGVHHPVTDNDQIRLYAQASGRITVSTKRSQQTVIPNIGYRPRVRDIPSRISIYWTIVKPGDILLINSTGNLIAPRGYFKIRSGKSSIMRSDAPIGKCNSECITPNGSIPNDKPFQNVNRITYGACPRYVKQNTLKLATGMRNVPEKQTRGIFGAIAGFIENGWEGMVDGWYGFRHQNSEGIGQAADLKSTQAAINQINGKLNRLIGKTNEKFHQIEKEFSEVEGRIQDLEKYVEDTKIDLWSYNAELLVALENQHTIDLTDSEMNKLFERTKKQLRENAEDMGNGCFKIYHKCDNACIGSIRNGTYDHDVYRDEALNNRFQIKGVELKSGYKDWILWISFAISCFLLCVVLLGFIMWACQKGNIRCNICI

SEQ ID NO: 2440 - protein, 565 aa, Artificial Sequence
  derived and/or modified protein sequence (wt) from hemagglutinin__InfluenzaA__ACI26439
MKVKLLVLLCTFTATYADTICIGYHANNSTDTVDTVLEKNVTVTHSVNLLEDSHNGKLCLLKGIAPLQLGNCSVAGWILGNPECELLISKESWSYIVEKPNPENGTCYPGHFADYEELREQLSSVSSFERFEIFPKESSWPNHTVTGVSASCSHNGKSSFYKNLLWLTGKNGLYPNLSKSYANNKEKEVLVLWGVHHPPNIGNQRALYHTENAYVSVVSSHYSRKFTPEIAKRPKVRDQEGRINYYWTLLEPGDTIIFEANGNLIAPRYAFALSRGFGSGIINSNAPMDECDAKCQTPQGAINSSLPFQNVHPVTIGECPKYVRSAKLRMVTGLRNIPSIQSRGLFGAIAGFIEGGWTGMVDGWYGYHHQNEQGSGYAADQKSTQNAINGITNKVNSVIEKMNTQFTAVGKEFNKLERRMENLNKKVDDGFIDVWTYNAELLVLLENERTLDFHDSNVKNLYEKVKSQLKNNAKEIGNGCFEFYHKCNDECMESVKNGTYDYPKYSEESKLSREKIDGVKLESMGVYQILAIYSTVASSLVLLVSLGAISFWMCSNGSLQCRICI

SEQ ID NO: 2441 - protein, 565 aa, Artificial Sequence; identical to SEQ ID NO: 2440
  derived and/or modified protein sequence (wt) from hemagglutinin__InfluenzaA__ACI26450

SEQ ID NO: 2442 - protein, 566 aa, Artificial Sequence
  derived and/or modified protein sequence (wt) from hemagglutinin__InfluenzaA__ACI26461
MKTIIALSYILCLVFTQKLPGNDNSTATLCLGHHAVPNGTIVKTITNDQIEVTNATELVQSSSTGEICDSPHQILDGENCTLIDALLGDPQCDGFQNKKWDLFVERSKAYSNCYPYDVPDYASLRSLVASSGTLEFNNESFNWTGVTQNGTSSACIRRSNNSFFSRLNWLTHLKFKYPALNVTMPNNEKFDKLYIWGVHHPGTDNDQIFPYAQASGRITVSTKRSQQTVIPNIGSRPRVRNIPSRISIYWTIVKPGDILLINSTGNLIAPRGYFKIRSGKSSIMRSDAPIGKCNSECITPNGSIPNDKPFQNVNRITYGACPRYVKQNTLKLATGMRNVPEKQTRGIFGAIAGFIENGWEGMVDGWYGFRHQNSEGIGQAADLKSTQAAIDQINGKLNRLIGKTNEKFHQIEKEFSEVEGRIQDLEKYVEDTKIDLWSYNAELLVALENQHTIDLTDSEMNKLFEKTKKQLRENAEDMGNGCFKIYHKCDNACIGSIRNGTYDHNVYRDEALNNRFQIKGVELKSGYKDWILWISFAISCFLLCVALLGFIMWACQKGNIRCNICI

SEQ ID NO: 2443 - protein, 565 aa, Artificial Sequence
  derived and/or modified protein sequence (wt) from hemagglutinin__InfluenzaA__ACI26472
MKTIIALSYILCLVFTQKLPGNDNSTATLCLGHHAVPNGTIVKTITNDQIEVTNATELVQSSSTGEICDSPHQILDGENCTLIDALLGDPQCDGFQNKKWDLFVERSKAYSNCYPYDVPDYASLRSLVASSGTLEFNNESFNWTGVTQNGTSSACIRRSNNSFFSRLNWLTHLKFKYPALNVTMPNNEKFDKLYIWGVHHPVTDNDQIFLYAQSGRITVSTKRSQQTVIPNIGYRPRVRNIPSRISIYWTIVKPGDILLINSTGNLIAPRGYFKIRSGKSSIMRSDAPIGKCNSECITPNGSIPNDKPFQNVNRITYGACPRYVKQNTLKLATGMRNVPEKQTRGIFGAIAGFIENGWEGMVDGWYGFRHQNSEGIGQAADLKSTQAAIDQINGKLNRLIGKTNEKFHQIEKEFSEVEGRIQDLEKYVEDTKIDLWSYNAELLVALENQHTIDLTDSEMNKLFEKTKKQLRENAEDMGNGCFKIYHKCDNACIGSIRNGTYDHDVYRDEALNNRFQIKGVELKSGYKDWILWISFAISCFLLCVALLGFIMWACQKGNIRCNICI

SEQ ID NO: 2444 - protein, 566 aa, Artificial Sequence; identical to SEQ ID NO: 2435
  derived and/or modified protein sequence (wt) from hemagglutinin__InfluenzaA__ACI26483

SEQ ID NO: 2445 - protein, 566 aa, Artificial Sequence
  derived and/or modified protein sequence (wt) from hemagglutinin__InfluenzaA__ACI26505
MKTIIALSYILCLVFAQKLPGNDNSTATLCLGHHAVPNGTIVKTITNDQIEVTNATELVQSSSTGEICDSPHQILDGENCTLIDALLGDPQCDGFQNKKWDLFVERSKAYSNCYPYDVPDYASLRSLVASSGTLEFNNESFNWAGVTQNGTSSACIRKSNNSFFSRLNWLTHLKFKYPALNVTMPNNEQFDKLYIWGVHHPGTDNDQIFLYAQASGRITVSTKRSQQTVIPNIGSRPRVRNIPSRISIYWTIVKPGDILLINSTGNLIAPRGYFKIRSGKSSIMRSDAPIGKCNSECITPNGSIPNDKPFQNVNRITYGACPRYVKQNTLKLATGMRNVPEKQTRGIFGAIAGFIENGWEGMVDGWYGFRHQNSEGRGQAADLKSTQAAIDQINGKLNRLIGKTNEKFHQIEKEFSEVEGRIQDLEKYVEDTKIDLWSYNAELLVALENQHTIDLTDSEMNKLFEKTKKQLRENAEDMGNGCFKIYHKCDNACIRSIRNGTYDHDVYRDEALNNRFQIKGVELKSGYKDWILWISFAISCFLLCVALLGFIMWACQKGNIRCNICI

SEQ ID NO: 2446 - protein, 566 aa, Artificial Sequence; identical to SEQ ID NO: 2434
  derived and/or modified protein sequence (wt) from hemagglutinin__InfluenzaA__ACI26516

SEQ ID NO: 2447 - protein, 566 aa, Artificial Sequence; identical to SEQ ID NO: 2435
  derived and/or modified protein sequence (wt) from hemagglutinin__InfluenzaA__ACI26527

SEQ ID NO: 2448 - protein, 566 aa, Artificial Sequence
  derived and/or modified protein sequence (wt) from hemagglutinin__InfluenzaA__ACI26538
MKTIIALSYILCLVFAQKLPGNDNSTATLCLGHHAVPNGTIVKTITNDQIEVTNATELVQSSSTGEICDSPHQILDGENCTLIDALLGDPQCDGFQNKKWDLFVERSKAYSNCYPYDVPDYASLRSLVASSGTLEFNNESFNWTGVTQNGTSSACIRRSNNSFFSRLNWLTHLKFKYPALNVTMPNNEQFDKLYIWGVHHPGTDNDQIFLYAQASGRITVSTKRSQQTVIPNIGSRPRVRNIPSRISIYWTIVKPGDILLINSTGNLIAPRGYFKIRSGKSSIMRSDAPIGKCNSECITPNGSIPNDKPFQNVNRITYGACPRYVKQNTLKLATGMRNVPDKQTRGIFGAIAGFIENGWEGMVDGWYGFRHQNSEGRGQAADLKSTQAAIDQINGKLNRLIGKTNEKFHQIEKEFSEVEGRIQDLEKYVEDTKIDLWSYNAELLVALENQHTIDLTDSEMNKLFEKTKKQLRENAEDMGNGCFKIYHKCDNACIGSIRNGTYDHDVYRDEALNNRFQIKGVELKSGYKDWILWISFAISCFLLCVALLGFIMWACQKGNIRCNICI

SEQ ID NO: 2449 - protein, 566 aa, Artificial Sequence
  derived and/or modified protein sequence (wt) from hemagglutinin__InfluenzaA__ACI26549
MKTIIALSYIFCLVFAQKLPGNDNSTATLCLGHHAVPNGTLVKTITNDQIEVTNATELVQSSSTGRICDSPHRILDGKNCTLIDALLGDPHCDGFQNEKWDLFVERSKAYSNCYPYDVPDYASLRSLVASSGTLEFINEDFNWTGVTQSGGSYSCKRGSVNSFFSRLNWLHESEYKYPALNVTMPNNGKFDKLYIWGVHHPSTDREQTKLYVRASGRVTVSTKRSQQTVIPNIGSRPWVRGLSSRISIYWTIVKPGDILLINSTGNLIAPRGYFKIRTGKSSIMRSDAPIGTCSSECITPNGSIPNDKPFQNVNKITYGACPRYVKQNTLKLATGMRNVPEKQTRGIFGAIAGFIENGWEGMVDGWYGFRHQNSEGTGQAADLKSTQAAIDQINGKLNRLIEKTNEKFHQIEKEFSEVEGRIQDLEEYVEDTKIDLWSYNAELLVALENQHTIDLTDSEMNKLFEKTRKQLRENAEDMGNGCFKIYHKCDNACIGSIRNGTYDHDVYRDEALNNRFQIKGVELKSGYKDWILWISFAISCFLLCVVLLGFIMWACQKGNIRCNICI

SEQ ID NO: 2450 - protein, 566 aa, Artificial Sequence
  derived and/or modified protein sequence (wt) from hemagglutinin__InfluenzaA__ACI26560
MKTIIALSYIFCLVFAQKLPGNDNSTATLCLGHHAVPNGTLVKTITNDQIEVTNATELVQSSSTGRICDSPHRILDGKNCTLIDALLGDPHCDGFQNKEWDLFVERSKAYSNCYPYDVPDYASLRSLVASSGTLEFINEDFNWTGVAQSGGSYACKRGSVNSFFSRLNWLHESEYKYPALNVTMPNNGKFDKLYIWGVHHPITDREQTNLYVRASGRVTVSTKRSQQTVIPNIGSRPWVRGLSSRISIYWTIVKPGDILLINSTGNLIAPRGYFKIRTGKSSIMRSDAPIGTCSSECITPNGSIPNDKPFQNVNRITYGACPRYVKQNTLKLATGMRNVPEKQTRGIFGAIAGFIENGWEGMVDGWYGFRHQNSEGTGQAADLKSTQAAIDQINGKLNRLIEKTNEKFHQIEKEFSEVEGRIQDLEKYVEDTKIDLWSYNAELLVALENQHTIDLTDSEMNKLFEKTRKQLRENAEDMGNGCFKIYHKCDNACIGSIRNGTYDHDVYRDEALNNRFQIKGVELKSGYKDWILWISFAISCFLLCVVLLGFIMWACQKGNIRCNICI

SEQ ID NO: 2451 - protein, 566 aa, Artificial Sequence
  derived and/or modified protein sequence (wt) from hemagglutinin__InfluenzaA__ACI26571
MKTIIALSYIFCLVFAQKLPGNDNSTATLCLGHHAVPNGTLVKTITNDQIEVTNATELVQSSSTGRICDSPHRILDGKNCTLIDALLGDPHCDGFQNKEWDLFVERSKAYSNCYPYDVPDYASLRSLVASSGTLEFINEDFNWTGVAQSGGSYACKRGSVNSFFSRLNWLHESEYKYPALNVTMPNNGKFDKLYIWGVHHPSTDREQTKLYVRASGRVTVSTKRSQQTVIPNIGSRPWVRGLSSRISIYWTIVKPGDILLINSTGNLIAPRGYFKIRTGKSSIMRSDAPIGTCSSECITPNGSIPNDKPFQNVNRITYGACPRYVKQNTLKLATGMRNVPEKQTRGIFGAIAGFIENGWEGMVDGWYGFRHQNSEGTGQAADLKSTQAAIDQINGKLNRLIEKTNEKFHQIEKEFSEVEGRIQDLEKYVEDTKIDLWSYNAELLVALENQHTIDLTDSEMNKLFEKTRKQLRENAEDMGNGCFKIYHKCDNACIGSIRNGTYNHDVYRDEALNNRFQIKGVELKSGYKDWILWISFAISCFLLCVVLLGFIMWACQKGNIRCNICI

SEQ ID NO: 2452 - protein, 566 aa, Artificial Sequence
  derived and/or modified protein sequence (wt) from hemagglutinin__InfluenzaA__ACI26593
MKTIIALSYILCLVFAQKLPGNDNSTATLCLGHHAVPNGTLVKTITNDQIEVTNATELVQSSSTGRICDSPHRILDGKNCTLIDALLGDPHCDGFQNKEWDLFVERSKAYSNCYPYDVPDYASLRSLVASSGTLEFTNEDFNWTGVAQSGESYACKRGSVKSFFSRLNWLHKSDYKYPALNVTMPNNGKFDKLYIWGVHHPSTDREQTSLYVRASGRVTVSTKRSQQTVIPNIGSRPWVRGLSSRISIYWTIVKPGDILLINSTGNLIAPRGYFKIRTGKSSIMRSDAPIGTCSSECITPNGSIPNDKPFQNVNRITYGACPRYVKQNTLKLATGMRNVPEKQTRGIFGAIAGFIENGWEGMVDGWYGFRHQNSEGTGQAADLKSTQAAIDQINGKLNRLIEKTNEKFHQIEKEFSEVEGRIQDLEKYVEDTKIDLWSYNAELLVALENQHTIDLTDSEMNKLFEKTRKQLRENAEDMGNGCFKIYHKCDNACIGSIRNGTYDHDVYRDEALNNRFQIKGVELKSGYKDWILWISFAISCFLLCVVLLGFIMWACQKGNIRCNICI

SEQ ID NO: 2453 - protein, 565 aa, Artificial Sequence
  derived and/or modified protein sequence (wt) from hemagglutinin__InfluenzaA__ACI32715
MKVKLLVLLCTFTATYADTICIGYHANNSTDTVDTVLEKNVTVTHSVNLLEDSHNGKLCLLKGIAPLQLGNCSVAGWILGNPECELLISKESWSYIVETPNPENGTCYPGYFADYEELREQLSSVSSFERFEIFPKESSWPNHTVTGVSASCSHNGKSSFYRNLLWLTGKNGLYPNLSKSYANNKEKEVLVLWGVHHPPNIGDQRALYHTENAYVSVVSSHYSRRFTPEIAKRPKVRDQEGRINYYWTLLEPGDTIIFEANGNLIAPRFAFALSRGFGSGIITSNAPMDECDAKCQTPQGAINSSLPFQNVHPVTIGECPKYVRSAKLRMATGLRNIPSIQSRGLFGAIAGFIEGGWTGMVDGWYGYHHQNEQGSGYAADQKSTQNAINGITNKVNTVIEKMNTQFTAVGKEFSKLERRMENLNKKVDDGFLDIWTYNAELLVLLENERTLDFHDSNVKNLYEKVKSQLKNNAKEIGNGCFEFYHKCNDECMESVKNGTYDYPKYSEESKLNREKIDGVKLESMGVYQILAIYSTVASSLVLLVSLGAISFWMCSNGSLQCRICI

SEQ ID NO: 2454 - protein, 565 aa, Artificial Sequence
  derived and/or modified protein sequence (wt) from hemagglutinin__InfluenzaA__ACI32716
MKVKLLVLLCTFTATYADTICIGYHANNSTDTVDTVLEKNVTVTHSVNLLEDSHNGKLCLLKGIAPLQLGNCSVAGWILGNPECELLISKESWSYIVETPNPENGTCYPGYFADYEELREQLSSVSSFERFEIFPKESSWPNHTVTGVSASCSHNGKSSFYRNLLWLTGKNGLYPNLSKSYANNKEKEVLVLWGVHHPPNIGDQRALYHTENAYVSVVSSHYSRRFTPEIAKRPKVRDQEGRINYYWTLLEPGDTIIFEANGNLIAPRFAFALSRGFGSGIITSNAPMDECDAKCQTPQGAINSSLPFQNVHPVTIGECPKYVRSAKLRMATGLRNIPSIQSRGLFGAIAGFIEGGWTGMVDGWYGYHHQNEQGSGYAADQKSTQNAINGITNKVNSVIEKMNTQFTAVGKEFSKLERRMENLNKKVDDGFLDIWTYNAELLVLLENERTLDFHDSNVKNLYEKVKSQLKNNAKEIGNGCFEFYHKCNDECMESVKNGTYDYPKYSEESKLNREKIDGVKLESMGVYQILAIYSTVASSLVLLVSLGAISFWMCSNGSLQCTICI

SEQ ID NO: 2455 - protein, 565 aa, Artificial Sequence
  derived and/or modified protein sequence (wt) from hemagglutinin__InfluenzaA__ACI32717
MKVKLLVLLCTFTATYADTICIGYHANNSTDTVDTVLEKNVTVTHSVNLLEDSHNGKLCLLKGIAPLQLGNCSVAGWILGNPECELLISKESWSYIVETPNPENGTCYPGYFADYEELREQLSSVSSFERFEIFPKESSWPNHTVTGVSASCSHNGKSSFYRNLLWLTGKNGLYPNLSKSYANNKEKEVLVLWGVHHPPNIGDQRALYHTENAYVSVVSSHYSRRFTPEIAKRPKVRDQEGRINYYWTLLEPGDTIIFEANGNLIAPRFAFALSRGFGSGIITSNAPMDECDAKCQTPQGAMNSSLPFQNVHPVTIGECPKYVRSAKLRMATGLRNIPSIQSRGLFGAIAGFIEGGWTGMVDGWYGYHHQNEQGSGYAADQKSTQNAINGITNKVNSVIEKMNTQFTAVGKEFSKLERRMENLNKKVDDGFLDIWTYNAELLVLLENERTLDFHDSNVKNLYEKVKSQLKNNAKEIGNGCFEFYHKCNDECMESVKNGTYDYPKYSEESKLNREKIDGVKLESMGVYQILAIYSTVASSLVLLVSLGAINFWMCSNGSLQCKICI

SEQ ID NO: 2456 - protein, 565 aa, Artificial Sequence
  derived and/or modified protein sequence (wt) from hemagglutinin__InfluenzaA__ACI32718
MKVKLLVLLCTFTATYADTICIGYHANNSTDTVDTVLEKNVTVTHSVNLLEDSHNGKLCLLKGIAPLQLGNCSVAGWILGNPECELLISKESWSYIVETPNPENGTCYPGYFADYEELREQLSSVSSFERFEIFPKESSWPNHTATGVSASCSHNGKSSFYRNLLWLTGKNGLYPNLSKSYANNKEKEVLVLWGVHHPPNIGDQRALYHTENAYVSVVSSHYSRRFTPEIAKRPKVRDQEGRINYYWTLLEPGDTIIFEANGNLIAPRFAFALSRGFGSGIITSNAPMDECDAKCQTPQGAINSSLPFQNVHPVTIGECPKYVRSAKLRMATGLRNIPSIQSRGLFGAIAGFIEGGWTGMVDGWYGYHHQNEQGSGYAADQKSTQNAINGITNKVNSVIEKMNTQFTAVGKEFSKLERRMENLNKKVDDGFLDIWTYNAELLVLLENERTLDFHDSNVKNLYEKVKSQLKNNAKEVGNGCFEFYHKCNDECMESVKNGTYDYPKYSEESKLNREKIDGVKLESMGVYQILAIYSTVASSLVLLVSLGAISFWMCSNGSLQCTICI

SEQ ID NO: 2457 - protein, 565 aa, Artificial Sequence; identical to SEQ ID NO: 2454
  derived and/or modified protein sequence (wt) from hemagglutinin__InfluenzaA__ACI32719

SEQ ID NO: 2458 - protein, 565 aa, Artificial Sequence; identical to SEQ ID NO: 2454
  derived and/or modified protein sequence (wt) from hemagglutinin__InfluenzaA__ACI32720

SEQ ID NO: 2459 - protein, 565 aa, Artificial Sequence
  derived and/or modified protein sequence (wt) from hemagglutinin__InfluenzaA__ACI32721
MKVKLLVLLCTFTATYADTICIGYHANNSTDTVDTVLEKNVTVTHSVNLLEDSHNGKLCLLKGIAPLQLGNCSVAGWILGNPECELLISKESWSYIVETPNPENGTCYPGYFADYEELREQLSSVSSFERFEIFPKESSWPNHTVTGVSASCSHNGKSSFYRNLLWLTGKNGLYPNLSKSYANNKEKEVLVLWGVHHPPNIGDQRALYHTENAYVSVVSSHYSRRFTPEIAKRPKVRDQEGRISYYWTLLEPGDTIIFEANGNLIAPRFAFALSRGFGSGIITSNAPMDECDAKCQTPQGAINSSLPFQNVHPVTIGECPKYVRSAKLRMATGLRNIPSIQSRGLFGAIAGFIEGGWTGMVDGWYGYHHQNEQGSGYAADQKSTQNAINGITNKVNSVIEKMNTQFTAVGKEFSKLERRMENLNKKVDDGFLDIWTYNAELLVLLENERTLDFHDSNVKNLYEKVKSQLKNNAKEIGNGCFEFYHKCNDECMESVKNGTYDYPKYSEESKLNREKIDGVKLESMGVYQILAIYSTVASSLVLLVSLGAISFWMCSNGSLQCRICI

SEQ ID NO: 2460 - protein, 565 aa, Artificial Sequence; identical to SEQ ID NO: 2454
  derived and/or modified protein sequence (wt) from hemagglutinin__InfluenzaA__ACI32722

SEQ ID NO: 2461 - protein, 565 aa, Artificial Sequence
  derived and/or modified protein sequence (wt) from hemagglutinin__InfluenzaA__ACI32723
MKVKLLVLLCTFTATYADTICIGYHANNSTDTVDTVLEKNVTVTHSVNLLEDSHNGKLCLLKGIAPLQLGNCSVAGWILGNPECELLISKESWSYIVETPNPENGTCYPGYFADYEELREQLSSVSSFERFEIFPKESSWPNHTVTGVSASCSHNGKSSFYRNLLWLTGKNGLYPNLSKSYANNKEKEVLVLWGVHHPPNIGDQRALYHTENAYVSVVSSHYSRRFTPEIAKRPKVRDQEGRINYYWTLLEPGDTIIFEANGNLIAPRFAFALSRGFGSGIITSNAPMDECDAKCQTPQGAINSSLPFQNVHPVTIGECPKYVRSAKLRMATGLRNIPSIQSRGLFGAIAGFIEGGWTGMVDGWYGYHHQNEQGSGYAADQKSTQNAINGITNKVNSVIEKMNTQFTAVGKEFSKLERRMENLNKKVDDGFLDIWTYNAELLVLLENERTLDFHDSNVKNLYEKVKSQLKNNAKEIGNGCFEFYHKCNDECMESVKNGTYDYPKYSEESKLNREKIDGVKLESMGVYQILAIYSTVASSLVLLVSLGAISFWMCSNGSLQCRICF

SEQ ID NO: 2462 - protein, 565 aa, Artificial Sequence
  derived and/or modified protein sequence (wt) from hemagglutinin__InfluenzaA__ACI32724
MKVKLLVLLCTFTATYADTICIGYHANNSTDTVDTVLEKNVTVTHSVNLLEDSHNGKLCLLKGIAPLQLGNCSVAGWILGNPECELLISKESWSYIVETPNPENGTCYPGYFADYEELREQLSSVSSFERFEIFPKESSWPNHTVTGVSASCSHNGKSSFYRNLLWLTGKNGLYPNLSKSYANNKEKEVLVLWGVHHPPNIGDQRALYHTENAYVSVVSSHYSRRFTPEIAKRPKVRDQEGRINYYWTLLKPGDTIIFEANGNLIAPRFAFALSRGFGSGIITSNAPMDECDAKCQTPQGAINSSLPFQNVHPVTIGECPKYVRSAKLRMATGLRNIPSIQSRGLFGAIAGFIEGGWTGMVDGWYGYHHQNEQGSGYAADQKSTQNAINGITNKVNSVIEKMNTQFTAVGKEFSKLERRMENLNKKVDDGFLDIWTYNAELLVLLENERTLDFHDSNVKNLYEKVKSQLKNNAKEIGNGCFEFYHKCNDECMESVKNGTYDYPKYSEESKLNREKIDGVKLESMGVYQILAIYSTVASSLVLLVSLGAISFWMCSNGSLQCKICI

SEQ ID NO: 2463 - protein, 565 aa, Artificial Sequence; identical to SEQ ID NO: 1385
  derived and/or modified protein sequence (wt) from hemagglutinin__InfluenzaA__ACI32725

SEQ ID NO: 2464 - protein, 565 aa, Artificial Sequence
  derived and/or modified protein sequence (wt) from hemagglutinin__InfluenzaA__ACI32726
MKVKLLVLLCTFTATYADTICIGYHANNSTDTVDTVLEKNVTVTHSVNLLEDSHNGKLCLLKGIAPLQLGNCSVAGWILGNPECELLISKESWSYIVETPNPENGTCYPGYFADYEELREQLSSVSSFERFEIFPKESSWPNHTVTGVSASCSHNGKSSFYRNLLWLTGKNGLYPNLSKSYANNKEKEVLVLWGVHHPPNIGDQRALYHTENAYVSVVSSHYSRRFTPEIAKRPKVRDQEGRINYYWTLLEPGDTIIFEANGNLIAPRFAFALSRGFGSGIITSNAPMDECDAKCQTPQGAINSSLPFQNVHPVTIGECPKYVRSAKLRMATGLRNIPSIQSRGLFGAIAGFIEGGWTGMVDGWYGYHHQNEQGSGYAADQKSTQNAINGITNKVNSVIEKMNTQFTAVGKEFSKLEKRMENLNKKVDDGFLDIWTYNAELLVLLENERTLDFHDSNVKNLYEKVKSQLKNNAKEIGNGCFEFYHKCNDECMESVKNGTYDYPKYSEESKLNREKIDGVKLESMGIYQILAIYSTVTSSLVLLVSLGAISFWMCSNGSLQCRICI

SEQ ID NO: 2465 - protein, 565 aa, Artificial Sequence
  derived and/or modified protein sequence (wt) from hemagglutinin__InfluenzaA__ACI32727
MKVKLLVLLCTFTATYADTICIGYHANNSTDTVDTVLEKNVTVTHSVNLLEDSHNGKLCLLKGIAPLQLGNCSVAGWILGNPECELLISKESWSYIVETPNPENGTCYPGYFADYEELREQLSSISSFERFEIFPKESSWPNHTVTGVSASCSHNGKSSFYRNLLWLTGKNGLYPNLSKSYANNKEKEVLVLWGVHHPPNIGDQRALYHTENAYVSVVSSHYSRRFTPEIAKRPKVRDQEGRINYYWTLLEPGDTIIFEANGNLIAPRFAFALSRGFGSGIITSNAPMDECDAKCQTPQGAINSSLPFQNVHPVTIGECPKYVRSAKLRMATGLRNIPSIQSRGLFGAIAGFIEGGWTGMVDGWYGYHHQNEQGSGYAADQKSTQNAINGITNKVNSVIEKMNTQFTAVGKEFSKLERRMENLNKKVDDGFLDIWTYNAELLVLLENERTLDFHDSNVKNLYEKVKSQLKNNAKEIGNGCFEFYHKCNDECMESVKNGTYDYPKYSEESKLNREKIDGVKLESMGVYQILAIYSTVASSLVLLVTLGAISFWMCSNGSLQCTICI

SEQ ID NO: 2466 - protein, 565 aa, Artificial Sequence
  derived and/or modified protein sequence (wt) from hemagglutinin__InfluenzaA__ACI32729
MKVKLLVLLCTFTATYADTICIGYHANNSTDTVDTVLEKNVTVTHSVNLLEDSHNGKLCLLKGIAPLQLGNCSVAGWILGNPECELLIPKESWSYIVETPNPENGTCYPGYFADYEELREQLSSVSSFERFEIFPKESSWPNHTVTGVSASCSHNGKSSFYRNLLWLTGKNGLYPNLSKSYANNKEKEVLVLWGVHHPPNIGDQRALYHTENAYVSVVSSHYSRRFTPEIAKRPKVRDQEGRINYYWTLLEPGDTIIFEANGNLIAPRFAFALSRGFGSGIITSNAPMDECDAKCQTPQGAINSSLPFQNVHPVTIGECPKYVRSAKLRMVTGLRNIPSIQSRGLFGAIAGFIEGGWTGMVDGWYGYHHQNEQGSGYAADQKSTQNAINGVTNKVNSVIEKMNTQFTAVGKEFNKLERRMENLNKKVDDGFLDIWTYNAELLVLLENERTLDFHDSNVKNLYEKVKSQLKNNAKEIGNGCFEFYHKCNDECMESVKNGTYDYPKYSEESKLNREKIDGVKLESMGVYQILAIYSTVASSLVLLVSLGAISFWMCSNGSLQCRICI

SEQ ID NO: 2467 - protein, 565 aa, Artificial Sequence; identical to SEQ ID NO: 2466
  derived and/or modified protein sequence (wt) from hemagglutinin__InfluenzaA__ACI32730

SEQ ID NO: 2468 - protein, 565 aa, Artificial Sequence
  derived and/or modified protein sequence (wt) from hemagglutinin__InfluenzaA__ACI32731
MKVKLLVLLCTFTATYADTICIGYHANNSTDTVDTVLEKNVTVTHSVNLLEDSHNGKLCLLKGIAPLQLGNCSVAGWILGNPECELLISKESWSYIVEKPNPENGTCYPGHFADYEELREQLSSVSSFERFEIFPKESSWPNHTVTGVSASCSHNGKSSFYKNLLWLTGKNGLYPNLSKSYANNKEKEVLVLWGVHHPPNIGDQKALYHTENAYVSVVSSHYSRKFNPEIAKRPKVRDQEGRINYYWTLLEPGDTIIFEANGNLIAPRYAFALSRGFGSGIINSNAPMDECDAKCQTPQGAINSSLPFQNVHPVTIGECPKYVRSAKLRMVTGLRNIPSIQSRGLFGAIAGFIEGGWTGMVDGWYGYHHQNEQGSGYAADQKSTQNAINGITNKVNSVIEKMNTQFTAVGKEFNKLERRMENLNKKVDDGFIDIWTYNAELLVLLENERTLDFHDSNVKNLYEKVKSQLKNNAKEIGNGCFEFYHKCNDECMESVKNGTYDYPKYSEESKLNREKIDGVKLESMGVYQILAIYSTVASSLVLLVSLGAISFWMCSNGSLQCKICI

SEQ ID NO: 2469 - protein, 565 aa, Artificial Sequence
  derived and/or modified protein sequence (wt) from hemagglutinin__InfluenzaA__ACI32732
MKVKLLVLLCTFTATYADTICIGYHANNSTDTVDTVLEKNVTVTHSVNLLEDSHNGKLCLLKGIAPLQLGNCSVAGWILGNPECELLISKESWSYIVETPNPENGTCYPGYFADYEELREQLSSVSSFERFEIFPKESSWPNHTVTGVSASCSHNGKSSFYRNLLWLTGKNGLYPNLSKSYANNKEKEVLVLWGVHHPPNIGDQRALYHTENAYVSVVSSHYSRRFTPEIAKRPKVRDQEGRINYYWTLLEPGDTIIFEANGNLIAPRFAFALSRGFGSGIITSNAPMDECDAKCQTPQGAINSSLPFQNVHPVTIGECPKYVRSAKLRMVTGLRNIPSIQSRGLFGAIAGFIEGGWTGMVDGWYGYHHQNEQGSGYAADQKSTQNAINGITNKVNSVIEKMNTQFTAVGKEFNKLERRMENLNKKVDDGFLDIWTYNAELLVLLENERTLDFHDSNVKNLYEKVKSQLKNNAKEIGNGCFEFYHKCNDECMESVKNGTYDYPKYSEESKLNREKIDGVKLESMGVYQILAIYSTVASSLVLLVSLGAISFWMCSNGSLQCTICI

SEQ ID NO: 2470 - protein, 565 aa, Artificial Sequence
  derived and/or modified protein sequence (wt) from hemagglutinin__InfluenzaA__ACI32733
MKVKLLVLLCTFTATYADTICIGYHANNSTDTVDTVLEKNVTVTHSVNLLEDSHNGKLCLLKGIAPLQLGNCSVAGWILGNPECELLISKESWSYIVEKPNPENGTCYPGHFADYEELREQLSSVSSFERFEIFPKESSWPNHTVTGVSASCSHNGKSSFYKNLLWLTGKNGLYPNLSKSYANNKEKEVLVLWGVHHPPNIGDQKALYHTENAYVSVVSSHYSRKFNSEIAKRPKVRDQEGRINYYWTLLEPGDTIIFEANGNLIAPRYAFALSRGFGSGIINSNAPMDECDAKCQTPQGAINSSLPFQNVHPVTIGECPKYVRSAKLRMVTGLRNIPSIQSRGLFGAIAGFIEGGWTGMVDGWYGYHHQNEQGSGYAADQKSTQNAINGITNKVNSVIEKMNTQFTAVGKEFNKLERRMENLNKKVDDGFIDIWTYNAELLVLLENERTLDFHDSNVKNLYEKVKSQLKNNAKEIGNGCFEFYHKCNDECMESVKNGTYDYPKYSEESKLNREKIDGVKLESMGVYQILAIYSTVASSLVLLVSLGAISFWMCSNGSLQCTICI

SEQ ID NO: 2471 - protein, 565 aa, Artificial Sequence
  derived and/or modified protein sequence (wt) from hemagglutinin__InfluenzaA__ACI32734
MKVKLLVLLCTFTATYADTICIGYHANNSTDTVDTVLEKNVTVTHSVNLLEDSHNGKLCLLKGIAPLQLGNCSVAGWILGNPECELLISKESWSYIVETPNPENGTCYPGYFADYEELREQLSSVSSFERFEIFPKESSWPNHTVTGVSASCSHNGKSSFYRNLLWLTGKNGLYPNLSKSYANNKKKEVLVLWGVHHPPNIGDQKALYHTENAYVSVVSSHYSRRFTPEIAKRPKVRDQEGRINYYWTLLEPGDTIIFEANGNLIAPRFAFALSRGFGSGIITSNAPMDECDAKCQTPQGAINSSLPFQNVHPVTIGECPKYVRSAKLRMVTGLRNIPSIQSRGLFGAIAGFIEGGWTGMVDGWYGYHHQNEQGSGYAADQKSTQNAINGITNKVNSVIEKMNTQFTAVGKEFNKLERRMENLNKKVDDGFLDIWTYNAELLVLLENERTLDFHDSNVKNLYEKVKSQLKNNAKEIGNGCFEFYHKCNDECMESVKNGTYDYPKYSEESKLNREKIDGVKLESMGVYQILAIYSTVASSLVLLVSLGAISFWMCSNGSLQCTICI

SEQ ID NO: 2472 - protein, 565 aa, Artificial Sequence
  derived and/or modified protein sequence (wt) from hemagglutinin__InfluenzaA__ACI32736
MKVKLLVLLCTFTATYADTICIGYHANNSTDTVDTVLEKNVTVTHSVNLLEDSHNGKLCLLKGIAPLQLGNCSVAGWILGNPECELLISRESWSYIVEKPNPENGTCYPGHFADYEELREQLSSVSSFERFEIFPKESSWPNHTATGVSASCSHNGKSSFYKNLLWLTGKNGLYPNLSKSYANNKEKEVLVLWGVHHPPNIGDQRALYHTENAYVSVVSSHYSRKFTPEIAKRPKVRDQEGRINYYWTLLEPGDTIIFEANGNLIAPRYAFALSRGFGSGIINSNAPMDECDAKCQTPQGAINSSLPFQNVHPVTIGECPKYVRSAKLRMVTGLRNIPSIQSRGLFGAIAGFIEGGWTGMVDGWYGYHHQNEQGSGYAADQKSTQNAINGITNKVNSVIEKMNTQFTAVGKEFNKLERRMENLNKKVDDGFIDIWTYNAELLVLLENERTLDFHDSNVRNLYEKVKSQLKNNAKEIGNGCFEFYHKCNDECMESVKNGTYDYPKYSEESKLNREKIDGVKLESMGVYQILAIYSTVASSLVLLVSLGAISFWMCSNGSLQCRICI

SEQ ID NO: 2473 - protein, 565 aa, Artificial Sequence
  derived and/or modified protein sequence (wt) from hemagglutinin__InfluenzaA__ACI32737
MKVKLLVLLCTFTATYADTICIGYHANNSTDTVDTVLEKNVTVTHSVNLLENSHNGKLCLLKGIAPLQLGNCSVAGWILGNPECELLIPKESWSYIVEIPNPENGTCYPGYFADYEELREQLSSVSSFERFEIFPKESSWPNHTVTGVSASCSHNGKSSFYRNLLWLTGKNGLYPNLSKSYANNKEKEVLVLWGVHHPPNIGDQRALYHTENAYVSVVSSHYSRRFTPEIAKRPKVRDQEGRINYYWTLLEPGDTIIFEANGNLIAPRFAFALSRGLGSGIITSNAPMDECDAKCQTPQGAINSSLPFQNVHPVTIGECPKYVRSAKLRMVTGLRNIPSIQSRGLFGAIAGFIEGGWTGMVDGWYGYHHQNEQGSGYAADQKSTQNAINGITNKVNSVIEKMNTQFTAVGKEFNKLERRMENLNKKVDDGFLDIWTYNAELLVLLENERTLDFHDSNVKNLYEKVKSQLRNNAKEIGNGCFEFYHKCNDECMESVKNGTYDYPKYSEESKLNREKIDGVKLESMGVYQILAIYSTVASSLVLLVSLGAISFWMCSNGSLQCRICI

SEQ ID NO: 2474 - protein, 565 aa, Artificial Sequence
  derived and/or modified protein sequence (wt) from hemagglutinin__InfluenzaA__ACI32739
MKVKLLILLCTFTATYADTICIGYHANNSTDTVDTVLEKNVTVTHSVNLLEDSHNGKLCLLKGIAPLQLGNCSVAGWILGNPECELLISKESWSYIVETPNPENGTCYPGYFADYEELREQLSSVSSFERFEIFPKESSWPNHTVTGVSASCSHNGKSSFYRNLLWLTGKNGLYPNLSKSYANNKEKEVLILWGVHHPPNIGNQRTLYHTENAYVSVVSSHYSRRFTPEITKRPKVRDQEGRINYYWTLLEPGDTIIFEANGNLIAPWYAFALSRGFGSGIITSNAPMDECDAKCQTPQGAINSSLPFQNVHPVTIGECPKYVRSAKLRMVTGLRNIPSIQSRGLFGAIAGFIEGGWTGMVDGWYGYHHQNEQGSGYAADQKSTQNAINGITNKVNSVIEKMNTQFTAVGKEFNKLERRMENLNKKVDDGFLDIWTYNAELLVLLENERTLDFHDSNVKNLYEKVKSQLKNNAKEIGNGCFEFYHKCNNECMESVKNGTYDYPKYSEESKLNREKIDGVKLESMGVYQILAIYSTVASSLVLLVSLGAISFWMCSNGSLQCKICI

SEQ ID NO: 2475 - protein, 565 aa, Artificial Sequence
  derived and/or modified protein sequence (wt) from hemagglutinin__InfluenzaA__ACI32740
MKVKLLILLCTFTATYADTICIGYHANNSTDTVDTVLEKNVTVTHSVNLLEDSHNGKLCLLKGIAPLQLGNCSVAGWILGNPECELLISKESWSYIVETPNPENGACYPGYFADYEELREQLSSVSSFERFEIFPKESSWPKHTVTGVSASCSHNGKSSFYRNLLWLTGKNGLYPNLSKSYANNKEKEVLILWGVHHPPNIGDQRTLYHTENAYVSVVSSHYSRRFTPEITKRPKVRDQEGRINYYWTLLEPGDTIIFEANGNLIAPWYAFALSRGFGSGIITSNAPMDECDAKCQTPQGAINSSLPFQNVHPVTIGECPKYVRSAKLRMVTGLRNIPSIQSRGLFGAIAGFIEGGWTGMVDGWYGYHHQNEQGSGYAADQKSTQNAINGITNKVNSVIEKMNTQFTAVGKEFNKLERRMENLNKKVDDGFLDIWTYNAELLVLLENERTLDFHDSNVKNLYEKVKSQLKNNAKEIGNGCFEFYHKCNNECMESVKNGTYDYPKYSEESKLNREKIDGVKLDSMGVYQILAIYSTVASSLVLLVSLGAISFWMCPNGSLQCTICI

SEQ ID NO: 2476 - protein, 565 aa, Artificial Sequence
  derived and/or modified protein sequence (wt) from hemagglutinin__InfluenzaA__ACI32741
MKVKLLILLCTFTATYADTICIGYHANNSTDTVDTVLEKNVTVTHSVNLLEDSHNGKLCLLKGIAPLQLGNCSVAGWILGNPECELLISKESWSYIVETPNPENGACYPGYFADYEELREQLSSVSSFERFEIFPKESSWPKHTVTGVSASCSHNGKSSFYRNLLWLTGKNGLYPNLSKSYANNKEKEVLILWGVHHPPNIGDQRTLYHTENAYVSVVSSHYSRRFTPEITKRPKVRDQEGRINYYWTLLEPGDTIIFEANGNLIAPWYAFALSRGFGSGIITSNAPMDECDAKCQTPQGAINSSLPFQNVHPVTIGECPKYVRSAKLRMVTGLRNIPSIQSRGLFGAIAGFIEGGWTGMVDGWYGYHHQNEQGSGYAADQKSTQNAINGITNKVNSVIEKMNTQFTAVGKEFNKLERRMENLNKKVDDGFLDIWTYNAELLVLLENERTLDFHDSNVKNLYEKVKSQLKNNAKEIGNGCFEFYHKCNNECMESVKNGTYDYPKYSEESKLNREKIDGVKLDSMGVYQILAIYSTVASSLVLLVSLGAISFWMCPNGSLQCKICI

SEQ ID NO: 2477 - protein, 565 aa, Artificial Sequence
  derived and/or modified protein sequence (wt) from hemagglutinin__InfluenzaA__ACI32742
MKVKLLILLCTFTATYADTICIGYHANNSTDTVDTVLEKNVTVTHSVNLLEDSHNGKLCLLKGIAPLQLGNCSVAGWILGNPECELLISKESWSYIVETPNPENGTCYPGYFADYEELREQLSSVSSFERFEIFPKESSWPNHTVTGVSASCSHNGKSSFYRNLLWLTGKNGLYPNLSKSYANNKEKEVLILWGVHHPPNIGDQRTLYHTENAYVSVVSSHYSRRFTPEITKRPKVRDQEGRINYYWTLLEPGDTIIFEANGNLIAPWYAFALSRGFGSGIITSNAPMDECDAKCQTPQGAINSSLPFQNVHPVTIGECPKYVRSAKLRMVTGLRNIPSIQSRGLFGAIAGFIEGGWTGMVDGWYGYHHQNEQGSGYAADQKSTQNAINGITNKVNSVIEKMNTQFTAVGKEFNKLERRMENLNKKVDDGFLDIWTYNAELLVLLENERTLDFHDSNVKNLYEKVKSQLKNNAKEIGNGCFEFYHKCNNECMESVKNGTYDYPKYSEESKLNREKIDGVKLDSMGVYQILAIYSTVASSLVLLVSLGAISFWMCSNGSLQCKICI

SEQ ID NO: 2478 - protein, 565 aa, Artificial Sequence
  derived and/or modified protein sequence (wt) from hemagglutinin__InfluenzaA__ACI32743
MKVKLLILLCTFTATYADTICIGYHANNSTDTVDTVLEKNVTVTHSVNLLEDSHNGKLCLLKGIAPLQLGNCSVAGWILGNPECELLISKESWSYIVETPNPENGACYPGYFADYEELREQLSSVSSFERFEIFPKKSSWPNHTVTGVSASCSHNGKSSFYRNLLWLTGKNGLYPNLSKSYANNKEKEVLILWGVHHPPNIGNQRTLYHTENAYVSVVSSHYSRRFTPEITKRPKVRDQEGRINYYWTLLEPGDTIIFEANGNLIAPWYAFALSRGFGSGIITSNAPMDECDAKCQTPQGAINSSLPFQNVHPVTIGECPKYVRSAKLRMVTGLRNIPSIQSRGLFGAIAGFIEGGWTGMVDGWYGYHHQNEQGSGYAADQKSTQNAINGITNKVNSVIEKMNTQFTAVGKEFNKLERRMENLNKKVDDGFLDIWTYNAELLVLLENERTLDFHDSNVKNLYEKVKSQLKNNAKEIGNGCFEFYHKCNNECMESVKNGTYDYPKYSEESKLNREKIDGVKLDSMGVYQILAIYSTVASSLVLLVSLGAISFWMCSNGSLQCRICI

SEQ ID NO: 2479 - protein, 566 aa, Artificial Sequence
  derived and/or modified protein sequence (wt) from hemagglutinin__InfluenzaA__ACJ09818
MKTIIALSYILCLVFAQKLPGNDNSTATLCLGHHAVPNGTIVKTITNDQVEVTNATELVQSSSTGEICDSPHQILDGENCTLIDALLGDPQCDGFQNKKWDLFVERSKAYSNCYPYDVPDYASLRSLVASSGTLEFNNESFNWTGVTQNGTSSACIRRSNNSFFSRLNWLTHLKFKYPALNVTMPNNEKFDKLYIWGVHHPGTDNDQIFLYAQASGRITVSTKRSQQTVIPNIGSRPRVRNIPSRISIYWTIVKPGDILLINSTGNLIAPRGYFKIRSGKSSIMRSDAPIGKCNSECITPNGSIPNDKPFQNVNRITYGACPRYVKQNTLKLATGMRNVPEKQTRGIFGAIAGFIENGWEGMVDGWYGFRHQNSEGIGQAADLKSTQAAIDQINGKLNRLIGKTNEKFHQIEKEFSEVEGRIQDLEKYVEDTKIDLWSYNAELLVALENQHTIDLTDSEMNKLFEKTKKQLRENAEDMGNGCFKIYHKCDNACIGSIRNGTYDHDVYRDEALNNRFQIKGVELKSGYKDWILWISFAMSCFLLCVALLGFIMWACQKGNIRCNICI

SEQ ID NO: 2480 - protein, 560 aa, Artificial Sequence
  derived and/or modified protein sequence (wt) from hemagglutinin__InfluenzaA__ACJ67533
METISLITILLVVTASNADKICIGHQSTNSTETVDTLTETNVPVTHAKELLHTEHNGMLCATSLGHPLILDTCTIEGLVYGNPSCDLLLEGREWSYIVERSSAVNGTCYPGNVENLEELRTLFSSASSYQRIQIFPDTTWNVTYTGTSRACSGSFYRSMRWLTQKSGFYPVQDAQYTNNRGKSILFVWGIHHPPTYAEQTNLYIRNDTTTSVTTEDLNRTFKPVIGPRPLVNGLQGRIDYYWSVLKPGQTLRVRSNGNLIAPWYGHVLSGGSHGRILKTDLKSGSCVVQCQTEKGGLNSTLPFHNISKYAFGTCPKYVRVNSLKLAVGLRNVPARSSRGLFGAIAGFIEGGWPGLVAGWYGFQHSNDQGVGMAADRDSTQKAIDKITSKVNNIVDKMNKQYEIIDHEFSEVETRLNMINNKIDDQIQDVWAYNAELLVLLENQKTLDEHDANVNNLYNKVKRALGSNAMEDGKGCFELYHKCDDQCMETIRNGTYNRRKYREESRLERQKIEGVKLESERTYKILTIYSTVASSLVLAMGFAAFLFWAMSNGSCRCNICI

SEQ ID NO: 2481 - protein, 567 aa, Artificial Sequence
  derived and/or modified protein sequence (wt) from hemagglutinin__InfluenzaA__ACJ68607
MEKIVLLLAIVSLVKSDQICIGYHANNSTEQVDTIMEKNVTVTHAQDILEKTHNGKLCDLDGVKPLILGDCSVAGWLLGNPMCDEFINVPEWSYIVEKANPANDLCYPGNFNDYEELKHLLSRINHFEKIQIIPKSSWSDHEASSGVSSACPYQGTPSFFRNVVWLIKKNNTYPTIKRSYNNTNQEDLLILWGIHHSNDAAEQTKLYQNPTTYISVGTSTLNQRLVPKIATRSKVNGQSGRMDFFWTILKPNDAINFESNGNFIAPEYAYKIVKKGDSAIMKSEVEYGNCNTKCQTPIGAINSSMPFHNIHPLTIGECPKYVKSNKLVLATGLRNSPLRERRRKRGLFGAIAGFIEGGWQGMVDGWYGYHHSNEQGSGYAADKESTQKAIDGVTNKVNSIIDKMNTQFEAVGREFNNLERRIENLNKKMEDGFLDVWTYNAELLVLMENERTLDFHDSNVKNLYDKVRLQLRDNAKELGNGCFEFYHKCDNECMESVRNGTYDYPQYSEEARLKREEISGVKLESIGTYQILSIYSTVASSLALAIMVAGLSLWMCSNGSLQCRICI

SEQ ID NO: 2482 - protein, 567 aa, Artificial Sequence
  derived and/or modified protein sequence (wt) from hemagglutinin__InfluenzaA__ACJ68609
MEKIVLLLAIVSLVKSDQICIGYHANNSTEQVDTIMEKNVTVTHAQDILEKTHNGKLCDLDGVKPLILRDCSVAGWLLGNPMCDEFINVPEWSYIVEKANPANDLCYPGNFNDYEELKHLLSRINHFEKIQIIPKSSWSDHEASSGVSSACPYQGTPSFFRNVVWLIKKNNTYPTIKRSYNNTNQEDLLILWGIHHSNDAAEQTKLYQNPTTYISVGTSTLNQRLVPKIATRSKVNGQSGRMDFFWTILKPNDAINFESNGNFIAPEYAYKIVKKGDSAIMKSEVEYGNCNTKCQTPIGAINSSMPFHNIHPLTIGECPKYVKSNKLVLATGLRNSPLRERRRKRGLFGAIAGFIEGGWQGMVDGWYGYHHSNEQGSGYAADKESTQKAIDGVTNKVNSIIDKMNTQFEAVGREFNNLERRIENLNKKMEDGFLDVWTYNAELLVLMENERTLDFHDSNVKNLYDKVRLQLRDNAKELGNGCFEFYHKCDNECMESVRNGTYDYPQYSEEARLRREEISGVKLESIGTYQILSIYSTVASSLALAIMVAGLSLWMCSNGSLQCRICI

SEQ ID NO: 2483 - protein, 567 aa, Artificial Sequence
  derived and/or modified protein sequence (wt) from hemagglutinin__InfluenzaA__ACJ68610
MEKIVLFLAIVSLVKSDQICIGYHANNSTEQVDTIMEKNVTVTHAQDILEKTHNGKLCDLDGVKPLILRDCSVAGWLLGNPMCDEFINVPEWSYIVEKANPANDLCYPGNFNDYEELKHLLSRINHFEKIQIIPKSSWSDHEASSGVSSACPYQGTPSFFRNVVWLIKKNNTYPTIKRSYNNTNQEDLLILWGIHHSNDAAEQTKLYQNPTTYISVGTSTLNQRLVPKIATRSKVNGQSGRMDFFWTILKPNDAINFESNGNFIAPEYAYKIVKKGDSAIIKSEVEYGNCNTKCQTPIGAINSSMPFHNIHPLTIGECPKYVKSNKLVLATGLRNSPLRERRRKRGLFGAIAGFIEGGWQGMVDGWYGYHHSNEQGSGYAADKESTQKAIDGVTNKVNSIIDKMNTQFEAVGREFNNLERRIENLNKKMEDGFLDVWTYNAELLVLMENERTLDFHDSNVKNLYDKVRLQLRDNAKELGNGCFEFYHKCDNECMESVRNGTYDYPQYSEEARLKREEISGVKLESIGTYQILSIYSTVASSLALAIMVAGLSLWMCSNGSLQCRICI

SEQ ID NO: 2484 - protein, 567 aa, Artificial Sequence
  derived and/or modified protein sequence (wt) from hemagglutinin__InfluenzaA__ACJ68611
MEKIVLLLAIVSLVKSDQICIGYHANNSTEQVDTIMEKNVTVTHAQDILEKTHNGKLCDLDGVKPLILRDCSVAGWLLGNPMCDEFINVPEWSYIVEKANPANDLCYPGNFNDYEELKHLLSRINHFEKIQIIPKSSWSDHEASLGVSSACPYQGMPSFFRNVVWLIKKNNTYPTIKRSYNNTNQEDLLILWGIHHSNDAAEQTKLYQNPTTYISVGTSTLNQRLVPKIATRSKVNGQSGRMDFFWTILKPNDAINFESNGNFIAPEYAYKIVKKGDSAIMKSEVGYGNCNTKCQTPIGAINSSMPFHNIHPLTIGECPKYVKSNKLVLATGLRNSPLRERRRKRGLFGAIAGFIEGGWQGMVDGWYGYHHSNEQGSGYAADKESTQKAIDGVTNKVNSIIDKMNTQFEAVGREFNNLERRIENLNKKMEDGFLDVWTYNAELLVLMENERTLDFHDSNVKNLYDKVRLQLRDNAKELGNGCFEFYHKCDDECMESVRNGTYDYPQYSEEARLKREEISGVKLESIGTYQILSIYSTVASSLALAIMVAGLSLWMCSNGSLQCRICI

SEQ ID NO: 2485 - protein, 567 aa, Artificial Sequence
  derived and/or modified protein sequence (wt) from hemagglutinin__InfluenzaA__ACJ68612
MEKIVLLLAIVSLVKSDQICIGYHANNSTEQVDTIMEKNVTVTHAQDILEKTHNGKLCDLDGVKPLILRDCSVAGWLLGNPMCDEFINVPEWSYIVEKANPANDLCYPGNFNDYEELKHLLSRINHFEKIQIIPKSSWPDHEASSGVSSACPYQGTPSFFRNVVWLIKKNNTYPTIKRSYNNTNQEDLLILWGIHHSNNAAEQTKLYQNPTTYISVGTSTLNLRLVPKIATRSKVNGQSGRMDFFWTILKPNDAINFESNGNFIAPEYAYKIVKKGDSAIMKSEVEYGNCNTKCQTPIGAINSSMPFHNIHPLTIGECPKYVKSNKLVLATGLRNSPLRERRRKRGLFGAIAGFIEGGWQGMVDGWYGYHHSNEQGSGYAADKESTQKAIDGVTNKVNSIIDKMNTQFEAVGREFNNLERRIENLNKKMEDGFLDVWTYNAELLVLMENERTLDFHDSNVKNLYDKVRLQLRDNAKELGNGCFEFYHKCDNECMESVRNGTYDYPQYSEEARLKREEISGVKLESIGAYQILSIYSTVASSLALAIMVAGLSLWMCSNGSLQCRICI

SEQ ID NO: 2486 - protein, 567 aa, Artificial Sequence
  derived and/or modified protein sequence (wt) from hemagglutinin__InfluenzaA__ACJ68613
MEKIVLFLAIVSHVKSDQICIGYHANNSTEQVDTIMEKNVTVTHAQDILEKTHNGKLCDLGGVKPLILRDCSVAGWLLGNPMCDEFINVPEWSYIVEKANPANDLCYPGNFNDYEELKHLLSRINHFEKIQIIPKSSWSDHEASSGVSSVCPYQGTPSFFRNVVWLIKKNNTYPTIKKSYNNTNQEDLLILWGIHHSNDAAEQTKLYQNPTTYISVGTSTLNQRLVPKIATRSKVNGQSGRMDFFWTILKPNDAINFESNGNFIAPEYAYKIVKKGDSAIMKSEVEYGNCNTKCQTPIGAINSSMPFHNIHPLTIGECPKYVKSNKLVLATGLRNSPLRERRRKRGLFGAIAGFIEGGWQGMVDGWYGYHHSNEQGSGYAADKESTQKAIDGVTNKVNSIIDKMNTQFEAVGREFNNLERRIENLNKKMEDGFLDVWTYNAELLVLMENERTLDFHDSNVKNLYDKVRLQLRDNAKELGNGCFEFYHKCDNECMESVRNGTYDYPQYSEEARLKREEISGVKLESIGTYQILSIYSTVASSLALAIMVAGLSLWMCSNGSLQCRICI

SEQ ID NO: 2487 - protein, 568 aa, Artificial Sequence
  derived and/or modified protein sequence (wt) from hemagglutinin__InfluenzaA__ACJ68614
MEKIVLLLAIVSLVKSDQICIGYHANNSTEQVDTIMEKNVTVTHAQDILEKTHNGKLCDLDGVKPLILRDCSVAGWLLGNPMCDEFLNVPEWSYIVEKINPVNDLCYPGNFNDYEELKHLLSRINHFEKIQIIPKSSWSDHEASSGVSSACPYQGRSSFFRNVVWLIKKNNTYPTIKRSYNNTNQEDLLVLWGIHHPNDAAEQTRLYQNPTTYISVGTSTLNQRLVPKLATRSKVNGQSGRMEFFWTILKPNDAINFESNGNFIAPENAYKIVKKGDSTIMKSELEYGNCNTKCQTPIGAINSSMPFHNIHPLTIGECPKYVKSNRLVLATGLRNSPQGERRRKKRGLFGAIAGFIEGGWQGMVDGWYGYHHSNERGSGYAADKESTQKAIDGVTNKVNSIIDKMNTQFEAVGREFNNLERRIENLNKKMEDGFLDVWTYNAELLVLMENERTLDFHDSNVKNLYDKVRLQLRDNAKELGNGCFEFYHRCDNECMESVRNGTYDYPQYSEEARLKREEISGVKLESIGTYQILSIYSTVASSLALAIMVAGLSLWMCSNGSLQCRICI

SEQ ID NO: 2488 - protein, 565 aa, Artificial Sequence
  derived and/or modified protein sequence (wt) from hemagglutinin__InfluenzaA__ACK99007
MKVKLLVLLCTFTATYADTICIGYHANNSTDTVDTVLEKNVTVTHSVNLLENSHNGKLCLLKGIAPLQLGNCSVAGWILGNPECELLISKESWSYIVEKPNPENGTCYPGHFADYEELREQLSSVSSFERFEIFPKESSWPNHTVTGVSASCSHNGESSFYRNLLWLTGKNGLYPNLSKSYANNKEKEVLVLWGVHHPPNIGDQKALYHTENAYVSVVSSHYSRKFTPEIAKRPKVRDQEGRINYYWTLLEPGDTIIFEANGNLIAPRYAFALSRGFGSGIINSNAPMDKCDAKCQTPQGAINSSLPFQNVHPVTIGECPKYVRSAKLRMVTGLRNIPSIQSRGLFGAIAGFIEGGWTGMVDGWYGYHHQNEQGSGYAADQKSTQNAINGITNKVNSVIEKMNTQFTAVGKEFNKLERRMENLNKKVDDGFIDIWTYNAELLVLLENERTLDFHDSNVKNLYEKVKSQLKNNAKEIGNGCFEFYHKCNDECMESVKNGTYDYPKYSEESKLNREKIDGVKLESMGVYQILAIYSTVASSLVLLVSLGAISFWMCSNGSLQCRICI

SEQ ID NO: 2489 - protein, 565 aa, Artificial Sequence
  derived and/or modified protein sequence (wt) from hemagglutinin__InfluenzaA__ACK99008
MKVKLLVLLCTFTATYADTICIGYHANNSTDTVDTVLEKNVTVTHSVNLLENSHNGKLCLLKGIAPLQLGNCSVAGWILGNPECELLISKESWSYIVEKPNPENGTCYPGHFADYEELREQLSSVSSFERFEIFPKESSWPNHTVTGVSASCSHNGESSFYRNLLWLTGKNGLYPNLSKSYANNKEKEVLVLWGVHHPPNIGDQKALYHTENAYVSVVSSHYSRKFTPEIAKRPKVRDQEGRINYYWTLLEPGDTIIFEANGNLIAPRYAFALSRGFGSGIINSNAPMDKCDAKCQTPQGAINSSLPFQNVHPVTIGECPKYVRSAKLRMVTGLRNIPSIQSRGLFGAIAGFIEGGWTGMVDGWYGYHHQNEQGSGYAADQKSTQNAINGITNKVNSVIEKMNTQFTAVGKEFNKLERRMENLNKKVDDGFIDIWTYNAELLVLLENERTLDFHDSNVKNLYEKVKSQLKNNAKEIGNGCFEFYHKCNDECMESVKNGTYDYPKYSEESKLNREKIDGVKLESMEVYQILAIYSTVASSLVLLVSLGAISFWMCSNGSLQCRICI

SEQ ID NO: 2490 - protein, 565 aa, Artificial Sequence
  derived and/or modified protein sequence (wt) from hemagglutinin__InfluenzaA__ACK99009
MKVKLLVLLCTFTATYADTICIGYHANNSTDTVDTVLEKNVTVTHSVNLLENSHNGKLCLLKGIAPLQLGNCSVAGWILGNPECELLISKESWSYIVEKPNPENGTCYPGHFADYEELREQLSSVSSFERFEIFPKESSWPNHTVTGVSASCSHNGESSFYRNLLWLTGKNGLYPNLSKSYANNKEKEVLVLWGVHHPPNIGDQKALYHTENAYVSVVSSHYSRKFTPEIAKRPKVRDQEGRINYYWTLLEPGDTITFEANGNLIAPRYAFALSRGFGSGIINSNAPMDKCDAKCQTPQGAINSSLPFQNVHPVTIGECPKYVRSAKLRMVTGLRNIPSIQSRGLFGAIAGFIEGGWTGMVDGWYGYHHQNEQGSGYAADQKSTQNAINGITNKVNSVIEKMNTQFTAVGKEFNKLERRMENLNKKVDDGFIDIWTYNAELLVLLENERTLDFHDSNVKNLYEKVKSQLKNNAKEIGNGCFEFYHKCNDECMESVKNGTYDYPKYSEESKLNREKIDGVKLESMGVYQILAIYSTVASSLVLLVSLGAISFWMCSNGSLQCRICI

SEQ ID NO: 2491 - protein, 565 aa, Artificial Sequence; identical to SEQ ID NO: 2488
  derived and/or modified protein sequence (wt) from hemagglutinin__InfluenzaA__ACK99011

SEQ ID NO: 2492 - protein, 565 aa, Artificial Sequence
  derived and/or modified protein sequence (wt) from hemagglutinin__InfluenzaA__ACK99012
MKVKLLVLLCTFTATYADTICIGYHANNSTDTVDTVLEKNVTVTHSVNLLENSHNGKLCLLKGIAPLQLGNCSVAGWILGNPECELLISKESWSYIVEKPNPENGTCYPGHFADYEELREQLSSVSSFERFEIFPKESSWPNHTVTGVSASCSHNGESSFYRNLLWLTGKNGLYPNLSKSYANNKEKEVLVLWGVHHPPNIGDQKALYHTENAYVSVVSSHYSRKFTPEIAKRPKVRDQEGRINYYWTLLEPGDTIIFEANGNLIAPRYAFALSRGFGSGIINSNAPMDKCDAKCQTPQGAINSSLPFQNVHPVTIGECPKYVRSAKLRMVTGLRNIPSIQSRGLFGAIAGFIEGGWTGMVDGWYGYHHQNEQGSGYAADQKSTQNAINGITNKVNSVIEKMNTQFTAVGKEFNKLERRMENLNKKVDDGFIDIWTYNAELLVLLENERTLDFHDSNVKNLYEKVKSQLKNNAKEIGNGCFEFYHKCNDECMESVKNGTYDYPKYSEESKLNREKIDGVKLESMGVYQILAIYSTVASSLVLLISLGAISFWMCSNGSLQCRICI

SEQ ID NO: 2493 - protein, 565 aa, Artificial Sequence; identical to SEQ ID NO: 2488
  derived and/or modified protein sequence (wt) from hemagglutinin__InfluenzaA__ACK99013

SEQ ID NO: 2494 - protein, 565 aa, Artificial Sequence
  derived and/or modified protein sequence (wt) from hemagglutinin__InfluenzaA__ACK99014
MKVKLLVLLCTFTATYADTICIGYHANNSTDTVDTVLEKNVTVTHSVNLLENSHNGKLCLLKGIAPLQLGNCSVAGWILGNPECELLISKESWSYIVEKPNPENGTCYPGHFADYEELREQLSSVSSFERFEIFPKESSWPNHTVTGVSASCSHNGESSFYRNLLWLTGKNGLYPNLSKSYANNKEKEVLVLWGVHHPPNIGDQKALYHTENAYVSVVSSHYSRKFTPEIAKRPKVRDQEGRINYYWTLLEPGDTIIFEANGNLIAPRYAFTLSRGFGSGIINSNAPMDKCDAKCQTPQGAINSSLPFQNVHPVTIGECPKYVRSAKLRMVTGLRNIPSIQSRGLFGAIAGFIEGGWTGMVDGWYGYHHQNEQGSGYAADQKSTQNAINGITNKVNSVIEKMNTQFTAVGKEFNKLERRMENLNKKVDDGFIDIWTYNAELLVLLENERTLDFHDSNVKNLYEKVKSQLKNNAKEIGNGCFEFYHKCNDECMESVKNGTYDYPKYSEESKLNREKIDGVKLESMGVYQILAIYSTVASSLVLLVSLGAISFWMCSNGSLQCRICI

SEQ ID NO: 2495 - protein, 565 aa, Artificial Sequence; identical to SEQ ID NO: 2488
  derived and/or modified protein sequence (wt) from hemagglutinin__InfluenzaA__ACK99016

SEQ ID NO: 2496 - protein, 565 aa, Artificial Sequence; identical to SEQ ID NO: 2488
  derived and/or modified protein sequence (wt) from hemagglutinin__InfluenzaA__ACK99018

SEQ ID NO: 2497 - protein, 565 aa, Artificial Sequence; identical to SEQ ID NO: 2488
  derived and/or modified protein sequence (wt) from hemagglutinin__InfluenzaA__ACK99023

SEQ ID NO: 2498 - protein, 565 aa, Artificial Sequence
  derived and/or modified protein sequence (wt) from hemagglutinin__InfluenzaA__ACK99026
MKVKLLVLLCTFTATYADTICIGYHANNSTDTVDTVLEKNVTVTHSVNLLENSHNGKLCLLKGIAPLQLGNCSVAGWILGNPECELLISKESWSYIVEKPNPENGTCYPGHFADYEELREQLSSVSSFERFEIFPKESSWPNHTVTGVSASCSHNGESSFYRNLLWLTGKNGLYPNLSKSYANNKEKEVLVLWGVHHPPNIGDQKALYHTENAYVSVVSSHYSRKFTPEIAKRPKVRDQEGRINYYWTLLEPGDTIIFEANGNLIAPRYAFALSRGFGSGIINSNAPMDKCDAKCQTPQGAINSSLPFQNVHPITIGECPKYVRSAKLRMVTGLRNIPSIQSRGLFGAIAGFIEGGWTGMVDGWYGYHHQNEQGSGYAADQKSTQNAINGITNKVNSVIEKMNTQFTAVGKEFNKLERRMENLNKKVDDGFIDIWTYNAELLVLLENERTLDFHDSNVKNLYEKVKSQLKNNAKEIGNGCFEFYHKCNDECMESVKNGTYDYPKYSEESKLNREKIDGVKLESMGVYQILAIYSTVASSLVLLVSLGAISFWMCSNGSLQCRICI

SEQ ID NO: 2499 - protein, 565 aa, Artificial Sequence; identical to SEQ ID NO: 2172
  derived and/or modified protein sequence (wt) from hemagglutinin__InfluenzaA__ACK99027

SEQ ID NO: 2500 - protein, 565 aa, Artificial Sequence
  derived and/or modified protein sequence (wt) from hemagglutinin__InfluenzaA__ACK99028
MKVKLLVLLCTFTATYADTICIGYHANNSTDTVDTVLEKNVTVTHSVNLLENSHNGKLCLLKGIAPLQLGNCSVAGWILGNPECELLISKESWSYIVEKPNPENGTCYPGHFADYEELREQLSSVSSFERFEIFPKESSWPNHTVTGVSASCSHNGESSFYRNLLWLTGKNGLYPNLSKSYANNKEKEVLVLWGVHHPPNIGDQKALYHTENAYVSVVSSHYSRKFTPEIAKRPKVRDQEGRINYYWTLLEPGDTIIFEANGNLIAPRYAFALSRGFGSGIINSNAPMDKCDAKCQTPKGAINSSLPFQNVHPVTIGECPKYVRSAKLRMVTGLRNIPSIQSRGLFGAIAGFIEGGWTGMVDGWYGYHHQNEQGSGYAADQKSTQNAINGITNKVNSVIEKMNTQFTAVGKEFNKLERRMENLNKKVDDGFIDIWTYNAELLVLLENERTLDFHDSNVKNLYEKVKSQLKNNAKEIGNGCFEFYHKCNDECMESVKNGTYDYPKYSEESKLNREKIDGVKLESMGVYQILAIYSTVASSLVLLVSLGAISFWMCSNGSLQCRICI

SEQ ID NO: 2501 - protein, 565 aa, Artificial Sequence
  derived and/or modified protein sequence (wt) from hemagglutinin__InfluenzaA__ACK99029
MKVKLLVLLCTFTATYADTICIGYHANNSTDTVDTVLEKNVTVTHSVNLLENSHNGKLCLLKGIAPLQLGNCSVAGWILGNPECELLISKESWSYIVEKPNPENGTCYPGHFADYEELREQLSSVSSFERFEIFPKESSWPNHTVTGVSASCSHNGESSFYRNLLWLTGKNGLYPNLSKSYANNKEKEVLVLWGVHHPPNIGDQKALYHTENAYVSVVSSHYSRKFTPEISKRPKVRDQEGRINYYWTLLEPGDTIIFEANGNLIAPRYAFALSRGFGSGIINSNAPMDKCDAKCQTPQGAINSSLPFQNVHPVTIGECPKYVRSAKLRMVTGLRNIPSIQSRGLFGAIAGFIEGGWTGMVDGWYGYHHQNEQGSGYAADQKSTQNAINGITNKVNSVIEKMNTQFTAVGKEFNKLERRMENLNKKVDDGFIDIWTYNAELLVLLENERTLDFHDSNVKNLYEKVKSQLKNNAKEIGNGCFEFYHKCNDECMESVKNGTYDYPKYSEESKLNREKIDGVKLESMGVYQILAIYSTVASSLVLLVSLGAISFWMCSNGSLQCRICI

SEQ ID NO: 2502 - protein, 565 aa, Artificial Sequence; identical to SEQ ID NO: 2488
  derived and/or modified protein sequence (wt) from hemagglutinin__InfluenzaA__ACK99030

SEQ ID NO: 2503 - protein, 565 aa, Artificial Sequence; identical to SEQ ID NO: 2488
  derived and/or modified protein sequence (wt) from hemagglutinin__InfluenzaA__ACK99031

SEQ ID NO: 2504 - protein, 565 aa, Artificial Sequence; identical to SEQ ID NO: 2488
  derived and/or modified protein sequence (wt) from hemagglutinin__InfluenzaA__ACK99032

SEQ ID NO: 2505 - protein, 565 aa, Artificial Sequence; identical to SEQ ID NO: 2488
  derived and/or modified protein sequence (wt) from hemagglutinin__InfluenzaA__ACK99033

SEQ ID NO: 2506 - protein, 565 aa, Artificial Sequence
  derived and/or modified protein sequence (wt) from hemagglutinin__InfluenzaA__ACK99034
MKVKLLVLLCTFTATYADTICIGYHANNSTDTVDTVLEKNVTVTHSVNLLENSHNGKLCLLKGIAPLQLGNCSVAGWILGNPECELLISKESWSYIVEKPNPENGTCYPGHFADYEELREQLSSVSSFERFEIFPKESSWPNHTVTGVSASCSHNGESSFYRNLLWLTGKNGLYPNLSKSYANNKEKEVLVLWGVHHPPNIGDQKALYHTENAYVSVVSSHYSRKFTPEIAKRPKVRDQEGRINYYWTLLEPGDTIIFEANGNLIAPRYAFALSRDFGSGIINSNAPMDKCDAKCQTPQGAINSSLPFQNVHPVTIGECPKYVRSAKLRMVTGLRNIPSIQSRGLFGAIAGFIEGGWTGMVDGWYGYHHQNEQGSGYAADQKSTQNAINGITNKVNSVIEKMNTQFTAVGKEFNKLERRMENLNKKVDDGFIDIWTYNAELLVLLENERTLDFHDSNVKNLYEKVKSQLKNNAKEIGNGCFEFYHKCNDECMESVKNGTYDYPKYSEESKLNREKIDGVKLESMGVYQILAIYSTVASSLVLLVSLGAISFWMCSNGSLQCRICI

SEQ ID NO: 2507 - protein, 565 aa, Artificial Sequence
  derived and/or modified protein sequence (wt) from hemagglutinin__InfluenzaA__ACK99035
MKVKLLVLLCTFTATYADTICIGYHANNSTDTVDTVLEKNVTVTHSVNLLENSHNGKLCLLKGIAPLQLGNCSVAGWILGNPECELLISKESWSYIVEKPNPENGTCYPGHFADYEELREQLSSVSAFERFEIFPKESSWPNHTVTGVSASCSHNGESSFYRNLLWLTGKNGLYPNLSKSYANNKEKEVLVLWGVHHPPNIGDQKALYHTENAYVSVVSSHYSRKFTPEISKRPKVRDQEGRINYYWTLLEPGDTIIFEANGNLIAPRYAFALSRGFGSGIINSNTPMDKCDAKCQTPQGAINSSLPFQNVHPVTIGECPKYVRSAKLRMVTGLRNIPSIQSRGLFGAIAGFIEGGWTGMVDGWYGYHHQNEQGSGYAADQKSTQNAINGITNKVNSVIEKMNTQFTAVGKEFNKLERRMENLNKKVDDGFIDIWTYNAELLVLLENERTLDFHDSNVKNLYEKVKSQLKNNAKEIGNGCFEFYHKCNDECMESVKNGTYDYPKYSEESKLNREKIDGVKLESMGVYQILAIYSTVASSLVLLVSLGAISFWMCSNGSLQCRICI

SEQ ID NO: 2508 - protein, 566 aa, Artificial Sequence; identical to SEQ ID NO: 2338
  derived and/or modified protein sequence (wt) from hemagglutinin__InfluenzaA__ACK99421

SEQ ID NO: 2509 - protein, 562 aa, Artificial Sequence
  derived and/or modified protein sequence (wt) from hemagglutinin__InfluenzaA__ACK99432
MAIIYLILLFTAVRGDQICIGYHANNSTEKIDTILERNVTVTHAKDILEKTHNGKLCKLNGIPPLELGDCSIAGWLLGNPECDRLLRVPEWSYIMEKENPRYSLCYPGSFNDYEELKHLLSSVKHFEKVKILPKDRWTQHTTTGGSMACAVSGKPSFFRNMVWLTTKGPNYPVAQGSYNNTSGEQMLIIWGVHHPNDEAEQRALYQKVGTYVSASTSTLYKRSIPEIAARPKVNGLGSRMEFSWTLLDMWDTINFESTGNLVAPEYGFKISKRGSSGIMKTEGTLENCETKCQTPLGAINTTLPFHNVHPLTIGECPKYVKSEKLVLATGLRNVPQIESRGLFGAIAGFIEGGWQGMVDGWYGYHHSNDQGSGYAADKESTQKAFDGITNKVNSVIEKMNTQFEAVGKEFSNLEKRLENLNKKMEDGFLDVWTYNAELLVLMENERTLDFHDSNVKNLYDKVRMQLRDNVKELGNGCFEFYHKCDNECMDSVKNGTYDYPKYEEESKLNRNEIKGVKLSSMGVYQILAIYATVAGSLSLAIMMAGISFWMCSNGSLQCRICI

SEQ ID NO: 2510 - protein, 566 aa, Artificial Sequence
  derived and/or modified protein sequence (wt) from hemagglutinin__InfluenzaA__ACK99443
MKAKLLVLLCAFTATDADTICIGYHANNSTDTVDTVLEKNVTVTHSVNLLEDSHNGKLCRLKGIAPLQLGNCSIAGWILGNPECESLFSKESWSYIAETPNSENGTCYPGYFADYEELREQLSSVSSFERFEIFPKESSWPNHTVTKGVTAACSHNGKSSFYRNLLWLTEKNGLYPNLSKSYVNNKEKEVLVLWGVHHPSNIGDQRAIYHTENAYVSVVSSHYSRRFTPEIAKRPKVRGQEGRINYYWTLLEPGDTIIFEANGNLIAPWYAFALSRGFGSGIITSNASMDECDAKCQTPQGAINSSLPFQNVHPVTIGECPKYVRSTKLRMVTGLRNIPSVQSRGLFGAIAGFIEGGWTGMIDGWYGYHHQNEQGSGYAADQKSTQNAINGITNKVNSVIEKMNTQFTAVGKEFNKLERRMENLNKKVDDGFLDIWTYNAELLVLLENERTLDFHDSNVKNLYEKVKSQLKNNAKEIGNGCFEFYHKCNNECMESVKNGTYDYPKYSEESKLNREKIDGVKLESMGVYQILAIYSTVASSLVLLVSLGAISFWMCSNGSLQCRICI

SEQ ID NO: 2511 - protein, 566 aa, Artificial Sequence
  derived and/or modified protein sequence (wt) from hemagglutinin__InfluenzaA__ACK99465
MKAKLLVLLCAFTATYADTICIGYHANNSTDTVDTVLEKNVTVTHSVNLLEDSHNGKLCRLKGTAPLQLGNCSVAGWILGNPECESLFSKESWSYIAEKPNPENGTCYPGYFADYEELREQLSSVSSFERFEIFPKESSWPNHTVTKGVTASCSHNGKSSFYKNLLWLTKKNGLYPNLSKSYVNNKEKEVLVLWGVHHPSNIGDQRAIYHTENAYVSVVSSHYSRRFTPEIAKRPKVRDQEGRINYYWTLLEPGDTIIFEANGNLIAPWYAFALSRGFGSGIITSNASMGECDAKCQTPQGAINSSLPFQNVHPVTIGECPKYVRSTKLRMVTGLRNIPSIQSRGLFGAIAGFIEGGWTGMIDGWYGYHHQNEQGSGYAADKKSTQNAIDGITNKVNSVIEKMNTQFTAVGKEFNKLERRMENLNKKVDDGFLDIWTYNAELLVLLENERTLDFHDSNVKNLYEKVKNQLKNNAKEIGNGCFEFYHKCNNECMESVKNGTYDYPKYSEESKLKREKIDGVKLESMGVYQILAIYSTVASSLVLLVSLGAISFWMCSNGSLQCRICI

SEQ ID NO: 2512 - protein, 566 aa, Artificial Sequence
  derived and/or modified protein sequence (wt) from hemagglutinin__InfluenzaA__ACK99476
MKTIIALSYILCMVFAQKLPGNDNSTATLCLGHHAVPNGTLVKTITNDQIEVTNATELVQSSSTGRICDSPHRILDGKNCTLIDALLGDPHCDDFQNKEWDLFVERSKAYSNCYPYDVPDYASLRSLVASSGTLEFNNESFNWTGVAQNGTSYACKRRSVKSFFSRLNWLHKLEYKYPALNVTMPNNDKFDKLYIWGVHHPRTDSDQTSLYVQASGRVTVSTKRSQQTVIPNIGSSPWVRGVSSRISIYWTIVKPGDILLINSTGNLIAPRGYFKIRSGKSSIMRSDAPIGNCNSECITPNGSIPNDKPFQNVNRITYGACPRYVKQNTLKLATGMRNVPEKQTRGIFGAIAGFIENGWEGMVDGWYGFRHQNSEGTGQAADLKSTQAAINQINGKLNRLIEKTNEKFHQIEKEFSEVEGRIQDLEKYVEDTKIDLWSYNAELLVALENQHTIDLTDSEMNKLFERTRKQLRENAEDMGNGCFKIYHKCDNACIGSIRNGTYDHDVYRDEALNNRFQIKGVELKSGYKDWILWISFAISCFLLCVVLLGFIMWACQKGNIRCNICI

SEQ ID NO: 2513 - protein, 565 aa, Artificial Sequence; identical to SEQ ID NO: 1914
  derived and/or modified protein sequence (wt) from hemagglutinin__InfluenzaA__ACL12063

SEQ ID NO: 2514 - protein, 566 aa, Artificial Sequence
  derived and/or modified protein sequence (wt) from hemagglutinin__InfluenzaA__ACL12129
MKTIIALSYILCLVFAQKLPGNDNSTATLCLGHHAVPNGTLVKTITNDQIEVTNATELVQSSSTGRICGSPHRILDGKNCTLIDALLGDPHCDGFQNKEWDLFVERSKAYSNCYPYDVPDYASLRSLVASSGTLEFINEDFNWTGVAQDGGSYACKRGSVNSFFSRLNWLHKLEYKYPALNVTMPNNGKFDKLYIWGVHHPSTDSDQTSLYVRASGRVTVSTKRSQQTVTPNIGSRPWVRGQSSRISIYWTIVKPGDILLIDSTGNLIAPRGYFKIRNGKSSIMRSDAPIGNCSSECITPNGSIPNDKPFQNVNRITYGACPRYVKQNTLKLATGMRNVPEKQTRGIFGAIAGFIENGWEGMVDGWYGFRHQNSEGTGQAADLKSTQAAIDQINGKLNRLIEKTNEKFQQIEKEFSEVEGRIQDLEKYVEDTKIDLWSYNAELLVALENQHTIDLTDSEMNKLFEKTRKQLRENAEDMGNGCFKIYHKCDNACIGSIRNGTYDHDVYRDEALNNRFQIKGVELKSGYKDWILWISFAISCFLLCVVLLGFIMWACQKGNIRCNICI

SEQ ID NO: 2515 - protein, 566 aa, Artificial Sequence; identical to SEQ ID NO: 2356
  derived and/or modified protein sequence (wt) from hemagglutinin__InfluenzaA__ACL12140

SEQ ID NO: 2516 - protein, 565 aa, Artificial Sequence; identical to SEQ ID NO: 2440
  derived and/or modified protein sequence (wt) from hemagglutinin__InfluenzaA__ACL12151

SEQ ID NO: 2517 - protein, 566 aa, Artificial Sequence; identical to SEQ ID NO: 2434
  derived and/or modified protein sequence (wt) from hemagglutinin__InfluenzaA__ACL12162

SEQ ID NO: 2518 - protein, 566 aa, Artificial Sequence
  derived and/or modified protein sequence (wt) from hemagglutinin__InfluenzaA__ACL12173
MKTIIALSYILCLVFAQKLPGNDNSTATLCLGHHAVPNGTIVKTITNDQIEVTNATELVQSSSTGEICDSPHQILDGENCTLIDALLGDPQCDGFQNKKWDLFVERSKAYSNCYPYDVPDYASLRSLVASSGTLEFNNESFNWTGVTQNGTSSACIRRSNNSFFSRLNWLTHLKFKYPALNVTMPNNEQFDKLYIWGVHHPGTDNDQIFLYAQASGRITVSTKRSQQTVIPNIGSRPRVRNIPSRISIYWTIVKPGDILLINSTGNLIAPRGYFKIRSGKSSIMRSDAPIGKCNSECITPNGSIPNDKPFQNVNRITYGACPRYVKQNTLKLATGMRNVPEKQTRGIFGAIAGFIENGWEGMVDGWYGFRHQNSEGRGQAADLKSTQAAINQINGKLNRLIGKTNEKFHQIEKEFSEVEGRIQDLEKYVEDTKIDLWSYNAELLVALENQHTIDLTDSEMNKLFEKTKKQLRENAEDMGNGCFKIYHKCDNACIGSIRNGTYDHDVYRDEALNNRFQIKGVELKSGYKDWILWISFAISCFLLCVALLGFIMWACQKGNIRCNICI

SEQ ID NO: 2519 - protein, 566 aa, Artificial Sequence
  derived and/or modified protein sequence (wt) from hemagglutinin__InfluenzaA__ACL12184
MKTIIALSYILCLVFAQKLPGNDNSTATLCLGHHAVPNGTIVKTITNDQIEVTNATELVQSSSTGEICDSPHQILDGENCTLIDALLGDPQCDGFQNKKWDLFVERSKAYSNCYPYDVPDYASLRSLVASSGTLEFNNESFNWTGVTQNGTSSACIRRSNNSFFSRLNWLTHLKFKYPALNVTMPNNEQFDKLYIWGVHHPGTDNDQIFLYAQASGRITVSTKRSQQTVIPNIGSRPRVRNIPSRISIYWTIVKPGDILLINSTGNLIAPRGYFKIRSGKSSIMRSDAPIGKCNSECITPNGSIPNDKPFQNVNRITYGACPRYVKQNTLKLATGMRNVPEKQTRGIFGAIAGFIENGWEGMVDGWYGFRHQNSEGRGQAADLKSTQAAIDQINGKLNRLIGKTNEKFHQIEKEFSEVEGRIQDLEKYVEDTKIDLWSYNAELLVALENQHTIDLTDSEMNKLFEKTKKQLRENAEDMGNGCFKIYHKCDNACIGSIRNGTYNHDVYRDEALNNRFQIKGVELKSGYKDWILWISFAISCFLLCVALLGFIMWACQKGNIRCNICI

SEQ ID NO: 2520 - protein, 566 aa, Artificial Sequence; identical to SEQ ID NO: 2434
  derived and/or modified protein sequence (wt) from hemagglutinin__InfluenzaA__ACL12195

SEQ ID NO: 2521 - protein, 566 aa, Artificial Sequence
  derived and/or modified protein sequence (wt) from hemagglutinin__InfluenzaA__ACL12217
MKTIIALSYILCLVFAQKLPGNDNSTATLCLGHHAVPNGTIVKTITNDQIEVTNATELVQSSSTGEICDSPHQILDGENCTLIDALLGDPQCDGFQNKKWDLFVERSKAYSNCYPYDVPDYASLRSLVASSGTLEFNNESFNWTGVTQNGTSSACIRRSNNSFFSRLNWLTHLKFKYPALNVTMPNNEQFDKLYIWGVHHPGTDNDQIFLYAQASGRITVSTKRSQQTVIPNIGSRPRVRNIPSRISIYWTIVKPGDVLLINSTGNLIAPRGYFKIRSGKSSIMRSDAPIGKCNSECITPNGSIPNDKPFQNVNRITYGACPRYVKQNTLKLATGMRNVPEKQTRGIFGAIAGFIENGWEGMVDGWYGFRHQNSEGRGQAADLKSTQAAIDQINGKLNRLIGKTNEKFHQIEKEFSEVEGRIQDLEKYVEDTKIDLWSYNAELLVALENQHTIDLTDSEMNKLFEKTKKQLRENAEDMGNGCFKIYHKCDNACIGSIRNGTYDHDVYRDEALNNRFQIKGVELKSGYKDWILWISFAISCFLLCVALLGFIMWACQKGNIRCNICI

SEQ ID NO: 2522 - protein, 566 aa, Artificial Sequence; identical to SEQ ID NO: 2434
  derived and/or modified protein sequence (wt) from hemagglutinin__InfluenzaA__ACL12228

SEQ ID NO: 2523 - protein, 566 aa, Artificial Sequence; identical to SEQ ID NO: 2434
  derived and/or modified protein sequence (wt) from hemagglutinin__InfluenzaA__ACL12239

SEQ ID NO: 2524 - protein, 566 aa, Artificial Sequence
  derived and/or modified protein sequence (wt) from hemagglutinin__InfluenzaA__ACL12250
MKTIIALSYILCLVFAQKFPGNDNSTATLCLGHHAVPNGTIVKTITNDQIEVTNATELVQSSSTGEICDSPHQILDGENCTLIDALLGDPQCDGFQNKNWDLFVERSKAYSNCYPYDVPDYVSLRSLVASSGTLEFNNESFNWTGVTQNGTSSACIRRSNNSFFSRLNWLTHSKFKYPALNVTMPNNENFDKLYIWGVHHPGTDNDQIFLYAQASGRITVSTKRSQQTVIPNIGSRPRVRNIPSRISIYWTIVKPGDILLINSTGNLIAPRGYFKIRSGKSSIMRSDAPIGKCNSECITPNGSIPNDKPFQNVNRITYGACPRYVKQNTLKLATGMRNVPEKQTRGIFGAIAGFIENGWEGMVDGWYGFRHQNSEGIGQAADLKSTQAAIDQINGKLNRLIGKTNEKFHQIEKEFSEVEGRIQDLEKYVEDTKIDLWSYNAELLVALENQHTIDLTDSEMNKLFEKTKKQLRENAEDMGNGCFKIYHKCDNACIGSIRNGTYDHDVYRDEALNNRFQIKGVELKSGYKDWILWISFAISCFLLCIALLGFIMWACQKGNIRCNICI

SEQ ID NO: 2525 - protein, 566 aa, Artificial Sequence
  derived and/or modified protein sequence (wt) from hemagglutinin__InfluenzaA__ACL12261
MKAKLLVLLCAFTATDADTICIGYHANNSTDTVDTVLEKNVTVTHSVNLLEDSHNGKLCRLKGIAPLQLGNCSIAGWILGNPECESLFSKKSWSYIAETPNSENGTCYPGYFADYEELREQLSSVSSFERFEIFPKESSWPNHTVTKGVTAACSHKGRSSFYRNLLWLTEKNGLYPNLSKSYVNNKEKEVLVLWGVHHPSNIGDQRAIYHTENAYVSVVSSHYNRRFTPEIAKRPKVRGQEGRINYYWTLLEPGDTIIFEANGNLIAPWYAFALSRGFGSGIITSNASMDECDAKCQTPQGAINSSLPFQNVHPVTIGECPKYVRSTKLRMVTGLRNIPSIQSRGLFGAIAGFIEGGWTGMIDGWYGYHHQNEQGSGYAADQKSTQNAINGITNKVNSVIEKMNTQFTAVGKEFNKLEKRMENLNKKVDDGFLDIWTYNAELLVLLENERTLDFHDSNVKNLYEKVKNQLKNNAKEIGNGCFEFYHKCNNECMESVKNGTYDYPKYSEESKLNREKIDGVKLESMGVYQILAIYSTVASSLVLLVSLGAISFWMCSNGSLQCRICI

SEQ ID NO: 2526 - protein, 562 aa, Artificial Sequence
  derived and/or modified protein sequence (wt) from hemagglutinin__InfluenzaA__ACN32272
MAIIYLILLFTAVRGDQICIGYHANNSTEKIDTILERNVTVTHAKDILEKTHNGKLCKLNGIPPLELGDCSIAGWLLGNPECDRLLRVPEWSYIMEKENPRYSLCYPGSFNDYEELKHLLSSVKHFEKVKILPKDRWTQHTTTGGSMACAVSGKPSFFRNMVWLTTKGPNYPVAQGSYNNTSGEQMLIIWGVHHPNDEAEQRALYQNVGTYVSASTSTLYKRSIPEIAARPKVNGLGSRMEFSWTLLDMWDTINFESTGNLVAPEYGFKISKRGSSGIMKTEGTLENCETKCQTPLGAINTTLPFHNVHPLTIGECPKYVKSEKLVLATGLRNVPQIESRGLFGAIAGFIEGGWQGMVDGWYGYHHSNDQGSGYAADKESTQKAFDGITNKVNSVIEKMNTQFEAVGKEFSNLEKRLENLNKKMEDGFLDVWTYNAELLVLMENERTLDFHDSNVKNLYDKVRMQLRDNVKELGNGCFEFYHKCDNECMDSVKNGTYDYPKYEEESKLNRNEIKGVKLSSMGVYQILAIYATVAGSLSLAIMMAGISFWMCSNGSLQCRICI

SEQ ID NO: 2527 - protein, 566 aa, Artificial Sequence
  derived and/or modified protein sequence (wt) from hemagglutinin__InfluenzaA__ACN32283
MKTIIALSYILCLVSAQKFPGNDNSTATLCLGHHAVPNGTIVKTITNDQIEVTNATELVQSSSTGEICDSPHQILDGENCTLIDALLGDPQCDGFQNKKWDLFVERSKAYSNCYPYDVPDYASLRSLVASSGTLEFNNESFNWTGVTQNGTSSACIRRSNNSFFSRLNWLTHLKFKYPALNVTMPNNEEFDKLYIWGVHHPGTDNDQIFLYAQASGRITVSTKRSQQTVIPNIGSRPRVRNIPSRISIYWTIVKPGDILLINSTGNLIAPRGYFKIRSGKSSIMRSDAPIGKCNSECITPNGSIPNDKPFQNVNRITYGACPRYVKQNTLKLATGMRNVPEKQTRGIFGAIAGFIENGWEGMVDGWYGFRHQNSEGIGQAADLKSTQAAIDQINGKLNRLIGKTNEKFHQIEKEFSEVEGRIQDLEKYVEDTKIDLWSYNAELLVALENQHTIDLTDSEMNKLFEKTKKQLRENAEDMGNGCFKIYHKCDNACIGSIRNGTYDHDVYRDEALNNRFQIKGVELKSGYKDWILWISFAISCFLLCVALLGFIMWACQKGNIRCNICI

SEQ ID NO: 2528 - protein, 566 aa, Artificial Sequence
  derived and/or modified protein sequence (wt) from hemagglutinin__InfluenzaA__ACN32474
MKTIIALSYILCLVSAQKLPGNDNSTATLCLGHHAVPNGTIVKTITNDQIEVTNATELVQSSSTGEICDSPHQVLDGENCTLIDALLGDPQCDGFQNKKWDLFVERSKAYSNCYPYDVPDYTSLRSLVASSGTLEFNNESFNWTGVTQNGTSSACIRRSNNSFFSRLNWLTHLKFKYPALNMTMPNNEEFDKLYIWGVHHPGTDNDQIFLYAQASGRITVSTKRSQQTVIPNIGSRPRVRNIPSRISIYWTIVKPGDILLINSTGNLIAPRGYFKIRSGKSSIMRSDAPIGKCNSECITPNGSIPNDKPFQNVNRITYGACPRYVKQNTLKLATGMRNVPEKQTRGIFGAIAGFIENGWEGMVDGWYGFRHQNSEGIGQAADLKSTQAAIDQINGKLNRLIGKTNEKFHQIEKEFSEVEGRIQDLEKYVEDTKIDLWSYNAELLVALENQHTIDLTDSEMNKLFEKTKKQLRENAEDMGNGCFKIYHKCDNACIGSIRNGTYDHEVYRDEALNNRFQIKGVELKSGYKDWILWISFAISCFLLCVALLGFIMWACQKGNIRCNICI

SEQ ID NO: 2529 - protein, 565 aa, Artificial Sequence; identical to SEQ ID NO: 2488
  derived and/or modified protein sequence (wt) from hemagglutinin__InfluenzaA__ACN32501

SEQ ID NO: 2530 - protein, 566 aa, Artificial Sequence
  derived and/or modified protein sequence (wt) from hemagglutinin__InfluenzaA__ACN32534
MKTIIALSYILCLVFAQKLPGNDNSTATLCLGHHAVPNGTLVKTITNDQIEVTNATELVQSSSTGRICDSPHQILDGENCTLIDALLGDPHCDGFQNKEWDLFVERSKAYSNCYPYDVPDYVSLRSLVASSGTLEFNNESFNWTGVAQNGTSSACKRRSDKSFFSRLNWLHQLKYKYPALNVTMPNNEKFDKLYIWGVHHPGTDSDQISLYAQASGRVTVSTKRSQQTVIPNIGSGPWVRGVSSRISIYWTIVKPGDILLINSTGNLIAPRGYFKIRSGKSSIMRSDAPIGKCNSECITPNGSIPNGKPFQNVNRITYGACPRYVKQNTLKLATGMRNVPEKQTRGIFGAIAGFIENGWEGMMDGWYGFRHQNSEGTGQAADLKSTQAAINQINGKLNRLIEKTNEKFHQIEKEFSEVEGRIQDLEKYVEDTKIDLWSYNAELLVALENQHTIDLTDSEMNKLFERTKKQLRENAEDMGNGCFKIYHKCDNACIGSIRNGTYDHDVYRDEALNNRFQIKGVELKSGYKDWILWISFAISCFLLCIVLLGFIMWACQKGNIRCNICI

SEQ ID NO: 2531 - protein, 566 aa, Artificial Sequence
  derived and/or modified protein sequence (wt) from hemagglutinin__InfluenzaA__ACN32545
MKTIIALSYILCLVFAQKLPGNDNSTATLCLGHHAVPNGTIVKTITNDQIEVTNATELVQSSSTGEICDSPHQILDGENCTLIDALLGDPHCDGFQNKKWDLFVERSKAYSNCYPYDVPDYASLRSLIASSGTLEFNNESFNWTGVTQNGTSSACIRRSNNSFFSRLNWLTHLKFKYPALNVTMPNNEKFDKLYIWGVHHPGTDNDQIFLYAQASGRITVSTKRSQQTVIPNIGSRPRVRNIPSRISIYWTIVKPGDILLINSTGNLIAPRGYFKIRSGKSSIMRSDAPIGKCNSECITPNGSIPNDKPFQNVNRITYGACPRYVKQNTLKLATGMRNVPEKQTRGIFGAIAGFIENGWEGMVDGWYGFRHQNSEGIGQAADLKSTQAAIDQINGKLNRLIGKTNEKFHQIEKEFSEVEGRIQDLEKYVEDTKIDLWSYNAELLVALENQHTIDLTDSEMNKLFEKTKKQLRENAEDMGNGCFKIYHKCDNACIGSIRNGTYDHDVYRDEALNNRFQIKGVELKSGYKDWILWISFAISCFLLCVALLGFIMWACQKGNIRCNICI

SEQ ID NO: 2532 - protein, 565 aa, Artificial Sequence
  derived and/or modified protein sequence (wt) from hemagglutinin__InfluenzaA__ACN32793
MKVKLLVLLCTFTATYADTICIGYHANNSTDTVDTVLEKNVTVTHSVNLLEDSHNGKLCLLKGIAPLQLGNCSVAGWILGNPECELLISKESWSYIVETPNPENGTCYPGYFADYEELREQLSSVSSFERFEIFPKESSWPNHTVTGVSASCSHNGKSSFYRNLLWLTGKNGLYPNLSESYANNKEKEVLVLWGVHHPPNIGDQRALYHTENAYVSVVSSHYSRRFTPEIAKRPKVRDQEGRINYYWTLLEPGDTIIFEANGNLIAPRFAFALSRGFGSGIITSNAPMDECDAKCQTPQGAINSSLPFQNVHPVTIGECPKYVRSTKLRMVTGLRNIPSIQSRGLFGAIAGFIEGGWTGMVDGWYGYHHQNEQGSGYAADQKSTQNAINGITNKVNSVIEKMNTQFTAVGKEFNKLERRMENLNKKVDDGFLDIWTYNAELLVLLENERTLDFHDSNVKNLYEKVKSQLKNNAKEIGNGCFEFYHKCNDECMESVKNGTYDYPKYSEESKLNREKIDGVKLESMGVYQILAIYSTVASSLVLLVSLGAISFWMCSNGSLQCRICI

SEQ ID NO: 2533 - protein, 565 aa, Artificial Sequence; identical to SEQ ID NO: 1957
  derived and/or modified protein sequence (wt) from hemagglutinin__InfluenzaA__ACN32804

SEQ ID NO: 2534 - protein, 565 aa, Artificial Sequence; identical to SEQ ID NO: 1945
  derived and/or modified protein sequence (wt) from hemagglutinin__InfluenzaA__ACN32815

SEQ ID NO: 2535 - protein, 565 aa, Artificial Sequence; identical to SEQ ID NO: 1955
  derived and/or modified protein sequence (wt) from hemagglutinin__InfluenzaA__ACN32826

SEQ ID NO: 2536 - protein, 566 aa, Artificial Sequence; identical to SEQ ID NO: 2434
  derived and/or modified protein sequence (wt) from hemagglutinin__InfluenzaA__ACN32848

SEQ ID NO: 2537 - protein, 566 aa, Artificial Sequence
  derived and/or modified protein sequence (wt) from hemagglutinin__InfluenzaA__ACN32870
MKTIIALSYILCLVFAQKFPGNDNSTATLCLGHHAVPNGTIVKTITNDQIEVTNATELVQSSSTGEICDSPHQILDGENCTLIDALLGDPQCDGFQNKNWDLFVERSKAYSNCYPYDVPDYASLRSLVASSGTLEFNNESFNWTGVTQNGTSSACIRRSNNSFFSRLNWLTHSKFKYPALNVTMPNNENFDKLYIWGVHHPGTDNDQIFLYAQASGRITVSTKRSQQTVIPNIGSRPRVRNIPSRISIYWTIVKPGDILLINSTGNLIAPRGYFKIRSGKSSIMRSDAPIGKCNSECITPNGSIPNDKPFQNVNRITYGACPRYVKQNTLKLATGMRNVPEKQTRGIFGAIAGFIENGWEGMVDGWYGFRHQNSEGIGQAADLKSTQAAIDQINGKLNRLIGKTNEKFHQIEKEFSEVEGRIQDLEKYVEDTKIDLWSYNAELLVALENQHTIDLTDSEMNKLFEKTKKQLRENAEDMGNGCFKIYHKCDNACIGSIRNGTYDHDVYRDEALNNRFQIKGVELKSGYKDWILWISFAISCFLLCIALLGFIMWACQKGNIRCNICI

SEQ ID NO: 2538 - protein, 566 aa, Artificial Sequence; identical to SEQ ID NO: 2537
  derived and/or modified protein sequence (wt) from hemagglutinin__InfluenzaA__ACN32892

SEQ ID NO: 2539 - protein, 566 aa, Artificial Sequence; identical to SEQ ID NO: 2434
  derived and/or modified protein sequence (wt) from hemagglutinin__InfluenzaA__ACN32903

SEQ ID NO: 2540 - protein, 566 aa, Artificial Sequence
  derived and/or modified protein sequence (wt) from hemagglutinin__InfluenzaA__ACN32914
MKTIIALSYILCLAFAQKLPGNDNSTATLCLGHHAVPNGTIVKTITNDQIEVTNATELVQSSSTGEICDSPHQILDGENCTLIDALLGDPQCDGFQNKKWDLFVERSKAYSNCYPYDVPDYASLRSLVASSGTLEFNNESFNWTGVTQNGTSSACIRRSNNSFFSRLNWLTHLKFKYPALNVTMPNNEQFDKLYIWGVHHPGTDNDQIFLYAQASGRITVSTKRSQQTVIPNIGSRPRVRNIPSRISIYWTIVKPGDILLINSTGNLIAPRGYFKIRSGKSSIMRSDAPIGKCNSECITPNGSIPNDKPFQNVNRITYGACPRYVKQNTLKLATGMRNVPEKQTRGIFGAIAGFIENGWEGMVDGWYGFRHQNSEGRGQAADLKSTQAAIDQINGKLNRLIGKTNEKFHQIEKEFSEVEGRIQDLEKYVEDTKIDLWSYNAELLVALENQHTIDLTDSEMNKLFEKTKKQLRENAEDMGNGCFKIYHKCDNACIGSIRNGTYDHDVYRDEALNNRFQIKGVELKSGYKDWILWISFAISCFLLCVALLGFIMWACQKGNIRCNICI

SEQ ID NO: 2541 - protein, 566 aa, Artificial Sequence; identical to SEQ ID NO: 2434
  derived and/or modified protein sequence (wt) from hemagglutinin__InfluenzaA__ACN32925

SEQ ID NO: 2542 - protein, 566 aa, Artificial Sequence
  derived and/or modified protein sequence (wt) from hemagglutinin__InfluenzaA__ACN32936
MKTIIALSYILCLVFAQKFPGNDNSTATLCLGHHAVPNGTIVKTITNDQIEVTNATELVQSSSTGEICDSPHQILDGENCTLIDALLGDPQCDGFQNKNWDLFVERSKAYSNCYPYDVPDYASLRSLVASSGTLEFNNESFNWTGVTQNGTSSACIRRSNNSFFSRLNWLTHSKFKYPALNVTMPNNENFDKLYIWGVHHPGTDNDQIFLYAQASGRITVSTKRSQQTVIPNIGSRPRIKNIPSRISIYWTIVKPGDILLINSTGNLIAPRGYFKIRSGKSSIMRSDAPIGKCNSECITPNGSIPNDKPFQNVNRITYGACPRYVKQNTLKLATGMRNVPEKQTRGIFGAIAGFIENGWEGMVDGWYGFRHQNSEGIGQAADLKSTQAAIDQINGKLNRLIGKTNEKFHQIEKEFSEVEGRIQDLEKYVEDTKIDLWSYNAELLVALENQHTIDLTDSEMNKLFEKTKKQLRENAEDMGNGCFKIYHKCDNACIGSIRNGTYDHDVYRDEALNNRFQIKGVELKSGYKDWILWISFAISCFLLCIALLGFIMWACQKGNIRCNICI

SEQ ID NO: 2543 - protein, 566 aa, Artificial Sequence; identical to SEQ ID NO: 2434
  derived and/or modified protein sequence (wt) from hemagglutinin__InfluenzaA__ACN32947

SEQ ID NO: 2544 - protein, 566 aa, Artificial Sequence
  derived and/or modified protein sequence (wt) from hemagglutinin__InfluenzaA__ACN32958
MKTIIALSYILCLVFAQKLPGNDNSTATLCLGHHAVPNGTIVKTITNDQIEVTNATELVQSSSTGEICDSPHQILDGENCTLIDALLGDPQCDGFQNKKWDLFVERNKAYSNCYPYDVPDYASLRSLVASSGTLEFNNESFNWTGVTQNGTSSACIRRSNNSFFSRLNWLTHLKFKYPALNVTMPNNEQFDKLYIWGVHHPGTDNDQIFLYAQASGRITVSTKRSQQTVIPNIGSRPRVRNIPSRISIYWTIVKPGDILLINSTGNLIAPRGYFKIRSGKSSIMRSDAPIGKCNSECITPNGSIPNDKPFQNVNRITYGACPRYVKQNTLKLATGMRNVPEKQTRGIFGAIAGFIENGWEGMVDGWYGFRHQNSEGRGQAADLKSTQAAIDQINGKLNRLIGKTNEKFHQIEKEFSEVEGRIQDLEKYVEDTKIDLWSYNAELLVALENQHTIDLTDSEMNKLFEKTKKQLRENAEDMGNGCFKIYHKCDNACIGSIRNGTYDHDVYRDEALNNRFQIKGVELKSGYKDWILWISFAISCFLLCVALLGFIMWACQKGNIRCNICI

SEQ ID NO: 2545 - protein, 566 aa, Artificial Sequence
  derived and/or modified protein sequence (wt) from hemagglutinin__InfluenzaA__ACN32969
MKTIIALSYILCLVSAQKLPGNDNSTATLCLGHHAVPNGTIVKTITNDQIEVTNATELVQSSSTGEICDSPHQVLDGENCTLIDALLGDPQCDGFQNKKWDLFVERSKAYSNCYPYDVPDYASLRSLVASSGTLEFNNESFNWTGVTQNGTSSACIRRSNNSFFSRLNWLTHSKFKYPALNVTMPNNEEFDKLYIWGVHHPGTDNDQIFLYAQASGRITVSTKRSQQTVIPNIGSRPRVRNIPSRISIYWTIVKPGDILLINSTGNLIAPRGYFKLRSGKSSIMRSDAPIGKCNSECITPNGSIPNDKPFQNVNRITYGACPRYVKQNTLKLATGMRNVPEKQTRGIFGAIAGFIENGWEGMVDGWYGFRHQNSEGIGQAADLKSTQAAIDQINGKLNRLIGKTNEKFHQIEKEFSEVEGRIQDLEKYVEDTKIDLWSYNAELLVALENQHTIDLTDSEMNKLFEKTKKQLRENAEDMGNGCFKIYHKCDNACIGSIRNGTYDHEVYRDEALNNRFQIKGVELKSGYKDWILWISFAISCFLLCVALLGFIMWACQKGNIRCNICI

SEQ ID NO: 2546 - protein, 566 aa, Artificial Sequence
  derived and/or modified protein sequence (wt) from hemagglutinin__InfluenzaA__ACN32980
MKTIIALSYILCLVFAQKLPGNDNSTATLCLGHHAVPNGTIVKTITNDQIEVTNATELVQSSSTGEICDSPHQILDGENCTLIDALLGDPQCDGFQNKKWDLFVERSKAHSNCYPYDVPDYASLRSLVASSGTLEFNNESFNWTGVTQNGTSSACIRRSKNSFFSRLNWLTHLKFKYPALNVTMPNDEKFDKLYIWGVHHPGTDNDQIFLYAQASGRITVSTKRSQQTVIPNIGSRPRVRNIPSRISIYWTIVKPGDILLINSTGNLIAPRGYFKIRSGKSSIMRSDAPIGKCNSECITPNGSIPNDKPFQNVNRITYGACPRYVKQNTLKLATGMRNVPEKQTRGIFGAIAGFIENGWEGMVDGWYGFRHQNSEGIGQAADLKSTQAAIDQINGKLNRLIGKTNEKFHQIEKEFSEVEGRIQDLEKYVEDTKIDLWSYNAELLVALENQHTIDLTDSEMNKLFEKTKKQLRENAEDMGNGCFKIYHKCDNACVGSIRNGTYDHDVYRDEALNNRFQIKGVELKSGYKDWILWISFAISCFLLCVALLGFIMWACQKGNIRCNICI

SEQ ID NO: 2547 - protein, 566 aa, Artificial Sequence; identical to SEQ ID NO: 2434
  derived and/or modified protein sequence (wt) from hemagglutinin__InfluenzaA__ACN32991

SEQ ID NO: 2548 - protein, 566 aa, Artificial Sequence; identical to SEQ ID NO: 2434
  derived and/or modified protein sequence (wt) from hemagglutinin__InfluenzaA__ACN33002

SEQ ID NO: 2549 - protein, 566 aa, Artificial Sequence; identical to SEQ ID NO: 2434
  derived and/or modified protein sequence (wt) from hemagglutinin__InfluenzaA__ACN33013

SEQ ID NO: 2550 - protein, 566 aa, Artificial Sequence
  derived and/or modified protein sequence (wt) from hemagglutinin__InfluenzaA__ACN33035
MKTIIALSYILCLVFAQKLPGNDNSTATLCLGHHAVPNGTIVKTITNDQIEVTNATELVQSSSTGEICDSPHQILDGENCTLIDALLGDPQCDGFQNKKWDLFVERSKAYSNCYPYDVPDYASLRSLVASSGTLEFNNESFNWTGVTQNGTSSACIRRSNNSFFSRLNWLTHLKFKYPALNVTMPNNEQFDKLYVWGVHHPGTDNDQIFLYAQASGRITVSTKRSQQTVIPNIGSRPRVRNIPSRISIYWTIVKPGDILLINSTGNLIAPRGYFKIRSGKSSIMRSDAPIGKCNSECITPNGSIPNDKPFQNVNRITYGACPRYVKQNTLKLATGMRNVPEKQTRGIFGAIAGFIENGWEGMVDGWYGFRHQNSEGRGQAADLKSTQAAIDQINGKLNRLIGKTNEKFHQIEKEFSEVEGRIQDLEKYVEDTKIDLWSYNAELLVALENQHTIDLTDSEMNKLFEKTKKQLRENAEDMGNGCFKIYHKCDNACIGSIRNGTYDHDVYRDEALNNRFQIKGVELKSGYKDWILWISFAISCFLLCVALLGFIMWACQKGNIRCNICI

SEQ ID NO: 2551 - protein, 566 aa, Artificial Sequence; identical to SEQ ID NO: 2434
  derived and/or modified protein sequence (wt) from hemagglutinin__InfluenzaA__ACN33046

SEQ ID NO: 2552 - protein, 566 aa, Artificial Sequence; identical to SEQ ID NO: 2434
  derived and/or modified protein sequence (wt) from hemagglutinin__InfluenzaA__ACN33057

SEQ ID NO: 2553 - protein, 566 aa, Artificial Sequence; identical to SEQ ID NO: 2434
  derived and/or modified protein sequence (wt) from hemagglutinin__InfluenzaA__ACN33068

SEQ ID NO: 2554 - protein, 566 aa, Artificial Sequence; identical to SEQ ID NO: 2537
  derived and/or modified protein sequence (wt) from hemagglutinin__InfluenzaA__ACN33079

SEQ ID NO: 2555 - protein, 565 aa, Artificial Sequence
  derived and/or modified protein sequence (wt) from hemagglutinin__InfluenzaA__ACN33090
MKVKLLILLCTFTATYADTICIGYHANNSTDTVDTVLEKNVTVTHSVNLLEDSHNGKLCLLKGIAPLQLGNCSVAGWILGNPECELLISKESWSYIVETPNPENGTCYPGYFADYEELREQLSSVSSFERFEIFPKESSWPNHTVTGVSASCSHNGKSSFYRNLLWLTGKNGLYPNLSKSYANNKEKEVLVLWGVHHPSNIGDQRALYHTENAYVSVVSSHYSRRFTPEIAKRPKVRDQEGRINYYWTLLEPGDTIIFEANGNLIAPRFAFALSRGFGSGIITSNAPMDECDAKCQTPQGAINSSLPFQNVHPVTIGECPKYVRSTKLRMVTGLRNIPSIQSRGLFGAIAGFIEGGWTGMVDGWYGYHHQNEQGSGYAADQKSTQNAINGITNKVNSVIEKMNTQFTAVGKEFNKLERRMENLNKKVDDGFLDIWTYNAELLVLLENERTLDFHDSNVKNLYEKVKSQLKNNAKEIGNGCFEFYHKCNDECMESVKNGTYDYPKYSEESKLNREKIDGVKLESMGVYQILAIYSTVASSLVLLVSLGAISFWMCSNGSLQCRICI

SEQ ID NO: 2556 - protein, 565 aa, Artificial Sequence; identical to SEQ ID NO: 1914
  derived and/or modified protein sequence (wt) from hemagglutinin__InfluenzaA__ACN33101

SEQ ID NO: 2557 - protein, 566 aa, Artificial Sequence; identical to SEQ ID NO: 2537
  derived and/or modified protein sequence (wt) from hemagglutinin__InfluenzaA__ACN33112

SEQ ID NO: 2558 - protein, 565 aa, Artificial Sequence; identical to SEQ ID NO: 2488
  derived and/or modified protein sequence (wt) from hemagglutinin__InfluenzaA__ACN33123

SEQ ID NO: 2559 - protein, 565 aa, Artificial Sequence; identical to SEQ ID NO: 2488
  derived and/or modified protein sequence (wt) from hemagglutinin__InfluenzaA__ACN33145

SEQ ID NO: 2560 - protein, 566 aa, Artificial Sequence; identical to SEQ ID NO: 2434
  derived and/or modified protein sequence (wt) from hemagglutinin__InfluenzaA__ACN33156

SEQ ID NO: 2561 - protein, 566 aa, Artificial Sequence
  derived and/or modified protein sequence (wt) from hemagglutinin__InfluenzaA__ACN33178
MKTIIALSYILCLVFAQKFPGNDNSTATLCLGHHAVPNGTIVKTITNDQIEVTNATELVQSSSTGEICDSPHQILDGENCTLIDALLGDPQCDGFQNKNWDLFVERSKAYSNCYPYDVPDYASLRSLVASSGTLEFNNESFNWTGVTQNGTSSACIRRSNNSFFSRLNWLTHSKFKYPALNVTMPNNENFDKLYIWGVHHPGTDNDQIFLYAQASGRITVSTKRSQQTVIPNIGSRPRVRNIPSRISIYWTIVKPGDILLINSTGNLIAPRGYFKIRSGKSSIMRSDAPIGKCNSECITPNGSIPNDKPFQNVNRITYGACPRYVKQNTLKLATGMRNVPEKQTRGIFGAIAGFIENGWEGMVDGWYGFRHQNSEGIGQAADLKSTQAAIDQINGKLNRLIGKTNEKFHQIEKEFSEVEGRIQDLEKYVEDTKIDLWSYNAELLVALENQHTIDLTDSEMNKLFEKTKKQLRENAEDMGNGCFKIYHKCDNACIGSIRNGTYDHDVYRDEALNNRFHIKGVELKSGYKDWILWISFAISCFLLCIALLGFIMWACQKGNIRCNICI

SEQ ID NO: 2562 - protein, 566 aa, Artificial Sequence; identical to SEQ ID NO: 2434
  derived and/or modified protein sequence (wt) from hemagglutinin__InfluenzaA__ACN33189

SEQ ID NO: 2563 - protein, 566 aa, Artificial Sequence
  derived and/or modified protein sequence (wt) from hemagglutinin__InfluenzaA__ACN33200
MKTIIALSYILCLVFAQKFPGNDNSTATLCLGHHAVPNGTIVKTITNDQIEVTNATELVQSSSTGEICDSPHQILDGENCTLIDALLGDPQCDGFQNKNWDLFVERSKAYSNCYPYDVPDYASLRSLVASSGTLEFNNESFNWTGVTQNGTSSACIRRSNNSFFSRLNWLTHSKFKYPALNVTMPNNENFDKLYIWGVHHPGTDNDQIFLYAQASGRITVSTKRSQQTVIPNIGSRPRVRNIPSRISIYWTIVEPGDILLINSTGNLIAPRGYFKIRSGKSSIMRSDAPIGKCNSECITPNGSIPNDKPFQNVNRITYGACPRYVKQNTLKLATGMRNVPEKQTRGIFGAIAGFIENGWEGMVDGWYGFRHQNSEGIGQAADLKSTQAAIDQINGKLNRLIGKTNEKFHQIEKEFSEVEGRIQDLEKYVEDTKIDLWSYNAELLVALENQHTIDLTDSEMNKLFEKTKKQLRENAEDMGNGCFKIYHKCDNACIGSIRNGTYDHDVYRDEALNNRFQIKGVELKSGYKDWILWISFAISCFLLCIALLGFIMWACQKGNIRCNICI

SEQ ID NO: 2564 - protein, 566 aa, Artificial Sequence
  derived and/or modified protein sequence (wt) from hemagglutinin__InfluenzaA__ACN33211
MKTIIALSYILCLVFAQKLPGNDNSTATLCLGHHAVPNGTIVKTITNDQIEVTNATELVQSSSTGEICDSPHQILDGENCTLIDALLGDPQCDGFQNKKWDLFVERSKAYSNCYPYDVPDYASLRSLVASSGTLEFNNESFNWTGVTQNGTSSACIRRSNNSFFSRLNWLTHLKFKYPALNVTMPNNEQFDKLYIWGVHHPGTDNDQIFLYAQASGRITVSTKRSQQTVIPNIGSRPRVRNIPSRISIYWTIVKPGDILLINSTGNLIAPRGYFKIRSGKSSIMRSDAPIGKCNSECITPNGSIPNDKPFQNVNRITYGACPRYVKQNTLKLATGMRNVPEKQTRGIFGAIAGFIENGWEGMVDGWYGFRHQNSEGRGQAADLKSTQAAIDQINGKLNRLIGKTNEKFHQIEKEFSEVEGRIQDLEKYVEDTKIDLWSYNAELLVALENQHTIDLTDSEMNKLFEKTKKQLRENAEDMGNGCFKIYHKCDNACIGSIRNGTYDHDVYRDEALSNRFQIKGVELKSGYKDWILWISFAISCFLLCVALLGFIMWACQKGNIRCNICI

SEQ ID NO: 2565 - protein, 565 aa, Artificial Sequence; identical to SEQ ID NO: 1956
  derived and/or modified protein sequence (wt) from hemagglutinin__InfluenzaA__ACN42981

SEQ ID NO: 2566 - protein, 565 aa, Artificial Sequence; identical to SEQ ID NO: 2190
  derived and/or modified protein sequence (wt) from hemagglutinin__InfluenzaA__ACN42992

SEQ ID NO: 2567 - protein, 566 aa, Artificial Sequence; identical to SEQ ID NO: 2434
  derived and/or modified protein sequence (wt) from hemagglutinin__InfluenzaA__ACN43003

SEQ ID NO: 2568 - protein, 566 aa, Artificial Sequence
  derived and/or modified protein sequence (wt) from hemagglutinin__InfluenzaA__ACN43014
MKTIIALSYILCLVFAQKFPGNDNSTATLCLGHHAVPNGTIVKTITNDQIEVTNATELVQSSSTGEICDSPHQILDGENCTLIDALLGDPQCDGFQNKNWDLFVERSKAYSNCYPYDVPDYASLRSLVASSGTLEFNNESFNWIGVTQNGTSSACIRRSNNSFFSRLNWLTHSKFKYPALNVTMPNNENFDKLYIWGVHHPGTDNDQIFLYAQASGRITVSTKRSQQTVIPNIGSRPRVRNIPSRISIYWTIVKPGDILLINSTGNLIAPRGYFKIRSGKSSIMRSDAPIGNCNSECITPNGSIPNDKPFQNVNRITYGSCPRYVKQNTLKLATGMRNVPEKQTRGIFGAIAGFIENGWEGMVDGWYGFRHQNSEGIGQAADLKSTQAAIDQINGKLNRLIGKTNEKFHQIEKEFSEVEGRIQDLEKYVEDTKIDLWSYNAELLVALENQHTIDLTDSEMNKLFEKTKKQLRENAEDMGNGCFKIYHKCDNACIGSIRNGTYDHDVYRDEALNNRFQIKGVELKSGYKDWILWISFAISCFLLCIALLGFIMWACQKGNIRCNICI

SEQ ID NO: 2569 - protein, 566 aa, Artificial Sequence; identical to SEQ ID NO: 2434
  derived and/or modified protein sequence (wt) from hemagglutinin__InfluenzaA__ACN43025

SEQ ID NO: 2570 - protein, 566 aa, Artificial Sequence; identical to SEQ ID NO: 2434
  derived and/or modified protein sequence (wt) from hemagglutinin__InfluenzaA__ACN43036

SEQ ID NO: 2571 - protein, 566 aa, Artificial Sequence; identical to SEQ ID NO: 2434
  derived and/or modified protein sequence (wt) from hemagglutinin__InfluenzaA__ACN43047

SEQ ID NO: 2572 - protein, 566 aa, Artificial Sequence
  derived and/or modified protein sequence (wt) from hemagglutinin__InfluenzaA__ACN43058
MKTIIALSYILCLVFAQKLPGNDNSTATLCLGHHAVPNGTIVKTITNDQIEVTNATELVQSSSTGEICGSPHQILDGENCTLIDALLGDPQCDGFQNKKWDLFVERSKAYSNCYPYDVPDYASLRSLVASSGTLEFNNESFNWTGVTQNGTSSACIRRSNNSFFSRLNWLTHLKFKYPALNVTMPNNEQFDKLYIWGVHHPGTDNDQIFLYAQASGRITVSTKRSQQTVIPNIGSRPRVRNIPSRISIYWTIVKPGDILLINSTGNLIAPRGYFKIRSGKSSIMRSDAPIGKCNSECITPNGSIPNDKPFQNVNRITYGACPRYVKQNTLKLATGMRNVPEKQTRGIFGAIAGFIENGWEGMVDGWYGFRHQNSEGRGQAADLKSTQAAIDQINGKLNRLIGKTNEKFHQIEKEFSEVEGRIQDLEKYVEDTKIDLWSYNAELLVALENQHTIDLTDSEMNKLFEKTKKQLRENAEDMGNGCFKIYHKCDNACIGSIRNGTYDHDVYRDEALNNRFQIKGVELKSGYKDWILWISFAISCFLLCVALLGFIMWACQKGNIRCNICI

SEQ ID NO: 2573 - protein, 566 aa, Artificial Sequence; identical to SEQ ID NO: 2434
  derived and/or modified protein sequence (wt) from hemagglutinin__InfluenzaA__ACN43069

SEQ ID NO: 2574 - protein, 566 aa, Artificial Sequence; identical to SEQ ID NO: 2537
  derived and/or modified protein sequence (wt) from hemagglutinin__InfluenzaA__ACN43080

SEQ ID NO: 2575 - protein, 566 aa, Artificial Sequence
  derived and/or modified protein sequence (wt) from hemagglutinin__InfluenzaA__ACN72617
MEAKLFVLFCAFTALKADTICVGYHANNSTDTVDTILEKNVTVTHSVNLLENSHNGKLCSLNGKAPLQLGNCNVAGWILGNPECDLLLTANSWSYIIETSDSKNGACYPGEFADYEELREQLSTVSSFERFEIFPKATSWPNHETTKGTTVACSHSGANSFYRNLLWIVKKGNSYPKLSKSYTNNKGKEVLVIWGVHHPPTDSDQQTLYQNKHTYVSVGSSKYYQRFTPEIVTRPKVREQAGRMNYYWTLLDQGDTITFEATGNLIAPWHAFALNKGSNSGIMMSDAHVHNCTTKCQTPHGALKGNLPFQNVHPITIGECPKYVKSTQLRMATGLRNIPSIQSRGLFGAIAGFIEGGWTGMIDGWYGYHHQNEQGSGYAADRKSTQIAIDGISNKVNSVIEKMNIQFTSVGKEFNNLEKRIENLNKKVDDGFLDVWTYNAELLILLENERTLDFHDFNVKNLYEKVKSQLRNNAKEIGNGCFEFYHKCDNECMESVKNGTYNYPRYSEESKLNREEIDGVKLESVGVHQILAIYSTVASSLVLLVSLGAISFWMCSNGSLQCRICI

SEQ ID NO: 2576 - protein, 566 aa, Artificial Sequence
  derived and/or modified protein sequence (wt) from hemagglutinin__InfluenzaA__ACN72632
MKTVIALSYVFCLVFGQDLPGKGNNTATLCLGHHAVPNGTLVKTITDDQIEVTNATELVQNFSIGKICKNPHRILDGANCTLIDSLLGDPHCDGFQNEKWDLFIERSKAFSNCYPYDVPEYTSLRSLIASSGTLEFTNEDFNWTGVTQNGGSSACKRGPNNSFFSRLNWLYKSGNTYPMLNVTMPNSDDFDKLYIWGVHHPSTDREQTNLYIQASGKIIVSTKRSQQTIIPNIGSRPWVRGLSSRISIYWTIVKPGDILIINSNGNLIAPRGYFKIQTGKSSVMRSDAPIGTCNYECITPNGSIPNDKPFQNVNRITYGACPHYIKQNTLKLATGMRNIPERQTRGIFGAIAGFIENGWEGMVNGWYGFRHQNSEGIGQAADLKSTQAAINQINGKLNRVIEKTNEKFHQIEKEFSEVEGRIQDLERYVEDTKIDLWSYNAELLVALENQHTIDLTDSEMNKLFEKTRKQLRENAEDMGNGCFKIYHKCDNSCMESIRNGTYDHNEYRDEAVNNRFQIKSVELKSGYKDWILWISFAISCFLLCAVWLGFIIWACQKGNIRCNICI

SEQ ID NO: 2577 - protein, 566 aa, Artificial Sequence; identical to SEQ ID NO: 2434
  derived and/or modified protein sequence (wt) from hemagglutinin__InfluenzaA__ACN76478

SEQ ID NO: 2578 - protein, 566 aa, Artificial Sequence
  derived and/or modified protein sequence (wt) from hemagglutinin__InfluenzaA__ACN76489
MKTIIALGYILCLVSAQKLPGNDNSTATLCLGHHAVPNGTIVKTITNDQIEVTNATELVQSSSTGEICDSPHQVLDGENCTLIDALLGDPQCDGFQNKKWDLFVERSKAYSNCYPYDVPDYASLRSLVASSGTLEFNNESFNWTGVTQNGTSSACIRRSNNSFFSRLNWLTHLKFKYPALNVTMPNNEEFDKLYIWGVHHPGTDNDQIFLYAQASGRITVSTKRSQQTVIPNIGSRPRVRNIPSRISIYWTIVKPGDILLINSTGNLIAPRGYFKIRSGKSSIMRSDAPIGKCNSECITPNGSIPNDKPFQNVNRITYGACPRYVKQNTLKLATGMRNVPEKQTRGIFGAIAGFIENGWEGMVDGWYGFRHQNSEGIGQAADLKSTQAAIDQINGKLNRLIGKTNEKFHQIEKEFSEVEGRIQDLEKYVEDTKIDLWSYNAELLVALENQHTIDLTDSEMNKLFEKTKKQLRENAEDMGNGCFKIYHKCDNACIGSIRNGTYDHEVYRDEALNNRFQIKGVELKSGYKDWILWISFAISCFLLCVALLGFIMWACQKGNIRCNICI

SEQ ID NO: 2579 - protein, 566 aa, Artificial Sequence; identical to SEQ ID NO: 2434
  derived and/or modified protein sequence (wt) from hemagglutinin__InfluenzaA__ACN76500

SEQ ID NO: 2580 - protein, 566 aa, Artificial Sequence; identical to SEQ ID NO: 2434
  derived and/or modified protein sequence (wt) from hemagglutinin__InfluenzaA__ACN76511

SEQ ID NO: 2581 - protein, 566 aa, Artificial Sequence; identical to SEQ ID NO: 2434
  derived and/or modified protein sequence (wt) from hemagglutinin__InfluenzaA__ACN76522

SEQ ID NO: 2582 - protein, 566 aa, Artificial Sequence; identical to SEQ ID NO: 2434
  derived and/or modified protein sequence (wt) from hemagglutinin__InfluenzaA__ACO36331

SEQ ID NO: 2583 - protein, 566 aa, Artificial Sequence
  derived and/or modified protein sequence (wt) from hemagglutinin__InfluenzaA__ACO36342
MKTIIALSYILCLVFAQKFPGNDNSTATLCLGHHAVPNGTIVKTITNDQIEVTNATELVQSSSTGEICDSPHQILDGENCTLIDALLGDPQCDGFQNKNWDLFVERSKAYSNCYPYDVPDYASLRSLVASSGTLEFNNESFNWTGVTQNGTSSACIRRSNNSFFSRLNWLTHSKFKYPALNVTMPNNENFDKLYIWGVHHPGTDNDQIFLYAQASGRITVSTKRSQQTVIPNIGSRPRVRNIPSRISIYWTIVKPGDILLINSTGNLIAPRGYFKIRSGKSSIMRSDAPIGKCNSECITPNGSIPNDKPFQNVNRITYGACPRYVKQNTLKLATGMRNVPEKQTRGIFGAIAGFIENGWEGMVDGWYGFRHQNSEGIGQAADLKSTQAAIDQINGKLNRLIGKTNEKFHQIEKEFSEIEGRIQDLEKYVEDTKIDLWSYNAELLVALENQHTIDLTDSEMNKLFEKTKKQLRENAEDMGNGCFKIYHKCDNACIGSIRNGTYDHDVYRDEALNNRFQIKGVELKSGYKDWILWISFAISCFLLCIALLGFIMWACQKGNIRCNICI

SEQ ID NO: 2584 - protein, 566 aa, Artificial Sequence
  derived and/or modified protein sequence (wt) from hemagglutinin__InfluenzaA__ACO36364
MKTIIALSYILCLVFAQKLPGNDNSTATLCLGHHAVPNGTIVKTITNDQIEVTNATELVQSSSTGEICDSPHQILDGENCTLIDALLGDPQCDGFQNKKWDLFVERSKAYSNCYPYDVPDYASLRSLVASSGTLEFNNESFNWTGVTQNGTSSACIRRSNNSFFSRLNWLTHLKFKYPALNVTMPNNEKFDKLYIWGVHHPGTDNDQIFLYAQASGRITVSTKRSQQTVIPNIGSRPRVRNIPSRISIYWTIVKPGDILLINSTGNLIAPRGYFKIRSGKSSIMRSDAPIGKCNSECITPNGSIPNDKPFQNVNRITYGACPRYVKQNTLKLATGMRNVPEKQTRGIFGAIAGFIENGWEGMVDGWYGFRHQNSEGTGQAADLKSTQAAIDQINGKLNRLIGKTNEKFHQIEKEFSEVEGRIQDLEKYVEDTKIDLWSYNAELLVALENQHTIDLTDSEMNKLFEKTKKQLRENAEDMGNGCFKIYHKCDNACIGSIRNGTYDHDVYRDEALNNRFQIKGVELKSGYKDWILWISFAISCFLLCVALLGFIMWACQKGNIRCNICI

SEQ ID NO: 2585 - protein, 566 aa, Artificial Sequence; identical to SEQ ID NO: 2301
  derived and/or modified protein sequence (wt) from hemagglutinin__InfluenzaA__ACO36375

SEQ ID NO: 2586 - protein, 565 aa, Artificial Sequence; identical to SEQ ID NO: 2488
  derived and/or modified protein sequence (wt) from hemagglutinin__InfluenzaA__ACO36397

SEQ ID NO: 2587 - protein, 566 aa, Artificial Sequence; identical to SEQ ID NO: 2301
  derived and/or modified protein sequence (wt) from hemagglutinin__InfluenzaA__ACO36408

SEQ ID NO: 2588 - protein, 566 aa, Artificial Sequence; identical to SEQ ID NO: 1928
  derived and/or modified protein sequence (wt) from hemagglutinin__InfluenzaA__ACO36419

SEQ ID NO: 2589 - protein, 566 aa, Artificial Sequence; identical to SEQ ID NO: 1928
  derived and/or modified protein sequence (wt) from hemagglutinin__InfluenzaA__ACO36430

SEQ ID NO: 2590 - protein, 566 aa, Artificial Sequence
  derived and/or modified protein sequence (wt) from hemagglutinin__InfluenzaA__ACO36441
MKTIIALSYILCLVFAQKLPGNDNSTATLCLGHHAVPNGTIVKTITNDQIEVTNATELVQSSSTGGICDSPHQILDGENCTLIDALLGDPQCDGFQNKKWDLFVERSKAYSNCYPYDVPDYASLRSLVASSGTLEFNNESFDWTGVTQNGTSSACKRRSNKSFFSRLNWLTHLKYKYPALNVTMPNNEKFDKLYIWGVHHPGTDSDQISLYAQASGRITVSTKRSQQTVIPNIGSRPRVRDVSSRISIYWTIVKPGDILLINSTGNLIAPRGYFKIRSGKSSIMRSDAPIGKCNSECITPNGSIPNDKPFQNVNRITYGACPRYVKQNTLKLATGMRNVPEKQTRGIFGAIAGFIENGWEGMVDGWYGFRHQNSEGTGQAADLKSTQAAINQINGKLNRLIGKTNEKFHQIEKEFSEVEGRIQDLEKYVEDTKIDLWSYNAELLVALENQHTIDLTDSEMNKLFERTKKQLRENAEDMGNGCFKIYHKCDNACIGSIRNGTYDHDVYRDEALNNRFQIKGVELKSGYKDWILWISFAISCFLLCVALLGFIMWACQKGNIRCDICI

SEQ ID NO: 2591 - protein, 566 aa, Artificial Sequence
  derived and/or modified protein sequence (wt) from hemagglutinin__InfluenzaA__ACO36452
MKTIIALSYILCLVFAQKLPGNDNSTATLCLGHHAVPNGTIVKTITNDQIEVTNATELVQSSSTGGICDSPHQILDGENCTLIDALLGDPQCDGFQNKKWDLFVERSKAYSNCYPYDVPDYASLRSLVASSGTLEFNNESFDWTGVTQNGTSSSCKRRSNNSFFSRLNWLTHLKYKYPALNVTMPNNEKFDKLYIWGVHHPGTDSDQISLYAQASGRITISTKRSQQTVIPNIGSRPRVRDVSSRISIYWTIVKPGDILLINSTGNLIAPRGYFKIRSGKSSIMRSDAPIGKCNSECITPNGSIPNDKPFQNVNRITYGACPRYVKQNTLKLATGMRNVPEKQTRGIFGAIAGFIENGWEGMVDGWYGFRHQNSEGTGQAADLKSTQAAINQINGKLNRLIGKTNEKFHQIEKEFSEVEGRIQDLEKYVEDTKIDLWSYNAELLVALENQHTIDLTDSEMNKLFERTKKQLRENAEDMGNGCFKIYHKCDNACIGSIRNGTYDHDVYRDEALNNRFQIKGVELKSGYKDWILWISFAISCFLLCVALLGFIMWACQKGNIRCNICI

SEQ ID NO: 2592 - protein, 566 aa, Artificial Sequence
  derived and/or modified protein sequence (wt) from hemagglutinin__InfluenzaA__ACO36463
MKTIIALSYILCLVFAQKLPGNDNSTATLCLGHHAVPNGTIVKTITNDQIEVTNATELVQSSSTGGICDSPHQILDGENCTLIDALLGDPQCDGFQNKKWDLFIERSKAYSNCYPYDVPDYASLRSLVASSGTLEFNNESFNWTGVTQNGTSSACQRRSNKSFFSRLNWLTHLKFKYPALNVTMPNNEKFDKLYIWGVHHPGTDNDQISLYAQTSGRITVSTKRSQQTVIPNIGSRPRVRDVPSRISIYWTIVKPGDILLINSTGNLIAPRGYFKIRSGKSSIMRSDAPIGKCNSECITPNGSIPNDKPFQNVNRITYGACPRYVKQNTLKLATGMRNVPERQTRGIFGAIAGFIENGWEGMVDGWYGFRHQNSEGTGQAADLKSTQAAINQINGKLNRLIGKTNEKFHQIEKEFSEVEGRIQDLEKYVEDTKIDLWSYNAELLVALENQHTIDLTDSEMNKLFERTKKQLRENAEDMGNGCFKIYHKCDNACIGSIRNGTYDHDVYRDEALNNRFQIKGVELKSGYKDWILWISFAISCFVLCVALLGFIMWACQKGNIRCNICI

SEQ ID NO: 2593 - protein, 566 aa, Artificial Sequence
  derived and/or modified protein sequence (wt) from hemagglutinin__InfluenzaA__ACO36474
MKTIIALSYILCLVFAQKLPGNDNSTATLCLGHHAVPNGTIVKTITNDQIEVTNATELVQSSSTGGICDSPHQILDGENCTLIDALLGDPQCDGFQNKKWDLFVERSKAYSNCYPYDVPDYASLRSLVASSGTLEFNNESFDWTGVTQNGTSSSCKRRSNNSFFSRLNWLTHLRYKYPALNVTMPNNEKFDKLYIWGVHHPGTDSDQISLYAQASGRITVSTKRSQQTVIPNIGSRPRVRDVSSRISIYWTIVKPGDILLINSTGNLIAPRGYFKIRSGKSSIMRSDAPIGKCNSECITPNGSIPNDKPFQNVNRITYGDCPRYVKQNTLKLATGMRNVPEKQTRGIFGAIAGFIENGWEGMVDGWYGFRHQNSEGTGQAADLKSTQAAINQINGKLNRLIGKTNEKFHQIEKEFSEVEGRIQDLEKYVEDTKIDLWSYNAELLVALENQHTIDLTDSEMNKLFERTKKQLRENAEDMGNGCFKIYHKCDNACIGSIRNGTYDHDVYRDEALNNRFQIKGVELKSGYKDWILWISFAISCFLLCVALLGFIMWACQKGNIRCNICI

SEQ ID NO: 2594 - protein, 566 aa, Artificial Sequence
  derived and/or modified protein sequence (wt) from hemagglutinin__InfluenzaA__ACO36496
MKTIIALSYILCLVFAQKLPGNDNSTATLCLGHHAVPNGTIVKTITNDQIEVTNATELVQSSSTGGICDSPHQILDGENCTLIDALLGDPQCDGFQNKKWDLFVERSKAYSNCYPYDVPDYASLRSLVASSGTLEFNNESFNWTGVTQNGTSSACKRRSNNGFFSRLNWLTHLKFKYPALNVTMPNNEKFDKLYIWGVHHPGTDNDQISLYAQASGRITVSTKRSQQTVIPNIGSRPRVRDISSRISIYWTIVKPGDILLINSTGNLIAPRGYFKIRSGKSSIMRSDAPIGKCNSECITPNGSIPNDKPFQNVNRITYGACPRYVKQNTLKLATGMRNVPETQTRGIFGAIAGFIENGWEGMVDGWYGFRHQNSEGTGQAADLKSTQAAINQINGKLNRLIGKTNEKFHQIEKEFSEVEGRIQDLEKYVEDTKIDLWSYNAELLVALENQHTIDLTDSEMNKLFERTKKQLRENAEDMGNGCFKIYHKCDNACIGSIRNGTYDHDVYRDEALNNRFQIKGVELKSGYKDWILWISFAISCFLLCVALLGFIMWACQKGNIRCNICI

SEQ ID NO: 2595 - protein, 566 aa, Artificial Sequence
  derived and/or modified protein sequence (wt) from hemagglutinin__InfluenzaA__ACO36518
MKTIIALSYILCLVFAQKLPGNDNSTATLCLGHHAVPNGTIVKTITNDQIEVTNATELVQSSSTGGICDSPHQILDGENCTLIDALLGDPQCDGFQNKKWDLFVERSKAYSNCYPYDVPDYASLRSLVASSGTLEFNNESFNWTGVTQNGTSSACKRRSNKSFFSRLNWLTHLKFKYPALNVTMPNNEKFDKLYIWGVHHPGTDNDQISLYAQASGRITVSTKRSQQTVIPNIGSRPRVRDVPSRISIYWTIVKPGDILLINSTGNLIAPRGYFKIRSGKSSIMRSDAPIGKCNSECITPNGSIPNDKPFQNVNRITYGTCPRYVKQNTLKLATGMRNVPEKQTRGIFGAIAGFIENGWEGMVDGWYGFRHQNSEGTGQAADLKSTQAAINQINGKLNRLIGKTNEKFHQIEKEFSEVEGRIQDLEKYVEDTKIDLWSYNAELLVALENQHTIDLTDSEMNKLFERTKKQLRENAEDMGNGCFKIYHKCDNACIGSIRNGTYDHDVYRDEALNNRFQIKGVELKLGYKDWILWISFAISCFLLCVALLGFIMWACQKGNIRCNICI

SEQ ID NO: 2596 - protein, 566 aa, Artificial Sequence
  derived and/or modified protein sequence (wt) from hemagglutinin__InfluenzaA__ACO36551
MKTIIALSHILCLVFAQKPPGNDNSTATLCLGHHAVPNGTIVKTITNDQIEVTNATELVQSSSTGGICDSPHQILDGENCTLIDALLGDPQCDGFQNKKWDLFVERSKAYSNCYPYDVPDYASLRSLVASSGTLEFNNESFNWTGVTQNGTSSACKRRSNNSFFSRLNWLTHLKFKYPALNVTMPNNEKFDKLYIWGVHHPGTDNDQISLYAQASGRITVSTKRSQQTVIPNIGSRPRVRDISSRISIYWTIVKPGDILLINSTGNLIAPRGYFKIRSGKSSIMRSDAPIGKCNSECITPNGSIPNDKPFQNVNRITYGACPRYVKQNTLKLATGMRNVPETQTRGIFGAIAGFIENGWEGMVDGWYGFRHQNSEGTGQAADLKSTQAAINQINGKLNRLIGKTNEKFHQIEKEFSEVEGRIQDLEKYVEDTKIDLWSYNAELLVALENQHTIDLTDSEMNKLFERTKKQLRENAEDMGNGCFKIYHKCDNACIGSIRNETYDHDVYRDEALNNRFQIKGVELKSGYKDWILWISFAISCFLLCVALLGFIMWACQKGNIRCNICI

SEQ ID NO: 2597 - protein, 566 aa, Artificial Sequence
  derived and/or modified protein sequence (wt) from hemagglutinin__InfluenzaA__ACO36562
MKTIIALSYILCLVFAQKLPGNDNSTATLCLGHHAVPNGTIVKTITNDQIEVTNATELVQSSSTGGICDSPHQILDGENCTLIDALLGDPQCDGFQNKKWDLFVERSKAYSNCYPYDVPDYASLRSLVASSGTLEFNNESFNWTGVTQNGTSSACKRRSNNSFFSRLNWLTHLKFKYPALNVTMPNNEKFDKLYIWGVHHPGTDNDQISLYAQASGRITVSTKRSQQTVIPNIGSRPRVRDIPSRISIYWTIVKPGDILLINSTGNLIAPRGYFKIRSGKSSIMRSDAPIGKCNSECITPNGSIPNDKPFQNVNRITYGACPRYVKQNTLKLATGMRNVPETQTRGIFGAIAGFIENGWEGMVDGWYGFRHQNSEGTGQAADLKSTQAAINQINGKLNRLIGKTNEKFHQIEKEFSEVEGRIQDLEKYVEDTKIDLWSYNAELLVALENQHTIDLTDSEMNKLFERTKKQLRENAEDMGNGCFKIYHKCDNACIGSIRNETYDHDVYRDEALNNRFQIKGVELKSGYKDWILWISFAISCFLLCVALLGFIMWACQKGNIRCNICI

SEQ ID NO: 2598 - protein, 566 aa, Artificial Sequence
  derived and/or modified protein sequence (wt) from hemagglutinin__InfluenzaA__ACO36573
MKTIIALSYILCLVFAQKLPGNDNSTATLCLGHHAVPNGTIVKTITNDQIEVTNATELVQSSSTGGICDSPHQILDGENCTLIDALLGDPQCDGFQNKKWDLFVERSKAYSNCYPYDVPDYASLRSLVASSGTLEFNNESFNWTGVTQNGTSSACKRRSNNSFFSRLNWLTHLKFKYPALNVTMPNNEKFDKLYIWGVHHPGTDNDQISLYAQASGRITVSTKRSQQTVIPNIGSRPRVRDISSRISIYWTIVKPGDILLINSTGNLIAPRGYFKIRSGKSSIMRSDAPIGKCNSECITPNGSIPNDKPFQNVNRITYGACPRYVKQNTLKLATGMRNVPETQTRGIFGAIAGFIENGWEGMVDGWYGFRHQNSEGTGQAADLKSTQAAINQINGKLNRLIGKTNEKFHQIEKEFSEVEGRIQDLEKYVEDTKIDLWSYNAELLVALENQHTIDLTDSEMNKLFERTKKQLRENAEDMGNGCFKIYHKCDNACIGSIRNETYDHDVYRDEALNNRFQIKGVELKSGYKDWILWISFAISCFLLCVALLGFIMWACQKGNIRCNICI

SEQ ID NO: 2599 - protein, 566 aa, Artificial Sequence
  derived and/or modified protein sequence (wt) from hemagglutinin__InfluenzaA__ACO36584
MKTIIALSYILCLVFSQKLPGNDNSTATLCLGHHAVPNGTIVKTITNDQIEVTNATELVQSSSTGGICDSPHQILDGENCTLIDALLGDPQCDGFQNKKWDLFVERSKAYSNCYPYDVPDYASLRSLVASSGTLEFNNESFNWTGVTQNGTSSACKRRSNNSFFSRLNWLTHLKFKYPALNVTMPNNEKFDKLYIWGVHHPGTDNDQISLYAQASGRITVSTKKSQQTVIPNIGSRPRVRDISSRISIYWTIVKPGDILLINSTGNLIAPRGYFKIRSGKSSIMRSDAPIGKCNSECITPNGSIPNDKPFQNVNRITYGACPRYVKQNTLKLATGMRNVPETQTRGIFGAIAGFIENGWEGMVDGWYGFRHQNSEGTGQAADLKSTQAAINQINGKLNRLIGKTNEKFHQIEKEFSEVEGRIQDLEKYVEDTKIDLWSYNAELLVALENQHTIDLTDSEMNKLFERTKKQLRENAEDMGNGCFKIYHKCDNACIGSIRNETYDHDVYRDEALNNRFQIKGVELKSGYKDWILWISFAISCFLLCVALLGFIMWACQKGNIRCNICI

SEQ ID NO: 2600 - protein, 566 aa, Artificial Sequence; identical to SEQ ID NO: 630
  derived and/or modified protein sequence (wt) from hemagglutinin__InfluenzaA__ACO36595

SEQ ID NO: 2601 - protein, 566 aa, Artificial Sequence
  derived and/or modified protein sequence (wt) from hemagglutinin__InfluenzaA__ACO36606
MKTIIALSYILCLVFAQKLPGNDNSTATLCLGHHAVPNGTIVKTITNDQIEVTNATELVQSSSTGGICDSPHQILDGENCTLIDALLGDPQCDGFQNKKWDLFVERSKAYSNCYPYDVPDYASLRSLVASSGTLEFKNESFNWTGVTQNGTSSACKRRSNNSFFSRLNWLTHLKFKYPALNVTMPNNEKFDKLYIWGVHHPGTDNDQIFLYAQASGRITVSTQRSQQTVIPNIGSRPRVRNIPSRISIYWTIVKPGDILLINSTGNLIAPRGYFKIRSGKSSIMRSDAPIGKCNSECITPNGSIPNDKPFQNVNRITYGACPRYVKQNTLKLATGMRNVPEKQTRGIFGAIAGFIENGWEGMVDGWYGFRHQNSEGIGQAADLKSTQAAINQINGKLNRLIGKTNEKFHQIEKEFSEVEGRIQDLEKYVEDTKIDLWSYNAELLVALENQHTIDLTDSEMNKLFERTKKQLRENAEDMGNGCFKIYHKCDNACIGSIRNGTYDHDVYRDEALNNRFQIKGVELKSGYKDWILWISFAISCFLLCVALLGFIMWACQKGNIRCNICI

SEQ ID NO: 2602 - protein, 566 aa, Artificial Sequence; identical to SEQ ID NO: 630
  derived and/or modified protein sequence (wt) from hemagglutinin__InfluenzaA__ACO36617

SEQ ID NO: 2603 - protein, 566 aa, Artificial Sequence; identical to SEQ ID NO: 630
  derived and/or modified protein sequence (wt) from hemagglutinin__InfluenzaA__ACO36628

SEQ ID NO: 2604 - protein, 566 aa, Artificial Sequence
  derived and/or modified protein sequence (wt) from hemagglutinin__InfluenzaA__ACO36639
MKTIIALSYILCLVFAQKLPGNDNSTATLCLGHHAVPNGTIVKTITNDQIEVTNATELVQSSSTGGICDSPHQILDGENCTLIDALLGDPQCDGFQNKKWDLFVERSKAYSNCYPYDVPDYASLRSLVASSGTLEFNNESFNWTGVTQNGTSSACKRRSNNSFFSRLNWLTHLKFKYPALNVTMPNNEKFDKLYIWGVHHPGTDNDQIFLYAQASGRITVSTKRSQQTVIPNIGSRPRVRNIPSRISIYWTIVKPGDILLINSTGNLIAPRGYFKIRSGKSSIMRSDAPIGKCNSECITPNGSIPNDKPFQNVNRITYGACPRYVKQNTLKLATGMRNVPEKQTRGIFGAIAGFIENGWEGMVDGWYGFRHQNSEGIGQAADLKSTQAAINQINGKLNRLIGKTNEKFHQIEKEFSEVEGRIQDLEKYVEDTKIDLWSYNAELLVALENQHTIDLTDSEMNKLFERTKKQLRENAEDMGNGCFKIYHKCDNACIGSIRNGTYDHDVYRDEALNNRFQIKGVELKSGYKDWILWISFAISCFLLCFALLGFIMWACQKGNIRCNICI

SEQ ID NO: 2605 - protein, 566 aa, Artificial Sequence
  derived and/or modified protein sequence (wt) from hemagglutinin__InfluenzaA__ACO36661
MKTIIALSYILCLVFAQKLPGNDNSTATLCLGHHAVPNGTIVKTITNDQIEVTNATELVQSSSTGGICDSPHQILDGENCTLIDALLGDPQCDGFQNKKWDLFVERSKAYSNCYPYDVPDYASLRSLVASSGTLEFNNESFNWTGVTQNGTSSACKRRSNNSFFSRLNWLTHLKFKYPALNVTMPNNEKFDKLYIWGVHHPGTDNDQIFLYAQASGRITVSTKRSQQTVIPNIGSRPRVRNIPSRISIYWTIVKPGDILLINSTGNLIAPRGYFKIRSGKSSIMRSDAPIGKCNSECITPNGSIPNDKPFQNVNRITYGACPRYVKQNTLKLATGMRNVPEKQTRGIFGAIAGFIENGWEGMVDGWYGFRHQNSEGIGQAADLKSTQAAINQINGKLNRLIGKTNEKFHQIEKEFSEVEGRIQDLEKYVEDIKIDLWSYNAELLVALENQHTIDLTDSEMNKLFERTKKQLRENAEDMGNGCFKIYHKCDNACIGSIRNGTYDHDVYRDEALNNRFQIKGVELKSGYKDWILWISFAISCFLLCVALLGFIMWACQKGNIRCNICI

SEQ ID NO: 2606 - protein, 566 aa, Artificial Sequence; identical to SEQ ID NO: 630
  derived and/or modified protein sequence (wt) from hemagglutinin__InfluenzaA__ACO36683

SEQ ID NO: 2607 - protein, 566 aa, Artificial Sequence; identical to SEQ ID NO: 2597
  derived and/or modified protein sequence (wt) from hemagglutinin__InfluenzaA__ACO37122

SEQ ID NO: 2608 - protein, 566 aa, Artificial Sequence
  derived and/or modified protein sequence (wt) from hemagglutinin__InfluenzaA__ACO94514
MKTIIALSYILCLVFAQKLPGNDNSTATLCLGHHAVPNGTIVKTITNDQIEVTNATELVQSSSTGEICDSPHQILDGENCTLIDALLGDPQCDGFQNKKWDLFVERSKAYSNCYPYDVPDYASLRSLVASSGTLEFNNESFNWTGVTQNGTSSACIRKSNNSFFSRLNWLTHLKFKYPALNVTMPNNEQFDKLYIWGVHHPGTDNDQIFLYAQASGRITVSTKRSQQTVIPNIGSRPRVRNIPSRISIYWTIVKPGDILLINSTGNLIAPRGYFKIRSGKSSIMRSDAPIGKCNSECITPNGSIPNDKPFQNVNRITYGACPRYVKQNTLKLATGMRNVPEKQTRGIFGAIAGFIENGWEGMVDGWYGFRHQNSEGRGQAADLKSTQAAIDQINGKLNRLIGKTNEKFHQIEKEFSEVEGRIQDLEKYVEDTKIDLWSYNAELLVALENQHTIDLTDSEMNKLFEKTKKQLRENAEDMGNGCFKIYHKCDNACIGSIRNGTYDHDVYRDEALNNRFQIKGVELKSGYKDWILWISFAISCFLLCVALLGFIMWACQKGNIRCNICI

SEQ ID NO: 2609 - protein, 566 aa, Artificial Sequence
  derived and/or modified protein sequence (wt) from hemagglutinin__InfluenzaA__ACO94515
MKTIIALSYILCLVFAQKLPGNDNSTATLCLGHHAVPNGTIVKTITNDQIEVTNATELVQSSSTGEICDSPHQILDGENCTLIDALLGDPQCDGFQNKKWDLFVERSKAYSNCYPYDVPDYASLRSLVASSGTLEFNNESFNWTGVTQNGTSSACIRKSNNSFFSRLNWLTHLKFKYPALNVTMPNNEQFDKLYIWGVHHPGTDNDQIFLYAQASGRITVSTKRSQQTVIPNIGSRPRVRNIPSRISIYWTIVKPGDILLINSTGNLIAPRGYFKIRSGKSSIMRSDAPIGKCNSECITPNGSIPNDKPFQNVNRITYGACPRYVKQNTLKLATGMRNVPEKQTRGIFGAIAGFIENGWEGMMDGWYGFRHQNSEGRGQAADLKSTQAAIDQINGKLNRLIGKTNEKFHQIEKEFSEVEGRIQDLEKYVEDTKIDLWSYNAELLVALENQHTIDLTDSEMNKLFEKTKKQLRENAEDMGNGCFKIYHKCDNACIGSIRNGTYDHDVYRDEALNNRFQIKGVELKSGYKDWILWISFAISCFLLCVALLGFIMWACQKGNIRCNICI

SEQ ID NO: 2610 - protein, 566 aa, Artificial Sequence; identical to SEQ ID NO: 2434
  derived and/or modified protein sequence (wt) from hemagglutinin__InfluenzaA__ACO94516

SEQ ID NO: 2611 - protein, 566 aa, Artificial Sequence; identical to SEQ ID NO: 2434
  derived and/or modified protein sequence (wt) from hemagglutinin__InfluenzaA__ACO94672

SEQ ID NO: 2612 - protein, 566 aa, Artificial Sequence
  derived and/or modified protein sequence (wt) from hemagglutinin__InfluenzaA__ACO94683
MKTIIALSYILCLVSAQKLPGNDNSTATLCLGHHAVPNGTIVKTITNDQIEVTNATELVQSSSTGEICDSPHQVLDGENCTLIDALLGDPQCDGFQNKKWDLFVERSKAYSNCYPYDVPDYASLRSLVASSGTLEFNNESFNWTGVTQNGTSSACIRRSNNSFFSRLNWLTHSKFKYPALNVTMPNNEEFDKLYIWGVHHPGTDNDQIFLYAQASGRITVSTKRSQQTVIPNIGSRPRVRNIPSRISIYWTIVKPGDILLINSTGNLIAPRGYFKIRSGKSSIMRSDAPIGKCNSECITPNGSIPNDKPFQNVNRITYGACPRYVKQNTLKLATGMRNVPEKQTRGIFGAIAGFIENGWEGMVDGWYGFRHQNSEGIGQAADLKSTQAAIDQINGKLNRLIGKTNEKFHQIEKEFTEVEGRIQDLEKYVEDTKIDLWSYNAELLVALENQHTIDLTDSEMNKLFEKTKKQLRENAEDMGNGCFKIYHKCDNACIGSIRNGTYDHEVYRDEALNNRFQIKGVELKSGYKDWILWISFAISCFLLCVALLGFIMWACQKGNIRCNICI

SEQ ID NO: 2613 - protein, 566 aa, Artificial Sequence; identical to SEQ ID NO: 2434
  derived and/or modified protein sequence (wt) from hemagglutinin__InfluenzaA__ACO94694

SEQ ID NO: 2614 - protein, 565 aa, Artificial Sequence; identical to SEQ ID NO: 2488
  derived and/or modified protein sequence (wt) from hemagglutinin__InfluenzaA__ACO94705

SEQ ID NO: 2615 - protein, 566 aa, Artificial Sequence
  derived and/or modified protein sequence (wt) from hemagglutinin__InfluenzaA__ACO94727
MKTIIALSYILCLVFAQKLPGNDNSTATLCLGHHAVPNGTIVKTITNDQIEVTNATELVQSSSTGEICDSPHQILDGENCTLIDALLGDPQCDGFQNKKWDLFVERSKAYSNCYPYDVPDYASLRSLVASSGTLEFNNESFNWTGVTQNGTSSACIRRSNNSFFSRLNWLTHLKFKYPALNVTMPNNEQFDKLYIWGVHHPGTDNDQIFLYAQASGRITVSTKRSQQTVIPNIGSRPRVRNIPSRISIYWTIVKPGDILLINSTGNLIAPRGYFKIRSGKSSIMKSDAPIGKCNSECITPNGSIPNDKPFQNVNRITYGACPRYVKQNTLKLATGMRNVPEKQTRGIFGAIAGFIENGWEGMVDGWYGFRHQNSEGRGQAADLKSTQAAIDQINGKLNRLIGKTNEKFHQIEKEFSEVEGRIQDLEKYVEDTKIDLWSYNAELLVALENQHTIDLTDSEMNKLFEKTKKQLRENAEDMGNGCFKIYHKCDNACIGSIRNGTYDHDVYRDEALNNRFQIKGVELKSGYKDWILWISFAISCLLLCVALLGFIMWACQKGNIRCNICI

SEQ ID NO: 2616 - protein, 566 aa, Artificial Sequence
  derived and/or modified protein sequence (wt) from hemagglutinin__InfluenzaA__ACO94738
MKTIIALSYIQCLVFAQKFPGNDNSTATLCLGHHAVPNGTVVKTITNDQIEVTNATELVQSSSTGEICDSPHQILDGENCTLIDALLGDPQCDGFQNKNWDLFVERSKAYSNCYPYDVPDYASLRSLVASSGTLEFNNESFNWTGVTQNGTSSACIRRSNNSFFSRLNWLTHSKFKYPALNVTMPNNENFDKLYIWGVHHPGTDNDQIFLYARASGRITVSTKRSQQTVIPNIGSRPRVRNIPSRISIYWTIVKPGDILLINSTGNLIAPRGYFKIRSGKSSIMRSDAPIGKCNSECITPNGSIPNDKPFQNVNRITYGACPRYVKQNTLKLATGMRNVPEKQTRGIFGAIAGFIENGWEGMVDGWYGFRHQNSEGIGQAADLKSTQAAIDQINGKLNRLIGKTNEKFHQIEKEFSEVEGRIQDLEKYVEDTKIDLWSYNAELLVALENQHTIDLTDSEMNKLFEKTKKQLRENAEDMGNGCFKIYHKCDNACIGSIRNGTYDHDVYRDEALNNRFQIKGVELKSGYKDWILWISFAISCFLLCIALLGFIMWACQKGNIRCNICI

SEQ ID NO: 2617 - protein, 566 aa, Artificial Sequence; identical to SEQ ID NO: 2537
  derived and/or modified protein sequence (wt) from hemagglutinin__InfluenzaA__ACO94760

SEQ ID NO: 2618 - protein, 566 aa, Artificial Sequence
  derived and/or modified protein sequence (wt) from hemagglutinin__InfluenzaA__ACO94771
MKTIIALSYILCLVFAQKLPGNDNSTATLCLGHHAVPNGTIVKTITNDQIEVTNATELVQSSSTGEICDSPHQILDGENCTLIDALLGDPQCDGFQNKKWDLFVERSKAYSNCYPYDVPDYASLRSLVASSGTLEFNNESFNWTGVTQNGTSSACIRRSNNSFFSRLNWLTHLKFKYPALNVTMPNNEQFDKLYIWGVHHPGTDNDQIFLYAQASGRITVSTKRSQQTVIPNIGSRPRVRNIPSRISIYWTIVKPGDILLINSTGNLIAPRGYFKIRSGKSSIMRSDAPIGKCNSECITPNGSIPNDKPFQNVNRITYGACPRYVKQNTLKLATGMRNVPEKQTRGIFGAIAGFIENGWEGMVDGWYGFRHQNSEGRGQAADLKSTQAAIDQINGKLNRLIGKTNEKFHQIEKEFSEVEGRIQDLEKYVEDTKIDLWSYNAELLVALENQHTIDLTDSEMNKLFEKTKKQLRENAEDMGNGCFKIYHKCDNACIGSIRNGTYDHDVYRDEALNNRFQIKGVELKSGYKDWILWISFAISCLLLCVALLGFIMWACQKGNIRCNICI

SEQ ID NO: 2619 - protein, 566 aa, Artificial Sequence; identical to SEQ ID NO: 2434
  derived and/or modified protein sequence (wt) from hemagglutinin__InfluenzaA__ACO94782

SEQ ID NO: 2620 - protein, 566 aa, Artificial Sequence; identical to SEQ ID NO: 2434
  derived and/or modified protein sequence (wt) from hemagglutinin__InfluenzaA__ACO94793

SEQ ID NO: 2621 - protein, 565 aa, Artificial Sequence
  derived and/or modified protein sequence (wt) from hemagglutinin__InfluenzaA__ACO94804
MKVKLLVLLCTFTATYADTICIGYHANNSTDTVDTVLEKNVTVTHSVNLLEDSHNGKLCLLKGIAPLQLGNCSVAGWILGNPECELLISRESWSYIVEKPNPENGTCYPGHFADYEELREQLSSVSSFERFEIFPKESSWPNHTTTGVSASCSHNGESSFYKNLLWLTGKNGLYPNLSKSYANNKEKEVLVLWGVHHPPNIGNQRALYHTENAYVSVVSSHYSRKFTPEIAKRPKVRDQEGRINYYWTLLEPGDTIIFEANGNLIAPRYAFALSRGFGSGIINSNAPMDGCDAKCQTPQGAINSSLPFQNVHPVTIGECPKYVRSAKLRMVTGLRNIPSIQSRGLFGAIAGFIEGGWTGMVDGWYGYHHQNEQGSGYAADQKSTQNAINGITNKVNSVIEKMNTQFTAVGKEFNKLERRMENLNKKVDDGFIDIWTYNAELLVLLENERTLDFHDSYVKNLYEKVKSQLKNNAKEIGNGCFEFYHKCNDECMESVKNGTYDYPKYSEESKLNREKIDGVKLESMGVYQILAIYSTVASSLVLLVSLGAISFWMCSNGSLQCRICI

SEQ ID NO: 2622 - protein, 566 aa, Artificial Sequence; identical to SEQ ID NO: 2301
  derived and/or modified protein sequence (wt) from hemagglutinin__InfluenzaA__ACO94815

SEQ ID NO: 2623 - protein, 566 aa, Artificial Sequence; identical to SEQ ID NO: 2308
  derived and/or modified protein sequence (wt) from hemagglutinin__InfluenzaA__ACO94848

SEQ ID NO: 2624 - protein, 565 aa, Artificial Sequence; identical to SEQ ID NO: 2488
  derived and/or modified protein sequence (wt) from hemagglutinin__InfluenzaA__ACO94859

SEQ ID NO: 2625 - protein, 565 aa, Artificial Sequence
  derived and/or modified protein sequence (wt) from hemagglutinin__InfluenzaA__ACO94870
MKVKLLVLLCTFTATYADTICIGYHANNSTDTVDTVLEKNVTVTHSVNLLENSHNGKLCLLKGIAPLQLGNCSVAGWILGNPECELLISKESWSYIVEKPNPENGTCYPGHFADYEELREQLSSVSSFERFEIFPKESSWPNHTVTGVSASCSHNGESSFYRNLLWLTGKNGLYPNLSKSYANNKGKEVLVLWGVHHPPNIGDQNTLYHTENAYVSVVSSHYSRKFTPEIAKRPKVRDQEGRINYYWTLLEPGDTIIFEANGNLIAPRYAFALNRGFGSGIINSNAPMDKCDAKCQTPQGAINSSLPFQNVHPVTIGECPKYVRSAKLRMVTGLRNIPSIQSRGLFGAIAGFIEGGWTGMVDGWYGYHHQNEQGSGYAADQKSTQNAINGITNKVNSVIEKMNTQFTAVGKEFNKLERRMENLNKKVDDGFIDIWTYNAELLVLLENERTLDFHDSNVKNLYEKVKSQLKNNAKEIGNGCFEFYHKCNDECMESVKNGTYDYPKYSEESKLNREKIDGVKLESMGVYQILAIYSTVASSLVLLVSLGAISFWMCSNGSLQCRICI

SEQ ID NO: 2626 - protein, 566 aa, Artificial Sequence
  derived and/or modified protein sequence (wt) from hemagglutinin__InfluenzaA__ACO94881
MKTIIALSYILCLVFAQKLPGNDNSTATLCLGHHAVPNGTIVKTITNDQIEVTNATELVQSSSTGGICDSPHQILDGENCTLIDALLGDPQCDGFQNKKWDLFVERSKAYSNCYPYDVPDYASLRSLVASSGTLEFNNESFDWTGVTQNGTSSSCKRRSNNSFFSRLNWLTHLKYKYPALNVTMPNNEKFDKLYIWGVHHPGTDSDQISLYAQASGRITVSTKRSQQTVIPNIGSRPRVRDVSSRISIYWTIVKPGDILLINSTGNLIAPRGYFKIRSGKSSIMRSDAPIGKCNSECITPNGSIPNDKPFQNVNRITYGACPRYVKQNTLKLATGMRNVPEKQTRGIFGAIAGFIENGWEGMVDGWYGFRHQNSEGTGQAADLKSTQAAINQINGKLNRLIGKTNEKFHQIEKEFSEVEGRIQDLEKYVEDTKIDLWSYNAELLVALENQHTIDLTDSEMNKLFERTKKQLRENAEDMGNGCFKIYHRCDNACIGSIRNGTYDHDVYRDEALNNRFQIKGVELKSGYKDWILWISFAISCFLLCVALLGFIMWACQKGNIRCNICI

SEQ ID NO: 2627 - protein, 566 aa, Artificial Sequence
  derived and/or modified protein sequence (wt) from hemagglutinin__InfluenzaA__ACO94892
MKTIIALSYILCLVFAQKLPGNDNSTATLCLGHHAVPNGTIVKTITNDQIEVTNATELVQSSSTGGICDSPHQILDGENCTLIDALLGDPQCDGFQNKKWDLFVERSKAYSNCYPYDVPDYASLRSLVASSGTLEFNNESFNWTGVTQNGTSSACQRRSNKSFFSRLNWLTHLKFKYPALNVTMPNNEKFDKLYIWGVHHPGTDNDQISLYAQTSGRITISTKRSQQTVIPNIGSRPRVRDVPSRISIYWTIVKPGDILLINSTGNLIAPRGYFKIRSGKSSIMRSDAPIVKCNSECITPNGSIPNDKPFQNVNRITYGACPRYVKQNTLKLATGMRNVPERQTRGIFGAIAGFIENGWEGMVDGWYGFRHQNSEGTGQAADLKSTQAAINQINGKLNRLIGKTNEKFHQIEKEFSEVEGRIQDLEKYVEDTKIDLWSYNAELLVALENQHTIDLTDSEMNKLFERTKKQLRENAEDMGNGCFKIYHKCDNACIGSIRNGTYDHDVYRDEALNNRFQIKGVELKSGYKDWILWISFAISCFLLCVALLGFIMWACQKGNIRCNICI

SEQ ID NO: 2628 - protein, 566 aa, Artificial Sequence
  derived and/or modified protein sequence (wt) from hemagglutinin__InfluenzaA__ACO94903
MKTIIALSYILCLVFAQKLPGNDNSTATLCLGHHAVPNGTIVKTITNDQIEVTNATELVQSSSTGGICDSPHQILDGENCTLIDALLGDPQCDGFQNKKWDLFVERSEAYSNCYPYDVPDYASLRSLVASSGTLEFNNESFNWTGVTQNGTSSACKRRSNKSFFSRLNWLTHLKFKYPALNVTMPNNEKFDKLYIWGVHHPGTDNDQISLYAQASGRITVSTKRSQQTVIPNIGSRPRVRDVPSRISIYWTIVKPGDILLINSTGNLIAPRGYFKIRSGKSSIMRSDAPIGKCNSECITPNGSIPNDKPFQNVNRITYGACPRYVKQNTLKLATGMRNVPEKQTRGIFGAIAGFIENGWEGMVDGWYGFRHQNSEGTGQAADLKSTQAAINQINGKLNRLIGKTNEKFHQIEKEFSEVEGRIQDLEKYVEDTKIDLWSYNAELLVALENQHTIDLTDSEMNKLFERTKKQLRENAEDMGNGCFKIYHKCDNACIGSIRNGTYDHDVYRDEALNNRFQIKGVELKSGYKDWILWISFAISCFLLCVALLGFIMWACQKGNIRCNICI

SEQ ID NO: 2629 - protein, 566 aa, Artificial Sequence
  derived and/or modified protein sequence (wt) from hemagglutinin__InfluenzaA__ACO94925
MKTIIALSYILCLVFAQKLPGNDNSTATLCLGHHAVPNGTVVKTITNDQIEVTNATELVQSSSTGGICDSPHQILDGENCTLIDALLGDPQCDGFQNKKWDLFVERSKAYSNCYPYDVPDYASLRSLVASSGTLEFNNESFNWTGVTQNGTSSACKRRSNKSFFSRLNWLTHLKFKYPALNVTMPNNEKFDKLYIWGVHHPGTDNDQISLYAQASGRITVSTKRSQQTVIPNIGSRPRVRDVPSRISIYWTIVKPGDILLINSTGNLIAPRGYFKIRSGKSSIMRSDAPIGKCNSECITPNGSIPNDKPFQNVNRITYGACPRYVKQNTLKLATGMRNVPEKQTRGIFGAIAGFIENGWEGMVDGWYGFRHQNSEGTGQAADLKSTQAAINQINGKLNRLIGKTNEKFHQIEKEFSEVEGRIQDLEKYVEDTKIDLWSYNAELLVALENQHTIDLTDSEMNKLFERTKKQLRENAEDMGNGCFKIYHKCDNACIGSIRNGTYDHDVYRDEALNNRFQIKGVELKSGYKDWILWISFAISCFLLCVALLGFIMWACQKGNIRCNICI

SEQ ID NO: 2630 - protein, 566 aa, Artificial Sequence
  derived and/or modified protein sequence (wt) from hemagglutinin__InfluenzaA__ACO94936
MKTIIALSYILCLVFAQKLPGNDNSTATLCLGHHAVPNGTIVKTITNDQIEVTNATELVQSSSTGGICDSPHQILDGEDCTLIDALLGDPQCDGFQNKKWDLFVERSKAYSNCYPYDVPDYASLRSLVASSGTLEFNNESFDWTGVTQNGTSSSCKRRSNNSFFSRLNWLTHLKYKYPALNVTMPNNEKFDKLYIWGVHHPGTDSDQISLYAQASGRITVSTKRSQQTVIPNIGSRPRVRDVSSRISIYWTIVKPGDILLINSTGNLIAPRGYFKIRSGKSSIMRSDAPIGKCNSECITPNGSIPNDKPFQNVNRITYGACPRYVKQNTLKLATGMRNVPEKQTRGIFGAIAGFIENGWEGMVDGWYGFRHQNSEGTGQAADLKSTQAAINQINGKLNRLIGKTNEKFHQIEKEFSEVEGRIQDLEKYVEDTKIDLWSYNAELLVALENQHTIDLTDSEMNKLFERTKKQLRENAEDMGNGCFKIYHKCDNACIGSIRNGTYDHDVYRDEALNNRFQIKGVELKSGYKDWILWISFAISCFLLCVALLGFIMWACQKGNIRCNICI

SEQ ID NO: 2631 - protein, 566 aa, Artificial Sequence
  derived and/or modified protein sequence (wt) from hemagglutinin__InfluenzaA__ACO94947
MKTIIALSYILCLVFAQKLPGNDNSTATLCLGHHAVPNGTIVKTITNDQIEVTNATELVQSSSTGGICDSPHQILDGENCTLIDALLGDPQCDGFQNKKWDLFVERSKAYSNCYPYDVPDYASLRSLVASSGTLEFNNESFNWTGVTQNGTSSACKRRSNKSFFSRLNWLTHLKFKYPALNVTMPNNEKFDKLYIWGVHHPGTDNDQISLYAQASGRITVSTKRSQQTVIPNIGSRPRVRDVPSRISIYWTIVKPGDILLINSTGNLIAPRGYFRIRSGKSSIMRSDAPIGKCNSECITPNGSIPNDKPFQNVNRITYGACPRYVKQNTLKLATGMRNVPEKQTRGIFGAIAGFIENGWEGMVDGWYGFRHQNSEGTGQAADLKSTQAAINQINGKLNRLIGKTNEKFHQIEKEFSEVEGRIQDLEKYVEDTKIDLWSYNAELLVALENQHTIDLTDSEMNKLFERTKKQLRENAEDMGNGCFKIYHKCDNACIGSIRNGTYDHDVYRDEALNNRFQIKGVELKSGYKDWILWISFAISCFLLCVALLGFIMWACQKGNIRCNICI

SEQ ID NO: 2632 - protein, 566 aa, Artificial Sequence
  derived and/or modified protein sequence (wt) from hemagglutinin__InfluenzaA__ACO95153
MKTIIALSYILCLVFAQKLPGNDNSTATLCLGHHAVPNGTIVKTITNDQIEVTNATELVQSSSTGGICDSPHQILDGENCTLIDALLGDPQCDGFQNKKWDLFVERSKAYSNCYPYDVPDYASLRSLVASSGTLEFNNESFNWTGVTQNGTSSACKRRSNNSFFSRLNWLTHLKFKYPALNVTMPNNENFDKLYIWGVHHPGTDNDQISLYAQASGRITVSTKRSQQTVIPNIGSRPRVRDISSRISIYWTIVKPGDILLINSTGNLIAPRGYFKIRSGKSSIMRSDAPIGKCNSECITPNGSIPNDKPFQNVNRITYGACPRYVKQNTLKLATGMRNVPETQTRGIFGAIAGFIENGWEGMVDGWYGFRHQNSEGTGQAADLKSTQAAINQINGKLNRLIGKTNEKFHQIEKEFSEVEGRIQDLEKYVEDTKIDLWSYNAELLVALENQHTIDLTDSEMNKLFERTKKQLRENAEDMGNGCFKIYHKCDNACIGSIRNGTYDHDVYRDEALNNRFQIKGVELKSGYKDWILWISFAISCFLLCVALLGFIMWACQKGNIRCNICI

SEQ ID NO: 2633 - protein, 566 aa, Artificial Sequence; identical to SEQ ID NO: 2598
  derived and/or modified protein sequence (wt) from hemagglutinin__InfluenzaA__ACO95171

SEQ ID NO: 2634 - protein, 566 aa, Artificial Sequence
  derived and/or modified protein sequence (wt) from hemagglutinin__InfluenzaA__ACO95193
MKTIIALSYILCLVFAQKLPGNDKSTATLCLGHHAVPNGTIVKTITNDQIEVTNATELVQSSSTGGICDSPHQILDGENCTLIDALLGDPQCDGFQNKKWDLFVERSKAYSNCYPYDVPDYASLRSLVASSGTLEFNNENFNWTGVTQNGTSSACKRRSNNSFFSRLNWLTHLKFKYPALNVTMPNNEKFDKLYIWGVHHPGTDNDQISLYAQASGRITVSTKRSQQTVIPNIGSRPRVRDISSRISIYWTIVKPGDILLINSTGNLIAPRGYFKIRSGKSSIMRSDAPIGKCSSECITPNGSIPNDKPFQNVNRITYGACPRYVKQNTLKLATGMRNVPETQTRGIFGAIAGFIENGWEGMVDGWYGFRHQNSEGTGQAADLKSTQAAINQINGKLNRLIGKTNEKFHQIEKEFSEVEGRIQDLEKYVEDTKIDLWSYNAELLVALENQHTIDLTDSEMNKLFERTKKQLRENAEDMGNGCFKIYHKCDNACIGSIRNGTYDHDVYRDEALNNRFQIKGVELKSGYKDWILWISFAISCFLLCVALLGFIMWACQKGNIRCNICI

SEQ ID NO: 2635 - protein, 566 aa, Artificial Sequence; identical to SEQ ID NO: 2597
  derived and/or modified protein sequence (wt) from hemagglutinin__InfluenzaA__ACO95204

SEQ ID NO: 2636 - protein, 566 aa, Artificial Sequence
  derived and/or modified protein sequence (wt) from hemagglutinin__InfluenzaA__ACO95215
MKTIIALSYILCLVFAQKLPGNDNSTATLCLGHHAVPNGTIVKTITNDQIEVTNATELVQSSSTGGICDSPHQILDGENCTLIDALLGDPQCDGFQNKKWDLFVERSKAYSNCYPYDVPDYASLRSLIASSGTLEFNNESFNWTGVTQNGTSSACKRRSNNSFFSRLNWLTHLKFKYPALNVTMPNNEKFDKLYIWGVHHPGTDNDQISLYAQASGRITVSTKRSQQTVIPNIGSRPRVRDISSRISIYWTIVKPGDILLINSTGNLIAPRGYFKIRSGKSSIMRSDAPIGKCNSECITPNGSIPNDKPFQNVNRITYGACPRYVKQNTLKLATGMRNVPETQTRGIFGAIAGFIENGWEGMVDGWYGFRHQNSEGTGQAADLKSTQAAINQINGKLNRLIGKTNEKFHQIEKEFSEVEGRIQDLEKYVEDTKIDLWSYNAELLVALENQHTIDLTDSEMNKLFERTKKQLRENAEDMGNGCFKIYHKCDNACIGSIRNETYDHDVYRDEALNNRFQIKSVELKSGYKDWILWISFAISCFLLCVALLGFIMWACQKGNIRCNICI

SEQ ID NO: 2637 - protein, 566 aa, Artificial Sequence; identical to SEQ ID NO: 281
  derived and/or modified protein sequence (wt) from hemagglutinin__InfluenzaA__ACO95226

SEQ ID NO: 2638 - protein, 566 aa, Artificial Sequence; identical to SEQ ID NO: 630
  derived and/or modified protein sequence (wt) from hemagglutinin__InfluenzaA__ACO95248

SEQ ID NO: 2639 - protein, 566 aa, Artificial Sequence
  derived and/or modified protein sequence (wt) from hemagglutinin__InfluenzaA__ACO95270
MKTIIALSYILCLVFTQKLPGNDNSTATLCLGHHAVPNGTIVKTITNDQIEVTNATELVQSSSTGEICDSPHQILDGENCTLIDALLGDPQCDGFQNKKWDLFVERSKAYSNCYPYDVPDYASLRSLVASSGTLEFNNESFNWTGVTQNGTSSACIRRSNNSFFSRLNWLTHLKFKYPALNVTMPNNEKFDKLYIWGVHHPVTDNNQIFLYAQASGRITVSTKRSQQTVIPNIGSRPRVRNIPSRISIYWTIVKPGDILLINSTGNLIAPRGYFKIRSGKSSIMRSDAPIGKCNSECITPNGSIPNDKPFQNVNRITYGACPRYVKQNTLKLATGMRNVPEKQTRGIFGAIAGFIENGWEGMVDGWYGFRHQNSEGIGQAADLKSTQAAIDQINGKLNRLIGKTNEKFHQIEKEFSEVEGRIQDLEKYVEDTKIDLWSYNAELLVALENQHTIDLTDSEMNKLFEKTKKQLRENAEDMGNGCFKIYHKCDNACIGSIRNGTYDHDVYRDEALNNRFQIKGVELKSGYKDWILWISFAISCFLLCVALLGFIMWACQKGNIRCNICI

SEQ ID NO: 2640 - protein, 566 aa, Artificial Sequence; identical to SEQ ID NO: 2434
  derived and/or modified protein sequence (wt) from hemagglutinin__InfluenzaA__ACO95281

SEQ ID NO: 2641 - protein, 566 aa, Artificial Sequence
  derived and/or modified protein sequence (wt) from hemagglutinin__InfluenzaA__ACO95292
MKTIIALSYILCLVFAQKLPGNDNSTATLCLGHHAVPNGTIVKTITNDQIEVTNATELVQSSSTGEICDSPHQILDGENCTLIDALLGDPQCDGFQNKKWDLFVERSKAYSNCYPYDVPDYASLRSLVASSGTLEFNNESFNWTGVTQNGTSSACIRRSNNSFFSRLNWLTHLKFKYPALNVTMPNNEQFDKLYIWGVHHPGTDNDQIFLYAQASGRITVSTKRSQQTVIPNIGSRPRVRNIPSRISIYWTIVKPGDILLINSTGNLIAPRGYFKIQSGKSSIMRSDAPIGKCNSECITPNGSIPNDKPFQNVNRITYGACPRYVKQNTLKLATGMRNVPEKQTRGIFGAIAGFIENGWEGMVDGWYGFRHQNSEGRGQAADLKSTQAAIDQINGKLNRLIGKTNEKFHQIEKEFSEVEGRIQDLEKYVEDTKIDLWSYNAELLVALENQHTIDLTDSEMNKLFEKTKKQLRENAEDMGNGCFKIYHKCDNACIGSIRNGTYDHDVYRDEALNNRFQIKGVELKSGYKDWILWISFAISCFLLCVALLGFIMWACQKGNIRCNICI

SEQ ID NO: 2642 - protein, 566 aa, Artificial Sequence; identical to SEQ ID NO: 2537
  derived and/or modified protein sequence (wt) from hemagglutinin__InfluenzaA__ACO95303

SEQ ID NO: 2643 - protein, 565 aa, Artificial Sequence
  derived and/or modified protein sequence (wt) from hemagglutinin__InfluenzaA__ACO95382
MKVKLLVLLCTFTATYADTICIGYHANNSTDTVDTVLEKNVTVTHSVNLLENSHNGKLCLLKGIAPLQLGNCSVAGWILGNPECELLISKESWSYIVEKPNPENGTCYPGHFADYEELREQLSSVSSFERFEIFPKEGSWPNHTVTGVSASCSHNGESSFYRNLLWLTGKNGLYPNLSKSYANNKEKEVLVLWGVHHPPNIGDQKALYHTENAYVSVVSSHYSRKFTPEIAKRPKVRDQEGRINYYWTLLEPGDTIIFEANGNLIAPRYAFALSRGFGSGIINSNAPMDKCDAKCQTPQGAINSSLPFQNVHPVTIGECPKYVRSAKLRMVTGLRNIPSIQSRGLFGAIAGFIEGGWTGMVDGWYGYHHQNEQGSGYAADQKSTQNAINGITNKVNSVIEKMNTQFTAVGKEFNKLERRMENLNKKVDDGFIDIWTYNAELLVLLENERTLDFHDSNVKNLYEKVKSQLKNNAKEIGNGCFEFYHKCNDECMESVKNGTYDYPKYSEESKLNREKIDGVKLESMGVYQILAIYSTVASSLVLLVSLGAISFWMCSNGSLQCRICI

SEQ ID NO: 2644 - protein, 565 aa, Artificial Sequence
  derived and/or modified protein sequence (wt) from hemagglutinin__InfluenzaA__ACO95415
MKVKLLVLLCTFTATYADTICIGYHANNSTDTIDTVLEKNVTVTHSVNLLENSHNGKLCLLKGIAPLQLGNCSVAGWILGNPECELLISKESWSYIVEKPNPENGTCYPGHFADYEELREQLSSVSSFERFEIFPKESSWPNHTVTGVSASCSHNGESSFYRNLLWLTGKNGLYPNLSKSYANNKGKEVLVLWGVHHPPNIGDQNTLYHTENAYVSVVSSHYSRKFTPEIAKRPKVRDQEGRINYYWTLLEPGDTIIFEANGNLIAPRYAFALSRGFGSGIINSNAPMDKCDAKCQTPQGAINSSLPFQNVHPVTIGECPKYVRSAKLRMVTGLRNIPSIQSRGLFGAIAGFIEGGWTGMVDGWYGYHHQNEQGSGYAADQKSTQNAINGITNKVNSVIEKMNTQFTAVGKEFNKLERRMENLNKKVDDGFIDIWTYNAELLVLLENERTLDFHDSNVKNLYEKVKSQLKNNAKEIGNGCFEFYHKCNDECMESVKNGTYDYPKYSEESKLNREKIDGVKLESMGVYQILAIYSTVASSLVLLVSLGAISFWMCSNGSLQCRICI

SEQ ID NO: 2645 - protein, 566 aa, Artificial Sequence
  derived and/or modified protein sequence (wt) from hemagglutinin__InfluenzaA__ACO95426
MKTIIALSYILCLVFAQKLPGNDNSTATLCLGHHAVPNGTIVKTITNDQIEVTNATELVQSSSTGGICDSPHQILDGENCTLIDALLGDPQCDGFQNKKWDLFVERSKAYSNCYPYDVPDYASLRSLVASSGTLEFNNESFDWTGVTQNGTSSSCKRRSNNSFFSRLNWLTHLKYKYPALNVTMPNNEKFDKLYIWGVHHPGTDSDQISLYAQASGRITVSTKRSQQTVIPNIGSRPRVRDVSSRISIYWTIVKPGDILLINSTGNLIAPRGYFKIRSGKSSIMRSDAPIGKCNSECITPNGSIPNDKPFQNVNRITYGACPRYVKQNTLKLATGMRNVPEKQTRGIFGAIAGFIENGWEGMVDGWYGFRHQNSEGTGQAADLKSTQAAINQINGKLNRLIGKTNEKFHQIEKEFSEVEGRIQDLEKYVEDTKIDLWSYNAELLVALENQHTIDLTDSEMNKLFERTKKQLRENAEDMGNGCFKIYHKCDNACIGSIRNGTYDHDVYRDEALNNRFQIKGVELKSGYKDWILWISFAISCFLLCVALLGFIMWACQKGNIRCNICI

SEQ ID NO: 2646 - protein, 566 aa, Artificial Sequence; identical to SEQ ID NO: 1795
  derived and/or modified protein sequence (wt) from hemagglutinin__InfluenzaA__ACO95437

SEQ ID NO: 2647 - protein, 566 aa, Artificial Sequence
  derived and/or modified protein sequence (wt) from hemagglutinin__InfluenzaA__ACO95448
MKTIIALSYILCLVFAQKLPGNDNSTATLCLGHHAVPNGTIVKTITNDQIEVTNATELVQSSSTGGICDSPHQILDGENCTLIDALLGDPQCDGFQNKKWDLFVERSKAYSNCYPYDVPDYASLRSLIASSGTLEFNNESFNWTGVTQNGTSSACKRRSNNSFFSRLNWLTHLKFKYPALNVTMPNNEEFDKLYIWGVHHPGTDNDQINLYAQASGRITVSTKRSQQTVIPNIGSRPRVRDIPSRISIYWTIVKPGDILLINSTGNLIAPRGYFKIRSGKSSIMRSDAPIGKCNSECITPNGSIPNDKPFQNVNRITYGACPRYVKQNTLKLATGMRNVPEKQTRGIFGAIAGFIENGWEGMVDGWYGFRHQNSEGIGQAADLKSTQAAIDQINGKLNRLIGKTNEKFHQIEKEFSEVEGRIQDLEKYVEDTKIDLWSYNAELLVALENQHTIDLTDSEMNKLFERTKKQLRENAEDMGNGCFKIYHKCDNACIGSIRNGTYDHDVYRDEALNNRFQIKGVELKSGYKDWILWISFAISCFLLCVALLGFIMWACQKGNIRCNICI

SEQ ID NO: 2648 - protein, 566 aa, Artificial Sequence; identical to SEQ ID NO: 630
  derived and/or modified protein sequence (wt) from hemagglutinin__InfluenzaA__ACO95459

SEQ ID NO: 2649 - protein, 566 aa, Artificial Sequence
  derived and/or modified protein sequence (wt) from hemagglutinin__InfluenzaA__ACO95470
MKTIIALSYILCLVFAQKLPGNDNSTATLCLGHHAVPNGTIVKTITNDQIEVTNATELVQSSSTGGICDSPHQILDGENCTLIDALLGDPQCDGFQNKKWDLFVERSKAYSNCYPYDVPDYASLRSLVASSGTLEFNNESFNWTGVTQNGTSSACKRRSNNSFFSRLNWLTHLKFKYPALNVTMPNNEKFDKLYIWGVHHPGTDNDQIFLYAQASGRITVSTKRSQQTVIPNIGSRPRVRNIPSRISIYWTIVKPGDILLINSTGNLIAPRGYFKIRSGKSSIMRSDAPIGRCNSECITPNGSIPNDKPFQNVNRITYGACPRYVKQNTLKLATGMRNVPEKQTRGIFGAIAGFIENGWEGMVDGWYGFRHQNSEGIGQAADLKSTQAAINQINGKLNRLIGKTNEKFHQIEKEFSEVEGRIQDLEKYVEDTKIDLWSYNAELLVALENQHTIDLTDSEMNKLFERTKKQLRENAEDMGNGCFKIYHKCDNACIGSIRNGTYDHDVYRDEALNNRFQIKGVELKSGYKDWILWISFAISCFLLCVALLGFIMWACQKGNIRCNICI

SEQ ID NO: 2650 - protein, 566 aa, Artificial Sequence
  derived and/or modified protein sequence (wt) from hemagglutinin__InfluenzaA__ACO95481
MKTIIALSYILCLVFAQKLPGNDNSTATLCLGHHAVPNGTIVKTITNDQIEVTNATELVQSSSTGGICDSPHQILDGENCTLIDALLGDPQCDGFQNKKWDLFVERSKAYSNCYPYDVPDYASLRSLVASSGTLEFNNESFNWTGVTQNGTSSACKRRSNNSFFSRLNWLTHLKFKYPALNVTMPNNEKFDKLYIWGVHHPGTDNDQIFLYAQASGRITVSTKRSQQTVIPNIGSRPRVRNIPSRISIYWTIVKPGDILLINSTGNLIAPRGYFKIRSGKSSIMRSDAPIGKCNSECITPNGSIPNDKPFQNVNRITYGACPRYVKQNTLKLATGMRNLPEKQTRGIFGAIAGFIENGWEGMVDGWYGFRHQNSEGIGQAADLKSTQAAINQINGKLNRLIGKTNEKFHQIEKEFSEVEGRIQDLEKYVEDTKIDLWSYNAELLVALENQHTIDLTDSEMNKLFERTKKQLRENAEDMGNGCFKIYHKCDNACIGSIRNGTYDHDVYRDEALNNRFQIKGVELKSGYKDWILWISFAISCFLLCVALLGFIMWACQKGNIRCNICI

SEQ ID NO: 2651 - protein, 566 aa, Artificial Sequence; identical to SEQ ID NO: 630
  derived and/or modified protein sequence (wt) from hemagglutinin__InfluenzaA__ACO95492

SEQ ID NO: 2652 - protein, 566 aa, Artificial Sequence; identical to SEQ ID NO: 630
  derived and/or modified protein sequence (wt) from hemagglutinin__InfluenzaA__ACO95503

SEQ ID NO: 2653 - protein, 566 aa, Artificial Sequence; identical to SEQ ID NO: 630
  derived and/or modified protein sequence (wt) from hemagglutinin__InfluenzaA__ACO95514

SEQ ID NO: 2654 - protein, 566 aa, Artificial Sequence; identical to SEQ ID NO: 630
  derived and/or modified protein sequence (wt) from hemagglutinin__InfluenzaA__ACO95536

SEQ ID NO: 2655 - protein, 566 aa, Artificial Sequence; identical to SEQ ID NO: 630
  derived and/or modified protein sequence (wt) from hemagglutinin__InfluenzaA__ACO95547

SEQ ID NO: 2656 - protein, 566 aa, Artificial Sequence
  derived and/or modified protein sequence (wt) from hemagglutinin__InfluenzaA__ACP41963
MKAILVVLLYTFATANADTLCIGYHANNSTDTVDTVLEKNVTVTHSVNLLEDKHNGKLCKLRGVAPLHLGKCNIAGWILGNPECESLSTASSWSYIVETSSSDNGTCYPGDFIDYEELREQLSSVSSFERFEIFPKTSSWPNHDSNKGVTAACPHAGAKSFYKNLIWLVKKGNSYPKLSKSYINDKGKEVLVLWGIHHPSTSADQQSLYQNADAYVFVGSSRYSKKFKPEIAIRPKVRDQEGRMNYYWTLVEPGDKITFEATGNLVVPRYAFAMERNAGSGIIISDTPVHDCNTTCQTPKGAINTSLPFQNIHPITIGKCPKYVKSTKLRLATGLRNVPSIQSRGLFGAIAGFIEGGWTGMVDGWYGYHHQNEQGSGYAADLKSTQNAIDEITNKVNSVIEKMNTQFTAVGKEFNHLEKRIENLNKKVDDGFLDIWTYNAELLVLLENERTLDYHDSNVKNLYEKVRSQLKNNAKEIGNGCFEFYHKCDNTCMESVKNGTYDYPKYSEEAKLNREEIDGVKLESTRIYQILAIYSTVASSLVLVVSLGAISFWMCSNGSLQCRICI

SEQ ID NO: 2657 - protein, 565 aa, Artificial Sequence; identical to SEQ ID NO: 2643
  derived and/or modified protein sequence (wt) from hemagglutinin__InfluenzaA__ACP44192

SEQ ID NO: 2658 - protein, 565 aa, Artificial Sequence; identical to SEQ ID NO: 2643
  derived and/or modified protein sequence (wt) from hemagglutinin__InfluenzaA__ACP44203

SEQ ID NO: 2659 - protein, 565 aa, Artificial Sequence
  derived and/or modified protein sequence (wt) from hemagglutinin__InfluenzaA__ACP44225
MKVKLLVLLCTFTATYADTICIGYHANNSTDTVDTVLEKNVTVTHSVNLLENSHNGKLCLLKGIAPLQLGNCSVAGWILGNPECGLLISKESWSYIVEKPNPENGTCYPGHFADYEELREQLSSVSSFERFEIFPKESSWPNHTVTGVSASCSHNGESSFYRNLLWLTGKNGLYPNLSKSYANNKEKEVLVLWGVHHPPNIGDQKALYHTENAYVSVVSSHYSRKFTPEIAKRPKVRDQEGRINYYWTLLEPGDTIIFEANGNLIAPRYAFALSRGFGSGIINSNAPMDKCDAKCQTPQGAINSSLPFQNVHPVTIGECPKYVRSAKLRMVTGLRNIPSIQSRGLFGAIAGFIEGGWTGMVDGWYGYHHQNEQGSGYAADQKSTQNAINGITNKVNSVIEKMNTQFTAVGKEFNKLERRMENLNKKVDDGFIDIWTYNAELLVLLENERTLDFHDSNVKNLYEKVKSQLKNNAKEIGNGCFEFYHKCNDECMESVKNGTYDYPKYSKESKLNREKIDGVKLESMGVYQILAIYSTVASSLVLLVSLGAISFWMCSNGSLQCRICI

SEQ ID NO: 2660 - protein, 566 aa, Artificial Sequence
  derived and/or modified protein sequence (wt) from hemagglutinin__InfluenzaA__ACP44236
MKTIIALSYILCLVFAQKLPGNDNSTATLCLGHHAVPNGTIVKTITNDQIEVTNATELVQSSSTGGICDSPHQILDGENCTLIDALLGDPQCDGFQNKKWDLFVERSKAYSNCYPYDVPDYASLRSLVASSGTLEFNNESFNWTGVTQNGTSSACKRRSDKSFFSRLNWLTHLKFKYPALNVTMPNNEKFDKLYIWGVHHPGTDNDQISLYAQASGRITVSTKRSQQTVIPNIGSRPRVRDVPSRISIYWTIVKPGDILLINSTGNLIAPRGYFKIRSGKSSIMRSDAPIGKCNSECITPNGSIPNDKPFQNVNRITYGACPRYVKQNTLKLATGMRNVPEKQTRGIFGAIAGFIENGWEGMVDGWYGFRHQNSEGTGQAADLKSTQAAINQINGKLNRLIGKTNEKFHQIEKEFSEVEGRIQDLEKYVEDTKIDLWSYNAELLVALENQHTIDLTDSEMNKLFERTKKQLRENAEDMGNGCFKIYHKCDNACIGSIRNGTYDHDVYRDEALNNRFQIKGVELKSGYKDWILWISFAISCFLLCVALLGFIMWACQKGNIRCNICI

SEQ ID NO: 2661 - protein, 566 aa, Artificial Sequence; identical to SEQ ID NO: 2597
  derived and/or modified protein sequence (wt) from hemagglutinin__InfluenzaA__ACP44247

SEQ ID NO: 2662 - protein, 566 aa, Artificial Sequence; identical to SEQ ID NO: 630
  derived and/or modified protein sequence (wt) from hemagglutinin__InfluenzaA__ACP44258

SEQ ID NO: 2663 - protein, 566 aa, Artificial Sequence; identical to SEQ ID NO: 630
  derived and/or modified protein sequence (wt) from hemagglutinin__InfluenzaA__ACP44269

SEQ ID NO: 2664 - protein, 566 aa, Artificial Sequence; identical to SEQ ID NO: 2656
  derived and/or modified protein sequence (wt) from hemagglutinin__InfluenzaA__ACQ44554

SEQ ID NO: 2665 - protein, 566 aa, Artificial Sequence; identical to SEQ ID NO: 2656
  derived and/or modified protein sequence (wt) from hemagglutinin__InfluenzaA__ACQ44556

SEQ ID NO: 2666 - protein, 566 aa, Artificial Sequence; identical to SEQ ID NO: 2656
  derived and/or modified protein sequence (wt) from hemagglutinin__InfluenzaA__ACQ45338

SEQ ID NO: 2667 - protein, 566 aa, Artificial Sequence
  derived and/or modified protein sequence (wt) from hemagglutinin__InfluenzaA__ACQ55359
MKAILVVLLYTFATANADTLCIGYHANNSTDTVDTVLEKNVTVTHSVNLLEDKHNGKLCKLRGVAPLHLGKCNIAGWILGNPECESLSTASSWSYIVETPSSDNGTCYPGDFIDYEELREQLSSVSSFERFEIFPKTSSWPNHDSNKGVTAACPHAGAKSFYKNLIWLVKKGNSYPKLSKSYINDKGKEVLVLWGIHHPSTSADQQSLYQNADAYVFVGSSRYSKKFKPEIAIRPKVRDQEGRMNYYWTLVEPGDKITFEATGNLVVPRYAFAMERNAGSGIIISDTPVHDCNTTCQTPKGAINTSLPFQNIHPITIGKCPKYVKSTKLRLATGLRNIPSIQSRGLFGAIAGFIEGGWTGMVDGWYGYHHQNEQGSGYAADLKSTQNAIDEITNKVNSVIEKMNTQFTAVGKEFNHLEKRIENLNKKVDDGFLDIWTYNAELLVLLENERTLDYHDSNVKNLYEKVRSQLKNNAKEIGNGCFEFYHKCDNTCMESVKNGTYDYPKYSEEAKLNREEIDGVKLESTRIYQILAIYSTVASSLVLVVSLGAISFWMCSNGSLQCRICI

SEQ ID NO: 2668 - protein, 566 aa, Artificial Sequence; identical to SEQ ID NO: 2656
  derived and/or modified protein sequence (wt) from hemagglutinin__InfluenzaA__ACQ55361

SEQ ID NO: 2669 - protein, 566 aa, Artificial Sequence
  derived and/or modified protein sequence (wt) from hemagglutinin__InfluenzaA__ACQ63223
MKAILVVLLYTFATANADTLCIGYHANNSTDTVDTVLEKNVTVTHSVNLLEDKHNGKLCKLRGVAPLHLGKCNIAGWILGNPECESLSTASSWSYIVETSSSDNGTCYPGDFIDYEELREQLSSVSSFERFEIFPKTSSWPNHDSNKGVTAACPHAGAKSFYKNLIWLVKKGNSYPKLSKSYINDKGKEVLVLWGIHHPSTSADQQSLYQNADAYVFVGTSRYSKKFKPEIAIRPKVRDQEGRMNYYWTLVEPGDKITFEATGNLVVPRYAFAMERNAGSGIIISDTPVHDCNTTCQTPKGAINTSLPFQNIHPITIGKCPKYVKSTKLRLATGLRNVPSIQSRGLFGAIAGFIEGGWTGMVDGWYGYHHQNEQGSGYAADLKSTQNAIDEITNKVNSVIEKMNTQFTAVGKEFNHLEKRIENLNKKVDDGFLDIWTYNAELLVLLENERTLDYHDSNVKNLYEKVRSQLKNNAKEIGNGCFEFYHKCDNTCMESVKNGTYDYPKYSEEAKLNREEIDGVKLESTRIYQILAIYSTVASSLVLVVSLGAISFWMCSNGSLQCRICI

SEQ ID NO: 2670 - protein, 566 aa, Artificial Sequence; identical to SEQ ID NO: 2669
  derived and/or modified protein sequence (wt) from hemagglutinin__InfluenzaA__ACQ63239

SEQ ID NO: 2671 - protein, 566 aa, Artificial Sequence; identical to SEQ ID NO: 2669
  derived and/or modified protein sequence (wt) from hemagglutinin__InfluenzaA__ACQ63244

SEQ ID NO: 2672 - protein, 566 aa, Artificial Sequence; identical to SEQ ID NO: 2669
  derived and/or modified protein sequence (wt) from hemagglutinin__InfluenzaA__ACQ63257

SEQ ID NO: 2673 - protein, 566 aa, Artificial Sequence
  derived and/or modified protein sequence (wt) from hemagglutinin__InfluenzaA__ACQ65691
MKTIIALSYILCLVFAQKLPGNDNSTATLCLGHHAVPNGTIVKTITNDQIEVTNATELVQSSSTGGICDSPHQILDGENCTLIDALLGDPQCDGFQNKKWDLFVERSKAYSNCYPYDVPDYASLRSLVASSGTLEFNNESFNWTGVTQNGTSSSCKRGSDNSFFSRLNWLTHLKFKYPALNVTMPNNEKFDKLYIWGVHHPGTDNDQIFPYAQASGRITVSTKRSQQTVIPNIGSRPRVRDIPSRISIYWTIVKPGDILLINSTGNLIAPRGYFKIRSGKSSIMRSDAPIGKCNSECITPNGSIPNDKPFQNVNRITYGACPRYVKQNTLKLATGMRNVPEKQTRGIFGAIAGFIENGWEGMVDGWYGFRHQNSEGIGQAADLKSTQAAINQINGKLNRLIGKTNEKFHQIEKEFSEVEGRIQDLEKYVEDTKIDLWSYNAELLVALENQHTIDLTDSEMNKLFERTKKQLRENAEDMGNGCFKIYHKCDNACIGSIRNGTYDHDVYRDEALNNRFQIKGVELKSGYKDWILWISFTISCFLLCVALLGFIMWACQKGNIRCNICI

SEQ ID NO: 2674 - protein, 566 aa, Artificial Sequence; identical to SEQ ID NO: 2434
  derived and/or modified protein sequence (wt) from hemagglutinin__InfluenzaA__ACQ65713

SEQ ID NO: 2675 - protein, 566 aa, Artificial Sequence
  derived and/or modified protein sequence (wt) from hemagglutinin__InfluenzaA__ACQ65724
MKTIIALSYILCLVFAQKLPGNDNSTATLCLGHHAVPNGTIVKTITNDQIEVTNATELVQSSSTGEICDSPHQILDGENCTLIDALLGDPQCDGFQNKKWDLFVERSKAYSNCYPYDVPDYASLRSLVASSGTLEFNNESFNWAGVTQNGTSSACIRRSNNSFFSRLNWLTHLKFKYPALNVTMPNNEQFDKLYIWGVHHPGTDNDQIFLYAQASGRITVSTKRSQQTVIPNIGSRPRVRNIPSRISIYWTIVKPGDILLINSTGNLIAPRGYFKIRSGKSSIMRSDAPIGKCNSECITPNGSIPNDKPFQNVNRITYGACPRYVKQNTLKLATGMRNVPEKQTRGIFGAIAGFIENGWEGMVDGWYGFRHQNSEGRGQAADLKSTQAAIDQINGKLNRLIGKTNEKFHQIEKEFSEVEGRIQDLEKYVEDTKIDLWSYNAELLVALENQHTIDLTDSEMNKLFEKTKKQLRENAEDMGNGCFKIYHKCDNACIGSIRNGTYDHDVYRDEALNNRFQIKGVELKSGYKDWILWISFAISCFLLCVALLGFIMWACQKGNIRCNICI

SEQ ID NO: 2676 - protein, 566 aa, Artificial Sequence
  derived and/or modified protein sequence (wt) from hemagglutinin__InfluenzaA__ACQ65747
MKTIIALSYILCLVFAQKLPGNDNSTATLCLGHHAVPNGTIVKTITNDQIEVTNATELVQSSSTGEICDSPHQILDGENCTLIDALLGDPQCDGFQNKKWDLFVERSKAYSNCYPYDVPDYASLRSLVASSGTLEFNNESFNWTGVTQNGTSSACIRRTNNSFFSRLNWLTHLKFKYPALNVTMPNNEKFDKLYIWGVHHPGTDNDQIFLYAQASGRITVSTKRSQQTVIPNIGSRPRVRNIPSRISIYWTIVKPGDILLINSTGNLIAPRGYFKIRSGKSSIMRSDAPIGKCNSECITPNGSIPNDKPFQNVNRITYGACPRYVKQNTLKLATGMRNVPEKQTRGIFGAIAGFIENGWEGMMDGWYGFRHQNSEGIGQAADLKSTQAAIDQINGKLNGLIGKTNEKFHQIEKEFSEVEGRIQDLEKYVEDTKIDLWSYNAELLVALENQHTIDLTDSEMNKLFEKTKKQLRENAEDMGNGCFKIYHKCDNACIGSIRNGTYDHDVYRDEALNNRFQIKGVELKSGYKDWILWISFAISCFLLCVALLGFIMWACQKGNIRCNICI

SEQ ID NO: 2677 - protein, 565 aa, Artificial Sequence
  derived and/or modified protein sequence (wt) from hemagglutinin__InfluenzaA__ACQ65758
MKVKLLVLLCTFTATYADTICIGYHANNSTDTVDTVLEKNVTVTHSVNLLENSHNGKLCLLKGIAPLQLGNCSVAGWILGNPECELLISKESWSYVVEKPNPENGTCYPGHFADYEELREQLSSVSSFERFEIFPKESSWPNHTVTGVSASCSHNGESSFYRNLLWLTGKNGLYPNLSKSYANNKGKEVLVLWGVHHPPNIGDQNTLYHTENAYVSVVSSHYSRKFTPEIAKRPKVRDQEGRINYYWTLLEPGDTIIFEANGNLIAPRYAFALSRGFGSGIINSNAPMDKCDAKCQTPQGAINSSLPFQNVHPVTIGECPKYVRSAKLRMVTGLRNIPSIQSRGLFGAIAGFIEGGWTGMVDGWYGYHHQNEQGSGYAADQKSTQNAINGITNKVNSVIEKMNTQFTAVGKEFNKLERRMENLNKKVDDGFIDIWTYNAELLVLLENERTLDFHDSNVKNLYEKVKSQLKNNAKEIGNGCFEFYHKCNDECMESVKNGTYDYPKYSEESKLNREKIDGVKLESMGVYQILAIYSTVASSLVLLVSLGAISFWMCSNGSLQCRICI

SEQ ID NO: 2678 - protein, 566 aa, Artificial Sequence; identical to SEQ ID NO: 2656
  derived and/or modified protein sequence (wt) from hemagglutinin__InfluenzaA__ACQ73386

SEQ ID NO: 2679 - protein, 566 aa, Artificial Sequence; identical to SEQ ID NO: 2669
  derived and/or modified protein sequence (wt) from hemagglutinin__InfluenzaA__ACQ73387

SEQ ID NO: 2680 - protein, 566 aa, Artificial Sequence
  derived and/or modified protein sequence (wt) from hemagglutinin__InfluenzaA__ACQ73555
MKTIIALSYILCLVFAQKLPGNDNSTATLCLGHHAVPNGTIVKTITNDQIEVTNATELVQSSSTGGICDSPHQILDGENCTLIDALLGDPQCDGFQNKKWDLFVERSKAYSNCYPYDVPDYASLRSLVASSGTLEFNNESFNWTGVTQNGTSSACKRRSNNSFFSRLNWLTHLKFKYPALNVTKPNNEKFDKLYIWGVHHPGTDNDQIFLYAQASGRITVSTKRSQQTVIPNIGSRPRVRNIPSRISIYWTIVKPGDILLINSTGNLIAPRGYFKIRSGKSSIMRSDAPIGKCNSECITPNGSIPNDKPFQNVNRITYGACPRYVKQNTLKLATGMRNVPEKQTRGIFGAIAGFIENGWEGMVDGWYGFRHQNSEGIGQAADLKSTQAAINQINGKLNRLIGKTNEKFHQIEKEFSEVEGRIQDLEKYVEDTKIDLWSYNAELLVALENQHTIDLTDSEMNKLFERTKKQLRENAEDMGNGCFKIYHKCDNACIGSIRNGTYDHDVYRDEALNNRFQIKGVELKSGYKDWILWISFAISCFLLCVALLGFIMWACQKGNIRCNICI

SEQ ID NO: 2681 - protein, 566 aa, Artificial Sequence; identical to SEQ ID NO: 2669
  derived and/or modified protein sequence (wt) from hemagglutinin__InfluenzaA__ACQ76294

SEQ ID NO: 2682 - protein, 566 aa, Artificial Sequence; identical to SEQ ID NO: 2669
  derived and/or modified protein sequence (wt) from hemagglutinin__InfluenzaA__ACQ76314

SEQ ID NO: 2683 - protein, 566 aa, Artificial Sequence; identical to SEQ ID NO: 2669
  derived and/or modified protein sequence (wt) from hemagglutinin__InfluenzaA__ACQ76317

SEQ ID NO: 2684 - protein, 566 aa, Artificial Sequence
  derived and/or modified protein sequence (wt) from hemagglutinin__InfluenzaA__ACQ76318
MKAILVVLLYTFATANADTLCIGYHANNSTDTVDTVLEKNVTVTHSVNLLEDKHNGKLCKLRGVAPLHLGKCNIAGWILGNPECESLSTASSWSYIVETPSSDNGTCYPGDFIDYEELREQLSSVSSFERFEIFPKTSSWPNHDSNKGVTAACPHAGAKSFYKNLIWLVKKGNSYPKLSKSYINDKGKEVLVLWGIHHPSTSADQQSLYQNADTYVFVGSSRYSKKFKPEIAIRPKVRDQEGRMNYYWTLVEPGDKITFEATGNLVVPRYAFAMERNAGSGIIISDTPVHDCNTTCQTPKGAINTSLPFQNIHPITIGKCPKYVKSTKLRLATGLRNIPSIQSRGLFGAIAGFIEGGWTGMVDGWYGYHHQNEQGSGYAADLKSTQNAIDEITNKVNSVIEKMNTQFTAVGKEFNHLEKRIENLNKKVDDGFLDIWTYNAELLVLLENERTLDYHDSNVKNLYEKVRSQLKNNAKEIGNGCFEFYHKCDNTCMESVKNGTYDYPKYSEEAKLNREEIDGVKLESTRIYQILAIYSTVASSLVLVVSLGAISFWMCSNGSLQCRICI

SEQ ID NO: 2685 - protein, 566 aa, Artificial Sequence; identical to SEQ ID NO: 2656
  derived and/or modified protein sequence (wt) from hemagglutinin__InfluenzaA__ACQ76326

SEQ ID NO: 2686 - protein, 566 aa, Artificial Sequence; identical to SEQ ID NO: 2656
  derived and/or modified protein sequence (wt) from hemagglutinin__InfluenzaA__ACQ76336

SEQ ID NO: 2687 - protein, 566 aa, Artificial Sequence; identical to SEQ ID NO: 2656
  derived and/or modified protein sequence (wt) from hemagglutinin__InfluenzaA__ACQ76347

SEQ ID NO: 2688 - protein, 566 aa, Artificial Sequence; identical to SEQ ID NO: 2669
  derived and/or modified protein sequence (wt) from hemagglutinin__InfluenzaA__ACQ76365

SEQ ID NO: 2689 - protein, 566 aa, Artificial Sequence; identical to SEQ ID NO: 2669
  derived and/or modified protein sequence (wt) from hemagglutinin__InfluenzaA__ACQ76370

SEQ ID NO: 2690 - protein, 566 aa, Artificial Sequence; identical to SEQ ID NO: 2656
  derived and/or modified protein sequence (wt) from hemagglutinin__InfluenzaA__ACQ76376

SEQ ID NO: 2691 - protein, 566 aa, Artificial Sequence
  derived and/or modified protein sequence (wt) from hemagglutinin__InfluenzaA__ACQ76383
MKAILVVLLYTFATANADTLCIGYHANNSTDTVDTVLEKNVTVTHSVNLLEDKHNGKLCKLRGVAPLHLGKCNIAGWILGNPECESLSTASSWSYIVETSSSDNGTCYPGDFIDYEELREQLSSVSSFERFEIFPKTSSWPNHDSNKGITAACPHAGAKSFYKNLIWLVKKGNSYPKLSKSYINDKGKEVLVLWGIHHPSTSADQQSLYQNADAYVFVGSSRYSKKFKPEIAIRPKVRDQEGRMNYYWTLVEPGDKITFEATGNLVVPRYAFAMERNAGSGIIISDTPVHDCNTTCQTPKGAINTSLPFQNIHPITIGKCPKYVKSTKLRLATGLRNVPSIQSRGLFGAIAGFIEGGWTGMVDGWYGYHHQNEQGSGYAADLKSTQNAIDEITNKVNSVIEKMNTQFTAVGKEFNHLEKRIENLNKKVDDGFLDIWTYNAELLVLLENERTLDYHDSNVKNLYEKVRSQLKNNAKEIGNGCFEFYHKCDNTCMESVKNGTYDYPKYSEEAKLNREEIDGVKLESTRIYQILAIYSTVASSLVLVVSLGAISFWMCSNGSLQCRICI

SEQ ID NO: 2692 - protein, 566 aa, Artificial Sequence; identical to SEQ ID NO: 2669
  derived and/or modified protein sequence (wt) from hemagglutinin__InfluenzaA__ACQ76389

SEQ ID NO: 2693 - protein, 566 aa, Artificial Sequence; identical to SEQ ID NO: 2656
  derived and/or modified protein sequence (wt) from hemagglutinin__InfluenzaA__ACQ76401

SEQ ID NO: 2694 - protein, 566 aa, Artificial Sequence; identical to SEQ ID NO: 2669
  derived and/or modified protein sequence (wt) from hemagglutinin__InfluenzaA__ACQ76405

SEQ ID NO: 2695 - protein, 566 aa, Artificial Sequence
  derived and/or modified protein sequence (wt) from hemagglutinin__InfluenzaA__ACQ76408
MKAILVVMLYTFATANADTLCIGYHANNSTDTVDTVLEKNVTVTHSVNLLEDKHNGKLCKLRGVAPLHLGKCNIAGWILGNPECESLSTASSWSYIVETSSSDNGTCYPGDFIDYEELREQLSSVSSFERFEIFPKTSSWPNHDSNKGVTAACPHAGAKSFYKNLIWLVKKGNSYPKLSKSYINDKGKEVLVLWGIHHPSTSADQQSLYQNADAYVFVGSSRYSKKFKPEIAIRPKVRDQEGRMNYYWTLVEPGDKITFEATGNLVVPRYAFAMERNAGSGIIISDTPVHDCNTTCQTPKGAINTSLPFQNIHPITIGKCPKYVKSTKLRLATGLRNVPSIQSRGLFGAIAGFIEGGWTGMVDGWYGYHHQNEQGSGYAADLKSTQNAIDEITNKVNSVIEKMNTQFTAVGKEFNHLEKRIENLNKKVDDGFLDIWTYNAELLVLLENERTLDYHDSNVKNLYEKVRSQLKNNAKEIGNGCFEFYHKCDNTCMESVKNGTYDYPKYSEEAKLNREEIDGVKLESTRIYQILAIYSTVASSLVLVVSLGAISFWMCSNGSLQCRICI

SEQ ID NO: 2696 - protein, 566 aa, Artificial Sequence
  derived and/or modified protein sequence (wt) from hemagglutinin__InfluenzaA__ACQ77601
MKTIIALSYILCLAFAQKLPGNDNSTATLCLGHHAVPNGTLVKTITNDQIEVTNATELVQSSSTGRICDSPHQILDGENCTLIDALLGDPHCDGFQNKEWDLFVERSKAYSDCYPYDVPDYASLRSLVASSGTLEFNNESFNWTGVAQNGTSSACKRRSIKSFFSRLNWLHQLENRYPAPNVTMPNNDKFDKLYIWGVHHPSTDSDQISVYAQASGRVTVSTKRSQQTVIPNIGSRPWVRGISSRISIYWTIVKPGDILLINSTGNLIAPRGYFKIRSGKSSIMRSDAPIGKCNSECITPNGSIPNDKPFQNVNRITYGACPRYVKQNTLKLATGMRNVPEKQTRGIFGAIAGFIENGWEGMMDGWYGFRHQNSEGTGQAADLKSTQAAINQINGKLNKLIEKTNEKFHQIEKEFSEVEGRIQDLEKYVEDTKIDLWSYNAELLVALENQHTIDLTDSEMNKLFERTRKQLRENAEDMGNGCFKIYHKCDNACIGSIRNGTYDHDVYRDEALNNRFQIKGVELKSGYKDWILWISFAISCFLLCVVLLGFIMWACQKGNIRCNICI

SEQ ID NO: 2697 - protein, 566 aa, Artificial Sequence
  derived and/or modified protein sequence (wt) from hemagglutinin__InfluenzaA__ACQ83310
MKAILVVLLYTFATANADTLCIGYHANNSTDTVDTVLEKNVTVTHSVNLLEDKHNGKLCKLRGVAPLHLGKCNIAGWILGNPECESLSTASSWSYIVETSSSDNGTCYPGDFIDYEELREQLSSMSSFERFEIFPKTSSWPNHDSNKGVTAACPHAGAKSFYKNLIWLVKKGNSYPKLSKSYINDKGKEVLVLWGIHHPSTSADQQSLYQNADAYVFVGSSRYSKKLKPEIAIRPKVRDQEGRMNYYWTLVEPGDKITFEATGNLVVPRYAFAMERNAGSGIIISDTPVHDCNTTCQTPKGAINTSLPFQNIHPITIGKCPKYVKSTKLRLATGLRNVPSIQSRGLFGAIAGFIEGGWTGMVDGWYGYHHQNEQGSGYAADLKSTQNAIDEITNKVNSVIEKMNTQFTAVGKEFNHLEKRIENLNKKVDDGFLDIWTYNAELLVLLENERTLDYHDSNVKNLYEKVRSQLKNNAKEIGNGCFEFYHKCDNTCMESVKNGTYDYPKYSEEAKLNREEIDGVKLESTRIYQILAIYSTVASSLVLVVSLGAISFWMCSNGSLQCRICI

SEQ ID NO: 2698 - protein, 566 aa, Artificial Sequence; identical to SEQ ID NO: 2656
  derived and/or modified protein sequence (wt) from hemagglutinin__InfluenzaA__ACQ84451

SEQ ID NO: 2699 - protein, 566 aa, Artificial Sequence; identical to SEQ ID NO: 2656
  derived and/or modified protein sequence (wt) from hemagglutinin__InfluenzaA__ACQ84457

SEQ ID NO: 2700 - protein, 566 aa, Artificial Sequence
  derived and/or modified protein sequence (wt) from hemagglutinin__InfluenzaA__ACQ84477
MKAILLVLLYTFTAANADTLCIGYHANNSTDTVDTVLEKNVTVTHSVNLLEDRHNGKLCKLRGVAPLHLGKCNIAGWLLGNPECELLFTASSWSYIVETSNSDNGTCYPGDFINYEELREQLSSVSSFERFEIFPKASSWPDHETNRGVTAACPYAGANSFYRNLIWLVKKGNSYPKLSKSYVNNKEKEVLVLWGIHHPPTSTDQQSLYQNADAYVFVGSSKYNKKFKPEIATRPKVRGQAGRMNYYWTLVEPGDTITFEATGNLVVPRYAFAMKRGSGSGIIISDTPVHDCNTTCQTPKGAINTSLPFQNIHPVTIGECPKYVKSTKLRMATGLRNIPSIQSRGLFGAIAGFIEGGWTGMIDGWYGYHHQNEQGSGYAADQKSTQNAIDGITNKVNSVIEKMNTQFTAVGKEFNHLEKRIENLNKKVDDGFLDVWTYNAELLVLLENERTLDYHDSNVKNLYEKVRSQLKNNAKEIGNGCFEFYHKCDDTCMESVKNGTYDYPKYSEESKLNREEIDGVKLESTRIYQILAIYSTVASSLVLLVSLGAISFWMCSNGSLQCRICI

SEQ ID NO: 2701 - protein, 566 aa, Artificial Sequence
  derived and/or modified protein sequence (wt) from hemagglutinin__InfluenzaA__ACQ89900
MKAILVVLLYTFATANADTLCIGYHANNSTDTVDTVLEKNVTVTHSVNLLEDKHNGKLCKLRGVAPLHLGKCNIAGWILGNPECESLSTASSWSYIVETSSSDNGTCYPGDFIDYEELREQLSSVSSFERFEIFPKTSSWPNHDSNKGVTAACPHAGAKSFYKNLIWLVKKGNSYPKLSKSYINDKGKEVLVLWGIHHPSTSADQQSLYQNADAYVFVGSSRYSKKFKPEIAIRPKVRDQEGRMNYYWTLVEPGDKITFEATGNLVVPRYAFAMERNAGSGIIISDTPVHDCNTTCQTPKGAINTSLPFQNIHPITIGKCPKYVKSTKLRLATGLRNVPSIQSRGLFGAIAGFIEGGWTGMVDGWYGYHHQNEQGSGYAADLKSTQNAIDEITNKVNSVVEKMNTQFTAVGKEFNHLEKRIENLNKKVDDGFLDIWTYNAELLVLLENERTLDYHDSNVKNLYEKVRSQLKNNAKEIGNGCFEFYHKCDNTCMESVKNGTYDYPKYSEEAKLNREEIDGVKLESTRIYQILAIYSTVASSLVLVVSLGAISFWMCSNGSLQCRICI

SEQ ID NO: 2702 - protein, 566 aa, Artificial Sequence; identical to SEQ ID NO: 2669
  derived and/or modified protein sequence (wt) from hemagglutinin__InfluenzaA__ACQ89902

SEQ ID NO: 2703 - protein, 566 aa, Artificial Sequence
  derived and/or modified protein sequence (wt) from hemagglutinin__InfluenzaA__ACQ89904
MKAILVVLLYTFATANADTLCIGYHANNSTDTVDTVLEKNVTVTHSVNLLEDKHNGKLCKLRGVAPLHLGKCNIAGWILGNPECESLSTASSWSYIVETSSSDKGTCYPGDFIDYEELREQLSSVSSFERFEIFPKTSSWPNHDSNKGVTAACPHAGAKSFYKNLIWLVKKGNSYPKLSKSYINDKGKEVLVLWGIHHPSTSADQQSLYQNADAYVFVGTSRYSKKFKPEIAIRPKVRDQEGRMNYYWTLVEPGDKITFEATGNLVVPRYAFAMERNAGSGIIISDTPVHDCNTTCQTPKGAINTSLPFQNIHPITIGKCPKYVKSTKLRLATGLRNVPSIQSRGLFGAIAGFIEGGWTGMVDGWYGYHHQNEQGSGYAADLKSTQNAIDEITNKVNSVIEKMNTQFTAVGKEFNHLEKRIENLNKKVDDGFLDIWTYNAELLVLLENERTLDYHDSNVKNLYEKVRSQLKNNAKEIGNGCFEFYHKCDNTCMESVKNGTYDYPKYSEEAKLNREEIDGVKLESTRIYQILAIYSTVASSLVLVVSLGAISFWMCSNGSLQCRICI

SEQ ID NO: 2704 - protein, 566 aa, Artificial Sequence; identical to SEQ ID NO: 2701
  derived and/or modified protein sequence (wt) from hemagglutinin__InfluenzaA__ACQ89905

SEQ ID NO: 2705 - protein, 566 aa, Artificial Sequence; identical to SEQ ID NO: 2656
  derived and/or modified protein sequence (wt) from hemagglutinin__InfluenzaA__ACQ99607

SEQ ID NO: 2706 - protein, 566 aa, Artificial Sequence; identical to SEQ ID NO: 2656
  derived and/or modified protein sequence (wt) from hemagglutinin__InfluenzaA__ACQ99608

SEQ ID NO: 2707 - protein, 566 aa, Artificial Sequence; identical to SEQ ID NO: 2656
  derived and/or modified protein sequence (wt) from hemagglutinin__InfluenzaA__ACQ99609

SEQ ID NO: 2708 - protein, 566 aa, Artificial Sequence; identical to SEQ ID NO: 2656
  derived and/or modified protein sequence (wt) from hemagglutinin__InfluenzaA__ACQ99611

SEQ ID NO: 2709 - protein, 566 aa, Artificial Sequence
  derived and/or modified protein sequence (wt) from hemagglutinin__InfluenzaA__ACQ99614
MKAILVVLLYTFATANADTLCIGYHANNSTDTVDTVLEKNVTVTHSVNLLEDKHNGKLCKLRGVAPLHLGKCNIAGWILGNPECESLSTASSWSYIVETSSSDNGTCYPGDFIDYEELREQLSSVSSFERFEIFPKTSSWPNHDSNKGVTAACPHAGAKSFYKNLIWLVKKGNSYPKLSKSYINDKGKEVLVLWGIHHPSTSADQQSLYQNADAYVFVGSSRYSKKFKPEIAIRPKVRDQEGRMNYYWTLVEPGDKITFEATGNLVVPRYAFAMERNAGSGIIISDTPVHDCNTTCQTPKGAINTSLPFQNIHPITIGKCPKYVKSTKLRLATGLRNVPSIQSRGLFGAIAGFIEGGWTGMVDGWYGYHHQNEQGSGYAADLKSTQNAIDEITNKVNSVIEKMNTQFTAVGKEFNHLEKRIENLNKKVDDGFLDIWTYNAELLILLENERTLDYHDSNVKNLYEKVRSQLKNNAKEIGNGCFEFYHKCDNTCMESVKNGTYDYPKYSEEAKLNREEIDGVKLESTRIYQILAIYSTVASSLVLVVSLGAISFWMCSNGSLQCRICI

SEQ ID NO: 2710 - protein, 566 aa, Artificial Sequence; identical to SEQ ID NO: 2709
  derived and/or modified protein sequence (wt) from hemagglutinin__InfluenzaA__ACQ99616

SEQ ID NO: 2711 - protein, 566 aa, Artificial Sequence; identical to SEQ ID NO: 2656
  derived and/or modified protein sequence (wt) from hemagglutinin__InfluenzaA__ACQ99617

SEQ ID NO: 2712 - protein, 566 aa, Artificial Sequence; identical to SEQ ID NO: 2656
  derived and/or modified protein sequence (wt) from hemagglutinin__InfluenzaA__ACQ99618

SEQ ID NO: 2713 - protein, 566 aa, Artificial Sequence; identical to SEQ ID NO: 2656
  derived and/or modified protein sequence (wt) from hemagglutinin__InfluenzaA__ACQ99619

SEQ ID NO: 2714 - protein, 566 aa, Artificial Sequence; identical to SEQ ID NO: 2656
  derived and/or modified protein sequence (wt) from hemagglutinin__InfluenzaA__ACQ99620

SEQ ID NO: 2715 - protein, 566 aa, Artificial Sequence; identical to SEQ ID NO: 2709
  derived and/or modified protein sequence (wt) from hemagglutinin__InfluenzaA__ACQ99621

SEQ ID NO: 2716 - protein, 566 aa, Artificial Sequence; identical to SEQ ID NO: 2656
  derived and/or modified protein sequence (wt) from hemagglutinin__InfluenzaA__ACQ99622

SEQ ID NO: 2717 - protein, 566 aa, Artificial Sequence
  derived and/or modified protein sequence (wt) from hemagglutinin__InfluenzaA__ACR01014
MKAILVVLLYTFATANADTLCIGYHANNSTDTVDTVLEKNVTVTHSVNLLEDKHNGKLCKLRGVAPLHLGKCNIAGWILGNPECESLSTASSWSYIVETSSSDNGTCYPGDFIDYEELREQLSSVSSFERFEIFPKTSSWPNHDSNKGVTAACPHAGAKSFYKNLIWLVKKGNSYPKLSKSYINDKGKEVLVLWGIHHPSTSADQQSLYQNADAYVFVGSSRYSKKFKPEIAIRPKVRDQEGRMNYYWTLVEPGDKITFEATGNLVVPRYAFAMERNAGSGIIISDTPVHDCNTTCQTPKGAINTSLPFQNIHPITIGKCPKYVKSTKLRLATGLRNVPSIQSRGLFGAIAGFIEGGWTGMVDGWYGYHHQNEQGSGYAADLKSTQNAIDEITNKVNSVIEKMNTQFTAVGKEFNHLEKRMENLNKKVDDGFLDIWTYNAELLVLLENERTLDYHDSNVKNLYEKVRSQLKNNAKEIGNGCFEFYHKCDNTCMESVKNGTYDYPKYSEEAKLNREEIDGVKLESTRIYQILAIYSTVASSLVLVVSLGAISFWMCSNGSLQCRICI

SEQ ID NO: 2718 - protein, 566 aa, Artificial Sequence; identical to SEQ ID NO: 2669
  derived and/or modified protein sequence (wt) from hemagglutinin__InfluenzaA__ACR08419

SEQ ID NO: 2719 - protein, 566 aa, Artificial Sequence
  derived and/or modified protein sequence (wt) from hemagglutinin__InfluenzaA__ACR08429
MKAILVVLLYTFATANADTLCIGYHANNSTDTVDTVLEKNVTVTHSVNLLEDKHNGKLCKLRGVAPLHLGKCNIAGWILGNPECESLSTASSWSYIVETSSSDNGTCYPGDFIDYEELREQLSSVSSFERFEIFPKTSSWPNHDSNKGVTAACPHAGAKSFYKNLIWLVKKGNSYPKLSKSYINDKGKEVLVLWGIHHPSTSADQQSLYQNADAYVFVGTSRYSKKFKPEIAIRPKVRDQEGRMNYYWTLVEPGDKITFEATGNLVVPRYAFAMERNTGSGIIISDTPVHDCNTTCQTPKGAINTSLPFQNIHPITIGKCPKYVKSTKLRLATGLRNVPSIQSRGLFGAIAGFIEGGWTGMVDGWYGYHHQNEQGSGYAADLKSTQNAIDEITNKVNSVIEKMNTQFTAVGKEFNHLEKRIENLNKKVDDGFLDIWTYNAELLVLLENERTLDYHDSNVKNLYEKVRSQLKNNAKEIGNGCFEFYHKCDNTCMESVKNGTYDYPKYSEEAKLNREEIDGVKLESTRIYQILAIYSTVASSLVLVVSLGAISFWMCSNGSLQCRICI

SEQ ID NO: 2720 - protein, 566 aa, Artificial Sequence; identical to SEQ ID NO: 2669
  derived and/or modified protein sequence (wt) from hemagglutinin__InfluenzaA__ACR08439

SEQ ID NO: 2721 - protein, 566 aa, Artificial Sequence; identical to SEQ ID NO: 2669
  derived and/or modified protein sequence (wt) from hemagglutinin__InfluenzaA__ACR08449

SEQ ID NO: 2722 - protein, 566 aa, Artificial Sequence
  derived and/or modified protein sequence (wt) from hemagglutinin__InfluenzaA__ACR08459
MKAILVVLLYTFATANADTLCIGYHANNSTDTVDTVLEKNVTVTHSVNLLEDKHNGKLCKLRGVAPLHLGKCNIAGWILGNPECESLSTASSWSYIVETSSSDNGTCYPGDFIDYEELREQLSSVSSFERFEIFPKTSSWPNHDSNKGVTAACPHAGAKSFYKNLIWLVKKGNSYPKLSKSYINDKGKEVLVLWGIHHPSTSADQQSLYQNADAYVFVGSSRYSKKFKPEIAIRPKVRDQEGRMNYYWTLVEPGDKITFEATGNLVVPRYAFAMERNAGSGIIISDTPVHDCDTTCQTPKGAINTSLPFQNIHPITIGKCPKYVKSTKLRLATGLRNVPSIQSRGLFGAIAGFIEGGWTGMVDGWYGYHHQNEQGSGYAADLKSTQNAIDEITNKVNSVIEKMNTQFTAVGKEFNHLEKRIENLNKKVDDGFLDIWTYNAELLVLLENERTLDYHDSNVKNLYEKVRSQLKNNAKEIGNGCFEFYHKCDNTCMESVKNGTYDYPKYSEEAKLNREEIDGVKLESTRIYQILAIYSTVASSLVLVVSLGAISFWMCSNGSLQCRICI

SEQ ID NO: 2723 - protein, 566 aa, Artificial Sequence; identical to SEQ ID NO: 2656
  derived and/or modified protein sequence (wt) from hemagglutinin__InfluenzaA__ACR08528

SEQ ID NO: 2724 - protein, 566 aa, Artificial Sequence; identical to SEQ ID NO: 2656
  derived and/or modified protein sequence (wt) from hemagglutinin__InfluenzaA__ACR08530

SEQ ID NO: 2725 - protein, 566 aa, Artificial Sequence; identical to SEQ ID NO: 2722
  derived and/or modified protein sequence (wt) from hemagglutinin__InfluenzaA__ACR08531

SEQ ID NO: 2726 - protein, 566 aa, Artificial Sequence; identical to SEQ ID NO: 2669
  derived and/or modified protein sequence (wt) from hemagglutinin__InfluenzaA__ACR08533

SEQ ID NO: 2727 - protein, 566 aa, Artificial Sequence; identical to SEQ ID NO: 2722
  derived and/or modified protein sequence (wt) from hemagglutinin__InfluenzaA__ACR08535

SEQ ID NO: 2728 - protein, 566 aa, Artificial Sequence; identical to SEQ ID NO: 2669
  derived and/or modified protein sequence (wt) from hemagglutinin__InfluenzaA__ACR08536

SEQ ID NO: 2729 - protein, 566 aa, Artificial Sequence; identical to SEQ ID NO: 2722
  derived and/or modified protein sequence (wt) from hemagglutinin__InfluenzaA__ACR08537

SEQ ID NO: 2730 - protein, 566 aa, Artificial Sequence; identical to SEQ ID NO: 2722
  derived and/or modified protein sequence (wt) from hemagglutinin__InfluenzaA__ACR08538

SEQ ID NO: 2731 - protein, 566 aa, Artificial Sequence; identical to SEQ ID NO: 2669
  derived and/or modified protein sequence (wt) from hemagglutinin__InfluenzaA__ACR08539

SEQ ID NO: 2732 - protein, 566 aa, Artificial Sequence; identical to SEQ ID NO: 2669
  derived and/or modified protein sequence (wt) from hemagglutinin__InfluenzaA__ACR08540

SEQ ID NO: 2733 - protein, 566 aa, Artificial Sequence; identical to SEQ ID NO: 2656
  derived and/or modified protein sequence (wt) from hemagglutinin__InfluenzaA__ACR08542

SEQ ID NO: 2734 - protein, 566 aa, Artificial Sequence; identical to SEQ ID NO: 2656
  derived and/or modified protein sequence (wt) from hemagglutinin__InfluenzaA__ACR08543

SEQ ID NO: 2735 - protein, 566 aa, Artificial Sequence; identical to SEQ ID NO: 2695
  derived and/or modified protein sequence (wt) from hemagglutinin__InfluenzaA__ACR08544

SEQ ID NO: 2736 - protein, 566 aa, Artificial Sequence; identical to SEQ ID NO: 2722
  derived and/or modified protein sequence (wt) from hemagglutinin__InfluenzaA__ACR08545

SEQ ID NO: 2737 - protein, 566 aa, Artificial Sequence; identical to SEQ ID NO: 2656
  derived and/or modified protein sequence (wt) from hemagglutinin__InfluenzaA__ACR08546

SEQ ID NO: 2738 - protein, 566 aa, Artificial Sequence; identical to SEQ ID NO: 2669
  derived and/or modified protein sequence (wt) from hemagglutinin__InfluenzaA__ACR08547

SEQ ID NO: 2739 - protein, 566 aa, Artificial Sequence; identical to SEQ ID NO: 2722
  derived and/or modified protein sequence (wt) from hemagglutinin__InfluenzaA__ACR08548

SEQ ID NO: 2740 - protein, 566 aa, Artificial Sequence; identical to SEQ ID NO: 2669
  derived and/or modified protein sequence (wt) from hemagglutinin__InfluenzaA__ACR08549

SEQ ID NO: 2741 - protein, 566 aa, Artificial Sequence; identical to SEQ ID NO: 2669
  derived and/or modified protein sequence (wt) from hemagglutinin__InfluenzaA__ACR08550

SEQ ID NO: 2742 - protein, 566 aa, Artificial Sequence; identical to SEQ ID NO: 2669
  derived and/or modified protein sequence (wt) from hemagglutinin__InfluenzaA__ACR08551

SEQ ID NO: 2743 - protein, 566 aa, Artificial Sequence; identical to SEQ ID NO: 2656
  derived and/or modified protein sequence (wt) from hemagglutinin__InfluenzaA__ACR08552

SEQ ID NO: 2744 - protein, 566 aa, Artificial Sequence; identical to SEQ ID NO: 2695
  derived and/or modified protein sequence (wt) from hemagglutinin__InfluenzaA__ACR08553

SEQ ID NO: 2745 - protein, 566 aa, Artificial Sequence; identical to SEQ ID NO: 2695
  derived and/or modified protein sequence (wt) from hemagglutinin__InfluenzaA__ACR08554

SEQ ID NO: 2746 - protein, 566 aa, Artificial Sequence; identical to SEQ ID NO: 2656
  derived and/or modified protein sequence (wt) from hemagglutinin__InfluenzaA__ACR09365

SEQ ID NO: 2747 - protein, 566 aa, Artificial Sequence; identical to SEQ ID NO: 2656
  derived and/or modified protein sequence (wt) from hemagglutinin__InfluenzaA__ACR09366

SEQ ID NO: 2748 - protein, 566 aa, Artificial Sequence; identical to SEQ ID NO: 2656
  derived and/or modified protein sequence (wt) from hemagglutinin__InfluenzaA__ACR09367

SEQ ID NO: 2749 - protein, 566 aa, Artificial Sequence; identical to SEQ ID NO: 2656
  derived and/or modified protein sequence (wt) from hemagglutinin__InfluenzaA__ACR09368

SEQ ID NO: 2750 - protein, 566 aa, Artificial Sequence; identical to SEQ ID NO: 2656
  derived and/or modified protein sequence (wt) from hemagglutinin__InfluenzaA__ACR09369

SEQ ID NO: 2751 - protein, 566 aa, Artificial Sequence; identical to SEQ ID NO: 2656
  derived and/or modified protein sequence (wt) from hemagglutinin__InfluenzaA__ACR09370

SEQ ID NO: 2752 - protein, 566 aa, Artificial Sequence; identical to SEQ ID NO: 2656
  derived and/or modified protein sequence (wt) from hemagglutinin__InfluenzaA__ACR09371

SEQ ID NO: 2753 - protein, 566 aa, Artificial Sequence; identical to SEQ ID NO: 2656
  derived and/or modified protein sequence (wt) from hemagglutinin__InfluenzaA__ACR09373

SEQ ID NO: 2754 - protein, 566 aa, Artificial Sequence; identical to SEQ ID NO: 2656
  derived and/or modified protein sequence (wt) from hemagglutinin__InfluenzaA__ACR09374

SEQ ID NO: 2755 - protein, 566 aa, Artificial Sequence
  derived and/or modified protein sequence (wt) from hemagglutinin__InfluenzaA__ACR09375
MKAILVVLLYTFATANADTLCIGYHANNSTDTVDTVLEKNVTVTHSVNLLEDKHNGKLCKLRGVAPLHLGKCNIAGWILGNPECESLSTASSWSYIVETSSSDNGTCYPGDFIDYEELREQLSSVSSFERFEIFPKTSSWPNHDSNKGVTAACPHAGAKSFYKNLIWLVKKGNSYPKLSKSYINDKGKEVLVLWGIHHPSTSADQQSLYQNADAYVFVGSSRYSKKFKPEIAIRPKVRDQEGRMNYYWTLVEPGDKITFEATGNLVVPRYAFAMEKNAGSGIIISDTPVHDCNTTCQTPKGAINTSLPFQNIHPITIGKCPKYVKSTKLRLATGLRNVPSIQSRGLFGAIAGFIEGGWTGMVDGWYGYHHQNEQGSGYAADLKSTQNAIDEITNKVNSVIEKMNTQFTAVGKEFNHLEKRIENLNKKVDDGFLDIWTYNAELLVLLENERTLDYHDSNVKNLYEKVRSQLKNNAKEIGNGCFEFYHKCDNTCMESVKNGTYDYPKYSEEAKLNREEIDGVKLESTRIYQILAIYSTVASSLVLVVSLGAISFWMCSNGSLQCRICI

SEQ ID NO: 2756 - protein, 566 aa, Artificial Sequence; identical to SEQ ID NO: 2656
  derived and/or modified protein sequence (wt) from hemagglutinin__InfluenzaA__ACR09376

SEQ ID NO: 2757 - protein, 566 aa, Artificial Sequence; identical to SEQ ID NO: 2656
  derived and/or modified protein sequence (wt) from hemagglutinin__InfluenzaA__ACR09377

SEQ ID NO: 2758 - protein, 566 aa, Artificial Sequence; identical to SEQ ID NO: 2656
  derived and/or modified protein sequence (wt) from hemagglutinin__InfluenzaA__ACR09395

SEQ ID NO: 2759 - protein, 566 aa, Artificial Sequence; identical to SEQ ID NO: 2656
  derived and/or modified protein sequence (wt) from hemagglutinin__InfluenzaA__ACR09396

SEQ ID NO: 2760 - protein, 566 aa, Artificial Sequence
  derived and/or modified protein sequence (wt) from hemagglutinin__InfluenzaA__ACR10186
MKAILVVLLYTFATANADTLCIGYHANNSTDTVDTVLEKNVTVTHSVNLLEDKHNGKLCKLRGVAPLHLGKCNIAGWILGNPECESLSTASSWSYIVETSSSDNGTCYPGDFIDYEELREQLSSVSSFERFEIFPKTSSWPNHDSNKGVTAACPHAGAKSFYKNLIWLVKKGNSYPKLSKSYINDKGKEVLVLWGIHHPSTSADQQSLYQNADAYVFVGTSRYSKKFKPEIAIRPKVRDQEGRMNYYWTLVEPGDKITFEATGNLVVPRYAFAMERNAGSGIIISDTPVHDCNTTCQTPKGAINTSLPFQNIHPITIGKCPKYVKSTKLRLATGLRNVPSIQSRGLFGAIAGFIEGGWTGMVDGWYGYHHQNEQGSGYAADLKSTQNAIDEITNKVNSVIEKMNTQFTAVGKEFNHLEKRIENLNKKIDDGFLDIWTYNAELLVLLENERTLDYHDSNVKNLYEKVRSQLKNNAKEIGNGCFEFYHKCDNTCMESVKNGTYDYPKYSEEAKLNREEIDGVKLESTRIYQILAIYSTVASSLVLVVSLGAISFWMCSNGSLQCRICI

SEQ ID NO: 2761 - protein, 566 aa, Artificial Sequence; identical to SEQ ID NO: 2760
  derived and/or modified protein sequence (wt) from hemagglutinin__InfluenzaA__ACR10222

SEQ ID NO: 2762 - protein, 566 aa, Artificial Sequence
  derived and/or modified protein sequence (wt) from hemagglutinin__InfluenzaA__ACR10223
MKAILVVLLYTFTTANADTLCIGYHANNSTDTVDTVLEKNVTVTHSVNLLEDKHNGKLCKLRGVAPLHLGKCNIAGWILGNPECESLSTASSWSYIVETSSSDNGTCYPGDFIDYEELREQLSSVSSFERFEIFPKTSSWPNHDSNKGVTAACPHAGAKSFYKNLIWLVKKGNSYPKLSKSYINDKGKEVLVLWGIHHPSTSADQQSLYQNADAYVFVGSSRYSKKFKPEIAIRPKVRDQEGRMNYYWTLVEPGDKITFEATGNLVVPRYAFAMERNAGSGIIISDTPVHDCNTTCQTPKGAINTSLPFQNIHPITIGKCPKYVKSTKLRLATGLRNVPSIQSRGLFGAIAGFIEGGWTGMVDGWYGYHHQNEQGSGYAADLKSTQNAIDEITNKVNSVIEKMNTQFTAVGKEFNHLEKRIENLNKKVDDGFLDIWTYNAELLVLLENERTLDYHDSNVKNLYEKVRSQLKNNAKEIGNGCFEFYHKCDNTCMESVKNGTYDYPKYSEEAKLNREEIDGVKLESTRIYQILAIYSTVASSLVLVVSLGAISFWMCSNGSLQCRICI

SEQ ID NO: 2763 - protein, 566 aa, Artificial Sequence
  derived and/or modified protein sequence (wt) from hemagglutinin__InfluenzaA__ACR15183
MKTIIALSYILCLVFAQKLPGNDNSTATLCLGHHAVPNGTIVKTITNDQIEVTNATELVQSSSTGGICDSPHQILDGENCTLIDALLGDPQCDGFQNKKWDLFVERSKAYSNCYPYDVPDYASLRSLVASSGTLEFNNESFNWTGVTQNGTSSACKRGSDNSFFSRLNWLTHLKFKYPALNVTMPNNEKFDKLYIWGVHHPGTDNDQIFPYAQASGRITVSTKRSQQTVIPNIGSRPRVRNIPSRISIYWTIVKPGDILLINSTGNLIAPRGYFKIRSGKSSIMRSDAPIGKCNSECITPNGSIPNDKPFQNVNRITYGACPRYVKQNTLKLATGMRNVPEKQTRGIFGAIAGFIENGWEGMVDGWYGFRHQNSEGIGQAADLKSTQAAINQINGKLNRLIGKTNEKFHQIEKEFSEVEGRIQDLEKYVEDTKIDLWSYNAELLVALENQHTIDLTDSEMNKLFERTKKQLRENAEDMGNGCFKIYHKCDNACIGSIRNGTYDHDVYRDEALNNRFQIKGVELKSGYKDWILWISFAISCFLLCVALLGFIMWACQKGNIRCNICI

SEQ ID NO: 2764 - protein, 565 aa, Artificial Sequence
  derived and/or modified protein sequence (wt) from hemagglutinin__InfluenzaA__ACR15194
MKVKLLVLLCTFTATYADTICIGYHANNSTDTVDTVLEKNVTVTHSVNLLENSHNGKLCLLKGIAPLQLGNCSVAGWILGNPECELLISKESWSYIVEKPNPENGTCYPGHFADYEELREQLSSVSSFERFEIFPKESSWPNHTVTGVSASCSHNGESSFYRNLLWLTGKNGLYPNLSKSYANNKEKEVLVLWGVHHPPNIGNQKALYHTENAYVSVVSSHYSRKFTPEIAKRPKVRDQEGRINYYWTLLEPGDTIIFEANGNLIAPRYAFALSRGLGSGIINSNAPMDKCDAKCQTPQGAINSSLPFQNVHPVTIGECPKYVRSAKLRMVTGLRNIPSIQSRGLFGAIAGFIEGGWTGMVDGWYGYHHQNEQGSGYAADQKSTQNAINGITNKVNSVIEKMNTQFTAVGKEFNKLERRMENLNKKVDDGFIDIWTYNAELLVLLENERTLDFHDSNVKNLYEKVKSQLKNNAKEIGNRCFEFYHKCNDECMESVKNGTYDYPKYSEESKLNREKIDGVKLESMGVYQILAIYSTVASSLVLLVSLGAISFWMCSNGSLQCRICI

SEQ ID NO: 2765 - protein, 565 aa, Artificial Sequence; identical to SEQ ID NO: 870
  derived and/or modified protein sequence (wt) from hemagglutinin__InfluenzaA__ACR15216

SEQ ID NO: 2766 - protein, 566 aa, Artificial Sequence
  derived and/or modified protein sequence (wt) from hemagglutinin__InfluenzaA__ACR15227
MKTIIALSYILCLVFAQKLPGNDNSTATLCLGHHAVPNGTIVKTITNDQIEVTNATELVQSSSTGGICDSPHQILDGENCTLIDALLGDPQCDGFQNKKWDLFVERSKAYSNCYPYDVPDYASLRSLVASSGTLEFNNESFNWTGVTQNGTSSACQRRSNKSFFSRLNWLTHLKFKYPALNVTMPNNEKFDKLYIWGVHHPGTDNDQISLYAQTSGRITVSTKRSQQTVIPNIGSRPRVRDVPSRISIYWTIVKPGDILLINSTGNLIAPRGYFKIRSGKSSIMRSDAPIGKCNSECITPNGSIPNDKPFQNVNRITYGACPRYVKQNTLKLATGMRNVPERQTRGIFGAIAGFIENGWEGMMDGWYGFRHQNSEGTGQAADLKSTQAAINQINGKLNRLIGKTNEKFHQIEKEFSEVEGRIQDLEKYVEDTKIDLWSYNAELLVALENQHTIDLTDSEMNKLFERTKKQLRENAEDMGNGCFKIYHKCDNACIGSIRNGTYDHDVYRDEALNNRFQIKGVELKSGYKDWILWISFAISCFLLCVALLGFIMWACQKGNIRCNICI

SEQ ID NO: 2767 - protein, 565 aa, Artificial Sequence
  derived and/or modified protein sequence (wt) from hemagglutinin__InfluenzaA__ACR15238
MKVKLLVLLCTFTATYADTICIGYHANNSTDTVDTVLEKNVTVTHSVNLLENSHNGKLCLLKGIAPLQLGNCSVAGWILGNPECELLISKESWSYIVEKPNPENGTCYPGHFADYEELREQLSSVSSFERFEIFPKESSWPNHTVTGVSASCSHNGESSFYRNLLWLTGKNGLYPNLSKSYANNKEKEVLVLWGVHHPPNIGVQKALYHTENAYVSVVSSHYSRKFTPEIAKRPKVRDQEGRINYYWTLLEPGDTIIFEANGNLIAPRYAFALSRGFGSGIINSNAPMDKCDAKCQTPQGAINSSLPFQNVHPVTIGECPKYVRSAKLRMVTGLRNIPSIQSRGLFGAIAGFIEGGWTGMVDGWYGYQHQNEQGSGYAADQKSTQNAINGITNKVNSVIEKMNTQFTAVGKEFNKLERRMENLNKKVDDGFIDIWTYNAELLVLLENERTLDFHDSNVKNLYEKVKSQLKNNAKEIGNGCFEFYHKCNDECMESVKNGTYDYPKYSEESKLNREKIDGVKLESMGVYQILAIYSTVASSLVLLVSLGAISFWMCSNGSLQCRICI

SEQ ID NO: 2768 - protein, 566 aa, Artificial Sequence
  derived and/or modified protein sequence (wt) from hemagglutinin__InfluenzaA__ACR15249
MKTIIALSYILCLVFAQKLPGNDNSTATLCLGHHAVPNGTIVKTITNDQIEVTNATELVQSSSTGEICDSPHQILDGENCTLIDALLGDPQCDGFQNKKWDLFVERSKAYSNCYPYDVPDYASLRSLVASSGTLEFNNESFNWTGVTQNGTSSACIRRSNNSFFSRLNWLTHSKFKYPALNVTMPNNEKFDKLYIWGVHHPGTDNDQIFLYAQASGRITVSTKRSQQTVIPNIGSRPRVRNIPSRISIYWTIVKPGDILLINSTGNLIAPRGYFKIRSGKSSIMRSDAPIGKCNSECITPNGSIPNDKPFQNVNRITYGACPRYVKQNTLKLATGMRNVPEKQTRGIFGAIAGFIENGWEGMVDGWYGFRHQNSEGIGQAADLKSTQAAIDQINGKLNRLIGKTNEKFHQIEKEFSEVEGRIQDLEKYVEDTKIDLWSYNAELLVALENQHTIDLTDSEMNKLFEKTKKQLRENAEDMGNGCFKIYHKCDNACIGSIRNGTYDHDVYRDEALNNRFQIKGVELKSGYKDWILWISFAISCFLLCVALLGFIMWACQKGNIRCNICI

SEQ ID NO: 2769 - protein, 566 aa, Artificial Sequence
  derived and/or modified protein sequence (wt) from hemagglutinin__InfluenzaA__ACR15282
MKTIIALSYILCLVFAQKLPGNDNSTATLCLGHHAVPNGTIVKTIMNDQIEVTNATELVQSSSTGEICDSPHQILDGENCTLIDALLGDPQCDGFQNKKWDLFVERSKAYSNCYPYDVPDYASLRSLVASSGTLEFNNESFNWTGVTQNGTSSACIRRSNNSFFSRLNWLTHSKFKYPALNVTMPNNEKFDKLYIWGVHHPGTDNDQIFLYAQASGRITVSTKRSQQTVIPNIGSRPRVRNIPSRISIYWTIVKPGDILLINSTGNLIAPRGYFKIRSGKSSIMRSDAPIGKCNSECITPNGSIPNDKPFQNVNRITYGACPRYVKQNTLKLATGMRNVPEKQTRGIFGAIAGFIENGWEGMVDGWYGFRHQNSEGIGQAADLKSTQAAIDQINGKLNRLIGKTNEKFHQIEKEFSEVEGRIQDLEKYVEDTKIDLWSYNAELLVALENQHTIDLTDSEMNKLFEKTKKQLRENAEDMGNGCFKIYHKCDNACIGSIRNGTYDHDVYRDEALNNRFQIKGVELKSGYKDWILWISFAISCFLLCVALLGFIMWACQKGNIRCNICI

SEQ ID NO: 2770 - protein, 566 aa, Artificial Sequence
  derived and/or modified protein sequence (wt) from hemagglutinin__InfluenzaA__ACR15293
MKTIIALSYILCLVFAQKLPGNDNSTATLCLGHHAVPNGTIVKTITNDQIEVTNATELVQSSSTGGICDSPHQILDGENCTLIDALLGDPQCDGFQNKKWDLFVERSKAYSNCYPYDVPDYASLRSLIASSGTLEFNNENFNWTGVTQNGTSSACKRGSDNSFFSRLNWLTHLKFKYPALKVTMPNNEKFDKLYIWGVHHPGTDNDQIFLYAQASGRITVSTKRSQQTVIPNIGSRPRVRNIPSRISIYWTIVKPGDILLINSTGNLIAPRGYFKIRSGKSSIMRSDAPIGKCNSECITPNGSIPNDKPFQNVNRITYGACPRYVKQNTLKLATGMRNVPEKQTRGIFGAIAGFIENGWEGMVDGWYGFRHQNSEGIGQAADLKSTQAAINQINGKLNRLIGKTNEKFHQIEKEFSEVEGRIQDLEKYVEDTKIDLWSYNAELLVALENQHTIDLTDSEMNKLFERTKKQLRENAEDMGNGCFKIYHKCDNACIGSIRNGTYDHDVYRDEALNNRFQIKGVELKSGYKDWILWISFAISCFLLCVALLGFIMWACQKGNIRCNICI

SEQ ID NO: 2771 - protein, 565 aa, Artificial Sequence
  derived and/or modified protein sequence (wt) from hemagglutinin__InfluenzaA__ACR15304
MKAKLLVLLCTFTATYADTICIGYHANNSTDTVDTVLEKNVTVTHSVNLLEDSHNGKLCLLKGIAPLQLGNCSVAGWILGNPECELLISKESWSYIVETPNPENGTCYPGYFADYEELREQLSSVSSFERFEIFPKESSWPNHTVTGVSASCSHNGKSSFYRNLLWLTGKNGLYPNLSKSYANNKEKEVLVLWGVHHPPNTGNQRALYHTENAYVSVVSSHYSRRFTPEIAKRPKVRDQEGRINYYWTLLEPGDTIIFEANGNLIAPWYAFALSRGFGSGIITSNAPMDECDAKCQTPQGAINSSLPFQNVHPVTIGECPKYVRSAKLRMVTGLRNIPSIQSRGLFGAIAGFIEGGWTGMVDGWYGYHHQNEQGSGYAADQKSTQNAINGITNKVNSVIEKMNTQFTAVGKEFNRLERRMENLNKKVDDGFLDIWTYNAELLVLLENERTLDFHDSNVKNLYEKVKSQLKNNAKEIGNGCFEFYHKCNNECMESVKNGTYDYPKYSEESKLNREKIDGVKLESMGVYQILAIYSTVASSLVLLVSLGAISFWMCSNGSLQCRICI

SEQ ID NO: 2772 - protein, 565 aa, Artificial Sequence
  derived and/or modified protein sequence (wt) from hemagglutinin__InfluenzaA__ACR15315
MKAKLLVLLCTFTATYADTICIGYHANNSTDTVDTVLEKNVTVTHSVNLLEDSHNGKLCLLKGIAPLQLGNCSVAGWILGNPECELLISKESWSYIVETPNPENGTCYPGYFADYEELREQLSSVSSFERFEIFPKGSSWPNHTVTGVSASCSHNGKSSFYRNLLWLTGKNGLYPNLSMSYVNNKEKEVLVLWGVHHPPNIRDQRALYHTENAYVSVVSSHYSRRFTPEIAKRPKVRDQEGRINYYWTLLEPGDTIIFEANGNLIAPWYAFALSRGFGSGIITSNAPMGECDAKCQTPQGAINSSLPFQNVHPVTIGECPKYVRSAKLRMVTGLRNIPSIQSRGLFGAIAGFIEGGWTGMVDGWYGYHHQNEQGSGYAADQKSTQNAINGITNKVNSVIEKMNTQFTAVGKEFNKLERRMENLNKKVDDGFLDIWTYNAELLVLLENERTLDFHDSNVKNLYEKVKSQLKNNAKEIGNGCFEFYHKCNNECMESVKNGTYDYPKYSEESKLNREKIDGVKLESMGVYQILAIYSTVASSLVLLVSLGAISFWMCSNGSLQCRICI

SEQ ID NO: 2773 - protein, 565 aa, Artificial Sequence
  derived and/or modified protein sequence (wt) from hemagglutinin__InfluenzaA__ACR15326
MKAKLLVLLCTFTATYADTICIGYHANNSTDTVDTVLEKNVTVTHSVNLLEDSHNGKLCLLKGIAPLQLGNCSVAGWILGNPECELLISKESWSYIVETPNPENGTCYPGYFADYEELREQLSSVSSFERFEIFPKGSSWPNHTVTGVSASCSHNGKSSFYRNLLWLTGKNGLYPNLSMSYVNNKEKEVLVLWGVHHPPNIGNQRALYHTENAYVSVVSSHYSRRFTPEIAKRPKVRDQEGRINYYWTLLEPGDTIIFEANGNLIAPWYAFALSRGFGSGIITSNAPMGECDEKCQTPQGAINSSLPFQNVHPVTIGECPKYVRSAKLRMVTGLRNIPSIQSRGLFGAIAGFIEGGWTGMVDGWYGYHHQNEQGSGYAADQKSTQNAINGITNKVNSVIEKMNTQFTAVGKEFNKLERRMENLNKKVDDGFLDIWTYNAELLVLLENERTLDFHDSNVKNLYEKVKSQLKNNAKEIGNGCFEFYHKCNNECMESVKNGTYDYPKYSEESKLNREKIDGVKLESMGVYQILAIYSTVASSLVLLVSLGAISFWMCSNGSLQCRICI

SEQ ID NO: 2774 - protein, 565 aa, Artificial Sequence
  derived and/or modified protein sequence (wt) from hemagglutinin__InfluenzaA__ACR15359
MKVKLLVLLCTFTATYADTICIGYHANNSTDTVDTVLEKNVTVTHSVNLLENSHNGKLCLLKGIAPLQLGNCSVAGWILGNPECGLLISKESWSYIVEKPNPENGTCYPGHFADYEELREQLSSVSSFERFEIFPKESSWPNHTVTGVSASCSHNGESSFYRNLLWLTGKNGLYPNLSKSYANNKEKEVLVLWGVHHPPNIGDQKALYHTENAYVSVVSSHYSRKFTPEIAKRPKVRDQEGRINYYWTLLEPGDTIIFEANGNLIAPRYAFALSRGFGSGIINSNAPMDKCDAKCQTPQGAINSSLPFQNVHPVTIGECPKYVRSAKLRMVTGLRNIPSIQSRGLFGAIAGFIEGGWTGMVDGWYGYHHQNEQGSGYAADQKSTQNAINGITNKVNSVIEKMNTQFTAVGKEFNKLERRMENLNKKVDDGFIDIWTYNAELLVLLENERTLDFHDSNVKNLYEKVKSQLKNNAKEIGNGCFEFYHKCNDECMESVKNGTYDYPKYSEESKLNREKIDGVKLESMGVYQILAIYSTVASSLVLLVSLGAISFWMCSNGSLQCRICI

SEQ ID NO: 2775 - protein, 565 aa, Artificial Sequence
  derived and/or modified protein sequence (wt) from hemagglutinin__InfluenzaA__ACR15370
MKVKLLVLLCTLTATYADTICIGYHANNSTDTVDTVLEKNVTVTHSVNLLENSHNGKLCLLKGIAPLQLGNCSVAGWILGNPECELLISKESWSYIVEKPNPENGTCYPGHFADYEELREQLSSVSSFERFEIFPKESSWPNHTVTGVSASCSHNGESSFYRNLLWLTGKNGLYPNLSKSYANNKEKEVLVLWGVHHPPNIGDQKALYHTENAYVSVVSSHYSRKFTPEIAKRPKVRDQEGRINYYWTLLEPGDTIIFEANGNLIAPRYAFALSRGFGSGIINSNAPMDKCDAKCQTPQGAINSSLPFQNVHPVTIGECPKYVRSAKLRMVTGLRNIPSIQSRGLFGAIAGFIEGGWTGMVDGWYGYHHQNEQGSGYAADQKSTQNAINGITNKVNSVIEKMNTQFTAVGKEFNKLERRMENLNKKVDDGFIDIWTYNAELLVLLENERTLDFHDSNVKNLYEKVKSQLKNNAKEIGNGCFEFYHKCNDECMESVKNGTYDYPKYSEESKLNREKIDGVKLESMGVYQILAIYSTVASSLILLVSLGAISFWMCSNGSLQCRICI

SEQ ID NO: 2776 - protein, 566 aa, Artificial Sequence; identical to SEQ ID NO: 2301
  derived and/or modified protein sequence (wt) from hemagglutinin__InfluenzaA__ACR15381

SEQ ID NO: 2777 - protein, 566 aa, Artificial Sequence; identical to SEQ ID NO: 2308
  derived and/or modified protein sequence (wt) from hemagglutinin__InfluenzaA__ACR15392

SEQ ID NO: 2778 - protein, 566 aa, Artificial Sequence; identical to SEQ ID NO: 1928
  derived and/or modified protein sequence (wt) from hemagglutinin__InfluenzaA__ACR15403

SEQ ID NO: 2779 - protein, 566 aa, Artificial Sequence; identical to SEQ ID NO: 1928
  derived and/or modified protein sequence (wt) from hemagglutinin__InfluenzaA__ACR15414

SEQ ID NO: 2780 - protein, 565 aa, Artificial Sequence; identical to SEQ ID NO: 2774
  derived and/or modified protein sequence (wt) from hemagglutinin__InfluenzaA__ACR15425

SEQ ID NO: 2781 - protein, 565 aa, Artificial Sequence
  derived and/or modified protein sequence (wt) from hemagglutinin__InfluenzaA__ACR15436
MKVKLLVLLCTFTATYADTICIGYHANNSTDTVDTVLEKNVTVTHSVNLLENSHNGKLCLLKGIAPLQLGNCSVAGWILGNPECELLISKESWSYIVEKPNPENGTCYPGHFADYEELREQLSSVSSFERFEIFPKESSWPNHTVTGVSASCSHNGESSFYRNLLWLTGKNGLYPNLSKSYANNKGKEVLVLWGVHHPPNIGDQNTLYHTENAYVSVVSSHYSRKFTPEIAKRPKVRDQEGRINYYWTLLEPGDTIIFEANGNLIAPRYAFALSRGFGSGIINSNAPMDKCDAKCQTPQGAINSSLPFQNVHPVTIGECPKYVRSAKLRMVTGLRNIPSIQSRGLFGAIAGFIEGGWTGMVDGWYGYHHQNEQGSGYAADQKSTQNAINGITNKVNSVIEKMNTQFTAVGKEFNKLERRMENLNKKVDDGFIDIWTYNAELLVLLENERTLDFHDSNVKNLYEKVKSQLKNNAKEIGNGCFEFYHKCNDECMESVKNGTYDYPKYSEESKLNREKIDGVKLESMGVYQILAIYSTVASSLVLLVSLGAISFWMCSNGSLQCRICI

SEQ ID NO: 2782 - protein, 565 aa, Artificial Sequence
  derived and/or modified protein sequence (wt) from hemagglutinin__InfluenzaA__ACR15458
MKVKLLVLLCTFTATYADTICIGYHANNSTDTVDTVLEKNVTVTHSVNLLENSHNGKLCLLKGIAPLQLGNCSVAGWILGNPECELLISKESWSYIVENPNPENGTCYPGHFADYEELREQLSSVSSFERFEIFPKESSWPNHTVTGVSASCSHNGESSFYRNLLWLTGKNGLYPNLSKSYANNKEKEVLVLWGVHHPPNIGDQKALYHTENAYVSVVSSHYSRKFTPEIAKRPKVRDQEGRINYYWTLLEPGDTIIFEANGNLIAPRYAFALSRGFGSGIINSNAPMDKCDAKCQTPQGAINSSLPFQNVHPVTIGECPKYVRSAKLRMVTGLRNIPSIQSRGLFGAIAGFIEGGWTGMVDGWYGYHHQNEQGSGYAADQKSTQNAINGITNKVNSVIEKMNTQFTAVGKEFNKLERRMENLNKKVDDGFIDIWTYNAELLVLLENERTLDFHDSNVKNLYEKVKSQLKNNAKEIGNGCFEFYHKCNDECMESVKNGTYDYPKYSEESKLNREKIDGVKLESMGVYQILAIYSTVASSLVLLVSLGAISFWMCSNGSLQCRICI

SEQ ID NO: 2783 - protein, 565 aa, Artificial Sequence
  derived and/or modified protein sequence (wt) from hemagglutinin__InfluenzaA__ACR15469
MKVKLLVLLCTFTATYADTICIGYHANNSTDTVDTVLEKNVTVTHSVNLLEDSHNGKLCLLKGIAPLQLGNCSVAGWILGNPECELLISKESWSYIVEKPDPENGTCYPGHFADYEELREQLSSVSSFERFEIFPKESSWPNHTVTGVSASCSHNGESSFYRNLLWLTGKNGLYPNLSKSYANNKEKEVLVLWGVHHPPNIGDQNTLYHTENAYVSVVSSHYSRKFTPEIAKRPKVRDQEGRINYYWTLLEPGDTIIFEANGNLIAPRYAFALSRGFGSGIINSNAPMDKCDAKCQTPQGAINSSLPFQNVHPVTIGECPKYVRSAKLRMVTGLRNIPSIQSRGLFGAIAGFIEGGWTGMVDGWYGYHHQNEQGSGYAADQKSTQNAINGITNKVNSVIEKMNTQFTAVGKEFNKLERRMENLNKKVDDGFIDIWTYNAELLVLLENERTLDFHDSNVKNLYEKVKSQLKNNAKEIGNGCFEFYHKCNDECMESVKNGTYDYPKYSEESKLNREKIDGVKLESMGVYQILAIYSTVASSLVLLVSLGAISFWMCSNGSLQCRICI

SEQ ID NO: 2784 - protein, 565 aa, Artificial Sequence; identical to SEQ ID NO: 2781
  derived and/or modified protein sequence (wt) from hemagglutinin__InfluenzaA__ACR15480

SEQ ID NO: 2785 - protein, 565 aa, Artificial Sequence
  derived and/or modified protein sequence (wt) from hemagglutinin__InfluenzaA__ACR15491
MKVKLLVLLCTFTATYADTICIGYHANNSTDTVDTVLEKNVTVTHSVNLLENSHNGKLCLLKGIAPLQLGNCSVAGWILGNPECELLISKESWSYIVEKPNPENGTCYPGHFADYEELREQLSSVSSFERFEIFPKESSWPNHTVTGVSASCSHNGESSFYRNLLWLTGRNGLYPNLSKSYANNKEKEVLVLWGVHHPPNIVDQKTLYRTENAYVSVVSSHYSRKFTPEIAKRPKVRDQEGRINYYWTLLEPGDTIIFEANGNLIAPRYAFALSRGFGSGIINSNAPMDKCDAKCQTPQGAINSSLPFQNVHPVTIGECPKYVRSAKLRMVTGLRNIPSIQSRGLFGAIAGFIEGGWTGMVDGWYGYHHQNEQGSGYAADQKSTQNAINGITNKVNSVIEKMNTQFTAVGKEFNKLERRMENLNKKVDDGFIDIWTYNAELLVLLENERTLDFHDSNVKNLYEKVKSQLKNNAKEIGNGCFEFYHKCNDECMESVKNGTYDYPKYSEESKLNREKIDGIKLESMGVYQILAIYSTVASSLVLLVSLGAISFWMCSNGSLQCRICI

SEQ ID NO: 2786 - protein, 565 aa, Artificial Sequence
  derived and/or modified protein sequence (wt) from hemagglutinin__InfluenzaA__ACR15502
MKVKLLVLLCTFTATYADTICIGYHANNATDTVDTVLEKNVTVTHSVNLLENSHNGKLCLLKGIAPLQLGNCSVAGWILGNPECELLISKESWSYIVEKPNPENGTCYPGHFADYEELREQLSSVSSFERFEIFPKESSWPNHTVTGVSASCSHNGESSFYRNLLWLTGKNGLYPNLSKSYANNKGKEVLVLWGVHHPPNIGDQNTLYHTENAYVSVVSSHYSRKFTPEIAKRPKVRDQEGRINYYWTLLEPGDTIIFEANGNLIAPRYAFALSRGFGSGIINSNAPMDKCDAKCQTPQGAINSSLPFQNVHPVTIGECPKYVRSAKLRMVTGLRNIPSIQSRGLFGAIAGFIEGGWTGMVDGWYGYHHQNEQGSGYAADQKSTQNAINGITNKVNSVIEKMNTQFTAVGKEFNKLERRMENLNKKVDDGFIDIWTYNAELLVLLENERTLDFHDSNVKNLYEKVKSQLKNNAKEIGNGCFEFYHKCNDECMESVKNGTYDYPKYSEESKLNREKIDGVKLESMGVYQILAIYSTVASSLVLLVSLGAISFWMCSNGSLQCRICI

SEQ ID NO: 2787 - protein, 565 aa, Artificial Sequence; identical to SEQ ID NO: 2643
  derived and/or modified protein sequence (wt) from hemagglutinin__InfluenzaA__ACR15513

SEQ ID NO: 2788 - protein, 566 aa, Artificial Sequence
  derived and/or modified protein sequence (wt) from hemagglutinin__InfluenzaA__ACR15524
MKTIIALSYILCLVFAQKLPGNDNSTATLCLGHHAVPNGTIVKTITNDQIEVTNATELVQSSSTGGICDSPHQILDGENCTLIDALLGDPQCDGFQNKKWDLFVERSKAYSNCYPYDVPDYASLRSLVASSGTLEFNNESFNWTGVTQNGTSSACKRRSNKSFFSRLNWLTHLKFKYPALNVTMPNNEKFDKLYIWGVHHPGTDNDQISLYAQASGRITVSTKRSQQTVIPNIGSRPRVRDVPSRISIYWTIVKSGDILLINSTGNLIAPRGYFKIRSGKSSIMRSDAPIGKCNSECITPNGSIPNDKPFQNVNRITYGACPRYVKQNTLKLATGMRNVPEKQTRGIFGAIAGFIENGWEGMVDGWYGFRHQNSEGTGQAADLKSTQAAINQINGKLNRLIGKTNEKFHQIEKEFSEVEGRIQDLEKYVEDTKIDLWSYNAELLVALENQHTIDLTDSEMNKLFERTKKQLRENAEDMGNGCFKIYHKCDNACIGSIRNGTYDHDVYRDEALNNRFQIKGVELKSGYKDWILWISFAISCFLLCVVLLGFIMWACQKGNIRCNICI

SEQ ID NO: 2789 - protein, 566 aa, Artificial Sequence; identical to SEQ ID NO: 2597
  derived and/or modified protein sequence (wt) from hemagglutinin__InfluenzaA__ACR15535

SEQ ID NO: 2790 - protein, 566 aa, Artificial Sequence
  derived and/or modified protein sequence (wt) from hemagglutinin__InfluenzaA__ACR15546
MKTIIALSYILCLVFAQKLPGNDNSTATLCLGHHAVPNGTIVKTITNDQIEVTNATELVQSSSTGGICDSPHHILDGENCTLIDALLGDPQCDGFQNKKWDLFVERSKAYSNCYPYDVPDYASLRSLVASSGTLEFNNESFNWTGVTQNGTSSACKRRSNNSFFSRLNWLTHLKFKYPALNVTMPNNEKFDKLYIWGVHHPGTDNDQISLYAQASGRITVSTKRSQQTVIPNIGSRPRVRDISSRISIYWTIVKPGDILLINSTGNLIAPRGYFKIRSGKSSIMRSDAPIGKCNSECITPNGSIPNDKPFQNVNRITYGACPRYVKQNTLKLATGMRNVPETQTRGIFGAIAGFIENGWEGMVDGWYGFRHQNSEGTGQAADLKSTQAAINQINGKLNRLIGKTNEKFHQIEKEFSEVEGRIQDLEKYVEDTKIDLWSYNAELLVALENQHTIDLTDSEMNKLFERTKKQLRENAEDMGNGCFKIYHKCDNACIGSIRNETYDHDVYRDEALNNRFQIKGVELKSGYKDWILWISFAISCFLLCVALLGFIMWACQKGNIRCNICI

SEQ ID NO: 2791 - protein, 566 aa, Artificial Sequence; identical to SEQ ID NO: 2372
  derived and/or modified protein sequence (wt) from hemagglutinin__InfluenzaA__ACR15557

SEQ ID NO: 2792 - protein, 566 aa, Artificial Sequence; identical to SEQ ID NO: 630
  derived and/or modified protein sequence (wt) from hemagglutinin__InfluenzaA__ACR15568

SEQ ID NO: 2793 - protein, 566 aa, Artificial Sequence
  derived and/or modified protein sequence (wt) from hemagglutinin__InfluenzaA__ACR15579
MKTIIALSYILCLVFAQKLPGNDNSTATLCLGHHAVPNGTIVKTITNDQIEVTNATELVQSSSTGGICDSPHQILDGENCTLIDALLGDPQCDGFQNKKWDLFVERSKAYSNCYPYDVPDYASLRSLVASSGTLEFNNESFNWTGVTQNGTSSACKRRSNNSFFSRLNWLTHLKFKYPALNVTMPNNEKFDKLYIWGVHHPGTDNDQIFLYAQASGRITVSTKRSQQTVIPNIGSRPRVRNIPSRISIYWTIVNPGDILLINSTGNLIAPRGYFKIRSGKSSIMRSDAPIGKCNSECITPNGSIPNDKPFQNVNRITYGACPRYVKQNTLKLATGMRNVPEKQTRGIFGAIAGFIENGWEGMVDGWYGFRHQNSEGIGQAADLKSTQAAINQINGKLNRLIGKTNEKFHQIEKEFSEVEGRIQDLEKYVEDTKIDLWSYNAELLVALENQHTIDLTDSEMNKLFERTKKQLRENAEDMGNGCFKIYHKCDNACIGSIRNGTYDHDVYRDEALNNRFQIKGVELKSGYKDWILWISFAISCFLLCVALLGFIMWACQKGNIRCNICI

SEQ ID NO: 2794 - protein, 566 aa, Artificial Sequence
  derived and/or modified protein sequence (wt) from hemagglutinin__InfluenzaA__ACR15590
MKTIIALSYILCLVFTQKLPGNDNSTATLCLGHHAVPNGTIVKTITNDQIEVTNATELVQSSSTGGICDSPHQILDGENCTLIDALLGDPQCDGFQNKKWDLFVERSKAYSNCYPYDVPDYASLRSLVASSGTLEFNNESFNWTGVTQNGTSSACKRRSNNSFFSRLNWLTHLKFKYPALNVTMPNNEKFDKLYIWGVHHPGTDNDQIFLYAQASGRITVSTKRSQQTVIPNIGSRPRVRNIPSRISIYWTIVKPGDILLINSTGNLIAPRGYFKIRSGKSSIMRSDAPIGKCNSECITPNGSIPNDKPFQNVNRITYGACPRYVKQNTLKLATGMRNVPEKQTRGIFGAIAGFIENGWEGMVDGWYGFRHQNSEGIGQAADLKSTQAAINQINGKLNRLIGKTNEKFHQIEKEFSEVEGRIQDLEKYVEDTKIDLWSYNAELLVALENQHTIDLTDSEMNKLFERTKKQLRENAEDMGNGCFKIYHKCDNACIGSIRNGTYDHDVYRDEALNNRFQIKGVELKSGYKDWILWISFAISCFLLCVALLGFIMWACQKGNIRCNICI

SEQ ID NO: 2795 - protein, 566 aa, Artificial Sequence; identical to SEQ ID NO: 630
  derived and/or modified protein sequence (wt) from hemagglutinin__InfluenzaA__ACR15601

SEQ ID NO: 2796 - protein, 566 aa, Artificial Sequence
  derived and/or modified protein sequence (wt) from hemagglutinin__InfluenzaA__ACR18920
MKAILVVLLYTFATANADTLCIGYHANNSTDTVDTVLEKNVTVTHSVNLLEDKHNGKLCKLRGVAPLHLGKCNIAGWILGNPECESLSTASSWSYIVETSSSDNGTCYPGDFIDYEELREQLSSVSSFERFEIFPKTSSWPNHDSNKGVTAACPHAGAKSFYKNLIWLVKKGNSYPKLSKSYINDKGKEVLVLWGIHHPSTSADQQSLYQNADAYVFVGSSRYSKKFKPEIAIRPKVRDQEGRMNYYWTLVEPGDKITFEATGNLVVPRYAFAMERNAGSGIIISDTPVHDCNTTCQTPKGAINTSLPFQNIHPITIGKCPKYVKSTKLRLATGLRNVPSIQSRGLFGAIAGFIEGGWTGMVDGWYGYHHQNEQGSGYAADLKSTQNAIDEITNKVNSVIEKMNIQFTAVGKEFNHLEKRIENLNKKVDDGFLDIWTYNAELLVLLENERTLDYHDSNVKNLYEKVRSQLKNNAKEIGNGCFEFYHKCDNTCMESVKNGTYDYPKYSEEAKLNREEIDGVKLESTRIYQILAIYSTVASSLVLVVSLGAISFWMCSNGSLQCRICI

SEQ ID NO: 2797 - protein, 566 aa, Artificial Sequence; identical to SEQ ID NO: 2669
  derived and/or modified protein sequence (wt) from hemagglutinin__InfluenzaA__ACR18975

SEQ ID NO: 2798 - protein, 566 aa, Artificial Sequence; identical to SEQ ID NO: 2656
  derived and/or modified protein sequence (wt) from hemagglutinin__InfluenzaA__ACR18976

SEQ ID NO: 2799 - protein, 566 aa, Artificial Sequence; identical to SEQ ID NO: 2656
  derived and/or modified protein sequence (wt) from hemagglutinin__InfluenzaA__ACR18977

SEQ ID NO: 2800 - protein, 566 aa, Artificial Sequence; identical to SEQ ID NO: 2669
  derived and/or modified protein sequence (wt) from hemagglutinin__InfluenzaA__ACR18978

SEQ ID NO: 2801 - protein, 566 aa, Artificial Sequence; identical to SEQ ID NO: 2656
  derived and/or modified protein sequence (wt) from hemagglutinin__InfluenzaA__ACR18979

SEQ ID NO: 2802 - protein, 566 aa, Artificial Sequence; identical to SEQ ID NO: 2722
  derived and/or modified protein sequence (wt) from hemagglutinin__InfluenzaA__ACR18981

SEQ ID NO: 2803 - protein, 566 aa, Artificial Sequence; identical to SEQ ID NO: 2656
  derived and/or modified protein sequence (wt) from hemagglutinin__InfluenzaA__ACR18982

SEQ ID NO: 2804 - protein, 566 aa, Artificial Sequence; identical to SEQ ID NO: 2669
  derived and/or modified protein sequence (wt) from hemagglutinin__InfluenzaA__ACR18988

SEQ ID NO: 2805 - protein, 566 aa, Artificial Sequence
  derived and/or modified protein sequence (wt) from hemagglutinin__InfluenzaA__ACR18991
MKAILVVLLYTFATANADTLCIGYHANNSTDTVDTVLEKNVTVTHSVNLLEDKHNRKLCKLRGVAPLHLGKCNIAGWILGNPECESLSTASSWSYIVETSSSDNGTCYPGDFIDYEELREQLSSVSSFERFEIFPKTSSWPNHDSNKGVTAACPHAGAKSFYKNLIWLVKKGNSYPKLSKSYINDKGKEVLVLWGIHHPSTSADQQSLYQNADAYVFVGSSRYSKKFKPEIAIRPKVRDQEGRMNYYWTLVEPGDKITFEATGNLVVPRYAFAMERNAGSGIIISDTPVHDCNTTCQTPKGAINTSLPFQNIHPITIGKCPKYVKSTKLRLATGLRNVPSIQSRGLFGAIAGFIEGGWTGMVDGWYGYHHQNEQGSGYAADLKSTQNAIDEITNKVNSVIEKMNTQFTAVGKEFNHLEKRIENLNKKVDDGFLDIWTYNAELLVLLENERTLDYHDSNVKNLYEKVRSQLKNNAKEIGNGCFEFYHKCDNTCMESVKNGTYDYPKYSEEAKLNREEIDGVKLESTRIYQILAIYSTVASSLVLVVSLGAISFWMCSNGSLQCRICI

SEQ ID NO: 2806 - protein, 566 aa, Artificial Sequence; identical to SEQ ID NO: 2656
  derived and/or modified protein sequence (wt) from hemagglutinin__InfluenzaA__ACR18993

SEQ ID NO: 2807 - protein, 566 aa, Artificial Sequence; identical to SEQ ID NO: 2695
  derived and/or modified protein sequence (wt) from hemagglutinin__InfluenzaA__ACR18995

SEQ ID NO: 2808 - protein, 566 aa, Artificial Sequence; identical to SEQ ID NO: 2717
  derived and/or modified protein sequence (wt) from hemagglutinin__InfluenzaA__ACR23302

SEQ ID NO: 2809 - protein, 566 aa, Artificial Sequence; identical to SEQ ID NO: 2669
  derived and/or modified protein sequence (wt) from hemagglutinin__InfluenzaA__ACR33743

SEQ ID NO: 2810 - protein, 566 aa, Artificial Sequence; identical to SEQ ID NO: 2656
  derived and/or modified protein sequence (wt) from hemagglutinin__InfluenzaA__ACR38821

SEQ ID NO: 2811 - protein, 566 aa, Artificial Sequence; identical to SEQ ID NO: 2656
  derived and/or modified protein sequence (wt) from hemagglutinin__InfluenzaA__ACR38822

SEQ ID NO: 2812 - protein, 566 aa, Artificial Sequence; identical to SEQ ID NO: 2656
  derived and/or modified protein sequence (wt) from hemagglutinin__InfluenzaA__ACR38823

SEQ ID NO: 2813 - protein, 566 aa, Artificial Sequence; identical to SEQ ID NO: 2722
  derived and/or modified protein sequence (wt) from hemagglutinin__InfluenzaA__ACR38824

SEQ ID NO: 2814 - protein, 566 aa, Artificial Sequence
  derived and/or modified protein sequence (wt) from hemagglutinin__InfluenzaA__ACR38825
MKAILVVLLYTFATANADTLCIGYHANNSTDTVDTVLEKNVTVTHSVNLLEDKHNGKLCKLRGVAPLHLGKCNIAGWILGNPECESLSTASSWSYIVETSSSDNGTCYPGDFIDYEELREQLSSVSSFERFEIFPKTSSWPNHDSNKGVTAACPHAGAKSFYKNLIWLVKKGNSYPKLSKSYINDKGKEVLVLWGIHHPSTSADQQSLYQNADAYVFVGTSRYSKKFKPEIAIRPKVRGQEGRMNYYWTLVEPGDKITFEATGNLVVPRYAFAMERNAGSGIIISDTPVHDCNTTCQTPKGAINTSLPFQNIHPITIGKCPKYVKSTKLRLATGLRNVPSIQSRGLFGAIAGFIEGGWTGMVDGWYGYHHQNEQGSGYAADLKSTQNAIDEITNKVNSVIEKMNTQFTAVGKEFNHLEKRIENLNKKIDDGFLDIWTYNAELLVLLENERTLDYHDSNVKNLYEKVRSQLKNNAKEIGNGCFEFYHKCDNTCMESVKNGTYDYPKYSEEAKLNREEIDGVKLESTRIYQILAIYSTVASSLVLVVSLGAISFWMCSNGSLQCRICI

SEQ ID NO: 2815 - protein, 566 aa, Artificial Sequence; identical to SEQ ID NO: 2669
  derived and/or modified protein sequence (wt) from hemagglutinin__InfluenzaA__ACR38826

SEQ ID NO: 2816 - protein, 566 aa, Artificial Sequence; identical to SEQ ID NO: 2656
  derived and/or modified protein sequence (wt) from hemagglutinin__InfluenzaA__ACR38827

SEQ ID NO: 2817 - protein, 566 aa, Artificial Sequence; identical to SEQ ID NO: 2722
  derived and/or modified protein sequence (wt) from hemagglutinin__InfluenzaA__ACR38828

SEQ ID NO: 2818 - protein, 566 aa, Artificial Sequence; identical to SEQ ID NO: 2656
  derived and/or modified protein sequence (wt) from hemagglutinin__InfluenzaA__ACR38829

SEQ ID NO: 2819 - protein, 566 aa, Artificial Sequence; identical to SEQ ID NO: 2695
  derived and/or modified protein sequence (wt) from hemagglutinin__InfluenzaA__ACR38830

SEQ ID NO: 2820 - protein, 566 aa, Artificial Sequence; identical to SEQ ID NO: 2669
  derived and/or modified protein sequence (wt) from hemagglutinin__InfluenzaA__ACR39354

SEQ ID NO: 2821 - protein, 566 aa, Artificial Sequence; identical to SEQ ID NO: 2669
  derived and/or modified protein sequence (wt) from hemagglutinin__InfluenzaA__ACR39393

SEQ ID NO: 2822 - protein, 566 aa, Artificial Sequence; identical to SEQ ID NO: 2669
  derived and/or modified protein sequence (wt) from hemagglutinin__InfluenzaA__ACR39403

SEQ ID NO: 2823 - protein, 566 aa, Artificial Sequence; identical to SEQ ID NO: 2669
  derived and/or modified protein sequence (wt) from hemagglutinin__InfluenzaA__ACR39413

SEQ ID NO: 2824 - protein, 566 aa, Artificial Sequence; identical to SEQ ID NO: 2669
  derived and/or modified protein sequence (wt) from hemagglutinin__InfluenzaA__ACR39423

SEQ ID NO: 2825 - protein, 566 aa, Artificial Sequence; identical to SEQ ID NO: 2669
  derived and/or modified protein sequence (wt) from hemagglutinin__InfluenzaA__ACR39433

SEQ ID NO: 2826 - protein, 566 aa, Artificial Sequence; identical to SEQ ID NO: 2669
  derived and/or modified protein sequence (wt) from hemagglutinin__InfluenzaA__ACR39443

SEQ ID NO: 2827 - protein, 566 aa, Artificial Sequence
  derived and/or modified protein sequence (wt) from hemagglutinin__InfluenzaA__ACR39453
MEAILVVLLYTFATANADTLCIGYHANNSTDTVDTVLEKNVTVTHSVNLLEDKHNGKLCKLRGVAPLHLGKCNIAGWILGNPECESLSTASSWSYIVETSSSDNGTCYPGDFIDYEELREQLSSVSSFERFEIFPKTSSWPNHDSNKGVTAACPHAGAKSFYKNLIWLVKKGNSYPKLSKSYINDKGKEVLVLWGIHHPSTSADQQSLYQNADAYVFVGTSRYSKKFKPEIAIRPKVRDQEGRMNYYWTLVEPGDKITFEATGNLVVPRYAFAMERNAGSGIIISDTPVHDCNTTCQTPKGAINTSLPFQNIHPITIGKCPKYVKSTKLRLATGLRNVPSIQSRGLFGAIAGFIEGGWTGMVDGWYGYHHQNEQGSGYAADLKSTQNAIDEITNKVNSVIEKMNTQFTAVGKEFNHLEKRIENLNKKVDDGFLDIWTYNAELLVLLENERTLDYHDSNVKNLYEKVRSQLKNNAKEIGNGCFEFYHKCDNTCMESVKNGTYDYPKYSEEAKLNREEIDGVKLESTRIYQILAIYSTVASSLVLVVSLGAISFWMCSNGSLQCRICI

SEQ ID NO: 2828 - protein, 566 aa, Artificial Sequence; identical to SEQ ID NO: 2669
  derived and/or modified protein sequence (wt) from hemagglutinin__InfluenzaA__ACR39463

SEQ ID NO: 2829 - protein, 566 aa, Artificial Sequence; identical to SEQ ID NO: 2669
  derived and/or modified protein sequence (wt) from hemagglutinin__InfluenzaA__ACR39473

SEQ ID NO: 2830 - protein, 566 aa, Artificial Sequence; identical to SEQ ID NO: 2669
  derived and/or modified protein sequence (wt) from hemagglutinin__InfluenzaA__ACR39483

SEQ ID NO: 2831 - protein, 566 aa, Artificial Sequence; identical to SEQ ID NO: 2669
  derived and/or modified protein sequence (wt) from hemagglutinin__InfluenzaA__ACR39493

SEQ ID NO: 2832 - protein, 566 aa, Artificial Sequence; identical to SEQ ID NO: 2669
  derived and/or modified protein sequence (wt) from hemagglutinin__InfluenzaA__ACR40288

SEQ ID NO: 2833 - protein, 566 aa, Artificial Sequence; identical to SEQ ID NO: 2669
  derived and/or modified protein sequence (wt) from hemagglutinin__InfluenzaA__ACR40298

SEQ ID NO: 2834 - protein, 566 aa, Artificial Sequence
  derived and/or modified protein sequence (wt) from hemagglutinin__InfluenzaA__ACR40308
MKAILVVLLYTFATANADTLCIGYHANNSTDTVDTVLEKNVTVTHSVNLLEDKHNGKLCKLRGVAPLHLGKCNIAGWILGNPECESLSTASSWSYIVETSSSDNGTCYPGDFIDYEELREQLSSVSSFERFEIFPKTSSWPNHDSNKGVTAACPHAGAKSFYKNLIWLVKKGNSYPKLSKSYINDKGKEVLVLWGIHHPSTSADQQSLYQNADAYVFVGSSRYSKKFKPEIAIRPKVRDQEGRMNYYWTLVEPGDKITFEATGNLVVPRYAFAMERNAGSGIIISDTPVHDCNTTCQTPKGAINTSLPFQNIYPITIGKCPKYVKSTKLRLATGLRNVPSIQSRGLFGAIAGFIEGGWTGMVDGWYGYHHQNEQGSGYAADLKSTQNAIDEITNKVNSVIEKMNTQFTAVGKEFNHLEKRIENLNKKVDDGFLDIWTYNAELLVLLENERTLDYHDSNVKNLYEKVRSQLKNNAKEIGNGCFEFYHKCDNTCMESVKNGTYDYPKYSEEAKLNREEIDGVKLESTRIYQILAIYSTVASSLVLVVSLGAISFWMCSNGSLQCRICI

SEQ ID NO: 2835 - protein, 566 aa, Artificial Sequence; identical to SEQ ID NO: 2669
  derived and/or modified protein sequence (wt) from hemagglutinin__InfluenzaA__ACR40318

SEQ ID NO: 2836 - protein, 566 aa, Artificial Sequence; identical to SEQ ID NO: 2669
  derived and/or modified protein sequence (wt) from hemagglutinin__InfluenzaA__ACR40328

SEQ ID NO: 2837 - protein, 566 aa, Artificial Sequence; identical to SEQ ID NO: 2669
  derived and/or modified protein sequence (wt) from hemagglutinin__InfluenzaA__ACR40338

SEQ ID NO: 2838 - protein, 566 aa, Artificial Sequence; identical to SEQ ID NO: 2669
  derived and/or modified protein sequence (wt) from hemagglutinin__InfluenzaA__ACR40348

SEQ ID NO: 2839 - protein, 566 aa, Artificial Sequence; identical to SEQ ID NO: 2669
  derived and/or modified protein sequence (wt) from hemagglutinin__InfluenzaA__ACR40358

SEQ ID NO: 2840 - protein, 566 aa, Artificial Sequence; identical to SEQ ID NO: 2669
  derived and/or modified protein sequence (wt) from hemagglutinin__InfluenzaA__ACR40378

SEQ ID NO: 2841 - protein, 566 aa, Artificial Sequence; identical to SEQ ID NO: 2669
  derived and/or modified protein sequence (wt) from hemagglutinin__InfluenzaA__ACR40388

SEQ ID NO: 2842 - protein, 566 aa, Artificial Sequence; identical to SEQ ID NO: 2656
  derived and/or modified protein sequence (wt) from hemagglutinin__InfluenzaA__ACR46986

SEQ ID NO: 2843 - protein, 566 aa, Artificial Sequence; identical to SEQ ID NO: 2656
  derived and/or modified protein sequence (wt) from hemagglutinin__InfluenzaA__ACR46988

SEQ ID NO: 2844 - protein, 566 aa, Artificial Sequence; identical to SEQ ID NO: 2656
  derived and/or modified protein sequence (wt) from hemagglutinin__InfluenzaA__ACR46989

SEQ ID NO: 2845 - protein, 566 aa, Artificial Sequence; identical to SEQ ID NO: 2656
  derived and/or modified protein sequence (wt) from hemagglutinin__InfluenzaA__ACR46990

SEQ ID NO: 2846 - protein, 566 aa, Artificial Sequence; identical to SEQ ID NO: 2656
  derived and/or modified protein sequence (wt) from hemagglutinin__InfluenzaA__ACR46992

SEQ ID NO: 2847 - protein, 566 aa, Artificial Sequence; identical to SEQ ID NO: 2656
  derived and/or modified protein sequence (wt) from hemagglutinin__InfluenzaA__ACR46993

SEQ ID NO: 2848 - protein, 566 aa, Artificial Sequence; identical to SEQ ID NO: 2656
  derived and/or modified protein sequence (wt) from hemagglutinin__InfluenzaA__ACR46994

SEQ ID NO: 2849 - protein, 566 aa, Artificial Sequence
  derived and/or modified protein sequence (wt) from hemagglutinin__InfluenzaA__ACR47006
MKAILVVLLYTFATANADTLCIGYHANNSTDTVDTVLEKNVTVTHSVNILEDKHNGKLCKLRGVAPLHLGKCNIAGWILGNPECESLSTASSWSYIVETSSSDNGTCYPGDFIDYEELREQLSSVSSFERFEIFPKTSSWPNHDSNKGVTAACPHAGAKSFYKNLIWLVKKGNSYPKLSKSYINDKGKEVLVLWGIHHPSTSADQQSLYQNADAYVFVGSSRYSKKFKPEIAIRPKVRDQEGRMNYYWTLVEPGDKITFEATGNLVVPRYAFAMERNAGSGIIISDTPVHDCNTTCQTPKGAINTSLPFQNIHPITIGKCPKYVKSTKLRLATGLRNVPSIQSRGLFGAIAGFIEGGWTGMVDGWYGYHHQNEQGSGYAADLKSTQNAIDEITNKVNSVIEKMNTQFTAVGKEFNHLEKRIENLNKKVDDGFLDIWTYNAELLVLLENERTLDYHDSNVKNLYEKVRSQLKNNAKEIGNGCFEFYHKCDNTCMESVKNGTYDYPKYSEEAKLNREEIDGVKLESTRIYQILAIYSTVASSLVLVVSLGAISFWMCSNGSLQCRICI

SEQ ID NO: 2850 - protein, 566 aa, Artificial Sequence; identical to SEQ ID NO: 2669
  derived and/or modified protein sequence (wt) from hemagglutinin__InfluenzaA__ACR49281

SEQ ID NO: 2851 - protein, 566 aa, Artificial Sequence
  derived and/or modified protein sequence (wt) from hemagglutinin__InfluenzaA__ACR49282
MKAILVVLLYTFATANADTLCIGYHANNSTDTVDTVLEKNVTVTHSVDLLEDKHNGKLCKLRGVAPLHLGKCNIAGWILGNPECESLSTASSWSYIVETSSSDNGTCYPGDFIDYEELREQLSSVSSFERFEIFPKTSSWPNHDSNKGVTAACPHAGAKSFYKNLIWLVKKGNSYPKLSKSYINDKGKEVLVLWGIHHPSTSADQQSLYQNADAYVFVGSSRYSKKFKPEIAIRPKVRDQEGRMNYYWTLVEPGDKITFEATGNLVVPRYAFAMERNAGSGIIISDTPVHDCNTTCQTPKGAINTSLPFQNIHPITIGKCPKYVKSTKLRLATGLRNVPSIQSRGLFGAIAGFIEGGWTGMVDGWYGYHHQNEQGSGYAADLKSTQNAIDEITNKVNSVIEKMNTQFTAVGKEFNHLEKRIENLNKKVDDGFLDIWTYNAELLVLLENERTLDYHDSNVKNLYEKVRSQLKNNAKEIGNGCFEFYHKCDNTCMESVKNGTYDYPKYSEEAKLNREEIDGVKLESTRIYQILAIYSTVASSLVLVVSLGAISFWMCSNGSLQCRICI

SEQ ID NO: 2852 - protein, 566 aa, Artificial Sequence; identical to SEQ ID NO: 2656
  derived and/or modified protein sequence (wt) from hemagglutinin__InfluenzaA__ACR49283

SEQ ID NO: 2853 - protein, 566 aa, Artificial Sequence; identical to SEQ ID NO: 2656
  derived and/or modified protein sequence (wt) from hemagglutinin__InfluenzaA__ACR49288

SEQ ID NO: 2854 - protein, 566 aa, Artificial Sequence; identical to SEQ ID NO: 2695
  derived and/or modified protein sequence (wt) from hemagglutinin__InfluenzaA__ACR49290

SEQ ID NO: 2855 - protein, 566 aa, Artificial Sequence; identical to SEQ ID NO: 2669
  derived and/or modified protein sequence (wt) from hemagglutinin__InfluenzaA__ACR49291

SEQ ID NO: 2856 - protein, 566 aa, Artificial Sequence; identical to SEQ ID NO: 2695
  derived and/or modified protein sequence (wt) from hemagglutinin__InfluenzaA__ACR49293

SEQ ID NO: 2857 - protein, 566 aa, Artificial Sequence; identical to SEQ ID NO: 2695
  derived and/or modified protein sequence (wt) from hemagglutinin__InfluenzaA__ACR49295

SEQ ID NO: 2858 - protein, 566 aa, Artificial Sequence; identical to SEQ ID NO: 2709
  derived and/or modified protein sequence (wt) from hemagglutinin__InfluenzaA__ACR50993

SEQ ID NO: 2859 - protein, 566 aa, Artificial Sequence; identical to SEQ ID NO: 2669
  derived and/or modified protein sequence (wt) from hemagglutinin__InfluenzaA__ACR50995

SEQ ID NO: 2860 - protein, 566 aa, Artificial Sequence; identical to SEQ ID NO: 2669
  derived and/or modified protein sequence (wt) from hemagglutinin__InfluenzaA__ACR51005

SEQ ID NO: 2861 - protein, 566 aa, Artificial Sequence; identical to SEQ ID NO: 2669
  derived and/or modified protein sequence (wt) from hemagglutinin__InfluenzaA__ACR51015

SEQ ID NO: 2862 - protein, 566 aa, Artificial Sequence; identical to SEQ ID NO: 2669
  derived and/or modified protein sequence (wt) from hemagglutinin__InfluenzaA__ACR51025

SEQ ID NO: 2863 - protein, 566 aa, Artificial Sequence; identical to SEQ ID NO: 2669
  derived and/or modified protein sequence (wt) from hemagglutinin__InfluenzaA__ACR51035

SEQ ID NO: 2864 - protein, 566 aa, Artificial Sequence; identical to SEQ ID NO: 2669
  derived and/or modified protein sequence (wt) from hemagglutinin__InfluenzaA__ACR51045

SEQ ID NO: 2865 - protein, 566 aa, Artificial Sequence; identical to SEQ ID NO: 2669
  derived and/or modified protein sequence (wt) from hemagglutinin__InfluenzaA__ACR51055

SEQ ID NO: 2866 - protein, 566 aa, Artificial Sequence; identical to SEQ ID NO: 2656
  derived and/or modified protein sequence (wt) from hemagglutinin__InfluenzaA__ACR51065

SEQ ID NO: 2867 - protein, 566 aa, Artificial Sequence; identical to SEQ ID NO: 2669
  derived and/or modified protein sequence (wt) from hemagglutinin__InfluenzaA__ACR52368

SEQ ID NO: 2868 - protein, 566 aa, Artificial Sequence; identical to SEQ ID NO: 2669
  derived and/or modified protein sequence (wt) from hemagglutinin__InfluenzaA__ACR52378

SEQ ID NO: 2869 - protein, 566 aa, Artificial Sequence; identical to SEQ ID NO: 2669
  derived and/or modified protein sequence (wt) from hemagglutinin__InfluenzaA__ACR52398

SEQ ID NO: 2870 - protein, 566 aa, Artificial Sequence; identical to SEQ ID NO: 2669
  derived and/or modified protein sequence (wt) from hemagglutinin__InfluenzaA__ACR52408

SEQ ID NO: 2871 - protein, 566 aa, Artificial Sequence; identical to SEQ ID NO: 2669
  derived and/or modified protein sequence (wt) from hemagglutinin__InfluenzaA__ACR52418

SEQ ID NO: 2872 - protein, 566 aa, Artificial Sequence; identical to SEQ ID NO: 2669
  derived and/or modified protein sequence (wt) from hemagglutinin__InfluenzaA__ACR52428

SEQ ID NO: 2873 - protein, 566 aa, Artificial Sequence; identical to SEQ ID NO: 2669
  derived and/or modified protein sequence (wt) from hemagglutinin__InfluenzaA__ACR52438

SEQ ID NO: 2874 - protein, 566 aa, Artificial Sequence; identical to SEQ ID NO: 2669
  derived and/or modified protein sequence (wt) from hemagglutinin__InfluenzaA__ACR52448

SEQ ID NO: 2875 - protein, 566 aa, Artificial Sequence; identical to SEQ ID NO: 2669
  derived and/or modified protein sequence (wt) from hemagglutinin__InfluenzaA__ACR52458

SEQ ID NO: 2876 - protein, 566 aa, Artificial Sequence; identical to SEQ ID NO: 2669
  derived and/or modified protein sequence (wt) from hemagglutinin__InfluenzaA__ACR52468

SEQ ID NO: 2877 - protein, 566 aa, Artificial Sequence; identical to SEQ ID NO: 2669
  derived and/or modified protein sequence (wt) from hemagglutinin__InfluenzaA__ACR52478

SEQ ID NO: 2878 - protein, 566 aa, Artificial Sequence; identical to SEQ ID NO: 2669
  derived and/or modified protein sequence (wt) from hemagglutinin__InfluenzaA__ACR52488

SEQ ID NO: 2879 - protein, 566 aa, Artificial Sequence; identical to SEQ ID NO: 2669
  derived and/or modified protein sequence (wt) from hemagglutinin__InfluenzaA__ACR54045

SEQ ID NO: 2880 - protein, 566 aa, Artificial Sequence
  derived and/or modified protein sequence (wt) from hemagglutinin__InfluenzaA__ACR54047
MKAILVVLLYTFATANADTLCIGYHANNSTDTVDTVLEKNVTVTHSVNLLEDKHNGKLCKLRGVAPLHLGKCNIAGWILGNPECESLSTASSWSYIVETSSSDNGTCYPGDFIDYEELREQLSSVSSFERFEIFPKTSSWPNHDSNKGVTAACPHAGAKSFYKNLIWLVKKGNSYPKLSKSYINDKGKEVLVLWGIHHPSTSADQQSLYQNADAYVFVGSSRYSKKFKPEIAIRPKVRDQEGRMNYYWTLVEPGDKITFEATGNLVVPRYAFAMERNAGSGIIISDTPVHDCNTTCQTPKGAINTSLPFQNIHPITIGKCPKYVKSTKLRLATGLRNVPSIQSRGLFGAIAGFIEGGWTGMVDGWYGYHHQNEQGSGYAADLKSTQNAIDEITNKVNSVIEKMNTQFTAVGKEFNHLEKRIENLNKKVDDGFLDIWTYNAELLVLLENERTLDYHDSNVKNLYEKVRSQLKNNAKEIGNGCFEFYHKCDNTCMESVKNGTYDYPKYSEEAKLNREEIDGIKLESTRIYQILAIYSTVASSLVLVVSLGAISFWMCSNGSLQCRICI

SEQ ID NO: 2881 - protein, 566 aa, Artificial Sequence
  derived and/or modified protein sequence (wt) from hemagglutinin__InfluenzaA__ACR54964
MKAILVVLLYTFATANADTLCIGYHANNSTDTVDTVLEKNVTVTHSVNLLEDKHNGKLCKLRGVAPLHLGKCNIAGWILGNPECESLSTASSWSYIVETSSSDNGTCYPGDFIDYEELREQLSSVSSFERFEIFPKTSSWPNHDSNKGVTAACPHAGAKSFYKNLIWLVKKGNSYPKLSKSYINDKGKEVLVLWGIHHPSTSADQQSLYQNADAYVFVGTSRYSKKFKPEIAIRPKVRDQEGRMNYYWTLVEPGDKITFEATGNLVVPRYAFAMERNAGSGIIISDTPVHDCNTTCQTPKGAINTSLPFQNIHPITIGKCPKYVKSTKLRLATGLRNVPSIQSRGLFGAIAGFIEGGWTGMVDGWYGYHHQNEQGSGYAADLKSTQNAIDEITNKVNSVIEKMNTQFIAVGKEFNHLEKRIENLNKKVDDGFLDIWTYNAELLVLLENERTLDYHDSNVKNLYEKVRSQLKNNAKEIGNGCFEFYHKCDNTCMESVKNGTYDYPKYSEEAKLNREEIDGVKLESTRIYQILAIYSTVASSLVLVVSLGAISFWMCSNGSLQCRICI

SEQ ID NO: 2882 - protein, 566 aa, Artificial Sequence; identical to SEQ ID NO: 2760
  derived and/or modified protein sequence (wt) from hemagglutinin__InfluenzaA__ACR54974

SEQ ID NO: 2883 - protein, 566 aa, Artificial Sequence; identical to SEQ ID NO: 2669
  derived and/or modified protein sequence (wt) from hemagglutinin__InfluenzaA__ACR54984

SEQ ID NO: 2884 - protein, 566 aa, Artificial Sequence; identical to SEQ ID NO: 2656
  derived and/or modified protein sequence (wt) from hemagglutinin__InfluenzaA__ACR54994

SEQ ID NO: 2885 - protein, 566 aa, Artificial Sequence; identical to SEQ ID NO: 2656
  derived and/or modified protein sequence (wt) from hemagglutinin__InfluenzaA__ACR55004

SEQ ID NO: 2886 - protein, 566 aa, Artificial Sequence; identical to SEQ ID NO: 2849
  derived and/or modified protein sequence (wt) from hemagglutinin__InfluenzaA__ACR56380

SEQ ID NO: 2887 - protein, 566 aa, Artificial Sequence; identical to SEQ ID NO: 2722
  derived and/or modified protein sequence (wt) from hemagglutinin__InfluenzaA__ACR56390

SEQ ID NO: 2888 - protein, 566 aa, Artificial Sequence; identical to SEQ ID NO: 2669
  derived and/or modified protein sequence (wt) from hemagglutinin__InfluenzaA__ACR56400

SEQ ID NO: 2889 - protein, 566 aa, Artificial Sequence; identical to SEQ ID NO: 2669
  derived and/or modified protein sequence (wt) from hemagglutinin__InfluenzaA__ACR56410

SEQ ID NO: 2890 - protein, 566 aa, Artificial Sequence; identical to SEQ ID NO: 2669
  derived and/or modified protein sequence (wt) from hemagglutinin__InfluenzaA__ACR56420

SEQ ID NO: 2891 - protein, 566 aa, Artificial Sequence; identical to SEQ ID NO: 2669
  derived and/or modified protein sequence (wt) from hemagglutinin__InfluenzaA__ACR56430

SEQ ID NO: 2892 - protein, 566 aa, Artificial Sequence; identical to SEQ ID NO: 2669
  derived and/or modified protein sequence (wt) from hemagglutinin__InfluenzaA__ACR56440

SEQ ID NO: 2893 - protein, 565 aa, Artificial Sequence
  derived and/or modified protein sequence (wt) from hemagglutinin__InfluenzaA__ACR58541
MKVKLLVLLCTFTATYADTICIGYHANNSTDTVDTVLEKNVTVTHSVNLLENSHNGKLCLLKGIAPLQLGNCSVAGWILGNPECELLISKESWSYIVEKPNPENGTCYPGHFADYEELREQLSSVSSFERFEIFPKESSWPNHTVTGVSASCSHNGESSFYRNLLWLTRKNGLYPNLSKSYANNKEKEVLVLWGVHHPPNIGDQKALYHTENAYVSVVSSHYSRKFTPEIAKRPKVRDQEGRINYYWTLLEPGDTIIFEANGNLIAPRYAFALSRGFGSGIINSNAPMDKCDAKCQTPQGAINSSLPFQNVHPVTIGECPKYVRSAKLRMVTGLRNIPSIQSRGLFGAIAGFIEGGWTGMVDGWYGYHHQNEQGSGYAADQKSTQNAINGITNKVNSVIDKMNTQFTAVGKEFNKLERRMENLNKKVDDGFIDIWTYNAELLVLLENERTLDFHDSNVKNLYEKVKSQLKNNAKEIGNGCFEFYHKCNDECMESVKNGTYDYPKYSEESKLNREKIDGVKLESMGVYQILAIYSTVASSLVLLVSLGAISFWMCSNGSLQCRICI

SEQ ID NO: 2894 - protein, 565 aa, Artificial Sequence; identical to SEQ ID NO: 1914
  derived and/or modified protein sequence (wt) from hemagglutinin__InfluenzaA__ACR61655

SEQ ID NO: 2895 - protein, 565 aa, Artificial Sequence; identical to SEQ ID NO: 1930
  derived and/or modified protein sequence (wt) from hemagglutinin__InfluenzaA__ACR61666

SEQ ID NO: 2896 - protein, 566 aa, Artificial Sequence; identical to SEQ ID NO: 2434
  derived and/or modified protein sequence (wt) from hemagglutinin__InfluenzaA__ACR61677

SEQ ID NO: 2897 - protein, 566 aa, Artificial Sequence; identical to SEQ ID NO: 2434
  derived and/or modified protein sequence (wt) from hemagglutinin__InfluenzaA__ACR61688

SEQ ID NO: 2898 - protein, 566 aa, Artificial Sequence; identical to SEQ ID NO: 2434
  derived and/or modified protein sequence (wt) from hemagglutinin__InfluenzaA__ACR61699

SEQ ID NO: 2899 - protein, 566 aa, Artificial Sequence; identical to SEQ ID NO: 2656
  derived and/or modified protein sequence (wt) from hemagglutinin__InfluenzaA__ACR67170

SEQ ID NO: 2900 - protein, 566 aa, Artificial Sequence; identical to SEQ ID NO: 2695
  derived and/or modified protein sequence (wt) from hemagglutinin__InfluenzaA__ACR67171

SEQ ID NO: 2901 - protein, 566 aa, Artificial Sequence; identical to SEQ ID NO: 2656
  derived and/or modified protein sequence (wt) from hemagglutinin__InfluenzaA__ACR67172

SEQ ID NO: 2902 - protein, 566 aa, Artificial Sequence; identical to SEQ ID NO: 2656
  derived and/or modified protein sequence (wt) from hemagglutinin__InfluenzaA__ACR67177

SEQ ID NO: 2903 - protein, 566 aa, Artificial Sequence; identical to SEQ ID NO: 2656
  derived and/or modified protein sequence (wt) from hemagglutinin__InfluenzaA__ACR67181

SEQ ID NO: 2904 - protein, 566 aa, Artificial Sequence
  derived and/or modified protein sequence (wt) from hemagglutinin__InfluenzaA__ACR67183
MKAILVVLLYTFATANADTLCIGYHANNSTDTVDTVLEKNVTVTHSVNLLEDKHNGKLCKLRGVAPLHLGKCNIAGWILGNPECESLSTASSWSYIVETSSSDNGTCYPGDFIDYEELREQLSSVSSFERFEIFPKTSSWPNHDSNKGVTAACPHAGAKSFYKNLIWLVKKGNSYPKLSKSYINDKGKEVLVLWGIHHPSTSADQQSLYQNADAYVFVGSSRYSKKFKPEIAIRPKVRDREGRMNYYWTLVEPGDKITFEATGNLVVPRYAFAMERNAGSGIIISDTPVHDCNTTCQTPKGAINTSLPFQNIHPITIGKCPKYVKSTKLRLATGLRNVPSIQSRGLFGAIAGFIEGGWTGMVDGWYGYHHQNEQGSGYAADLKSTQNAIDEITNKVNSVIEKMNTQFTAVGKEFNHLEKRIENLNKKVDDGFLDIWTYNAELLVLLENERTLDYHDSNVKNLYEKVRSQLKNNAKEIGNGCFEFYHKCDNTCMESVKNGTYDYPKYSEEAKLNREEIDGVKLESTRIYQILAIYSTVASSLVLVVSLGAISFWMCSNGSLQCRICI

SEQ ID NO: 2905 - protein, 566 aa, Artificial Sequence; identical to SEQ ID NO: 2669
  derived and/or modified protein sequence (wt) from hemagglutinin__InfluenzaA__ACR67184

SEQ ID NO: 2906 - protein, 566 aa, Artificial Sequence; identical to SEQ ID NO: 2656
  derived and/or modified protein sequence (wt) from hemagglutinin__InfluenzaA__ACR67185

SEQ ID NO: 2907 - protein, 566 aa, Artificial Sequence; identical to SEQ ID NO: 2849
  derived and/or modified protein sequence (wt) from hemagglutinin__InfluenzaA__ACR67186

SEQ ID NO: 2908 - protein, 566 aa, Artificial Sequence; identical to SEQ ID NO: 2656
  derived and/or modified protein sequence (wt) from hemagglutinin__InfluenzaA__ACR67187

SEQ ID NO: 2909 - protein, 566 aa, Artificial Sequence; identical to SEQ ID NO: 2695
  derived and/or modified protein sequence (wt) from hemagglutinin__InfluenzaA__ACR67188

SEQ ID NO: 2910 - protein, 566 aa, Artificial Sequence; identical to SEQ ID NO: 2695
  derived and/or modified protein sequence (wt) from hemagglutinin__InfluenzaA__ACR67189

SEQ ID NO: 2911 - protein, 566 aa, Artificial Sequence
  derived and/or modified protein sequence (wt) from hemagglutinin__InfluenzaA__ACR67190
MEAILVVLLYTFATANADTLCIGYHANNSTDTVDTVLEKNVTVTHSVNLLEDKHNGKLCKLRGVAPLHLGKCNIAGWILGNPECESLSTASSWSYIVETSSSDNGTCYPGDFIDYEELREQLSSVSSFERFEIFPKTSSWPNHDSNKGVTAACPHAGAKSFYKNLIWLVKKGNSYPKLSKSYINDKGKEVLVLWGIHHPSTSADQQSLYQNADAYVFVGSSRYSKKFKPEIAIRPKVRDQEGRMNYYWTLVEPGDKITFEATGNLVVPRYAFAMERNAGSGIIISDTPVHDCNTTCQTPKGAINTSLPFHNIHPITIGKCPKYVKSTKLRLATGLRNVPSIQSRGLFGAIAGFIEGGWTGMVDGWYGYHHQNEQGSGYAADLKSTQNAIDEITNKVNSVIEKMNTQFTAVGKEFNHLEKRIENLNKKVDDGFLDIWTYNAELLVLLENERTLDYHDSNVKNLYEKVRSQLKNNAKEIGNGCFEFYHKCDNTCMESVKNGTYDYPKYSEEAKLNREEIDGVKLESTRIYQILAIYSTVASSLVLVVSLGAISFWMCSNGSLQCRICI

SEQ ID NO: 2912 - protein, 566 aa, Artificial Sequence; identical to SEQ ID NO: 2656
  derived and/or modified protein sequence (wt) from hemagglutinin__InfluenzaA__ACR67192

SEQ ID NO: 2913 - protein, 566 aa, Artificial Sequence
  derived and/or modified protein sequence (wt) from hemagglutinin__InfluenzaA__ACR67193
MKAILVVLLYTFATANADTLCIGYHANNSTDTVDTVLEKNVTVTHSVNILEDKHNGKLCKLRGVAPLHLGKCNIAGWILGNPECESLSTASSWSYIVETSSSDNGTCYPGDFIDYEELREQLSSVSSFERFEIFPKTSSWPNHDSNKGVTAACPHAGAKSFYKNLIWLVKKGNSYPKLSKSYINDKGKEVLVLWGIHHPSTSADQQSLYQNADAYVFVGSSRYSKKFKPEIAIRPKVRDQEGRMNYYWTLVEPGDKITFEATGNLVVPRYAFAMERNAGSGIIISDTPVHECNTTCQTPKGAINTSLPFQNIHPITIGKCPKYVKSTKLRLATGLRNVPSIQSRGLFGAIAGFIEGGWTGMVDGWYGYHHQNEQGSGYAADLKSTQNAIDEITNKVNSVIEKMNTQFTAVGKEFNHLEKRIENLNKKVDDGFLDIWTYNAELLVLLENERTLDYHDSNVKNLYEKVRSQLKNNAKEIGNGCFEFYHKCDNTCMESVKNGTYDYPKYSEEAKLNREEIDGVKLESTRIYQILAIYSTVASSLVLVVSLGAISFWMCSNGSLQCRICI

SEQ ID NO: 2914 - protein, 566 aa, Artificial Sequence; identical to SEQ ID NO: 2656
  derived and/or modified protein sequence (wt) from hemagglutinin__InfluenzaA__ACR67195

SEQ ID NO: 2915 - protein, 566 aa, Artificial Sequence; identical to SEQ ID NO: 2656
  derived and/or modified protein sequence (wt) from hemagglutinin__InfluenzaA__ACR67197

SEQ ID NO: 2916 - protein, 566 aa, Artificial Sequence; identical to SEQ ID NO: 2913
  derived and/or modified protein sequence (wt) from hemagglutinin__InfluenzaA__ACR67198

SEQ ID NO: 2917 - protein, 566 aa, Artificial Sequence; identical to SEQ ID NO: 2656
  derived and/or modified protein sequence (wt) from hemagglutinin__InfluenzaA__ACR67199

SEQ ID NO: 2918 - protein, 566 aa, Artificial Sequence; identical to SEQ ID NO: 2669
  derived and/or modified protein sequence (wt) from hemagglutinin__InfluenzaA__ACR67244

SEQ ID NO: 2919 - protein, 566 aa, Artificial Sequence
  derived and/or modified protein sequence (wt) from hemagglutinin__InfluenzaA__ACR67254
MKAILVVLLYTFATANADTLCIGYHANNSTDTVDTVLEKNVTVTHSVNLLEDKHNGKLCKLRGVAPLHLGKCNIAGWILGNPECESLSTASSWSYIVETSSSDNGTCYPGDFIDYEELREQLSSVSSFERFEIFPKTSSWPNHDSNKGVTAACPHAGAKSFYKNLIWLVKKGNSYPKLSKSYINDKGKEVLVLWGIHHPSTSADQQSLYQNADAYVFVGSSRYSKKFKPEIAIRPKVRDQEGRMNYYWTLVEPGDKITFEATGNLVVPRYAFAMERNVGSGIIISDTPVHDCNTTCQTPKGAINTSLPFQNIHPITIGKCPKYVKSTKLRLATGLRNVPSIQSRGLFGAIAGFIEGGWTGMVDGWYGYHHQNEQGSGYAADLKSTQNAIDEITNKVNSVIEKMNTQFTAVGKEFNHLEKRIENLNKKVDDGFLDIWTYNAELLVLLENERTLDYHDSNVKNLYEKVRSQLKNNAKEIGNGCFEFYHKCDNTCMESVKNGTYDYPKYSEEAKLNREEIDGVKLESTRIYQILAIYSTVASSLVLVVSLGAISFWMCSNGSLQCRICI

SEQ ID NO: 2920 - protein, 566 aa, Artificial Sequence; identical to SEQ ID NO: 2669
  derived and/or modified protein sequence (wt) from hemagglutinin__InfluenzaA__ACR77438

SEQ ID NO: 2921 - protein, 566 aa, Artificial Sequence; identical to SEQ ID NO: 2669
  derived and/or modified protein sequence (wt) from hemagglutinin__InfluenzaA__ACR77448

SEQ ID NO: 2922 - protein, 566 aa, Artificial Sequence
  derived and/or modified protein sequence (wt) from hemagglutinin__InfluenzaA__ACR77458
MKAILVVLLYTFATANADTLCIGYHANNSTDTVDTVLEKNVTVTHSVNLLEDKHNGKLCKLRGVAPLHLDKCNIAGWILGNPECESLSTASSWSYIVETSSSDNGTCYPGDFIDYEELREQLSSVSSFERFEIFPKTSSWPNHDSNKGVTAACPHAGAKSFYKNLIWLVKKGNSYPKLSKSYINDKGKEVLVLWGIHHPSTSADQQSLYQNADAYVFVGTSRYSKKFKPEIAIRPKVRDQEGRMNYYWTLVEPGDKITFEATGNLVVPRYAFAMERNAGSGIIISDTPVHDCNTTCQTPKGAINTSLPFQNIHPITIGKCPKYVKSTKLRLATGLRNVPSIQSRGLFGAIAGFIEGGWTGMVDGWYGYHHQNEQGSGYAADLKSTQNAIDEITNKVNSVIEKMNTQFTAVGKEFNHLEKRIENLNKKVDDGFLDIWTYNAELLVLLENERTLDYHDSNVKNLYEKVRSQLKNNAKEIGNGCFEFYHKCDNTCMESVKNGTYDYPKYSEEAKLNREEIDGVKLESTRIYQILAIYSTVASSLVLVVSLGAISFWMCSNGSLQCRICI

SEQ ID NO: 2923 - protein, 566 aa, Artificial Sequence; identical to SEQ ID NO: 2669
  derived and/or modified protein sequence (wt) from hemagglutinin__InfluenzaA__ACR77468

SEQ ID NO: 2924 - protein, 566 aa, Artificial Sequence; identical to SEQ ID NO: 2669
  derived and/or modified protein sequence (wt) from hemagglutinin__InfluenzaA__ACR77478

SEQ ID NO: 2925 - protein, 566 aa, Artificial Sequence; identical to SEQ ID NO: 2669
  derived and/or modified protein sequence (wt) from hemagglutinin__InfluenzaA__ACR77488

SEQ ID NO: 2926 - protein, 566 aa, Artificial Sequence; identical to SEQ ID NO: 2669
  derived and/or modified protein sequence (wt) from hemagglutinin__InfluenzaA__ACR77498

SEQ ID NO: 2927 - protein, 566 aa, Artificial Sequence; identical to SEQ ID NO: 2656
  derived and/or modified protein sequence (wt) from hemagglutinin__InfluenzaA__ACR83525

SEQ ID NO: 2928 - protein, 566 aa, Artificial Sequence
  derived and/or modified protein sequence (wt) from hemagglutinin__InfluenzaA__ACR83538
MKAILVVLLYTFATANADTLCIGYHANNSTDTVDTVLEKNVTVTHSVNLLEDKHNGKLCKLRGVAPLHLGKCNIAGWILGNPECESLSTASSWSYIVETSSSDNGTCYPGDFIDYEELREQLSSVSSFERFEIFPKTSSWPNHDSNKGVTAACPHAGAKSFYKNLIWLVKKGNSYPKLSKSYINDKGKEVLVLWGIHHPSTSADQQSLYQNADAYVFVGTSRYSKKFKPEIAIRPKVRDQEGRMNYYWTLVEPGDKITFEATGNLVVPRYAFAMERNAGSGIIISDTPVHDCNTTCQTPKGAINTSLPFQNIHPITIGKCPKYVKSTKLRLATGLRNVPSILSRGLFGAIAGFIEGGWTGMVDGWYGYHHQNEQGSGYAADLKSTQNAIDEITNKVNSVIEKMNTQFTAVGKEFNHLEKRIENLNKKVDDGFLDIWTYNAELLVLLENERTLDYHDSNVKNLYEKVRSQLKNNAKEIGNGCFEFYHKCDNTCMESVKNGTYDYPKYSEEAKLNREEIDGVKLESTRIYQILAIYSTVASSLVLVVSLGAISFWMCSNGSLQCRICI

SEQ ID NO: 2929 - protein, 566 aa, Artificial Sequence; identical to SEQ ID NO: 2669
  derived and/or modified protein sequence (wt) from hemagglutinin__InfluenzaA__ACS14666

SEQ ID NO: 2930 - protein, 566 aa, Artificial Sequence; identical to SEQ ID NO: 2669
  derived and/or modified protein sequence (wt) from hemagglutinin__InfluenzaA__ACS14676

SEQ ID NO: 2931 - protein, 566 aa, Artificial Sequence; identical to SEQ ID NO: 2669
  derived and/or modified protein sequence (wt) from hemagglutinin__InfluenzaA__ACS14686

SEQ ID NO: 2932 - protein, 566 aa, Artificial Sequence; identical to SEQ ID NO: 2669
  derived and/or modified protein sequence (wt) from hemagglutinin__InfluenzaA__ACS14696

SEQ ID NO: 2933 - protein, 566 aa, Artificial Sequence; identical to SEQ ID NO: 2669
  derived and/or modified protein sequence (wt) from hemagglutinin__InfluenzaA__ACS14706

SEQ ID NO: 2934 - protein, 566 aa, Artificial Sequence; identical to SEQ ID NO: 2669
  derived and/or modified protein sequence (wt) from hemagglutinin__InfluenzaA__ACS14716

SEQ ID NO: 2935 - protein, 566 aa, Artificial Sequence; identical to SEQ ID NO: 2669
  derived and/or modified protein sequence (wt) from hemagglutinin__InfluenzaA__ACS14726

SEQ ID NO: 2936 - protein, 566 aa, Artificial Sequence; identical to SEQ ID NO: 2669
  derived and/or modified protein sequence (wt) from hemagglutinin__InfluenzaA__ACS14736

SEQ ID NO: 2937 - protein, 566 aa, Artificial Sequence; identical to SEQ ID NO: 2849
  derived and/or modified protein sequence (wt) from hemagglutinin__InfluenzaA__ACS27189

SEQ ID NO: 2938 - protein, 566 aa, Artificial Sequence; identical to SEQ ID NO: 2669
  derived and/or modified protein sequence (wt) from hemagglutinin__InfluenzaA__ACS27199

SEQ ID NO: 2939 - protein, 566 aa, Artificial Sequence; identical to SEQ ID NO: 2669
  derived and/or modified protein sequence (wt) from hemagglutinin__InfluenzaA__ACS27209

SEQ ID NO: 2940 - protein, 566 aa, Artificial Sequence; identical to SEQ ID NO: 2722
  derived and/or modified protein sequence (wt) from hemagglutinin__InfluenzaA__ACS27219

SEQ ID NO: 2941 - protein, 566 aa, Artificial Sequence; identical to SEQ ID NO: 2669
  derived and/or modified protein sequence (wt) from hemagglutinin__InfluenzaA__ACS27229

SEQ ID NO: 2942 - protein, 566 aa, Artificial Sequence
  derived and/or modified protein sequence (wt) from hemagglutinin__InfluenzaA__ACS27239
MKAILVVLLYTFATANADTLCIGYHANNSTDTVDTVLEKNVTVTHSVNLLEDKHNGKLCKLRGVAPLHLGKCNIAGWILGNPECESLSTASSWSYIVETSSSDNGTCYPGDFIDYEELREQLSSMSSFERFEIFPKTSSWPNHDSNKGVTAACPHAGAKSFYKNLIWLVKKGNSYPKLSKSYINDKGKEVLVLWGIHHPSTSADQQSLYQNADAYVFVGSSRYSKKFKPEIAIRPKVRDQEGRMNYYWTLVEPGDKITFEATGNLVVPRYAFAMERNAGSGIIISDTPVHDCNTTCQTPKGAINTSLPFQNIHPITIGKCPKYVKSTKLRLATGLRNVPSIQSRGLFGAIAGFIEGGWTGMVDGWYGYHHQNEQGSGYAADLKSTQNAIDEITNKVNSVIEKMNTQFTAVGKEFNHLEKRIENLNKKVDDGFLDIWTYNAELLVLLENERTLDYHDSNVKNLYEKVRSQLKNNAKEIGNGCFEFYHKCDNTCMESVKNGTYDYPKYSEEAKLNREEIDGVKLESTRIYQILAIYSTVASSLVLVVSLGAISFWMCSNGSLQCRICI

SEQ ID NO: 2943 - protein, 566 aa, Artificial Sequence; identical to SEQ ID NO: 2669
  derived and/or modified protein sequence (wt) from hemagglutinin__InfluenzaA__ACS27249

SEQ ID NO: 2944 - protein, 566 aa, Artificial Sequence; identical to SEQ ID NO: 2669
  derived and/or modified protein sequence (wt) from hemagglutinin__InfluenzaA__ACS27775

SEQ ID NO: 2945 - protein, 566 aa, Artificial Sequence; identical to SEQ ID NO: 2656
  derived and/or modified protein sequence (wt) from hemagglutinin__InfluenzaA__ACS34705

SEQ ID NO: 2946 - protein, 566 aa, Artificial Sequence; identical to SEQ ID NO: 2656
  derived and/or modified protein sequence (wt) from hemagglutinin__InfluenzaA__ACS34966

SEQ ID NO: 2947 - protein, 566 aa, Artificial Sequence
  derived and/or modified protein sequence (wt) from hemagglutinin__InfluenzaA__ACS34967
MKAILVVLLYTFATANADTLCIGYHANNSTDTVDTVLEKNVTVTHSVNLLEDKHNGKLCKLRGVAPLHLGKCNIAGWILGNPECESLSTASSWSYIVETSSSDNGTCYPGDFIDYEELREQLSSVSSFERFEIFPKTSSWPNHDSNKGVTAACPHAGAKSFYKNLIWLVKKGNSYPKLSKSYINDKGKEVLVLWGIHHPSTSADQQSLYQNADAYVFVGSSRYSKKFKPEIAIRPKVRDQEGRMNYYWTLVEPGDKITFEATGNLVVPRYAFAMERNAGSGIIISDTPVHDCNTTCQTPKGAINTSLPFQNIHPITIGKCPKYVKSTKSRLATGLRNVPSIQSRGLFGAIAGFIEGGWTGMVDGWYGYHHQNEQGSGYAADLKSTQKAIDEITNKVNSVIEKMNTQFTAVGKEFNHLEKRIENLNKKVDDGFLDIWTYNAELLVLLENERTLDYHDSNVKNLYEKVRSQLKNNAKEIGNGCFEFYHKCDNTCMESVKNGTYDYPKYSEEAKLNREEIDGVKLESTRIYQILAIYSTVASSLVLVVSLGAISFWMCSNGSLQCRICI

SEQ ID NO: 2948 - protein, 566 aa, Artificial Sequence
  derived and/or modified protein sequence (wt) from hemagglutinin__InfluenzaA__ACS34968
MKAILVVLLYTFATANADTLCIGYHANNSTDTVDTVLEKNVTVTHSVNLLEDKHNGKLCKLRGVAPLHLGKCNIAGWILGNPECESLSTASSWSYIVESSSSDNGTCYPGDFIDYEELREQLSSVSSFERFEIFPKTSSWPNHDSNKGVTAACPHAGAKSFYKNLIWLVKKGNSYPKLSKSYINDKGKEVLVLWGIHHPSTSADQQSLYQNADAYVFVGSSRYSKKFKPEIAIRPKVRDQEGRMNYYWTLVEPGDKIIFEATGNLVVPRYAFAMERNAGSGIIISDTPVHDCNTTCQTPKGAINTSLPFQNIHPITIGKCPKYVKSTKLRLATGLRNVPSIQSRGLFGAIAGFIEGGWTGMVDGWYGYHHQNEQGSGYAADLKSTQNAIDEITNKVNSVIEKMNTQFTAVGKEFNHLEKRIENLNKKVDDGFLDIWTYNAELLVLLENERTLDYHDSNVKNLYEKVRSQLKNNAKEIGNGCFEFYHKCDNTCMESVKNGTYDYPKYSEEAKLNREEIDGVKLESTRIYQILAIYSTVASSLVLVVSLGAISFWMCSNGSLQCRICI

SEQ ID NO: 2949 - protein, 566 aa, Artificial Sequence
  derived and/or modified protein sequence (wt) from hemagglutinin__InfluenzaA__ACS36632
MKAILVVLLYTFATANADTLCIGYHANNSTDTVDTVLEKNVTVTHSVNLLEDKHNGKLCKLRGVAPLHLGKCNIAGWILGNPECESLSTASSWSYIVETSSSDNGTCYPGDFIDYEELREQLSSVSSFERFEIFPKTSSWPNHDSNKGVTAACPHAGAKSFYKNLIWLVKKGNSYPKLSKSYINDKGKEVLVLWGIHHPSTSADQQSLYQNADAYVFVGSSRYSKKFKPEIAIRPKVRDQEGRMNYYWTLVEPGDKITFEATGNLVVPRYAFAMERNAGSGIIISDTPVHDCNTTCQTPKGAINTSLPFQNIHPITIGKCPKYVKSTKLRLATGLRNVPSIQSRGLFGAIAGFIEGGWTGMVDGWYGYHHQNEQGSGYAADLKSTQKAIDEITNKVNSVIEKMNTQFTAVGKEFNHLEKRIENLNKKVDDGFLDIWTYNAELLVLLENERTLDYHDSNVKNLYEKVRSQLKNNAKEIGNGCFEFYHKCDNTCMESVKNGTYDYPKYSEEAKLNREEIDGVKLESTRIYQILAIYSTVASSLVLVVSLGAISFWMCSNGSLQCRICI

SEQ ID NO: 2950 - protein, 566 aa, Artificial Sequence
  derived and/or modified protein sequence (wt) from hemagglutinin__InfluenzaA__ACS36645
MKAILVVLLYTFATANADTLCIGYHANNSTDTVDTVLEKNVTVTHSVNLLEDKHNGKLCKLRGVAPLHLGKCNIAGWILGNPECESLSTASSWSYIVETSSSDNGTCYPGDFIDYEELREQLSSVSSFERFEIFPKTSSWPNHDSNKGVTAACPHAGTKSFYKNLIWLVKKGNSYPKLSKSYINDKGKEVLVLWGIHHPSTSADQQSLYQNADAYVFVGSSRYSKKFKPEIAIRPKVRDQEGRMNYYWTLVEPGDKITFEATGNLVVPRYAFAMERNAGSGIIISDTPVHDCNTTCQTPKGAINTSLPFQNIHPITIGKCPKYVKSTKLRLATGLRNVPSIQSRGLFGAIAGFIEGGWTGMVDGWYGYHHQNEQGSGYAADLKSTQNAIDEITNKVNSVIEKMNTQFTAVGKEFNHLEKRIENLNKKVDDGFLDIWTYNAELLVLLENERTLDYHDSNVKNLYEKVRSQLKSNAKEIGNGCFEFYHKCDNTCMESVKNGTYDYPKYSEEAKLNREEIDGIKLESTRIYQILAIYSTVASSLVLVVSLGAISFWMCSNGSLQCRICI

SEQ ID NO: 2951 - protein, 566 aa, Artificial Sequence
  derived and/or modified protein sequence (wt) from hemagglutinin__InfluenzaA__ACS45035
MKAILVVLLYTFATANADTLCIGYHANNSTDTVDTVLEKNVTVTHSVNLLEDKHNGKLCKLRGVAPLHLGKCNIAGWILGNPECESLSTASSWSYIVETPSSDNGTCYPGDFIDYEELREQLSSVSSFERFEIFPKTSSWPNHDSNKGVTAACPHAGAKSFYKNLIWLVKKGNSYPKLSKSYINDKGKEVLVLWGIHHPSTSADQQSIYQNADTYVFVGSSRYSKKFKPEIAIRPKVRDQEGRMNYYWTLVEPGDKITFEATGNLVVPRYAFAMERNAGSGIIISDTPVHDCNTTCQTPKGAINTSLPFQNIHPITIGKCPKYVKSTKLRLATGLRNIPSIQSRGLFGAIAGFIEGGWTGMVDGWYGYHHQNEQGSGYAADLKSTQNAIDEITNKVNSVIEKMNTQFTAVGKEFNHLEKRIENLNKKVDDGFLDIWTYNAELLVLLENERTLDYHDSNVKNLYEKVRSQLKNNAKEIGNGCFEFYHKCDNTCMESVKNGTYDYPKYSEEAKLNREEIDGVKLESTRIYQILAIYSTVASSLVLVVSLGAISFWMCSNGSLQCRICI

SEQ ID NO: 2952 - protein, 566 aa, Artificial Sequence; identical to SEQ ID NO: 2669
  derived and/or modified protein sequence (wt) from hemagglutinin__InfluenzaA__ACS50084

SEQ ID NO: 2953 - protein, 566 aa, Artificial Sequence; identical to SEQ ID NO: 2911
  derived and/or modified protein sequence (wt) from hemagglutinin__InfluenzaA__ACS50095

SEQ ID NO: 2954 - protein, 566 aa, Artificial Sequence
  derived and/or modified protein sequence (wt) from hemagglutinin__InfluenzaA__ACS54258
MKAILVVLLYTFATANADTLCIGYHANNSTDTVDTVLEKNVTVTHSVNLLEDKHNGKLCKLRGVAPLHLGKCNIAGWILGNPECESLSTASSWSYIVETSSSDNGTCYPGDFIDYEELREQLSSVSSFERFEIFPKTSSWPNHDSNKGVTAACPHAGAKSFYKNLIWLVKKGNSYPKLSKSYINDKGKEVLVLWGIHHPSTSADQQSLYQNADAYVFVGTSRYSKKFKPEIAIRPKVRDQEGRMNYYWTLVEPGDKITFEATGNLVVPRYAFAMERNAGSGIIISDTPVHDCNTTCQTPKGAINTSLPFQNIHPITIGKCPKYVKSTKLRLATGLRNVPSIQSRGLFGAIAGFIEGGWTGMVDGWYGYHHQNEQGSGYAADLKSTQNAIDEITNKVNSVIEKMNTQFTAVGKEFNHLEKRIENLNKKVDDGFLDIWTYNAELLVLLENERTLDYHDSNVKNLYEKVRSQLKNNAKEIGNGCFEFYHKCDNTCMESVKNGTYYYPKYSEEAKLNREEIDGVKLESTRIYQILAIYSTVASSLVLVVSLGAISFWMCSNGSLQCRICI

SEQ ID NO: 2955 - protein, 566 aa, Artificial Sequence; identical to SEQ ID NO: 2684
  derived and/or modified protein sequence (wt) from hemagglutinin__InfluenzaA__ACS54259

SEQ ID NO: 2956 - protein, 566 aa, Artificial Sequence; identical to SEQ ID NO: 2656
  derived and/or modified protein sequence (wt) from hemagglutinin__InfluenzaA__ACS54260

SEQ ID NO: 2957 - protein, 566 aa, Artificial Sequence; identical to SEQ ID NO: 2669
  derived and/or modified protein sequence (wt) from hemagglutinin__InfluenzaA__ACS54261

SEQ ID NO: 2958 - protein, 566 aa, Artificial Sequence; identical to SEQ ID NO: 2669
  derived and/or modified protein sequence (wt) from hemagglutinin__InfluenzaA__ACS54263

SEQ ID NO: 2959 - protein, 566 aa, Artificial Sequence; identical to SEQ ID NO: 2669
  derived and/or modified protein sequence (wt) from hemagglutinin__InfluenzaA__ACS54301

SEQ ID NO: 2960 - protein, 566 aa, Artificial Sequence; identical to SEQ ID NO: 2656
  derived and/or modified protein sequence (wt) from hemagglutinin__InfluenzaA__ACS66821

SEQ ID NO: 2961 - protein, 566 aa, Artificial Sequence
  derived and/or modified protein sequence (wt) from hemagglutinin__InfluenzaA__ACS68822
MKAILVVLLYTFATANADTLCIGYHANNSTDTVDTVLEKNVTVTHSVNLLEDKHNGKLCKLRGVAPLHLGKCNIAGWILGNPECESLSTASSWSYIVETSSSDNGTCYPGDFIDYEGLREQLSSVSSFERFEIFPKTSSWPNHDSNKGVTAACPHAGAKSFYKNLIWLVKKGNSYPKLSKSYINDKGKEVLVLWGIHHPSTSADQQSLYQNADAYVFVGTSRYSKKFKPEIAIRPKVRDQEGRMNYYWTLVEPGDKITFEATGNLVVPRYAFAMERNAGSGIIISDTPVHDCNTTCQTPKGAINTSLPFQNIHPITIGKCPKYVKSTKLRLATGLRNVPSIQSRGLFGAIAGFIEGGWTGMVDGWYGYHHQNEQGSGYAADLKSTQNAIDEITNKVNSVIEKMNTQFTAVGKEFNHLEKRIENLNKKIDDGFLDIWTYNAELLVLLENERTLDYHDSNVKNLYEKVRSQLKNNAKEIGNGCFEFYHKCDNTCMESVKNGTYDYPKYSEEAKLNREEIDGVKLESTRIYQILAIYSTVASSLVLVVSLGAISFWMCSNGSLQCRICI

SEQ ID NO: 2962 - protein, 566 aa, Artificial Sequence; identical to SEQ ID NO: 2669
  derived and/or modified protein sequence (wt) from hemagglutinin__InfluenzaA__ACS75821

SEQ ID NO: 2963 - protein, 566 aa, Artificial Sequence; identical to SEQ ID NO: 2669
  derived and/or modified protein sequence (wt) from hemagglutinin__InfluenzaA__ACS77926

SEQ ID NO: 2964 - protein, 566 aa, Artificial Sequence; identical to SEQ ID NO: 2669
  derived and/or modified protein sequence (wt) from hemagglutinin__InfluenzaA__ACS77936

SEQ ID NO: 2965 - protein, 566 aa, Artificial Sequence; identical to SEQ ID NO: 2762
  derived and/or modified protein sequence (wt) from hemagglutinin__InfluenzaA__ACS77946

SEQ ID NO: 2966 - protein, 566 aa, Artificial Sequence; identical to SEQ ID NO: 2669
  derived and/or modified protein sequence (wt) from hemagglutinin__InfluenzaA__ACS77956

SEQ ID NO: 2967 - protein, 566 aa, Artificial Sequence; identical to SEQ ID NO: 2669
  derived and/or modified protein sequence (wt) from hemagglutinin__InfluenzaA__ACS77966

SEQ ID NO: 2968 - protein, 566 aa, Artificial Sequence; identical to SEQ ID NO: 2669
  derived and/or modified protein sequence (wt) from hemagglutinin__InfluenzaA__ACS77976

SEQ ID NO: 2969 - protein, 566 aa, Artificial Sequence; identical to SEQ ID NO: 2911
  derived and/or modified protein sequence (wt) from hemagglutinin__InfluenzaA__ACS77986

SEQ ID NO: 2970 - protein, 566 aa, Artificial Sequence
  derived and/or modified protein sequence (wt) from hemagglutinin__InfluenzaA__ACS77996
MKATLVVLLYTFATANADTLCIGYHANNSTDTVDTVLEKNVTVTHSVNLLEDKHNGKLCKLRGVAPLHLGKCNIAGWILGNPECESLSTASSWSYIVETSSSDNGTCYPGDFIDYEELREQLSSVSSFERFEIFPKTSSWPNHDSNKGVTAACPHAGAKSFYKNLIWLVKKGNSYPKLSKSYINDKGKEVLVLWGIHHPSTSADQQSLYQNADAYVFVGTSRYSKKFKPEIAIRPKVRDQEGRMNYYWTLVEPGDKITFEATGNLVVPRYAFAMERNAGSGIIISDTPVHDCNTTCQTPKGAINTSLPFQNIHPITIGKCPKYVKSTKLRLATGLRNVPSIQSRGLFGAIAGFIEGGWTGMVDGWYGYHHQNEQGSGYAADLKSTQNAIDEITNKVNSVIEKMNTQFTAVGKEFNHLEKRIENLNKKVDDGFLDIWTYNAELLVLLENERTLDYHDSNVKNLYEKVRSQLKNNAKEIGNGCFEFYHKCDNTCMESVKNGTYDYPKYSEEAKLNREEIDGVKLESTRIYQILAIYSTVASSLVLVVSLGAISFWMCSNGSLQCRICI

SEQ ID NO: 2971 - protein, 566 aa, Artificial Sequence; identical to SEQ ID NO: 2669
  derived and/or modified protein sequence (wt) from hemagglutinin__InfluenzaA__ACS78006

SEQ ID NO: 2972 - protein, 566 aa, Artificial Sequence; identical to SEQ ID NO: 2669
  derived and/or modified protein sequence (wt) from hemagglutinin__InfluenzaA__ACS78016

SEQ ID NO: 2973 - protein, 566 aa, Artificial Sequence
  derived and/or modified protein sequence (wt) from hemagglutinin__InfluenzaA__ACS78026
MKAILVVLLYTFATANADTLCIGYHANNSTDTVDTVLEKNVTVTHSVNLLEDKHNGKLCKLRGVAPLHLGKCNIAGWILGNPECESLSTASSWSYIVETSSSDNGTCYPGDFIDYEELREQLSSVSSFERFEIFPKISSWPNHDSNRGVTAACPHAGAKSFYKNLIWLVKKGNSYPKLIKSYINDKGKEVLVLWGIHHPSTSADQQSLYQNADAYVFVGSSRYSKKFKPEIAIRPKVRDQEGRMNYYWTLVEPGDKITFEATGNLVVPRYAFAMERNAGSGIIISDTPVHDCNTTCQTPKGAINTSLPFQNIHPITIGKCPKYVKSTKLRLATGLRNVPSIQSRGLFGAIAGFIEGGWTGMVDGWYGYHHQNEQGSGYAADLKSTQNAIDEITNKVNSVIEKMNTQFTAVGKEFNHLEKRIENLNKKVDDGFLDIWTYNAELLVLLENERTLDYHDSNVKNLYEKVRSQLKNNAKEIGNGCFEFYHKCDNTCMESVKNGTYDYPKYSEEAKLNREEIDGVKLESTRIYQILAIYSTVASSLVLVVSLGAISFWMCSNGSLQCRICI

SEQ ID NO: 2974 - protein, 566 aa, Artificial Sequence; identical to SEQ ID NO: 2911
  derived and/or modified protein sequence (wt) from hemagglutinin__InfluenzaA__ACS78036

SEQ ID NO: 2975 - protein, 566 aa, Artificial Sequence; identical to SEQ ID NO: 2911
  derived and/or modified protein sequence (wt) from hemagglutinin__InfluenzaA__ACS78046

SEQ ID NO: 2976 - protein, 566 aa, Artificial Sequence; identical to SEQ ID NO: 2684
  derived and/or modified protein sequence (wt) from hemagglutinin__InfluenzaA__ACS92569

SEQ ID NO: 2977 - protein, 566 aa, Artificial Sequence; identical to SEQ ID NO: 2684
  derived and/or modified protein sequence (wt) from hemagglutinin__InfluenzaA__ACS92579

SEQ ID NO: 2978 - protein, 566 aa, Artificial Sequence; identical to SEQ ID NO: 2669
  derived and/or modified protein sequence (wt) from hemagglutinin__InfluenzaA__ACS92589

SEQ ID NO: 2979 - protein, 566 aa, Artificial Sequence
  derived and/or modified protein sequence (wt) from hemagglutinin__InfluenzaA__ACS92612
MKAILVVLLYTFATANADTLCIGYHANNSTDTVDTVLEKNVTVTHSVNLLEDKHNGKLCKLRGVAPLHLGKCNIAGWILGNPECESLSTASSWSYIVETSSSDNGTCYPGDFIDYEELREQLSSVSSFERFEIFPKTSSWPIHDSNKGVTAACPHAGAKSFYKNLIWLVKKGNSYPKLSKSYINDKGKEVLVLWGIHHPSTSADQQSLYQNADAYVFVGSSRYSKKFKPEIAIRPKVRDQEGRMNYYWTLVEPGDKITFEATGNLVVPRYAFAMERNAGSGIIISDTPVHDCDTTCQTPKGAINTSLPFQNIHPITIGKCPKYVKSTKLRLATGLRNIPSIQSRGLFGAIAGFIEGGWTGMVDGWYGYHHQNEQGSGYAADLKSTQNAIDEITNKVNSVIEKMNTQFTAVGKEFNHLEKRIENLNKKVDDGFLDIWTYNAELLVLLENERTLDYHDSNVKNLYEKVRSQLKNNAKEIGNGCFEFYHKCDNTCMESVKNGTYDYPKYSEEAKLNREEIDGVKLESTRIYQILAIYSTVASSLVLVVSLGAISFWMCSNGSLQCRICI

SEQ ID NO: 2980 - protein, 566 aa, Artificial Sequence; identical to SEQ ID NO: 2669
  derived and/or modified protein sequence (wt) from hemagglutinin__InfluenzaA__ACT10307

SEQ ID NO: 2981 - protein, 566 aa, Artificial Sequence; identical to SEQ ID NO: 2669
  derived and/or modified protein sequence (wt) from hemagglutinin__InfluenzaA__ACT10314

SEQ ID NO: 2982 - protein, 566 aa, Artificial Sequence
  derived and/or modified protein sequence (wt) from hemagglutinin__InfluenzaA__ACT11057
MKAILVVLLYTFATANADTLCIGYHANNSTDTVDTVLEKNVTVTHSVNILEDKHNGKLCKLRGVAPLHLGKCNIAGWILGNPECESLSTASSWSYIVETSSSDNGTCYPGDFIDYEELREQLSSVSSFERFEIFPKTSSWPNHDSNKGVTAACPHAGAKSFYKNLIWLVKKGNSYPKLSKSYINDKGKEVLVLWGIHHPSTSADQQSLYQNADAYVFVGSSRYSKKFKPEIAIRPKVRDQEGRMNYYWTLVEPGDKITFEATGNLVVPRYAFAMERNAGSGIIISDTPVHDCNTTCQTPKGAINTSLPFQNIHPITIGKCPKYVKSTKLRLATGLRNVPSIQSRGLFGAIAGFIEGGWTGMVDGWYGYHHQNEQGSGYAADLKSTQNAIDEITNKVNSVIEKMNTQFTAVGKEFNHLEKRIENLNKKVDDGFLDIWTYNAELLVLLENERTLDYHDSNVKNLYEKVRSQLKNNAKEVGNGCFEFYHKCDNTCMESVKNGTYDYPKYSEEAKLNREEIDGVKLESTRIYQILAIYSTVASSLVLVVSLGAISFWMCSNGSLQCRICI

SEQ ID NO: 2983 - protein, 567 aa, Artificial Sequence
  derived and/or modified protein sequence (wt) from hemagglutinin__InfluenzaA__ACT15312
MEKIVLLLAIVSIVKSDQICIGYHANNSTEQVDTIMEKNVTVTHAQDILEKTHNGKLCNLDGVKPLILRDCSVAGWLLGNPMCDEFLNVPEWSYIVEKINPANDLCYPGNFNDYEELKHLLSRINHFEKIQIIPKNSWSDHEASGVSSACPYQGRSSFFRNVVWLTKKNNAYPTIKRSYNNTNQEDLLVLWGIHHPNDAAEQTRLYQNPTTYISVGTSTLNQRLVPKIATRSKVNGQSGRMEFFWTILKSNDAINFESNGNFIAPENAYKIVKKGDSTIMKSELEYGNCNTKCQTPIGAINSSMPFHNIHPLTIGECPKYVKSNRLVLATGLRNSPQGERRRKKRGLFGAIAGFIEGGWQGMVDGWYGYHHSNEQGSGYAADKESTQKAIDGVTNKVNSIIDKMNTQFEAVGREFNNLERRIENLNKKMEDGFLDVWTYNAELLVLMENERTLDFHDSNVKNLYDKVRLQLRDNAKELGNGCFEFYHRCDNECMESVRNGTYDYPQYSEEARLKREEISGVKLESIGTYQILSIYSTVASSLALAIMVAGLFLWMCSNGSLQCRICI

SEQ ID NO: 2984 - protein, 567 aa, Artificial Sequence
  derived and/or modified protein sequence (wt) from hemagglutinin__InfluenzaA__ACT15314
MEKIVLLLAIVSLVKSDQICIGYHANNSTEQVDTIMEKNVTVTHAQDILEKTHNGKLCNLDGVKPLILRDCSVAGWLLGNPMCDEFLNVPEWSYIVEKINPANDLCYPGNFNDYEELKHLLSRINHFEKIQIIPKNSWSDHEASGVSSACPYQGRSSFFRNVVWLTKKNNAYPTIKRSYNNTNQEDLLVLWGIHHPNDAAEQTRLYQNPTTYISVGTSTLNQRLVPKITTRSKVNGQSGRMEFFWTILKSNDAINFESNGNFIAPENAYKIVKKGDSTIMKSELEYGNCNTKCQTPIGAINSSMPFHNIHPLTIGECPKYVKSNRLVLATGLRNSPQGERRRKKRGLFGAIAGFIEGGWQGMVDGWYGYHHSNEQGSGYAADKESTQKAIDGVTNKVNSIIDKMNTQFEAVGREFNNLERRIENLNKKMEDGFLDVWTYNAELLVLMENERTLDFHDSNVKNLYDKVRLQLRDNAKELGNGCFEFYHRCDNECMESVRNGTYDYPQYSEEARLKREEISGVKLESIGTYQILSIYSTVASSLALAIMVAGLFLWMCSNGSLQCRICI

SEQ ID NO: 2985 - protein, 567 aa, Artificial Sequence
  derived and/or modified protein sequence (wt) from hemagglutinin__InfluenzaA__ACT15316
MEKIVLLLAIVSLVKSDQICIGYHANNSTEQVDTIMEKNVTVTHAQDILEKTHNGKLCNLDGVKPLILRDCSVAGWLLGNPMCDEFLNVPEWSYIVEKINPANDLCYPGNFNDYEELKHLLSRINHFEKIQIIPKNSWSDHEASGVSSACPYQGRSSFFRNVVWLTKKDNAYPTIKRSYNNTNQEDLLVLWGIHHPNDAAEQTRLYQNPTTYISVGTSTLNQRLIPKIATRSKVNGQSGRMEFFWTILKSNDAINFESNGNFIAPENAYKIVKKGDSTIMKSELEYGNCNTKCQTPIGAINSSMPFHNIHPLTIGECPKYVKSNRLVLATGLRNSPQGERRRKKRGLFGAIAGFIEGGWQGMVDGWYGYHHSNEQGSGYAADKESTQKAIDGVTNKVNSIIDKMNTQFEAVGREFNNLERRIENLNKKMEDGFLDVWTYNAELLVLMENERTLDFHDSNVKNLYDKVRLQLRDNAKELGNGCFEFYHRCDNECMESVRNGTYDYPQYSEEARLKREEISGVKLESIGTYQILSIYSTVASSLALAIMVAGLFLWMCSNGSLQCRICI

SEQ ID NO: 2986 - protein, 567 aa, Artificial Sequence
  derived and/or modified protein sequence (wt) from hemagglutinin__InfluenzaA__ACT15320
MEKIVLLLAIVSLVKSDQICIGYHANNSTEQVDTIMEKNVTVTHAQDILEKTHNGKLCNLDGVKPLILRDCSVAGWLLGNPMCDEFLNVPEWSYIVEKINPANDLCYPGNFNDYEELKHLLSRINHFEKIQIIPKNSWSDHEASGMSSACPYQGRSSFFRNVVWLTKKDNAYPTIKRSYNNTNQEDLLVLWGIHHPNDAAEQTRLYQNPTTYISVGTSTLNQRLVPKIATRSKVNGQSGRMEFFWTILKSNDAINFESNGNFIAPENAYKIVKKGDSTIMKSELEYGNCNTKCQTPIGAINSSMPFHNIHPLTIGECPKYVKSNRLVLATGLRNSPQGERRRKKRGLFGAIAGFIEGGWQGMVDGWYGYHHSNEQGSGYAADKESTQKAIDGVTNKVNSIIDKMNTQFEAVGREFNNLERRIENLNKKMEDGFLDVWTYNAELLVLMENERTLDFHDSNVKNLYDKVRLQLRDNAKELGNGCFEFYHRCDNECMESVRNGTYDYPQYSEEARLKREEISGVKLESIGTYQILSIYSTVASSLALAIMVAGLFLWMCSNGSLQCRICI

SEQ ID NO: 2987 - protein, 567 aa, Artificial Sequence
  derived and/or modified protein sequence (wt) from hemagglutinin__InfluenzaA__ACT15322
MEKIVLLLAIVSLVKSDQICIGYHANNSTEQVDTIMEKNVTVTHAQDILEKTHNGKLCNLDGVKPLILRDCSVAGWLLGNPMCDEFLNVPEWSYIVEKINPANDLCYPGNFNDYEELKHLLSRINHFEKIQIIPKNSWSDHEASGVSSACPYQGRSSFFRNVVWLTKKDNAYPTIKRSYNNTNQEDLLVLWGIHHPNDAAEQTRLYQNPTTYISVGTSTLNQRLVPKIATRSKVNGQSGRMEFFWTILKSNDAINFESNGNFIAPENAYKIVKKGDSTIMKSELEYGNCNTKCQTPIGAINSSMPFHNIHPLTIGECPKYVKSNRLVLATGLRNSPQGERRRKKRGLFGAIAGFIEGGWQGMVDGWYGYHHSNEQGSGYAADKESTQKAIDGVTNKVNSIIDKMNTQFEAVGREFNNLESRIENLNKKMEDGFLDVWTYNAELLVLMENERTLDFHDSNVKNLYDKVRLQLRDNAKELGNGCFEFYHRCDNECMESVRNGTYDYPQYSEEARLKREEISGVKLESIGTYQILSIYSTVASSLALAIMVAGLFLWMCSNGSLQCRICI

SEQ ID NO: 2988 - protein, 567 aa, Artificial Sequence
  derived and/or modified protein sequence (wt) from hemagglutinin__InfluenzaA__ACT15326
MEKIVLLLAIVSLVKSDQICIGYHANNSTEQVDTIMEKNVTVTHAQDILEKTHNGKLCNLDGVKPLILRDCSVAGWLLGNPMCDEFLNVPEWSYIVEKINPANDLCYPGNFNDYEELKHLLSRINHFEKIQIIPKNSWSDHEASGVSSACPYQGRSSFFRNVVWLTKKDNAYPTIKRSYNNTNQEDLLVLWGIHHPNDAAEQTRLYQNPTTYISVGTSTLNQRLIPKIATRSKVNGQSGRMEFFWTILKPNDAINFESNGNFIAPENAYKIVKKGDSTIMKSELEYGNCNTKCQTPIGAINSSMPFHNIHPLTIGECPKYVKSNRLVLATGLRNSPQGERRRKKRGLFGAIAGFIEGGWQGMVDGWYGYHHSNEQGSGYAADKESTQKAIDGVTNKVNSIIDKMNTQFEAVGREFNNLERRIENLNKKMEDGFLDVWTYNAELLVLMENERTLDFHDSNVKNLYDKVRLQLRDNAKELGNGCFEFYHRCDNECMESVRNGTYDYPQYSEEARLKREEISGVKLESIGTYQILSIYSTVASSLALAIMVAGLFLWMCSNGSLQCRICI

SEQ ID NO: 2989 - protein, 567 aa, Artificial Sequence
  derived and/or modified protein sequence (wt) from hemagglutinin__InfluenzaA__ACT15328
MEKIVLLLAIVSLVKSDQICIGYHANNSTEQVDTIMEKNVTVTHAQDILEKTHNGKLCNLDGVKPLILRDCSVAGWLLGNPMCDEFLNVPEWSYIVEKINPANDLCYPGNFNDYEELKHLLSRINHFEKIQIIPKNSWSDHEASGVSSACPYQGRSSFFRNVVWLTKKDNAYPTIKRSYNNTNQEDLLVLWGIHHPNDAAEQTRLYQNPTTYISVGTSTLNQRLVPKIATRSKVNGQNGRMEFFWTILKSNDAINFESNGNFIAPENAYKIVKKGDSTIMKSELEYGNCNTKCQTPIGAINSSMPFHNIHPLTIGECPKYVKSNRLVLATGLRNSPQGERRRKKRGLFGAIAGFIEGGWQGMVDGWYGYHHSNEQGSGYAADKESTQKAIDGVTNKVNSIIDKMNTQFEAVGREFNNLERRIENLNKKMEDGFLDVWTYNAELLVLMENERTLDFHDSNVKNLYDKVRLQLRDNAKELGNGCFEFYHRCDNECMESVRNGTYDYPHYSEEARLKREEISGVKLESIGTYQILSIYSTVASSLALAIMVAGLFLWMCSNGSLQCRICI

SEQ ID NO: 2990 - protein, 567 aa, Artificial Sequence
  derived and/or modified protein sequence (wt) from hemagglutinin__InfluenzaA__ACT15330
MEKIVLLLAIVSLVKSDQICIGYHANNSTEQVDTIMEKNVTVTHAQDILEKTHNGKLCNLDGVKPLILRDCSVAGWLLGNPMCDEFLNVPEWSYIVEKINPANDLCYPGNFNDYEELKHLLSRINHFEKIQIIPKNSWSDHEASGVSSACPYQGRSSFFRNVVWLTKKDNAYPTIKRSYNNTNQEDLLVLWGIHHPNDAAEQTRLYQNPTTYISVGTSTLNQRLVPKIATRSKVNGQSGRMEFFWTILKSNDAINFESNGNFIAPENAYKIVKKGDSTIMKSELEYGNCNTKCQTPIGAINSSMPFHNIHPLTIGECPKYVKSNRLVLATGLRNSPQGERRRKKRGLFGAIAGFIEGGWQGMVDGWYGYHHSNEQGSGYAADKESTQKAIDGVTNKVNSIIDKMNTQFEAVGREFNNLERRIENLNKKMEDGFLDVWTYNAELLVLMENERTLDFHDSNVKNLYDKVRLQLRDNAKELGNGCFEFYHRCDNECMESVRNGTYDYPHYSEEARLKREEISGVKLESIGTYQILSIYSTVASSLALAIMVAGLFLWMCSNGSLQCRICI

SEQ ID NO: 2991 - protein, 568 aa, Artificial Sequence
  derived and/or modified protein sequence (wt) from hemagglutinin__InfluenzaA__ACT15332
MEKIVLLLAIVSLVKSDQICIGYHANNSTEQVDTIMEKNVTVTHAQDILEKTHNGKLCDLDGVKPLILRDCSVAGWLLGNPMCDEFLNVPEWSYIVEKINPANDLCYPGDFNDYEELKHLLSRINHFEKIQIIPKSSWSDHEASSGVSSACPYQGRSSFFRNVVWLIKKDNAYPTIKRSYNNTNQEDLLVLWGIHHPNDAAEQTRLYHNPTTYISVGTSTLNQRLVPKIATRSKINGQSGRMEFFWTILKPNDAINFESNGNFIAPENAYKIVKKGDSTIMKSELEYGNCNTKCQTPIGAINSSMPFHNIHPLTIGECPKYVKSSRLVLATGLRNSPQGKSRRKKRGLFGAIAGFIEGGWQGMVDGWYGYHHSNEQGSGYAADKESTQRAIDGVTNKVNSIIDKMNTQFEAVGREFNNLERRIENLNKKMEDGFLDVWTYNAELLVLMENERTLDFHDSNVKNLYDKVRLQLRDNAKELGNGCFEFYHRCDNECMESVRNGTYDYPQYSEEARLKREEISGVKLESIGIYQILSIYSTVASSLALAIMVAGLFLWMCSNGSLQCRICI

SEQ ID NO: 2992 - protein, 567 aa, Artificial Sequence
  derived and/or modified protein sequence (wt) from hemagglutinin__InfluenzaA__ACT15336
MEKIVLLLAIVSLVKSDQICIGYHANNSTEQVDTIMEKNVTVTHAQDILEKTHNGKLCNLDGVKPLILRDCSVAGWLLGNPMCDEFLNVPEWSYIVEKINPANDLCYPGNFNDYEELKHLLSRINHFEKIQIIPKNSWSDHEASGVSSACPYQGRSSFFRNVVWLTKKDNAYPTIKRSYNNTNQEDLLVLWGIHHPNDAAEQTRLYQNPTTYISVGTSTLNQRLVPKIATRSKVNGQSGRMEFFWTILKSNDAINFESNGNFIAPENAYKIVKKGDSTIMKSELEYGNCNTKCQTPIGAINSSMPFHNIHPLTIGECPKYVKSNRLVLATGLRNSPQGERRRKKRGLFGAIAGFIEGGWQGMVDGWYGYHHSNEQGSGYAADKESTQKAIDGVTNKVNSIIDKMNTQFEAVGREFNNLERRIENLNKKMEDGFLDVWTYNAELLVLMENERTLDFHDSNVKNLYDKVRLQLRDNAKELGNGCFEFYHRCDNECMESVRNGTYDYPQYSEEARLKREEISGVKLESIGTYQILSIYSTVASSLALAIMVAGLFLWMCSNGSLQCRICI

SEQ ID NO: 2993 - protein, 567 aa, Artificial Sequence
  derived and/or modified protein sequence (wt) from hemagglutinin__InfluenzaA__ACT15338
MEKIVLLLAIVSLVKSDQICIGYHANNSTEQVDTIMEKNVTVTHAQDILEKTHNGKLCNLDGVKPLILRDCSVAGWLLGNPMCDEFLNVPEWSYIVEKINPANDLCYPGNFNDYEELKHLLSRINHFEKIQIIPKNSWSDHEASGVSSACPYQGRSSFFRNVVWLTKKNNAYPTIKRSYNNTNQEDLLVLWGIHHPNDATEQTRLYQNPTTYISVGTSTLNQRLIPKIATRSKVNGQSGRMEFFWTILKSNDAINFESNGNFIAPENAYKIVKKGDSTIMKSELEYGNCNTKCQTPIGAINSSMPFHNIHPLTIGECPKYVKSNRLVLATGLRNSPQEGRRRKKRGLFGAIAGFIEGGWQGMVDGWYGYHHSNEQGSGYAADKESTQKAIDGVTNKVNSIIDKMNTQFEAVGREFNNLERRIENLNKKMEDGFLDVWTYNAELLVLMENERTLDFHDSNVKNLYDKVRLQLRDNAKELGNGCFEFYHRCDNECMESVRNGTYDYPQYSEEARLKREEISGVKLESIGTYQILSIYSTVASSLALAIMVAGLFLWMCSNGSLQCRICI

SEQ ID NO: 2994 - protein, 567 aa, Artificial Sequence
  derived and/or modified protein sequence (wt) from hemagglutinin__InfluenzaA__ACT15340
MEKIVLLLAIVSLVKSDQICIGYHANNSTEQVDTIMEKNVTVTHAQDILEKTHNGKLCNLDGVKPLILRDCSVAGWLLGNPMCDEFLNVPEWSYIVEKINPANDLCYPGNFNDYEELKHLLSRINHFEKIQIIPKNSWSDHEASGVSSACPYQGRSSFFRNVVWLTKKNNAYPTIKRSYNNTNQEDLLVLWGIHHPNDAEEQTRLYQNPTTYISVGTSTLNQRLVPKIATRSKVNGQSGRMEFFWTILKSNDAINFESNGNFIAPENAYKIVKKGDSTIMKSELEYGNCNTKCQTPIGAINSSMPFHNIHPLTIGECPKYVKSNRLVLATGLRNSPQGERRRKKRGLFGAIAGFIEGGWQGMVDGWYGYHHSNEQGSGYAADKESTQKAIDGVTNKVNSIIDKMNTQFEAVGREFNALERRIENLNKKMEDGFLDVWTYNAELLVLMENERTLDFHDSNVKNLYDKVRLQLRDNAKELGNGCFEFYHRCDNECMESVRNGTYDYPQYSEEARLKREEISGVKLESIGTYQILSIYSTVASSLALAIMVAGLFLWMCSNGSLQCRICI

SEQ ID NO: 2995 - protein, 567 aa, Artificial Sequence
  derived and/or modified protein sequence (wt) from hemagglutinin__InfluenzaA__ACT15342
MEKIVLLLAIVSLVKSDQICIGYHANNSTEQVDTIMEKNVTVTHAQDILEKTHNGKLCNLDGVKPLILRDCSVAGWLLGNPMCDEFLNVPEWSYIVEKINPANDLCYPGSFNDYEELKHLLSRINHFEKIQIIPKNSWSDHEASGVSSACPYQGRSSFFRNVVWLTKKDNAYPTIKRSYNNTNQEDLLVLWGIHHPNDAAEQTRLYQNPTTYISVGTSTLNQRLVPKIATRSKVNGQSGRMEFFWTILKPNDAINFESNGNFIAPENAYKIVKKGDSTIMKSELEYGNCNTKCQTPIGAINSSMPFHNIHPLTIGECPKYVKSNRLILATGLRNSPQGERRRKKRGLFGAIAGFIEGGWQGMVDGWYGYHHSNEQGSGYAADKESTQKAIDGVTNKVNSIIDKMNTQFEAVGREFNNLERRIENLNKKMEDGFLDVWTYNAELLVLMENERTLDFHDSNVKNLYDKVRLQLRDNAKELGNGCFEFYHRCDNECMESVRNGTYDYPQYSEEARLKREEISGVKLESIGTYQILSIYSTVASSLALAIMVAGLFLWMCSNGSLQCRICI

SEQ ID NO: 2996 - protein, 567 aa, Artificial Sequence; identical to SEQ ID NO: 2992
  derived and/or modified protein sequence (wt) from hemagglutinin__InfluenzaA__ACT15343

SEQ ID NO: 2997 - protein, 567 aa, Artificial Sequence
  derived and/or modified protein sequence (wt) from hemagglutinin__InfluenzaA__ACT15345
MEKIVLLLAIVSLVKSDQICIGYHANNSTEQVDTIMEKNVTVTHAQDILEKTHNGKLCNLDGVKPLILRDCSVAGWLLGNPMCDEFLNVPEWSYIVEKINPANDLCYPGNFNDYEELKHLLSRINHFEKIQIIPKNSWSDHEASGVSSSCPYQGRSSFFRNVVWLTKKDNAYPTIKRSYNNTNQEDLLVLWGIHHPNDAAEQTRLYQNPTTYISVGTSTLNQRLVPKIATRSKVNGQSGRMEFFWTILKSNDAINFGSNGNFIAPENAYKIVKKGDSTIMKSELEYGNCNTKCQTPIGAINSSMPFHNIHPLTIGECPKYVKSNRLVLATGLRNSPQGERRRKKRGLFGAIAGFIEGGWQGMVDGWYGYHHSNEQGSGYAADKESTQKAIDGVTNKVNSIIDKMNTQFEAVGREFNNLERRIENLNKKMEDGFLDVWTYNAELLVLMENERTLDFHDSNVKNLYDKVRLQLRDNAKELGNGCFEFYHRCDNECMESVRNGTYDYPQYSEEARLKREEISGVKLESIGTYQILSIYSTVASSLALAIMVAGLFLWMCSNGSLQCRICI

SEQ ID NO: 2998 - protein, 568 aa, Artificial Sequence
  derived and/or modified protein sequence (wt) from hemagglutinin__InfluenzaA__ACT15347
MEKIVLLLAIVSLVKSDQICIGYHANNSTEQVDTIMEKNVTVTHAQDILEKTHNGKLCDLDGVKPLILRDCSVAGWLLGNPMCDEFLNVPEWSYIVEKINPANDLCYPGDFNDYEELKHLLSRINHFEKIQIIPKSSWSDHEASSGVSSACPYQGRSSFFRNVVWLIKKDNAYPTIKRSYNNTNQEDLLVLWGIHHPNDAAEQTRLYHNPTTYISVGTSTLNQRLVPKIATRSKVNGQSGRMEFFWTILKPNDAINFESNGNFIAPENAYKIVKKGDSTIMKSELEYGNCNTKCQTPIGAINSSMPFHNIHPLTIGECPKYVKSSRLVLATGLRNSPQGKNRRKKRGLFGAIAGFIEGGWQGMVDGWYGYHHSNEQGSGYAADKESTQRAIDGVTNKVNSIIDKMNTQFEAVGREFNNLERRIENLNKKMEDGFLDVWTYNAELLVLMENERTLDFHDSNVKNLYDKVRLQLRDNAKELGNGCFEFYHRCDNECMESVRNGTYDYPQYSEEARLKREEISGVKLESIGIYQILSIYSTVASSLALAIMVAGLFLWMCSNGSLQCRICI

SEQ ID NO: 2999 - protein, 567 aa, Artificial Sequence
  derived and/or modified protein sequence (wt) from hemagglutinin__InfluenzaA__ACT15349
MEKIVLLLAIVSLVKSDQICIGYHANNSTEQVDTIMEKNVTVTHAQDILEKTHNGKLCNLDGVKPLILRDCSVAGWLLGNPMCDEFLNVPEWSYIVEKINPANDLCYPGNFNDYEELKHLLSRINHFEKIQIIPKNSWSDHEASGVSSACPYQGRSSFFRNVVWLTKKDNAYPTIKRSYNNTNQEDLLVLWGIHHPNDATEQTRLYQNPTTYISVGTSTLNQRLIPKIATRSKVNGQSGRMEFFWTILKSNDAINFESNGNFIAPENAYKIVKKGDSTIMKSELEYGNCNTKCQTPIGAINSSMPFHNIHPLTIGECPKYVKSNRLVLATGLRNSPQEERRRKKRGLFGAIAGFIEGGWQGMVDGWYGYHHSNEQGSGYAADKESTQKAIDGVTNKVNSIIDKMNTQFEAVGREFNNLERRIENLNKKMEDGFLDVWTYNAELLVLMENERTLDFHDSNVKNLYDKVRLQLRDNAKELGNGCFEFYHRCDNECMESVRNGTYDYPQYSEEARLKREEISGVKLESIGTYQILSIYSTVASSLALAIMVAGLFLWMCSNGSLQCRICI

SEQ ID NO: 3000 - protein, 568 aa, Artificial Sequence
  derived and/or modified protein sequence (wt) from hemagglutinin__InfluenzaA__ACT15351
MEKIVLLLAIVSLVKSDQICIGYHANNSTEQVDTIMEKNVTVTHAQDILEKTHNGKLCDLDGVKPLILRDCSVAGWLLGNPMCDEFLNVPEWSYIVEKINPANDLCYPGDFNDYEELKHLLSRINHFEKIQIIPKSSWSDHEASSGVSSACPYQGGSSFFRNVVWLIKKDNAYPTIKRSYNNTNQEDLLVLWGIHHPNDAAEQTRLYHNPTTYISVGTSTLNQRLVPKIATRSKVNGQSGRMEFFWTILKPNDAINFESNGNFIAPENAYKIVKKGDSTIMKSELEYGNCNTKCQTPIGAINSSMPFHNIHPLTIGECPKYVKSSRLVLATGLRNSPQGKSRRKKRGLFGAIAGFIEGGWQGMVDGWYGYHHSNEQGSGYAADKESTQRAIDGVTNKVNSIIDKMNTQFEAVGREFNKLERRIENLNKKMEDGFLDVWTYNAELLVLMENERTLDFHDSNVKNLYDKVRLQLRDNAKELGNGCFEFYHRCDNECMESVRNGTYDYPQYSEEARLKREEISGVKLESIGIYQILSIYSTVASSLALAIMVAGLFLWMCSNGSLQCRICI

SEQ ID NO: 3001 - protein, 567 aa, Artificial Sequence
  derived and/or modified protein sequence (wt) from hemagglutinin__InfluenzaA__ACT15353
MEKIVLLLAIVSLVKSDQICIGYHANNSTEQVDTIMEKNVTVTHAQDILEKTHNGKLCNLDGVKPLILRDCSVAGWLLGNPMCDEFLNVPEWSYIVEKINPANDLCYPGNFNDYEELKHLLSRINHFEKIQIIPKNSWSDHEASGVSSACPYQGRSSFFRNVVWLTKKNSAYPTIKRSYNNTNQEDLLVLWGIHHPNDAAEQTRLYQNPTTYISVGTSTLNQRLVPKIATRSKVNGQSGRMEFFWTILKSNDAINFESNGNFIAPENAYKIVKKGDSTIMKSELEYSNCNTKCQTPIGAINSSMPFHNIHPLTIGECPKYVKSNRLVLATGLRNSPQGERRRKKRGLFGAIAGFIEGGWQGMVDGWYGYHHSNEQGSGYAADKESTQKAIDGVTNKVNSIIDKMNTQFEAVGREFNNLERRIENLNKKMEDGFLDVWTYNAELLVLMENERTLDFHDSNVKNLYDKVRLQLRDNAKELGNGCFEFYHRCDNECMESVRNGTYDYPQYSEEARLKREEISGVKLESIGTYQILSIYSTVASSLALAIMVAGLFLWMCSNGSLQCRICI

SEQ ID NO: 3002 - protein, 568 aa, Artificial Sequence
  derived and/or modified protein sequence (wt) from hemagglutinin__InfluenzaA__ACT15355
MEKIVLLLAIVSLVKSDQICIGYHANNSTEQVDTIMEKNVTVTHAQDILEKTHNGKLCDLDGVKPLILRDCSVAGWLLGNPMCDEFLNVPEWSYIVEKINPANDLCYPGDFNDYEELKHLLSRINHFEKIQIIPKSSWSDHEASSGVSSACPYQGRSSFFRNVVWLIKKDNAYPTIKRSYNNTNQEDLLVLWGIHHPNDAAEQTRLYHNPTTYISVGTSTLNQRLVPKIATRSKVNGQSGRMEFFWTILKPNDAINFESNGNFIAPENAYKIVKKGDSTIMKSELEYGNCNTKCQTPIGAINSSMPFHNIHPLTIGECPKYVKSSRLVLATGLRNSPQGKSRRKKRGLFGAIAGFIEGGWQGMVDGWYGYHHSNEQGSGYAADKESTQRAIDGVTNKVNSIIDKMNTQFEAVGREFNNLERRIENLNKKMEDGFLDVWTYNAELLVLMENERTLDFHDSNVKNLYDKVRLQLRDNAKELGNGCFEFYHRCDNECMESVRNGTYDYPQYSEEARLKREEISGVKLESIGIYQILSIYSTVASSLALAIMVAGLFLWMCSNGSLQCRICI

SEQ ID NO: 3003 - protein, 567 aa, Artificial Sequence
  derived and/or modified protein sequence (wt) from hemagglutinin__InfluenzaA__ACT15357
MEKIVLLLAIVSLVKSDQICIGYHANNSTEQVDTIMERNVTVTHAQDILEKTHNGKLCNLDGVKPLILRDCSVAGWLLGNPMCDEFLNVPEWSYIVEKINPANDLCYPGNFNDYEELKHLLSRINHFEKIQIIPKNSWSDHEASGVSSACPYQGRSSFFRNVVWLTQKDNAYPTIKRSYNNTNQEDLLVLWGIHHPNDAAEQTRLYQNPTTYISVGTSTLNQRLIPKIATRSKVNGQSGRMEFFWTILKSNDAINFESNGNFIAPENAYKIVKKGDSTIMKSELEYGNCNTKCQTPIGAINSSMPFHNIHPLTIGECPKYVKSNRLVLATGLRNSPQGERRRKKRGLFGAIAGFIEGGWQGMVDGWYGYHHSNEQGSGYAADKESTQKAIDGVTNKVNSIIDKMNTQFEAVGREFNNLERRIENLNKKMEDGFLDVWTYNAELLVLMENERTLDFHDSNVKNLYDKVRLQLRDNAKELGNGCFEFYHRCDNECMESVRNGTYDYPQYSEEARLKREEISGVKLESIGTYQILSIYSTVASSLALAIMVAGLFLWMCSNGSLQCRICI

SEQ ID NO: 3004 - protein, 566 aa, Artificial Sequence
  derived and/or modified protein sequence (wt) from hemagglutinin__InfluenzaA__ACT20200
MKAILVVLLYTFATANADTLCIGYHANNSTDTVDTVLEKNVTVTHSVNLLEDKHNGKLCKLRGVAPLHLGKCNIAGWILGNPECESLSTASSWSYIVETSSSDNGTCYPGDFIDYEELREQLSSVSSFERFEIFPKTSSWPNHDSNKGVTAACPHAGAKSFYKNLIWLVKKGNSYPKLSKSYINDKGKEVLVLWGIHHPSTSADQQSLYQNADAYVFVGSSRYSKKFKPEIAIRPKVRDQEGRMNYYWTLVEPGDKITFEATGNLVVPRYAFAMERNAGSGIIISDTPVHDCNTTCQTPKGAINTSLPFQNIHPITIGKCPKYVKSTKLRLATGLRNVPSIQSRGLFGAIAGFIEGGWTGMVDGWYGYHHQNEQGSGYAADLKSTQNAIDEITNKVNSVIEKMNTQFTAVGKEFNHLEKRIENLNKKVDDGFLDIWTYNAELLVLLENERTLDYHDSNVKNLYEKVRNQLKNNAKEIGNGCFEFYHKCDNTCMESVKNGTYDYPKYSEEAKLNREEIDGVKLESTRIYQILAIYSTVASSLVLVVSLGAISFWMCSNGSLQCRICI

SEQ ID NO: 3005 - protein, 566 aa, Artificial Sequence
  derived and/or modified protein sequence (wt) from hemagglutinin__InfluenzaA__ACT21466
MKTIIALSYILCLVFAQKLPGNDNSTATPCLGHHAVPNGTLVKTITNDQIEVTNATELVQSSSTGKICDSPHRILDGKNCTLIDALLGDPHCDGFKNKEWDLFVERSTAYSNCYPYDVPDYASLRSLVASSGTLEFTNEGFNWTGVAQDGTSYACKRGSVKSFFSRLNWLHKLEYKYPALNVTMPNNDKFDKLYIWGVHHPSTDSDQTSLYVQASGRVTVSTKRSQQTVIPNIGSRPWVRGISSRISIYWTIVKPGDILLINSTGNLIAPRGYFKIRSGKSSIMRSDAPIDNCNSECITPNGSIPNDKPFQNVNRITYGACPRYVKQNTLKLATGMRNVPEKQTRGIFGAIAGFIENGWEGMVDGWYGFRHQNSEGTGQAADLKSTQAAINQINGKLNRLIEKTNEKFHQIEKEFSEVEGRIQDLEKYVEDTKIDLWSYNAELLVALENQHTIDLTDSEMNKLFEKTRKQLRENAEDMGNGCFKIYHKCDNACIGSIRNGTYDHDVYRDEALNNRFQIKGVELKSGYKDWILWISFAISCFLLCVVLLGFIMWACQKGNIRCNICI

SEQ ID NO: 3006 - protein, 566 aa, Artificial Sequence
  derived and/or modified protein sequence (wt) from hemagglutinin__InfluenzaA__ACT21467
MKTIIALSYILCLVFAQKLPGSDNSTATLCLGHHAVPNGTLVKTITNDQIEVTNATELVQSSSTGKICDSPHRILDGKNCTLIDALLGDPHCDGFKNKEWDLFVERSTAYSNCYPYDVPDYASLRSLVASSGTLEFTNEGFNWTGVAQDGTSYACKRGSVKSFFSRLNWLHKLEYKYPALNVTMPNNDKFDKLYIWGVHHPSTDSDQTSLYVQASGRVTVSTKRSQQTVIPNIGSRPWVRGISSRISVYWTIVKPRDILLINSTGNLIAPRGYFKIRSGKSSIMRSDAPIDNCNSECITPNGSIPNDKPFQNVNRITYGACPRYVKQNTLKLATGMRNVPEKQTRGIFGAIAGFIENGWEGMVDGWYGFRHQNSEGTGQAADLKSTQAAINRINGKLNRLIEKTNEKFHQIEKEFSEVEGRIQDLEKYVEDTKIDLWSYNAELLVALENQHTIDLTDSEMNKLFEKTRKQLRENAEDMGNGCFKIYHKCDNACIGSIRNGTYDHDVYRDEALNNRFQIKGVELKSGYKDWILWISFAISCFLLCVVLLGFIMWACQKGNIRCNICI

SEQ ID NO: 3007 - protein, 566 aa, Artificial Sequence
  derived and/or modified protein sequence (wt) from hemagglutinin__InfluenzaA__ACT21468
MKTIIALSYILCLVFAQKLPGNDNSTATLCLGHHAVPNGTLVKTITNDQIEVTNATELVQSSSTGKICDSPHRILDGKNCTLIDALLGDPHCDGFKNKEWDLFVERSTAYSNCYPYDVPDYASLRSLVASSGTLEFTNEGFNWTGVAQDGTSYACKRGSVKSFFSRLNWLHKLEYKYPALNVTMPNNDKFDKLYIWGVHHPSTDSDQTSLYVQASGRVTVSTKRSQQTVIPNIGSRPWVRGISSRISIYWTIVKPGDILLINSTGNLIAPRGYFKIRSGKSSIMRSDAPIDNCNSECITPNGSIPNDKPFQNVNRITYGACPRYVKQNTLKLATGMRNVPEKQTRGIFGAIAGFIENGWEGMVDGWYGFRHQNSEGTGQAADLKSTQAAINQINGKLNRLIEKTNEKFHQIEKEFSEVEGRIQDLEKYVEDTKIDLWSYNAELLVALENQHTIDLTDSEMNKLFEKTRKQLRENVEDMGNGCFKIYHKCDNACIGSIRNGTYDHDVYRDEALNNRFQIKGVELKSGYKDWILWISFAISCFLLCVVLLGFIMWACQKGNIRCNICI

SEQ ID NO: 3008 - protein, 566 aa, Artificial Sequence
  derived and/or modified protein sequence (wt) from hemagglutinin__InfluenzaA__ACT21469
MKTIIALSYISRLVFAQKLPGNDNSTATLCLGHHAVPNGTLVKTITNDQIEVTNATELVQSSSTGRICDSPHRILDGENCTLIDALLGDPHCDGFQNKEWDLFVERSKAYSNCYPYDVPDYASLRSLVASSGTLEFNNESFNWTGVAQDGTSYACKRRSIKSFFSRLNWLHQLKYKYPALNVTMPNNDKFDKLYIWGVHHPSTDSDQTSLYAQASGRVTVSTKRSQQTVIPNIGSRPWVRGVSSRISIYWTIVKPGDILLINSTGNLIAPRGYFKIRSGKSSIMRSDAPIGKCNSECITPNGSIPNDKPFQNVNRITYGACPRYVKQNTLKLATGMRNVPEKQTRGIFGAIAGFIENGWEGMVDGWYGFRHQNSEGTGQAADLKSTQAAINQINGKLNRLIEKTNEKFHQIEKEFSEVEGRIQDLEKYVEDTKIDLWSYNAELLVALENQHTIDLTDSEMNKLFERTRKQLRENAEDMGNGCFKIYHKCDNACIGSIRNGTYDHDVYRDEALNNRFQIKGVELKSGYKDWILWISFAISCFLLCVVLLGFIMWACQKGNIRCNICI

SEQ ID NO: 3009 - protein, 566 aa, Artificial Sequence
  derived and/or modified protein sequence (wt) from hemagglutinin__InfluenzaA__ACT21471
MKTIIALSYISCLVFAQKLPGNDNSTATLCLGHHAVPNGTLVKTITNDQIEVTNATELVQSSSTGRICDSPHRILDGENCTLIDALLGDPHCDGFQNKEWDLFVERSKAYSNCYPYDVPDYASLRSLVASSGTLEFNNESFNWTGVAQDGTSYACKRRSIKSFFSRLNWLHQLKYKYPALNVTMPNNDKFDKLYIWGVHHPSTDSDQTSLYAQASGRVTVSTKRSQQTVIPNIGSRPWVRGVSSRISIYWTIVKPGDILLINSTGNLIAPRGYFKIRSGKSSIMRSDAPIGKCNSECITPNGSIPNDKPFQNVNRITYGACPRYVKQNTLKLATGMRNVPEKQTRGIFGAIAGFIENGWEGMVDGWYGFRHQNSEGTGQAADLKSTQAAINQINGKLNRLIEKTNEKFHQIEKEFSEVEGRIQDLEKYVEDTKIDLWSYNAELLVALENQHTIDLTDSEMNKLFERTRKQLRENAEDMGNGCFKIYHKCDNACIGSIRNGTYDHDVYRDEALNNRFQIKGVELKSGYKDWILWISFAISCFLLCVVLLGFIMWACQKGNIRCNICI

SEQ ID NO: 3010 - protein, 566 aa, Artificial Sequence
  derived and/or modified protein sequence (wt) from hemagglutinin__InfluenzaA__ACT21472
MKTIIALSYISCLVFAQKLPGNDNSTATLCLGHHAVPNGTLVKTITNDQIEVTNATELVQSSSTGRICDSPHRILDGENCTLIDALLGDPHCDGFQNKEWDLFVERSKAYSNCYPYDVPDYASLRSLVASSGTLEFNNESFNWTGVAQDGTSYACKRRSIKSFFSTLNWLHQLKYKYPALNVTMPNNDKFDKLYIWGVHHPSTDSDQTSLYAQASGRVTVSTKRSQQTVIPNIGSRPWVRGVSSRISIYWTIVKPGDILLINSTGNLIAPRGYFKIRSGKSSIMRSDAPIGKCNSECITPNGSIPNDKPFQNVNRITYGACPRYVKQNTLKLATGMRNVPEKQTRGIFGAIAGFIENGWEGMVDGWYGFRHQNSEGTGQAADLKSTQAAINQINGKLNRLIEKTNEKFHQIEKEFSEVEGRIQDLEKYVEDTKIDLWSYNAELLVALENQHTIDLTDSEMNKLFERTRKQLRENAEDMGNGCFKIYHKCDNACIGSIRNGTYDHDVYRDEALNNRFQIKGVELKSGYKDWILWISFAISCFLLCVVLLGFIMWACQKGNIRCNICI

SEQ ID NO: 3011 - protein, 566 aa, Artificial Sequence
  derived and/or modified protein sequence (wt) from hemagglutinin__InfluenzaA__ACT21507
MKTIIALSYILCLVFAQKLPGNDNSTATLCLGHHAVPNGTIVKTITNDQIEVTNATELVQSSSTGGICDSPHQILDGENRTLIDALLGDPQCDGFQNKKWDLFVERSKAYSNCYPYDVPDYASLRSLVASSGTLEFNNESFNWTGVTQNGTSSACKGRSNNSFFSRLNWLTHLKFKYPALNVTMPNNEKFDKLYIWGVHHPGTDNDQISLYAQASGRITVSTKRSQQTVIPNIGSRPRVRDIPSRISIYWTIVKPGDILLINSTGNLIAPRGYFKIRSGKSSIMRSDAPIGKCNSECITPNGSIPNDKPFQNVNRITYGACPRYVKQNTLKLATGMRNVPEKQTRGIFGAIAGFIENGWEGMVDGWYGFRHQNSEGIGQAADLKSTQAAINQINGKLNRLIGKTNEKFHQIEKEFSEVEGRIQDLEKYVEDTRIDLWSYNAELLVALESQHTIDLTDSEMNKLFERTKKQLRENAEDMGNGCFKIYHKCDNACIGSIRNGTYDHDVYRDEALNKRFQIKGVELKSGYKDWILWISFAISCFLLCVALLGFIMWACQKGNIRCNICI

SEQ ID NO: 3012 - protein, 566 aa, Artificial Sequence
  derived and/or modified protein sequence (wt) from hemagglutinin__InfluenzaA__ACT21508
MKTIIALSYILCLVFAQKLPGNDNSTATLCLGHHAVPNGTIVKTITNDQIEVTNATELVQSSSTGGICDSPHQILDGENCTLIDALLGDPQCDGFQNKKWDLFVERSKAYSNCYPYDVPDYASLRSLVASSGTLEFNNESFNWTGVTQNGTSSACKRRSNNSFFSRLNWLTHLKFKYPALNVTMPNNEKFDKLYIWGVHHPGTDNDQISLYAQASGRITVSTKRSQQTVIPNIGSRPRVRDIPSRISIYWTIVKPGDILLINSTGNLIAPRGYFKIRSGKSSIMRSDAPIGKCNSECITPNGSIPNDKPFQNVNRITYGACPRYVKQDTLKLATGMRNVPEKQTRGIFGAIAGFIENGWEGMVDGWYGFRHQNSEGIGQAADLKSTQAAINQINGKLNRLIGKTNEKFHQIEKEFSEVEGRIQDLEKYVEDTKIDLWSYNAELLVALENQHTIDLTDSEMNKLFERTKKQLRENAEDMGNGCFKIYHKCDNACIGSIRNGTYDHDVYRDEALNNRFQIKGVELKSGYKDWILWISFAISCFLLCVALLGFIMWACQKGNIRCNICI

SEQ ID NO: 3013 - protein, 566 aa, Artificial Sequence
  derived and/or modified protein sequence (wt) from hemagglutinin__InfluenzaA__ACT21509
MKTIIALSYILCLVFAQKLPGNDNSTATLCLGHHAVPNGTIVKTITNDQIEVTNATELVQSSSTGGICDSPHQILDGENCTLIDALLGDPQCDGFQNKKWDLFVERSKAYSNCYPYDVPDYASLRSLVASSGTLEFNNESFNWTGVTQNGTSSACKRRSNNSFFSRLNWLTHLKFKYPALNVTMPNNEKFDKLYIWGVHHPGTDNDQISLYAQASGRITVSTKRSQQTVIPNIGSRPRVRDIPSRISIYWTIVKPGDILLINSTGNLIAPRGYFKIRSGKSSIMRSDAPIGKCNSECITPNGSIPNDKPFQNVNRITYGACPRYVKQNTLKLATGMRNVPETQTRGIFGAIAGFIENGWEGMVDGWYGFRHQNSEGTGQAADLKSTQAAINQINGKPNRLIGKTNEKFHQIEKEFSEVEGRIQDLEKYVEDTKIDLWSYNAELLVALENQHTIDLTDSEMNKLFEKTKKQLRENAEDMGNGCFKIYHKCDNACIGSIRNETYDHDVYRDEALNNRFQIKGVELKSGYKDWILWISFAISCFLLCVALLGFIMWACQKGNIRCNICI

SEQ ID NO: 3014 - protein, 566 aa, Artificial Sequence
  derived and/or modified protein sequence (wt) from hemagglutinin__InfluenzaA__ACT21510
MKTIIALSYILCPVFAQKLPGNDNSTATLCLGHHAVPNGTIVKTITNDQIEVTNATELVQSSSTGGICDSPHQILDGENCTLIDALLGDPQCDGFQNKKWDLFVERSKAYSNCYPYDVPDYASLRSLVASSGTLEFNNESFNWTGVTQNGTSSACKRRSNNSFFSRLNWLTHLKFKYPALNVTMPNNEKFDKLYIWGVHHPGTDNDQISLYAQASGRITVSTKRSQQTVIPNIGSRPRVRDIPSRISIYWTIVKPGDILLINSTGNLIAPRGYFKIRSGKSSIMRSDAPIGKCNSECITPNGSIPNDKPFQDVNRITYGACPRYVKQNTLKLATGMRNVPEKQTRGIFGAIAGFIENGWEGMVDGWYGFRHQNSEGIGQAADLKSTQAAINQINGKLNRLIGKTNEKFHQIEKEFSEVEGRIQDLEKYVEDTKIDLWSYNAELLVALENQHTIDLTDSEMNKLFERTEKQLRENAEDMGNGCFKIYHKCDNAGIGSIRNGTYDHDVYRDEALNNRFQIKGVELKSGYKDWILWISFAISCFLLCVALLGFIMWACQKGNIRCNICI

SEQ ID NO: 3015 - protein, 566 aa, Artificial Sequence; identical to SEQ ID NO: 2913
  derived and/or modified protein sequence (wt) from hemagglutinin__InfluenzaA__ACT21572

SEQ ID NO: 3016 - protein, 566 aa, Artificial Sequence; identical to SEQ ID NO: 2669
  derived and/or modified protein sequence (wt) from hemagglutinin__InfluenzaA__ACT22031

SEQ ID NO: 3017 - protein, 566 aa, Artificial Sequence; identical to SEQ ID NO: 2669
  derived and/or modified protein sequence (wt) from hemagglutinin__InfluenzaA__ACT22032

SEQ ID NO: 3018 - protein, 566 aa, Artificial Sequence; identical to SEQ ID NO: 2669
  derived and/or modified protein sequence (wt) from hemagglutinin__InfluenzaA__ACT22033

SEQ ID NO: 3019 - protein, 566 aa, Artificial Sequence; identical to SEQ ID NO: 2669
  derived and/or modified protein sequence (wt) from hemagglutinin__InfluenzaA__ACT22034

SEQ ID NO: 3020 - protein, 566 aa, Artificial Sequence; identical to SEQ ID NO: 2684
  derived and/or modified protein sequence (wt) from hemagglutinin__InfluenzaA__ACT22035

SEQ ID NO: 3021 - protein, 566 aa, Artificial Sequence
  derived and/or modified protein sequence (wt) from hemagglutinin__InfluenzaA__ACT22036
MKAILVVLLYTFATANADTLCIGYHANNSTDTVDTVLEKNVTVTHSVNLLEDKHNGKLCKLRGVAPLHLGKCNIAGWILGNPECESLSTASSWSYIVETSSSDNGTCYPGDFIDYEELREQLSSVSSFERFEIFPKTSSWPNHDSNKGVTAACPHAGAKSFYKNLIWLIKKGNSYPKLSKSYINDKGKEVLVLWGIHHPSTSADQQSLYQNADAYVFVGSSRYSKKFKPEIAIRPKVRDQEGRMNYYWTLVEPGDKITFEATGNLVVPRYAFAMERNAGSGIIISDTPVHDCNTTCQTPKGAINTSLPFQNIHPITIGKCPKYVKSTKLRLATGLRNVPSIQSRGLFGAIAGFIEGGWTGMVDGWYGYHHQNEQGSGYAADLKSTQNAIDEITNKVNSVIEKMNTQFTAVGKEFNHLEKRIENLNKKVDDGFLDIWTYNAELLVLLENERTLDYHDSNVKNLYEKVRSQLKNNAKEIGNGCFEFYHKCDNTCMESVKNGTYDYPKYSEEAKLNREEIDGVKLESTRIYQILAIYSTVASSLVLVVSLGAISFWMCSNGSLQCRICI

SEQ ID NO: 3022 - protein, 566 aa, Artificial Sequence
  derived and/or modified protein sequence (wt) from hemagglutinin__InfluenzaA__ACT22037
MKAILVVLLYTFATANADTLCIGYHANNSTDTVDTVLEKNVTVTHSVNLLEDKHNGKLCKLRGVAPLHLGKCNIAGWILGNPECESLSTASSWSYIVETSSSDNGTCYPGDFIDYEELREQLSSVSSFERFEIFPKTSSWPNHDSNKGVTAACPHAGAKSFYKNLIWLVKKGNSYPKLSKSYINDKGKEVLVLWGIHHPSTSADQQSLYQNADAYVFVGTSRYSKKFKPEIAIRPKVREQEGRMNYYWTLVEPGDKITFEATGNLVVPRYAFAMERNAGSGIIISDTPVHDCNTTCQTPKGAINTSLPFQNIHPITIGKCPKYVKSTKLRLATGLRNVPSIQSRGLFGAIAGFIEGGWTGMVDGWYGYHHQNEQGSGYAADLKSTQNAIDEITNKVNSVIEKMNTQFTAVGKEFNHLEKRIENLNKKVDDGFLDIWTYNAELLVLLENERTLDYHDSNVKNLYEKVRSQLKNNAKEIGNGCFEFYHKCDNTCMESVKNGTYDYPKYSEEAKLNREEIDGVKLESTRIYQILAIYSTVASSLVLVVSLGAISFWMCSNGSLQCRICI

SEQ ID NO: 3023 - protein, 566 aa, Artificial Sequence
  derived and/or modified protein sequence (wt) from hemagglutinin__InfluenzaA__ACT22038
MKAILVVLLYTFATANADTLCIGYHANNSTDTVDTVLEKNVTVTHSVNLLEDKHNGKLCKLRGVAPLHLGKCNIAGWILGNPECESLSTASSWSYIVETSSSDNGTCYPGDFIDYEELREQLSSVSSFERFEIFPKTSSWPNHDSNKGVTAACPHAGAKSFYKNLIWLVKKGNSYPKLSKSYINDKGKEVLVLWGIHHPSTNADQQSLYQNADAYVFVGSSRYSKKFKPEIAIRPKVRDQEGRMNYYWTLVEPGDKITFEATGNLVVPRYAFAMERNAGSGIIISDTPVHDCNTTCQTPKGAINTSLPFQNIHPITIGKCPKYVKSTKLRLATGLRNVPSIQSRGLFGAIAGFIEGGWTGMVDGWYGYHHQNEQGSGYAADLKSTQNAIDEITNKVNSVIEKMNTQFTAVGKEFNHLEKRIENLNKKVDDGFLDIWTYNAELLVLLENERTLDYHDSNVKNLYEKVRSQLKNNAKEIGNGCFEFYHKCDNTCMESVKNGTYDYPKYSEEAKLNREEIDGVKLESTRIYQILAIYSTVASSLVLVVSLGAISFWMCSNGSLQCRICI

SEQ ID NO: 3024 - protein, 566 aa, Artificial Sequence
  derived and/or modified protein sequence (wt) from hemagglutinin__InfluenzaA__ACT22055
MKAILVVLLYTFATANADTLCIGYHANNSTDTVDTVLEKNVTVTHSVNLLEDKHNGKLCKLRGVAPLHLGKCNIAGWILGNPECESLSTASSWSYIVETSSSDNGTCYPGDFIDYEELREQLSSVSSFERFEIFPKTSSWPNHDSNKGVTAACPHAGAKSFYKNLIWLVKKGNSYPKLRKSYINDKGKEVLVLWGIHHPSTSADQQSLYQNADAYVFVGTSRYSKKFKPEIAIRPKVRDQEGRMNYYWTLVEPGDKITFEATGNLVVPRYAFAMERNAGSGIIISDTPVHDCNTTCQTPKGAINTSLPFQNIHPITIGKCPKYVKSTKLRLATGLRNVPSIQSRGLFGAIAGFIEGGWTGMVDGWYGYHHQNEQGSGYAADLKSTQNAIDEITNKVNSVIEKMNTQFTAVGKEFNHLEKRIENLNKKVDDGFLDIWTYNAELLVLLENERTLDYHDSNVKNLYEKVRSQLKNNAKEIGNGCFEFYHKCDNTCMESVKNGTYDYPKYSEEAKLNREEIDGVKLESTRIYQILAIYSTVASSLVLVVSLGAISFWMCSNGSLQCRICI

SEQ ID NO: 3025 - protein, 566 aa, Artificial Sequence; identical to SEQ ID NO: 2982
  derived and/or modified protein sequence (wt) from hemagglutinin__InfluenzaA__ACT22504

SEQ ID NO: 3026 - protein, 566 aa, Artificial Sequence; identical to SEQ ID NO: 2911
  derived and/or modified protein sequence (wt) from hemagglutinin__InfluenzaA__ACT33122

SEQ ID NO: 3027 - protein, 566 aa, Artificial Sequence
  derived and/or modified protein sequence (wt) from hemagglutinin__InfluenzaA__ACT33123
MKAILVVLLYTFATANADTLCIGYHANNSTDTVDTVLEKNVTVTHSVNLLEDKHNGKLCKLRGVAPLHLGKCNIAGWILGNPECESLSTASSWSYIVETSSSDNGTCYPGDFIDYEELREQLSSVSSFERFEIFPKTSSWPNHDSNKGVTAACPHAGAKSFYKNLIWLVKKGNSYPKLSKSYINDKGKEVLVLWGIHHPSTSADQQSLYQNADAYVFVGTSRYSKKFKPEIAIRPKVRDQEGRMNYYWTLVEPGDKITFEATGNLVVPRYAFAMERNAGSGIIISDTPVHDCNTTCQTPKGAINTSLPFQNIHPITIGKCPKYVKSTKLRLATGLRNVPSIQSRGLFGAIAGFIEGGWTGMVDGWYGYHHQNEQGSGYAADLKSTQNAIDEITNKVNSVIEKMNTQFTAVGKEFNHLEKRIENLNKKVDDGFLDIWTYNAELLVLLENERTLDYHDSNVKNLYEKVRSQLKNNAKEIGNGCFEFYHKCDNTCMESVKNGTYDYPKYSEEAKLNREEIDGVKLESTRIYQILAIYSTVASSLVLVVSLGAISFWMCSNGSLQFRICI

SEQ ID NO: 3028 - protein, 566 aa, Artificial Sequence; identical to SEQ ID NO: 2669
  derived and/or modified protein sequence (wt) from hemagglutinin__InfluenzaA__ACT33125

SEQ ID NO: 3029 - protein, 566 aa, Artificial Sequence
  derived and/or modified protein sequence (wt) from hemagglutinin__InfluenzaA__ACT36505
MKAILVVLLYTFATANADTLCIGYHANNSTDTVDTVLEKNVTVTHSVNLLEDKHNGKLCKLRGVAPLHLGKCNIAGWILGNPECESLSTASSWSYIVETSSSDNGTCYPGDFIDYEELREQLSSVSSFERFEIFPKTSSWPNHDSNKGVTAACPHAGAKSFYKNLIWLVKKGNSYPKLSKSYINDKGKEVLVLWGIHHPSTSADQQSLYQNADAYVFVGTSRYSKKFKPEIAIRPKVRDQEGRMNYYWTLIEPGDKITFEATGNLVVPRYAFAMERNAGSGIIISDTPVHDCNTTCQTPKGAINTSLPFQNIHPITIGKCPKYVKSTKLRLATGLRNVPSIQSRGLFGAIAGFIEGGWTGMVDGWYGYHHQNEQGSGYAADLKSTQNAIDEITNKVNSVIEKMNTQFTAVGKEFNHLEKRIENLNKKVDDGFLDIWTYNAELLVLLENERTLDYHDSNVKNLYEKVRSQLKNNAKEIGNGCFEFYHKCDNTCMESVKNGTYDYPKYSEEAKLNREEIDGVKLESTRIYQILAIYSTVASSLVLVVSLGAISFWMCSNGSLQCRICI

SEQ ID NO: 3030 - protein, 566 aa, Artificial Sequence
  derived and/or modified protein sequence (wt) from hemagglutinin__InfluenzaA__ACT36649
MKAILVVLLYTFATANADTLCIGYHANNSTDTVDTVLEKNVTVTHSVNLLEDKHNGKLCKLRGVAPLHLGKCNIAGWILGNPECESLSTARSWSYIVETSSSDNGTCYPGDFIDYEELREQLNSVSSFERFEIFPKTSSWPNHDSNKGVTAACPHAGAKSFYKNLIWLVKKGNSYPKLSKSYINDKGKEVLVLWGIHHPSTSADQQSLYQNADAYVFVGSSRYSKKFKPEIAIRPKVRDQEGRMNYYWTLVEPGDKITFEATGNLVVPRYAFAMERNAGSGIIISDTPVHDCNTTCQTPKGAINTSLPFQNIHPITIGKCPKYVKSTKLRLATGLRNVPSIQSRGLFGAIAGFIEGGWTGMVDGWYGYHHQNEQGSGYAADLKSTQNAIDEITNKVNSVIEKMNTQFTAVGKEFNHLEKRIENLNKKVDDGFLDIWTYNAELLVLLENERTLDYHDSNVKSLYEKVRSQLKNNAKEIGNGCFEFYHKCDNTCMESVKNGTYDYPKYSEEAKLNREEIDGVKLESTRIYQILAIYSTVASSLVLVVSLGAISFWMCSNGSLQCRICI

SEQ ID NO: 3031 - protein, 566 aa, Artificial Sequence; identical to SEQ ID NO: 2669
  derived and/or modified protein sequence (wt) from hemagglutinin__InfluenzaA__ACT36650

SEQ ID NO: 3032 - protein, 566 aa, Artificial Sequence; identical to SEQ ID NO: 2669
  derived and/or modified protein sequence (wt) from hemagglutinin__InfluenzaA__ACT36652

SEQ ID NO: 3033 - protein, 566 aa, Artificial Sequence; identical to SEQ ID NO: 2667
  derived and/or modified protein sequence (wt) from hemagglutinin__InfluenzaA__ACT36653

SEQ ID NO: 3034 - protein, 566 aa, Artificial Sequence
  derived and/or modified protein sequence (wt) from hemagglutinin__InfluenzaA__ACT36655
MKAILVVLLYTFATANADTLCIGYHANNSTDTVDTVLEKNVTVTHSVNLLEDKHNGKLCKLRGVAPLHLGKCNIAGWILGNPECESLSTASSWSYIVETSSSGNGTCYPGDFIDYEELREQLSSVSSFERFEIFPKTSSWPNHDSNKGVTAACPHAGAKSFYKNLIWLVKKGNSYPKLSKSYINDKGKEVLVLWGIHHPSTSADQQSLYQNADAYVFVGSSRYSKKFKPEIAIRPKVRDQEGRMNYYWTLVEPGDKITFEATGNLVVPRYAFAMERNAGSGIIISDTPVHDCNTTCQTPKGAINTSLPFQNIHPITIGKCPKYVKSTKLRLATGLRNVPSIQSRGLFGAIAGFIEGGWTGMVDGWYGYHHQNEQGSGYAADLKSTQNAIDEITNKVNSVIEKMNTQFTAVGKEFNHLEKRIENLNKKVDDGFLDIWTYNAELLVLLENERTLDYHDSNVKNLYEKVRSQLKNNAKEIGNGCFEFYHKCDNTCMESVKNGTYDYPKYSEEAKLNREEIDGVKLESTRIYQILAIYSTVASSLVLVVSLGAISFWMCSNGSLQCRICI

SEQ ID NO: 3035 - protein, 566 aa, Artificial Sequence; identical to SEQ ID NO: 2656
  derived and/or modified protein sequence (wt) from hemagglutinin__InfluenzaA__ACT36658

SEQ ID NO: 3036 - protein, 566 aa, Artificial Sequence; identical to SEQ ID NO: 2695
  derived and/or modified protein sequence (wt) from hemagglutinin__InfluenzaA__ACT36659

SEQ ID NO: 3037 - protein, 566 aa, Artificial Sequence; identical to SEQ ID NO: 2656
  derived and/or modified protein sequence (wt) from hemagglutinin__InfluenzaA__ACT36661

SEQ ID NO: 3038 - protein, 566 aa, Artificial Sequence; identical to SEQ ID NO: 2669
  derived and/or modified protein sequence (wt) from hemagglutinin__InfluenzaA__ACT36663

SEQ ID NO: 3039 - protein, 566 aa, Artificial Sequence; identical to SEQ ID NO: 2669
  derived and/or modified protein sequence (wt) from hemagglutinin__InfluenzaA__ACT36666

SEQ ID NO: 3040 - protein, 566 aa, Artificial Sequence
  derived and/or modified protein sequence (wt) from hemagglutinin__InfluenzaA__ACT52687
MKAILVVLLYTFATANADTLCIGYHANNSTDTVDTVLEKNVTVTHSVNLLEDKHNGKLCKLRGVAPLHLGKCNIAGWILGNPECESLSTASSWSYIVETSSSDNGTCYPGDFIDYEELREQLSSVSSFERFEIFPKTSSWPNHDSNKGVTAACPHAGAKSFYKNLIWLVKKGNSYPKLSKSYINDKGKEVLVLWGIHHPSTSADQQSLYQNADAYVFVGSSRYSKKFKPEIAIRPKVRGQEGRMNYYWTLVEPGDKITFEATGNLVVPRYAFAMERNAGSGIIISDTPVHDCNTTCQTPKGAINTSLPFQNIHPITIGKCPKYVKSTKLRLATGLRNVPSIQSRGLFGAIAGFIEGGWTGMVDGWYGYHHQNEQGSGYAADLKSTQNAIDEITNKVNSVIEKMNTQFTAVGKEFNHLEKRIENLNKKVDDGFLDIWTYNAELLVLLENERTLDYHDSNVKNLYEKVRSQLKNNAKEIGNGCFEFYHKCDNTCMESVKNGTYDYPKYSEEAKLNREEIDGVKLESTRFYQILAIYSTVASSLVLVVSLGAISFWMCSNGSLQCRICI

SEQ ID NO: 3041 - protein, 566 aa, Artificial Sequence; identical to SEQ ID NO: 2656
  derived and/or modified protein sequence (wt) from hemagglutinin__InfluenzaA__ACT54606

SEQ ID NO: 3042 - protein, 566 aa, Artificial Sequence; identical to SEQ ID NO: 2669
  derived and/or modified protein sequence (wt) from hemagglutinin__InfluenzaA__ACT66146

SEQ ID NO: 3043 - protein, 566 aa, Artificial Sequence; identical to SEQ ID NO: 2911
  derived and/or modified protein sequence (wt) from hemagglutinin__InfluenzaA__ACT66155

SEQ ID NO: 3044 - protein, 566 aa, Artificial Sequence
  derived and/or modified protein sequence (wt) from hemagglutinin__InfluenzaA__ACT66162
MEAILVVLLYTFATANADTLCIGYHANNSTDTVDTVLEKNVTVTHSVNLLEDKHNGKLCKLRGVAPLHLGKCNIAGWILGNPECESLSTASSWSYIVETSSSDNGTCYPGDFIDYEELREHLSSVSSFERFEIFPKTSSWPNHDSNKGVTAACPHAGAKSFYKNLIWLVKKGNSYPKLSKSYINDKGKEVLVLWGIHHPSTSADQQSLYQNADAYVFVGSSRYSKKFKPEIAIRPKVRDQEGRMNYYWTLVEPGDKITFEATGNLVVPRYAFAMERNAGSGIIISDTPVHDCNTTCQTPKGAINTSLPFQNIHPITIGKCPKYVKSTKLRLATGLRNVPSIQSRGLFGAIAGFIEGGWTGMVDGWYGYHHQNEQGSGYAADLKSTQNAIDEITNKVNSVIEKMNTQFTAVGKEFNHLEKRIENLNKKVDDGFLDIWTYNAELLVLLENERTLDYHDSNVKNLYEKVRSQLKNNAKEIGNGCFEFYHKCDNTCMESVKNGTYDYPKYSEEAKLNREEIDGVKLESTRIYQILAIYSTVASSLVLVVSLGAISFWMCSNGSLQCRICI

SEQ ID NO: 3045 - protein, 566 aa, Artificial Sequence; identical to SEQ ID NO: 2669
  derived and/or modified protein sequence (wt) from hemagglutinin__InfluenzaA__ACT67239

SEQ ID NO: 3046 - protein, 566 aa, Artificial Sequence; identical to SEQ ID NO: 2669
  derived and/or modified protein sequence (wt) from hemagglutinin__InfluenzaA__ACT67255

SEQ ID NO: 3047 - protein, 566 aa, Artificial Sequence; identical to SEQ ID NO: 2656
  derived and/or modified protein sequence (wt) from hemagglutinin__InfluenzaA__ACT68102

SEQ ID NO: 3048 - protein, 566 aa, Artificial Sequence
  derived and/or modified protein sequence (wt) from hemagglutinin__InfluenzaA__ACT68103
MKAILVVLLYTFATANADTLCIGYHANNSTDTVDTVLEKNVTVTHSVNLLEDKHNGKLCKLRGVAPLHLGKCNIAGWILGNPECESLSTASSWSYIVETSSSDNGTCYPGDFIDYEELREQLSSVSSFERFEIFPKTSSWPNHDSNKGVTAACPHAGAKSFYKNLIWLVKKGNSYPKLSKSYINDKGKEVLVLWGIHHPSTSADQQSLYQNADAYVFVGSSRYSKKFKPEIAIRPKVRDQEGRMNYYWTLVEPGDKITFEATGNLVVPRYAFAMERNAGSGIIISDTPVHDCNTTCQTLKGAINTSLPFQNIHPITIGKCPKYVKSTKLRLATGLRNVPSIQSRGLFGAIAGFIEGGWTGMVDGWYGYHHQNEQGSGYAADLKSTQNAIDEITNKVNSVIEKMNTQFTAVGKEFNHLEKRIENLNKKVDDGFLDIWTYNAELLVLLENERTLDYHDSNVKNLYEKVRSQLKNNAKEIGNGCFEFYHKCDNTCMESVKNGTYDYPKYSEEAKLNREEIDGVKLESTRIYQILAIYSTVASSLVLVVSLGAISFWMCSNGSLQCRICI

SEQ ID NO: 3049 - protein, 566 aa, Artificial Sequence; identical to SEQ ID NO: 2656
  derived and/or modified protein sequence (wt) from hemagglutinin__InfluenzaA__ACT68104

SEQ ID NO: 3050 - protein, 566 aa, Artificial Sequence
  derived and/or modified protein sequence (wt) from hemagglutinin__InfluenzaA__ACT68105
MKAILVVLLYTFATANADTLCIGYHANNSTDTVDTVLEKNVTVTHSVNLLEDKHNGKLCKLRGVAPLHLGKCNIAGWILGNPECESLSTASSWSYIVETSSSDNGTCYPGDFIDYEELREQLSSVSSFERFEIFPKTSSWPNHDSNKGVTAACPHAGAKSFYKNLIWLVKKGNSYPKLSKSYINDKGKEVLVLWGIHHPSTSADQQSLYQNADAYVFVGSSKYSKKFKPEIAIRPKVRDQEGRMNYYWTLVEPGDKITFEATGNLVVPRYAFAMERNAGSGIIISDTPVHDCNTTCQTPKGAINTSLPFQNIHPITIGKCPKYVKSTKLRLATGLRNVPSIQSRGLFGAIAGFIEGGWTGMVDGWYGYHHQNEQGSGYAADLKSTQNAIDEITNKVNSVIEKMNTQFTAVGKEFNHLEKRIENLNKKVDDGFLDIWTYNAELLVLLENERTLDYHDSNVKNLYEKVRSQLKNNAKEIGNGCFEFYHKCDNTCMESVKNGTYDYPKYSGEAKLNREEIDGVKLESTRIYQILAIYSTVASSLVLVVSLGAISFWMCSNGSLQCRICI

SEQ ID NO: 3051 - protein, 566 aa, Artificial Sequence; identical to SEQ ID NO: 2656
  derived and/or modified protein sequence (wt) from hemagglutinin__InfluenzaA__ACT68106

SEQ ID NO: 3052 - protein, 566 aa, Artificial Sequence; identical to SEQ ID NO: 2656
  derived and/or modified protein sequence (wt) from hemagglutinin__InfluenzaA__ACT68107

SEQ ID NO: 3053 - protein, 566 aa, Artificial Sequence; identical to SEQ ID NO: 2849
  derived and/or modified protein sequence (wt) from hemagglutinin__InfluenzaA__ACT68108

SEQ ID NO: 3054 - protein, 566 aa, Artificial Sequence
  derived and/or modified protein sequence (wt) from hemagglutinin__InfluenzaA__ACT68109
MKAILVVLLYTFATANTDTLCIGYHANNSTDTVDTVLEKNVTVTHSVNLLEDKHNGKLCKLRGVAPLHLGKCNIAGWILGNPECESLSTASSWSYIVETSSSDNGTCYPGDFIDYEELREQLSSVSSFERFEIFPKTSSWPNHDSNKGVTAACPHAGAKSFYKNLIWLVKKGNSYPKLSKSYINDKGKEVLVLWGIHHPSTSADQQSLYQNADAYVFVGTSRYSKKFKPEIAIRPKVRDQEGRMNYYWTLVEPGDKITFEATGNLVVPRYAFAMERNAGSGIIISDTPVHDCNTTCQTPKGAINTSLPFQNIHPITIGKCPKYVKSTKLRLATGLRNVPSIQSRGLFGAIAGFIEGGWTGMVDGWYGYHHQNEQGSGYAADLKSTQNAIDEITNKVNSVIEKMNTQFTAVGKEFNHLEKRIENLNKKVDDGFLDIWTYNAELLVLLENERTLDYHDSNVKNLYEKVRSQLKNNAKEIGNGCFEFYHKCDNTCMESVKNGTYDYPKYSEEAKLNREEIDGVKLESTRIYQILAIYSTVASSLVLVVSLGAISFWMCSNGSLQCRICI

SEQ ID NO: 3055 - protein, 566 aa, Artificial Sequence; identical to SEQ ID NO: 2656
  derived and/or modified protein sequence (wt) from hemagglutinin__InfluenzaA__ACT68110

SEQ ID NO: 3056 - protein, 566 aa, Artificial Sequence; identical to SEQ ID NO: 2656
  derived and/or modified protein sequence (wt) from hemagglutinin__InfluenzaA__ACT68112

SEQ ID NO: 3057 - protein, 566 aa, Artificial Sequence; identical to SEQ ID NO: 2656
  derived and/or modified protein sequence (wt) from hemagglutinin__InfluenzaA__ACT68113

SEQ ID NO: 3058 - protein, 566 aa, Artificial Sequence; identical to SEQ ID NO: 2656
  derived and/or modified protein sequence (wt) from hemagglutinin__InfluenzaA__ACT68115

SEQ ID NO: 3059 - protein, 566 aa, Artificial Sequence; identical to SEQ ID NO: 2656
  derived and/or modified protein sequence (wt) from hemagglutinin__InfluenzaA__ACT68119

SEQ ID NO: 3060 - protein, 566 aa, Artificial Sequence
  derived and/or modified protein sequence (wt) from hemagglutinin__InfluenzaA__ACT79133
MKAILVVLLYTFATANADTLCIGYHANNSTDTVDTVLEKNVTVTHSVNLLEDKHNGKLCKLRGVAPLHLGKCNIAGWILGNPECESLSTASSWSYIVETSSSDNGTCYPGDFIDYEELREQLSSVSSFERFEIFPKTSSWPNHDSNKGVTAACPHAGAKSFYKNLIWLVKKGNSYPKLSKSYINDKGKEVLVLWGIHHPSTSADQQSLYQNADAYVFVGTSRYSKKFKPEIAIRPKVRDQEGRMNYYWKLVEPGDKITFEATGNLVVPRYAFAMERNAGSGIIISDTPVHDCNTTCQTPKGAINTSLPFQNIHPITIGKCPKYVKSTKLRLATGLRNVPSIQSRGLFGAIAGFIEGGWTGMVDGWYGYHHQNEQGSGYAADLKSTQNAIDEITNKVNSVIEKMNTQFTAVGKEFNHLEKRIENLNKKVDDGFLDIWTYNAELLVLLENERTLDYHDSNVKNLYEKVRSQLKNNAKEIGNGCFEFYHKCDNTCMESVKNGTYDYPKYSEEAKLNREEIDGVKLESTRIYQILAIYSTVASSLVLVVSLGAISFWMCSNGSLQCRICI

SEQ ID NO: 3061 - protein, 566 aa, Artificial Sequence; identical to SEQ ID NO: 2656
  derived and/or modified protein sequence (wt) from hemagglutinin__InfluenzaA__ACT79143

SEQ ID NO: 3062 - protein, 566 aa, Artificial Sequence; identical to SEQ ID NO: 2695
  derived and/or modified protein sequence (wt) from hemagglutinin__InfluenzaA__ACT79153

SEQ ID NO: 3063 - protein, 566 aa, Artificial Sequence; identical to SEQ ID NO: 2982
  derived and/or modified protein sequence (wt) from hemagglutinin__InfluenzaA__ACT79163

SEQ ID NO: 3064 - protein, 566 aa, Artificial Sequence; identical to SEQ ID NO: 2982
  derived and/or modified protein sequence (wt) from hemagglutinin__InfluenzaA__ACT79173

SEQ ID NO: 3065 - protein, 566 aa, Artificial Sequence
  derived and/or modified protein sequence (wt) from hemagglutinin__InfluenzaA__ACT79625
MKAILVVLLYTFATANADTLCIGYHANNSTDTVDTVLEKNVTVTHSVNLLEDKHNGKLCKLRGVAPLHLGKCNIAGWILGNPECESLSTASSWSYIVETSSSDNGTCYPGDFIDYEELREQLSSVSSFERFEIFPKTSSWPNHDSNKGVTTACPHAGAKSFYKNLIWLVKKGNSYPKLSKSYINDKGKEVLVLWGIHHPSTSADQQSLYQNADAYVFVGTSRYSKKFKPEIAIRPKVRDQEGRMNYYWTLVEPGDKITFEATGNLVVPRYAFAMERNAGSGIIISDTPVHDCNTTCQTPKGAINTSLPFQNIHPITIGKCPKYVKSTKLRLATGLRNVPSIQSRGLFGAIAGFIEGGWTGMVDGWYGYHHQNEQGSGYAADLKSTQNAIDEITNKVNSVIEKMNTQFTAVGKEFNHLEKRIENLNKKIDDGFLDIWTYNAELLVLLKNERTLDYHDSNVKNLYEKVRSQLKNNAKEIGNGCFEFYHKCDNTCMESVKNGTYDYPKYSEEAKLNREEIDGVKLESTRIYQILAIYSTVASSLVLVVSLGAISFWMCSNGSLQCRICI

SEQ ID NO: 3066 - protein, 566 aa, Artificial Sequence; identical to SEQ ID NO: 2656
  derived and/or modified protein sequence (wt) from hemagglutinin__InfluenzaA__ACT79627

SEQ ID NO: 3067 - protein, 566 aa, Artificial Sequence
  derived and/or modified protein sequence (wt) from hemagglutinin__InfluenzaA__ACT82512
MKAILVVLLYTFATANADTLCIGYHANNSTDTVDTVLEKNVTVTHSVNLLEDKHNGKLCKLRGVAPLHLGKCNIAGWILGNPECESLSTASSWSYIVETSSSDNGTCYPGDFIDYEELREQLSSVSSFERFEIFPKTSSWPNHDSNKGVTAACPHAGAKSFYKNLIWLVKKGNSYPKLSKSYINDKGKEVLVLWGIHHPSTSADQQSLYQNADAYVFVGTSRYSKKFKPEIAIRPKVRDQEGRMNYYWTLVEPGDKITFEATGNLVVPRYAFAMERNAGSGIIISDTPVHDCNTTCQTPKGAINTSLPFQNIHPITIGKCPKYVKSTKLRLATGLRNVPSIQSRGLFGAIAGFIEGGWTGMVDGWYGYHHQNEQGSGYAADLKSTQNAIDEITNKVNSVIEKMNTQFTAVGKEFNHLEKRIENLNKKVDDGFLDIWTYNAELLVLLENERTLDYHDSNVKNLYEKVRSQFKNNAKEIGNGCFEFYHKCDNTCMESVKNGTYDYPKYSEEAKLNREEIDGVKLESTRIYQILAIYSTVASSLVLVVSLGAISFWMCSNGSLQCRICI

SEQ ID NO: 3068 - protein, 566 aa, Artificial Sequence; identical to SEQ ID NO: 2669
  derived and/or modified protein sequence (wt) from hemagglutinin__InfluenzaA__ACT82513

SEQ ID NO: 3069 - protein, 566 aa, Artificial Sequence
  derived and/or modified protein sequence (wt) from hemagglutinin__InfluenzaA__ACT82514
MKAILVVLLYTFATANADTLCIGYHANNSTDTVDTVLEKNVTVTHSVNLLEDKHNGKLCKLRGVAPLHLGKCNIAGWILGNPECESLSTASSWSYIVETSSSDNGTCYPGDFIDYEELREQLSSVSSFERFEIFPKTSSWPNHDSNKGVTAACPHAGAKSFYKNLIWLVKKGNSYPKLSKSYINDKGKEVLVLWGIHHPSTSADQQSLYQNADAYVFVGTSRYSKKFKPEIAIRPKVRDQEGRMNYYWTLVEPGDKITFEATGNLVVPRYAFAMERNAGSGIIISNTPVHDCNTTCQTPKGSINTSLPFQNIHPITIGKCPKYVKSTKLRLATGLRNVPSIQSRGLFGAIAGFIEGGWTGMVDGWYGYHHQNEQGSGYAADLKSTQNAIDEITNKVNSVIEKMNTQFTAVGKEFNHLEKRIENLNKKVDDGFLDIWTYNAELLVLLENERTLDYHDSNVKNLYEKVRSQLKNNAKEIGNGCFEFYHKCDNTCMESVKNGTYDYPKYSEEAKLNREEIDGVKLESTRIYQILAIYSTVASSLVLVVSLGAISFWMCSNGSLQCRICI

SEQ ID NO: 3070 - protein, 566 aa, Artificial Sequence; identical to SEQ ID NO: 2669
  derived and/or modified protein sequence (wt) from hemagglutinin__InfluenzaA__ACT82515

SEQ ID NO: 3071 - protein, 566 aa, Artificial Sequence
  derived and/or modified protein sequence (wt) from hemagglutinin__InfluenzaA__ACT82516
MKAILVVLLYTFATANADTLCIGYHANNSTDTVDTVLEKNVTVTHSVNLLEDKHNGKLCKLRGVAPLHLGKCNIAGWILGNPECESLSTASSWSYIVETSSSDNGTCYPGDFIDYEELREQLSSVSSFERFEIFPKTSSWPNHDSNKGVTAACPHAGAKSFYKNLIWLVKKGNSYPKLSKSYINDKGKEVLVLWGIHHPSTSADQQSLYQNADAYVFVGSSRYSKKFKPEIAIRPKVRDQEGRMNYYWTLVEPGDKITFEATGNLMVPRYAFAMERNAGSGIIISDTPVHDCNTTCQTPKGAINTSLPFHNIHPITIGKCPKYVKSTKLRLATGLRNVPSIQSRGLFGAIAGFIEGGWTGMVDGWYGYHHQNEQGSGYAADLKSTQNAIDEITNKVNSVIEKMNTQFTAVGKEFNHLEKRIENLNKKVDDGFLDIWTYNAELLVLLENERTLDYHDSNVKNLYEKVRSQLKNNAKEIGNGCFEFYHKCDNTCMESVKNGTYDYPKYSEEAKLNREEIDGVKLESTRIYQILAIYSTVASSLVLVVSLGAISFWMCSNGSLQCRICI

SEQ ID NO: 3072 - protein, 566 aa, Artificial Sequence; identical to SEQ ID NO: 2911
  derived and/or modified protein sequence (wt) from hemagglutinin__InfluenzaA__ACT83795

SEQ ID NO: 3073 - protein, 566 aa, Artificial Sequence; identical to SEQ ID NO: 2911
  derived and/or modified protein sequence (wt) from hemagglutinin__InfluenzaA__ACT83805

SEQ ID NO: 3074 - protein, 566 aa, Artificial Sequence; identical to SEQ ID NO: 2669
  derived and/or modified protein sequence (wt) from hemagglutinin__InfluenzaA__ACT83815

SEQ ID NO: 3075 - protein, 566 aa, Artificial Sequence; identical to SEQ ID NO: 2669
  derived and/or modified protein sequence (wt) from hemagglutinin__InfluenzaA__ACT83825

SEQ ID NO: 3076 - protein, 566 aa, Artificial Sequence; identical to SEQ ID NO: 2669
  derived and/or modified protein sequence (wt) from hemagglutinin__InfluenzaA__ACT83835

SEQ ID NO: 3077 - protein, 566 aa, Artificial Sequence; identical to SEQ ID NO: 2762
  derived and/or modified protein sequence (wt) from hemagglutinin__InfluenzaA__ACT83845

SEQ ID NO: 3078 - protein, 566 aa, Artificial Sequence; identical to SEQ ID NO: 2656
  derived and/or modified protein sequence (wt) from hemagglutinin__InfluenzaA__ACT83855

SEQ ID NO: 3079 - protein, 566 aa, Artificial Sequence; identical to SEQ ID NO: 2669
  derived and/or modified protein sequence (wt) from hemagglutinin__InfluenzaA__ACT83865

SEQ ID NO: 3080 - protein, 566 aa, Artificial Sequence; identical to SEQ ID NO: 2911
  derived and/or modified protein sequence (wt) from hemagglutinin__InfluenzaA__ACT83875

SEQ ID NO: 3081 - protein, 566 aa, Artificial Sequence; identical to SEQ ID NO: 2911
  derived and/or modified protein sequence (wt) from hemagglutinin__InfluenzaA__ACT85999

SEQ ID NO: 3082 - protein, 566 aa, Artificial Sequence; identical to SEQ ID NO: 2911
  derived and/or modified protein sequence (wt) from hemagglutinin__InfluenzaA__ACT86009

SEQ ID NO: 3083 - protein, 566 aa, Artificial Sequence; identical to SEQ ID NO: 2669
  derived and/or modified protein sequence (wt) from hemagglutinin__InfluenzaA__ACT86019

SEQ ID NO: 3084 - protein, 566 aa, Artificial Sequence; identical to SEQ ID NO: 2762
  derived and/or modified protein sequence (wt) from hemagglutinin__InfluenzaA__ACT86029

SEQ ID NO: 3085 - protein, 566 aa, Artificial Sequence; identical to SEQ ID NO: 2669
  derived and/or modified protein sequence (wt) from hemagglutinin__InfluenzaA__ACT86039

SEQ ID NO: 3086 - protein, 566 aa, Artificial Sequence; identical to SEQ ID NO: 2669
  derived and/or modified protein sequence (wt) from hemagglutinin__InfluenzaA__ACT86059

SEQ ID NO: 3087 - protein, 566 aa, Artificial Sequence; identical to SEQ ID NO: 2669
  derived and/or modified protein sequence (wt) from hemagglutinin__InfluenzaA__ACT86069

SEQ ID NO: 3088 - protein, 566 aa, Artificial Sequence; identical to SEQ ID NO: 2669
  derived and/or modified protein sequence (wt) from hemagglutinin__InfluenzaA__ACT86079

SEQ ID NO: 3089 - protein, 566 aa, Artificial Sequence; identical to SEQ ID NO: 2669
  derived and/or modified protein sequence (wt) from hemagglutinin__InfluenzaA__ACT86089

SEQ ID NO: 3090 - protein, 566 aa, Artificial Sequence; identical to SEQ ID NO: 2669
  derived and/or modified protein sequence (wt) from hemagglutinin__InfluenzaA__ACT86099

SEQ ID NO: 3091 - protein, 566 aa, Artificial Sequence; identical to SEQ ID NO: 2911
  derived and/or modified protein sequence (wt) from hemagglutinin__InfluenzaA__ACT86109

SEQ ID NO: 3092 - protein, 566 aa, Artificial Sequence; identical to SEQ ID NO: 2669
  derived and/or modified protein sequence (wt) from hemagglutinin__InfluenzaA__ACT86119

SEQ ID NO: 3093 - protein, 566 aa, Artificial Sequence; identical to SEQ ID NO: 2911
  derived and/or modified protein sequence (wt) from hemagglutinin__InfluenzaA__ACT86129

SEQ ID NO: 3094 - protein, 566 aa, Artificial Sequence; identical to SEQ ID NO: 2669
  derived and/or modified protein sequence (wt) from hemagglutinin__InfluenzaA__ACT86139

SEQ ID NO: 3095 - protein, 566 aa, Artificial Sequence
  derived and/or modified protein sequence (wt) from hemagglutinin__InfluenzaA__ACU00932
MKAILVVLLYTFATANADTLCIGYHANNSTDTVDTVLEKNVTVTHSVNLLEDKHNGKLCKLRGVAPLHLGKCNIAGWILGNPECESLSTASSWSYIVETSSSDNGTCYPGDFIDYEELREQLSSVSSFERFEIFPKTSSWPNHDSNKGVTAACPHAGAKSFYKNLIWLVKKGNSYPKLSKSYINDKGKEVLVLWGIHHPSTSADQQSLYQNADAYVFVGTSRYSKNFKPEIAIRPKVRDQEGRMNYYWTLVEPGDKITFEATGNLVVPRYAFAMERNAGSGIIISDTPVHDCNTTCQTPKGAINTSLPFQNIHPITIGKCPKYVKSTKLRLATGLRNVPSIQSRGLFGAIAGFIEGGWTGMVDGWYGYHHQNEQGSGYAADLKSTQNAIDEITNKVNSVIEKMNTQFTAVGKEFNHLEKRIENLNKKVDDGFLDIWTYNAELLVLLENERTLDYHDSNVKNLYEKVRSQLKNNAKEIGNGCFEFYHKCDNTCMESVKNGTYDYPKYSEEAKLNREEIDGVKLESTRIYQILAIYSTVASSLVLVVSLGAISFWMCSNGSLQCRICI

SEQ ID NO: 3096 - protein, 566 aa, Artificial Sequence; identical to SEQ ID NO: 2669
  derived and/or modified protein sequence (wt) from hemagglutinin__InfluenzaA__ACU00942

SEQ ID NO: 3097 - protein, 566 aa, Artificial Sequence; identical to SEQ ID NO: 2669
  derived and/or modified protein sequence (wt) from hemagglutinin__InfluenzaA__ACU00952

SEQ ID NO: 3098 - protein, 566 aa, Artificial Sequence
  derived and/or modified protein sequence (wt) from hemagglutinin__InfluenzaA__ACU12494
MKTIIALSYILCLVFAQKLPGNDNSTATLCLGHHAVPNGTLVKTITNDQIEVTNATELVQSSSTGRICDSPHRILDGKNCTLIDALLGDPHCDGFQNKEWDLFVERSKAYSNCYPYDVPDYASLRSLVASSGTLEFINEDFNWTGVAQSGESYACKRGSVKSFFSRLNWLHESDYKYPALNVTMPNNGKFDKLYIWGVHHPITDREQTSLYVRASGRVTVSTKRSQQTVIPNIGSRPWVRGLSSRISIYWTIVKPGDILLINSTGNLIAPRGYFKIRTGKSSIMRSDAPIGTCSSECITPNGSIPNDKPFQNVNRITYGACPRYVKQNTLKLATGMRNVPEKQTRGIFGAIAGFIENGWEGMVDGWYGFRHQNSEGTGQAADLKSTQAAIDQINGKLNRLIEKTNEKFHQIEKEFSEVEGRIQDLEKYVEDTKIDLWSYNAELLVALENQHTIDLTDSEMNKLFEKTRKQLRENAEDMGNGCFKIYHKCDNACIGSIRNGTYDHDVYRDEALNNRFQIKGVELKSGYKDWILWISFAISCFLLCVVLLGFIMWACQKGNIRCNICI

SEQ ID NO: 3099 - protein, 565 aa, Artificial Sequence; identical to SEQ ID NO: 2781
  derived and/or modified protein sequence (wt) from hemagglutinin__InfluenzaA__ACU12505

SEQ ID NO: 3100 - protein, 566 aa, Artificial Sequence
  derived and/or modified protein sequence (wt) from hemagglutinin__InfluenzaA__ACU12516
MKTIIALSYILCLVFAQKLPGNDNSTATLCLGHHAVPNGTIVKTITNDQIEVTNATELVQSSSTGGICDSPHQILDGENCTLVDALLGDPQCDGFQNKKWDLFVERSKAYSNCYPYDVPDYASLRSLVASSGTLEFNNESFNWTGVTQNGTSSACKRRSNNSFFSRLNWLTHLKFKYPALNVTMPNNEKFDKLYIWGVHHPGTDNDQISLYAQASGRITVSTKRSQQTVIPNIGSRPRVRDISSRISIYWTIVKPGDILLINSTGNLIAPRGYFKIRSGKSSIMRSDAPIGKCNSECITPNGSIPNDKPFQNVNRITYGACPRYVKQNTLKLATGMRNVPETQTRGIFGAIAGFIENGWEGMVDGWYGFRHQNSEGTGQAADLKSTQAAINQINGKLNRLIGKTNEKFHQIEKEFSEVEGRIQDLEKYVEDTKIDLWSYNAELLVALENQHTIDLTDSEMNKLFERTKKQLRENAEDMGNGCFKIYHKCDNACIGSIRNGTYDHDVYRDEALNNRFQIKGVELKSGYKDWILWISFAISCFLLCVALLGFIMWACQKGNIRCNICI

SEQ ID NO: 3101 - protein, 566 aa, Artificial Sequence; identical to SEQ ID NO: 630
  derived and/or modified protein sequence (wt) from hemagglutinin__InfluenzaA__ACU12527

SEQ ID NO: 3102 - protein, 566 aa, Artificial Sequence; identical to SEQ ID NO: 2372
  derived and/or modified protein sequence (wt) from hemagglutinin__InfluenzaA__ACU12538

SEQ ID NO: 3103 - protein, 566 aa, Artificial Sequence; identical to SEQ ID NO: 1568
  derived and/or modified protein sequence (wt) from hemagglutinin__InfluenzaA__ACU12549

SEQ ID NO: 3104 - protein, 565 aa, Artificial Sequence
  derived and/or modified protein sequence (wt) from hemagglutinin__InfluenzaA__ACU12560
MKVKLLVLLCTFTATYADTICIGYHANNSTDTVDTVLEKNVTVTHSVNLLENSHNGKLCLLKGIAPLQLGNCSVAGWILGNPECELLISKESWSYIVEKPNPENGTCYPGHFADYEELREQLSSVSSFERFEIFPKESSWPNHTVTGVSASCSHNGESSFYRNLLWLTGKNGLYPNLSKSYANNKGKEVLVLWGVHHPPNIGDQNTLYHTENAYVSVVSSHYSRKFTPEIAKRPKVRDQEGRINYYWTLLEPGDTIIFEANGNLIAPRYAFALSRGFGSGIINSNVPMDKCDAKCQTPQGAINSSLPFQNVHPVTIGECPKYVRSAKLRMVTGLRNIPSIQSRGLFGAIAGFIEGGWTGMVDGWYGYHHQNEQGSGYAADQKSTQNAINGITNKVNSVIEKMNTQFTAVGKEFNKLERRMENLNKKVDDGFIDIWTYNAELLVLLENERTLDFHDSNVKNLYEKVKSQLKNNAKEIGNGCFEFYHKCNDECMESVKNGTYDYPKYSEESKLNREKIDGVKLESMGVYQILAIYSTVASSLVLLVSLGAISFWMCSNGSLQCRICI

SEQ ID NO: 3105 - protein, 565 aa, Artificial Sequence; identical to SEQ ID NO: 2488
  derived and/or modified protein sequence (wt) from hemagglutinin__InfluenzaA__ACU12571

SEQ ID NO: 3106 - protein, 565 aa, Artificial Sequence
  derived and/or modified protein sequence (wt) from hemagglutinin__InfluenzaA__ACU12582
MKVKLLVLLCTFTATYADTICIGYHANNSTDTVDTVLEKNVTVTHSVNLLENSHNGKLCLLKGIAPLQLGNCSVAGWILGNPECELLISKESWSYIVEKPNPENGTCYPGRFADYEELREQLSSVSSFERFEIFPKESSWPNHTVTGVSASCSHNGESSFYRNLLWLTGKNGLYPNLSKSYANNKGKEVLVLWGVHHPPNIGDQNTLYHTENAYVSVVSSHYSRKFTPEIAKRPKVRDQEGRINYYWTLLEPGDTIIFEANGNLIAPRYAFALSRGFGSGIINSNAPMDKCDAKCQTPQGAINSSLPFQNVHPVTIGECPKYVRSAKLRMVTGLRNIPSIQSRGLFGAIAGFIEGGWTGMVDGWYGYHHQNEQGSGYAADQKSTQNAINGITNKVNSVIEKMNTQFTAVGKEFNKLERRMENLNKKVDDGFIDIWTYNAELLVLLENERTLDFHDSNVKNLYEKVKSQLKNNAKEIGNGCFEFYHKCNDECMESVKNGTYDYPKYSEESKLNREKIDGVKLESMGVYQILAIYSTVASSLVLLVSLGAISFWMCSNGSLQCRICI

SEQ ID NO: 3107 - protein, 565 aa, Artificial Sequence
  derived and/or modified protein sequence (wt) from hemagglutinin__InfluenzaA__ACU12593
MKVKLLVLLCTFTATYADTICIGYHANNSTDTVDTVLEKNVTVTHSVNLLENSHNGKLCLLKGIAPLQLGNCSVAGWILGNPECELLISKESWSYIVEKPNPENGTCYPGHFADYEELREQLSSVSSFERFEIFPKESSWPNHTVTGVSASCSHNGESSFYRNLLWLTGKNGLYPNLSKSYANNKEKEVLVLWGVHHPPNIVDQKTLYRTENAYVSVVSSHYSRKFTPEIAKRPKVRDQEGRINYYWTLLEPGDTIIFEANGNLIAPRYAFALSRGFGSGIINSNAPMDKCDAKCQTPQGAINSSLPFQNVHPVTIGECPKYVRSAKLRMVTGLRNIPSIQSRGLFGAIAGFIEGGWTGMVDGWYGYHHQNEQGSGYAADQKSTQNAIDGITNKVNSVIEKMNTQFTAVGKEFNKLERRMENLNKKVDDGFIDIWTYNAELLVLLENERTLDFHDSNVKNLYEKVKSQLKNNAKEIGNGCFEFYHKCNDECMESVKNGTYDYPKYSEESKLNREKIDGIKLESMGVYQILAIYSTVASSLVLLVSLGAISFWMCSNGSLQCRICI

SEQ ID NO: 3108 - protein, 566 aa, Artificial Sequence; identical to SEQ ID NO: 2669
  derived and/or modified protein sequence (wt) from hemagglutinin__InfluenzaA__ACU13090

SEQ ID NO: 3109 - protein, 566 aa, Artificial Sequence; identical to SEQ ID NO: 2669
  derived and/or modified protein sequence (wt) from hemagglutinin__InfluenzaA__ACU13091

SEQ ID NO: 3110 - protein, 566 aa, Artificial Sequence; identical to SEQ ID NO: 2669
  derived and/or modified protein sequence (wt) from hemagglutinin__InfluenzaA__ACU13092

SEQ ID NO: 3111 - protein, 566 aa, Artificial Sequence; identical to SEQ ID NO: 2669
  derived and/or modified protein sequence (wt) from hemagglutinin__InfluenzaA__ACU13093

SEQ ID NO: 3112 - protein, 566 aa, Artificial Sequence
  derived and/or modified protein sequence (wt) from hemagglutinin__InfluenzaA__ACU13094
MKAILVVLLYTFATANADTLCIGYHANNSTDTVDTVLEKNVTVTHSVNLLEDKHNGKLCKLRGVAPLHLGKCNIAGWILGNPECESLSTASSWSYIVETSSSDNGTCYPGDFIDYEELREQLSSVSSFERFEIFPKTSSWPNHDSNKGVTAACPHAGAKSFYKNLIWLVKKGNSYPKLSKSYINDKGKEVLVLWGIHHPSTSADQQSLYQNADAYVFVGSSRYSKKFKPEIAIRPKVRGQEGRMNYYWTLVEPGDKITFEATGNLVVPRYAFAMERNAGSGIIISDTPVHDCNTTCQTPKGAINTSLPFQNIHPITIGKCPKYVKSTKLRLATGLRNVPSIQSRGLFGAIAGFIEGGWTGMVDGWYGYHHQNEQGSGYAADLKSTQNAIDEITNKVNSVIEKMNTQFTAVGKEFNHLEKRIENLNKKVDDGFLDIWTYNAELLVLLENERTLDYHDSNVKNLYEKVRSQLKNNAKEIGNGCFEFYHKCDNTCMESVKNGTYDYPKYSEEAKLNREEIDGVKLESTRIYQILAIYSTVASSLVLVVSLGAISFWMCSNGSLQCRICI

SEQ ID NO: 3113 - protein, 566 aa, Artificial Sequence; identical to SEQ ID NO: 2669
  derived and/or modified protein sequence (wt) from hemagglutinin__InfluenzaA__ACU13095

SEQ ID NO: 3114 - protein, 566 aa, Artificial Sequence
  derived and/or modified protein sequence (wt) from hemagglutinin__InfluenzaA__ACU13096
MKAILVVLLHTFATANADTLCIGYHANNSTDTVDTVLEKNVTVTHSVNLLEDKHNGKLCKLRGVAPLHLGKCNIAGWILGNPECESLSTASSWSYIVETSSSDNGTCYPGDFIDYEELREQLSSVSSFERFEIFPKTSSWPNHDSNKGVTAACPHAGAKSFYKNLIWLVKKGNSYPKLSKSYINDKGKEVLVLWGIHHPSTSADQQSLYQNADAYVFVGSSRYSKKFKPEIAIRPKVRDQEGRMNYYWTLVEPGDKITFEATGNLVVPRYAFAMERNAGSGIIISDTPVHDCNTTCQTPKGAINTSLPFQNIHPITIGKCPKYVKSTKLRLATGLRNVPSIQSRGLFGAIAGFIEGGWTGMVDGWYGYHHQNEQGSGYAADLKSTQNAIDEITNKVNSVIEKMNTQFTAVGKEFNHLEKRIENLNKKVDDGFLDIWTYNAELLVLLENERTLDYHDSNVKNLYEKVRSQLKNNAKEIGNGCFEFYHKCDNTCMESVKNGTYDYPKYSEEAKLNREEIDGVTLESTRIYQILAIYSTVASSLVLVVSLGAISFWMCSNGSLQCRICI

SEQ ID NO: 3115 - protein, 566 aa, Artificial Sequence; identical to SEQ ID NO: 2669
  derived and/or modified protein sequence (wt) from hemagglutinin__InfluenzaA__ACU13098

SEQ ID NO: 3116 - protein, 566 aa, Artificial Sequence
  derived and/or modified protein sequence (wt) from hemagglutinin__InfluenzaA__ACU13099
MKAILVVLLYTFATANADTLCIGYHANNSTDTVDTVLEKNVTVTHSVNLLEDKHNGKLCKLRGVAPLHLGKCNIAGWILGNPECESLSTASSWSYIVETSSSDNGTCYPGDFIDYEELREQLSSVSSFERFEIFPKTSSWPNHDSNKGVTAACPHAGAKSFYKNLIWLVKKGNSYPKLSKSYINDKGKEVLVLWGIHHPSTSADQQSLYQNADAYVFVGTSRYSKKFKPEIAIRPKVREQEGRMNYYWTLVEPGDKITFEATGNLVVPRYAFAMERNAGSGIIISDTPVHDCNTTCQTPKGAINTSLPFQNIHSITIGKCPKYVKSTKLRLATGLRNVPSIQSRGLFGAIAGFIEGGWTGMVDGWYGYHHQNEQGSGYAADLKSTQNAIDEITNKVNSVIEKMNTQFTAVGKEFNHLEKRIENLNKKVDDGFLDIWTYNAELLVLLENERTLDYHDSNVKNLYEKVRSQLKNNAKEIGNGCFEFYHKCDNTCMESVKNGTYDYPKYSEEAKLNREEIDGVKLESTRIYQILAIYSTVASSLVLVVSLGAISFWMCSNGSLQCRICI

SEQ ID NO: 3117 - protein, 566 aa, Artificial Sequence
  derived and/or modified protein sequence (wt) from hemagglutinin__InfluenzaA__ACU13129
MKAILVVLLYTFATANADTLCIGYHANNSTDTVDTVLEKNVTVTHSVNLLEDKHNGKLCKLRGVAPLHLGKCNIAGWILGNPECESLSTASSWSYIVETSSSDNGTCYPGDFIDYEELREQLSSVSSFERFEIFPKTSSWPNHDSNKGVTAACPHAGAKSFYKNLIWLVKKGNSYPKLSKSYINDKGKEVLVLWGIHHPSTSADQQSLYQNADAYVFVGTSRYSKKFKPEIAIRPKVREQEGRMNYYWTLVEPGDKITFEATGNLVVPRYAFAMERNAGSGIIISDTPVHDCNTTCQTPKGAINTSLPFQNIHPITIGKCPKYVKSTKLRLATGLRNVPSIQSRGLFGAIAGFIEGGWTGMVDGWYGYHHQNEQGSGYAADLKSTQNAIDEITNKVNSVIEKMNTQFTAVGEEFNHLEKRIENLNKKVDDGFLDIWTYNAELLVLLENERTLDYHDSNVKNLYEKVRSQLKNNAKEIGNGCFEFYHKCDNTCMESVKNGTYDYPKYSEEAKLNREEIDGVKLESTRIYQILAIYSTVASSLVLVVSLGAISFWMCSNGSLQCRICI

SEQ ID NO: 3118 - protein, 566 aa, Artificial Sequence; identical to SEQ ID NO: 2669
  derived and/or modified protein sequence (wt) from hemagglutinin__InfluenzaA__ACU16795

SEQ ID NO: 3119 - protein, 566 aa, Artificial Sequence; identical to SEQ ID NO: 2669
  derived and/or modified protein sequence (wt) from hemagglutinin__InfluenzaA__ACU16858

SEQ ID NO: 3120 - protein, 566 aa, Artificial Sequence; identical to SEQ ID NO: 2669
  derived and/or modified protein sequence (wt) from hemagglutinin__InfluenzaA__ACU16930

SEQ ID NO: 3121 - protein, 566 aa, Artificial Sequence; identical to SEQ ID NO: 2669
  derived and/or modified protein sequence (wt) from hemagglutinin__InfluenzaA__ACU16993

SEQ ID NO: 3122 - protein, 566 aa, Artificial Sequence; identical to SEQ ID NO: 2669
  derived and/or modified protein sequence (wt) from hemagglutinin__InfluenzaA__ACU17059

SEQ ID NO: 3123 - protein, 566 aa, Artificial Sequence; identical to SEQ ID NO: 2669
  derived and/or modified protein sequence (wt) from hemagglutinin__InfluenzaA__ACU17126

SEQ ID NO: 3124 - protein, 566 aa, Artificial Sequence; identical to SEQ ID NO: 2760
  derived and/or modified protein sequence (wt) from hemagglutinin__InfluenzaA__ACU17187

SEQ ID NO: 3125 - protein, 566 aa, Artificial Sequence; identical to SEQ ID NO: 2669
  derived and/or modified protein sequence (wt) from hemagglutinin__InfluenzaA__ACU17258

SEQ ID NO: 3126 - protein, 566 aa, Artificial Sequence
  derived and/or modified protein sequence (wt) from hemagglutinin__InfluenzaA__ACU17389
MEAILVVLLYTFATANADTLCIGYHANNSTDTVDTVLEKNVTVTHSVNLLEDKHNGKLCKLRGVAPLHLGKCNIAGWILGNPECESLSTASSWSYIVETSSSDNGTCYPGDFIDYEELREQLSSVSSFERFEIFPKTSSWPNHDSNKGVTAACPHAGAKSFYKNLIWLVKKGNSYPKLSKSYINDKGKEVLVLWGIHHPSTSADQQSLYQNADAYVFVGSSRYSKKFKPEIAIRPKVRDQEGRMNYYWTLVEPGDKITFEATGNLVVPRYAFAMERNAGSGIIISDTPVHDCNTACQTPKGAINTSLPFHNIHPITIGKCPKYVKSTKLRLATGLRNVPSIQSRGLFGAIAGFIEGGWTGMVDGWYGYHHQNEQGSGYAADLKSTQNAIDEITNKVNSVIEKMNTQFTAVGKEFNHLEKRIENLNKKVDDGFLDIWTYNAELLVLLENERTLDYHDSNVKNLYEKVRSQLKNNAKEIGNGCFEFYHKCDNTCMESVKNGTYDYPKYSEEAKLNREEIDGVKLESTRIYQILAIYSTVASSLVLVVSLGAISFWMCSNGSLQCRICI

SEQ ID NO: 3127 - protein, 566 aa, Artificial Sequence; identical to SEQ ID NO: 2669
  derived and/or modified protein sequence (wt) from hemagglutinin__InfluenzaA__ACU17450

SEQ ID NO: 3128 - protein, 566 aa, Artificial Sequence; identical to SEQ ID NO: 2669
  derived and/or modified protein sequence (wt) from hemagglutinin__InfluenzaA__ACU17521

SEQ ID NO: 3129 - protein, 566 aa, Artificial Sequence; identical to SEQ ID NO: 2656
  derived and/or modified protein sequence (wt) from hemagglutinin__InfluenzaA__ACU27041

SEQ ID NO: 3130 - protein, 565 aa, Artificial Sequence
  derived and/or modified protein sequence (wt) from hemagglutinin__InfluenzaA__ACU27406
MKVKLLVLLCTFTATYADTICIGYHANNSTDTVDTVLEKNVTVTHSVNLLENSHNGKLCLLKGIAPLQLGNCSVAGWILGNPECELLISKESWSYIVEKPNPENGTCYPGHFADYEELREQLSSVSSFERFEIFPKESSWPNHTVTGVSASCSHNGESSFYRNLLWLTGKNGLYPNLSKSYANNKEKEVLVLWGVHHPPNIVDQKTLYRTENAYVSVVSSHYSRKFTPEIAKRPKIRDQEGRINYYWTLLEPGDTIIFEANGNLIAPRYAFALSRGFGSGIINSNAPMDKCDAKCQTPQGAINSSLPFQNVHPVTIGECPKYVRSAKLRMVTGLRNIPSIQSRGLFGAIAGFIEGGWTGMVDGWYGYHHQNEQGSGYAADQKSTQNAINGITNKVNSVIERMNTQFTAVGKEFNKLERRMENLNKKVDDGFIDIWTYNAELLVLLENERTLDFHDSNVKNLYEKVKSQLKNNAKEIGNGCFEFYHKCNDECMESVKNGTYDYPKYSEESKLNREKIDGVKLESMGVYQILAIYSTVASSLVLLVSLGAISFWMCSNGSLQCRICI

SEQ ID NO: 3131 - protein, 565 aa, Artificial Sequence
  derived and/or modified protein sequence (wt) from hemagglutinin__InfluenzaA__ACU27407
MKVKLLVLLCTFTATYADTICIGYHANNSTDTVDTVLEKNVTVTHSVNLLENSHNGKLCLLKGIAPLQLGNCSVAGWILGNPECELLISKESWSYIVEKPNPENGTCYPGHFADYEELREQLSSVSSFERFEIFPKESSWPNHTVTGVSASCSHNGESSFYRNLLWLTGKNGLYPNLSKSYANNKEKEVLVLWGVHHPPNIVDQKTLYRTENAYVSVVSSHYSRKFTPEIAKRPKVRDQEGRINYYWTLLEPGDTIIFEANGNLIAPRYAFALSRGFGSGIINSNAPMDKCDAKCQTPQGAINSSLPFQNVHPVTIGECPKYVRSAKLRMVTGLRNIPSIQSRGLFGAIAGFIEGGWTGMVDGWYGYHHQNEQGSGYAADQKSTQNAINGITNKVNSVIEKMNTQFTAVGKEFNKLERRMENLNKKVDDGFIDIWTYNAELLVLLENERTLDFHDSNVKNLYEKVKSQLKNNAKEIGNGCFEFYHKCNDECMESVKNGTYDYPKYSEESKLNREKIDGVKLESMGVYQILAIYSTVASSLVLLVSLGAISFWMCSNGSLQCRICI

SEQ ID NO: 3132 - protein, 566 aa, Artificial Sequence; identical to SEQ ID NO: 2656
  derived and/or modified protein sequence (wt) from hemagglutinin__InfluenzaA__ACU29949

SEQ ID NO: 3133 - protein, 566 aa, Artificial Sequence
  derived and/or modified protein sequence (wt) from hemagglutinin__InfluenzaA__ACU29979
MKAILVVLLYTFAAANADTLCIGYHANNSTDTVDTVLEKNVTVTHSVNLLEDKHNGKLCKLRGVAPLHLGKCNIAGWILGNPECESLSTASSWSYIVETSSSDNGTCYPGDFIDYEELREQLSSVSSFERFEIFPKTSSWPNHDSNKGVTAACPHAGAKSFYKNLIWLVKKGNSYPKLSKSYINDKGKEVLVLWGIHHPSTSADQQSLYQNADAYVFVGTSRYSKKFKPEIAIRPKVRDQEGRMNYYWTLVEPGDKITFEATGNLVVPRYAFAMERNAGSGIIISDTPVHDCNTTCQTPKGAINTSLPFQNIHPITIGKCPKYVKSTKLRLATGLRNVPSIQSRGLFGAIAGFIEGGWTGMVDGWYGYHHQNEQGSGYAADLKSTQNAIDEITNKVNSVIEKMNTQFTAVGKEFNHLEKRIENLNKKVDDGFLDIWTYNAELLVLLENERTLDYHDSNVKNLYEKVRSQLKNNAKEIGNGCFEFYHKCDNTCMESVKNGTYDYPKYSEEAKLNREEIDGVKLESTRIYQILAIYSTVASSLVLVVSLGAISFWMCSNGSLQCRICI

SEQ ID NO: 3134 - protein, 566 aa, Artificial Sequence; identical to SEQ ID NO: 2669
  derived and/or modified protein sequence (wt) from hemagglutinin__InfluenzaA__ACU29989

SEQ ID NO: 3135 - protein, 567 aa, Artificial Sequence
  derived and/or modified protein sequence (wt) from hemagglutinin__InfluenzaA__ACU29999
MKAILVVLLYTFATANADTLCIGYHANNSTDTVDTVLEKNVTVTHSVNLLEDKHNGKLCKLRGVAPLHLGKCNIAGWILGNPECESLSTASSWSYIVETSSSDNGTCYPGDFIDYEELREQLSSVSSFERFEIFPKTSSWPNHDSNKGVTAACPHAGAKSFYKNLIWLVKKGNSYPKLSKSYINDKGKEVLVLWGIHHPSTSADQQSLYQNADAYVFVGTSRYSKKFKPEIAIRPKVRDQEGRMNYYWTLVEPGDKITFEATGNLVVPRYAFAMERNAGSGIIISDTPVHDCNTTCQTPKGAINTSLPFQNIHPITIGKCPKYVKSTKLRLATGLRNVPSIQSRGLFGAIAGFIEGGWTGMVDGWYGYHHQNEQGSGYAADLKSTQNAIDEITNKVNSVIEKMNTQFTAVGKEFNHLEKRIENLNKKVDDGFLDIWTYNAELLVLLENERTLDYHDSNVKNLYEKVRSQLKNNAKEIGNGCFEFYHKCDNTCMESVKNGTYDYPKYSEEAKLNREEIDGVKLESTRIYQILAIYSTVASSLVLVVSLGAISFWMCSNGSLLQCRICI

SEQ ID NO: 3136 - protein, 567 aa, Artificial Sequence
  derived and/or modified protein sequence (wt) from hemagglutinin__InfluenzaA__ACU30009
MEAILVVLLYTFATANADTLCIGYHANNSTDTVDTVLEKNVTVTHSVNLLEDKHNGKLCKLRGVAPLHLGKCNIAGWILGNPECESLSTASSWSYIVETSSSDNGTCYPGDFIDYEELREQLSSVSSFERFEIFPKTSSWPNHDSNKGVTAACPHAGAKSFYKNLIWLVKKGNSYPKLSKSYINDKGKEVLVLWGIHHPSTSADQQSLYQNADAYVFVGSSRYSKKFKPEIAIRPKVRDQEGRMNYYWTLVEPGDKITFEATGNLVVPRYAFAMERNAGSGIIISDTPVHDCNTTCQTPKGAINTSLPFHNIHPITIGKCPKYVKSTKLRLATGLRNVPSIQSRGLFGAIAGFIEGGWTGMVDGWYGYHHQNEQGSGYAADLKSTQNAIDEITNKVNSVIEKMNTQFTAVGKEFNHLEKRIENLNKKVDDGFLDIWTYNAELLVLLENERTLDYHDSNVKNLYEKVRSQLKNNAKEIGNGCFEFYHKCDNTCMESVKNGTYDYPKYSEEAKLNREEIDGVKLESTRIYQILAIYSTVASSLVLVVSLGAISFWMCSGYGSLQCRICI

SEQ ID NO: 3137 - protein, 566 aa, Artificial Sequence; identical to SEQ ID NO: 3029
  derived and/or modified protein sequence (wt) from hemagglutinin__InfluenzaA__ACU30019

SEQ ID NO: 3138 - protein, 566 aa, Artificial Sequence; identical to SEQ ID NO: 2849
  derived and/or modified protein sequence (wt) from hemagglutinin__InfluenzaA__ACU30093

SEQ ID NO: 3139 - protein, 566 aa, Artificial Sequence
  derived and/or modified protein sequence (wt) from hemagglutinin__InfluenzaA__ACU30103
MKAILVVLLYTFATANADTLCIGYHANNSTDTVDTVLEKNVTVTHSVNLLEDKHNGKLCKLRGVAPLHLGKCNIAGWILGNPECESLSTASSWSYIVETSSSDNGTCYPGDFIDYEELREQLSSVSSFERFEIFPKTSSWPNHDSNKGVTAACPHAGAKSFYKNLIWLVKKGNSYPKLSKSYINDKGKEVLVLWGIHHPSTSADQQSLYQNADAYVFVGTSRYSKKFKPEIAIRPKVRDQEGRMNYHWTLVEPGDKITFEATGNLVVPRYAFAMERNAGSGIIISDTPVHDCNTTCQTPKGAINTSLPFQNIHPITIGKCPKYVKSTKLRLATGLRNVPSIQSRGLFGAIAGFIEGGWTGMVDGWYGYHHQNEQGSGYAADLKSTQNAIDEITNKVNSVIEKMNTQFTAVGKEFNHLEKRIENLNKKVDDGFLDIWTYNAELLVLLENERTLDYHDSNVKNLYEKVRSQLKNNAKEIGNGCFEFYHKCDNTCMESVKNGTYDYPKYSEEAKLNREEIDGVKLESTRIYQILAIYSTVASSLVLVVSLGAISFWMCSNGSLQCRICI

SEQ ID NO: 3140 - protein, 567 aa, Artificial Sequence
  derived and/or modified protein sequence (wt) from hemagglutinin__InfluenzaA__ACU30112
MEAILVVLLYTFATANADTLCIGYHANNSTDTVDTVLEKNVTVTHSVNLLEDKHNGKLCKLRGVAPLHLGKCNIAGWILGNPECESLSTASSWSYIVETSSSDNGTCYPGDFIDYEELREQLSSVSSFERFEIFPKTSSWPNHDSNKGVTAACPHAGAKSFYKNLIWLVKKGNSYPKLSKSYINDKGKEVLVLWGIHHPSTSADQQSLYQNADAYVFVGSSRYSKKFKPEIAIRPKVRDQEGRMNYYWTLVEPGDKITFEATGNLVVPRYAFAMERNAGSGIIISDTPVHDCNTTCQTPKGAINTSLPFHNIHPITIGKCPKYVKSTKLRLATGLRNVPSIQSRGLFGAIAGFIEGGWTGMVDGWYGYHHQNEQGSGYAADLKSTQNAIDEITNKVNSVIEKMNTQFTAVGKEFNHLEKRIENLNKKVDDGFLDIWTYNAELLVLLENERTLDYHDSNVKNLYEKVRSQLKNNAKEIGNGCFEFYHKCDNTCMESVKNGTYDYPKYSEEAKLNREEIDGVKLESTRIYQILAIYSTVASSLVLVVSLGAISFWMCSHMVLLQCRICI

SEQ ID NO: 3141 - protein, 566 aa, Artificial Sequence
  derived and/or modified protein sequence (wt) from hemagglutinin__InfluenzaA__ACU30121
MEAILVVLLYTFATANADTLCIGYHANNSTDTVDTVLEKNVTVTHSVNLLEDKHNGKLCKLRGVAPLHLGKCNIAGWILGNPECESLSTASSWSYIVETSSSDNGTCYPGDFIDYEELREQLSSVSSFERFEIFPKTSSWPNHDSNKGVTAACPHAGAKSFYKNLIWLVKKGNSYPKLSKSYINDKGKEVLVLWGIHHPSTSADQQSLYQNADAYVFVGSSRYSKKFKPEIAIRPKVRDQEGRMNYYWTLVEPGDKITFEATGNLVVPRYAFAMERNAGSGIIISDTPVHDCNTTCQTPKGAINTSLPFHNIHPITIGKCPKYVKSTKLRLATGLRNVPSIQSRGLFGAIAGFIEGGWTGMVDGWYGYHHQNEQGSGYAADLKSTQNAIDEITNKVNSVIEKMNTQFTAVGKEFNHLEKRIENLNKKVDDGFLDIWTYNAELLVLLENERTLDYHDSNVKNLYEKVRNQLKNNAKEIGNGCFEFYHKCDNTCMESVKNGTYDYPKYSEEAKLNREEIDGVKLESTRIYQILAIYSTVASSLVLVVSLGAISFWMCSNGSLQCRICI

SEQ ID NO: 3142 - protein, 566 aa, Artificial Sequence; identical to SEQ ID NO: 2762
  derived and/or modified protein sequence (wt) from hemagglutinin__InfluenzaA__ACU31124

SEQ ID NO: 3143 - protein, 566 aa, Artificial Sequence; identical to SEQ ID NO: 2701
  derived and/or modified protein sequence (wt) from hemagglutinin__InfluenzaA__ACU31143

SEQ ID NO: 3144 - protein, 566 aa, Artificial Sequence; identical to SEQ ID NO: 2701
  derived and/or modified protein sequence (wt) from hemagglutinin__InfluenzaA__ACU31144

SEQ ID NO: 3145 - protein, 566 aa, Artificial Sequence; identical to SEQ ID NO: 2701
  derived and/or modified protein sequence (wt) from hemagglutinin__InfluenzaA__ACU31145

SEQ ID NO: 3146 - protein, 566 aa, Artificial Sequence; identical to SEQ ID NO: 2849
  derived and/or modified protein sequence (wt) from hemagglutinin__InfluenzaA__ACU31146

SEQ ID NO: 3147 - protein, 566 aa, Artificial Sequence; identical to SEQ ID NO: 2669
  derived and/or modified protein sequence (wt) from hemagglutinin__InfluenzaA__ACU31147

SEQ ID NO: 3148 - protein, 566 aa, Artificial Sequence
  derived and/or modified protein sequence (wt) from hemagglutinin__InfluenzaA__ACU31148
MKAILVIMLYTFATANADTLCIGYHANNSTDTVDTVLEKNVTVTHSVNLLEDKHNGKLCKLRGVAPLHLGKCNIAGWILGNPECESLSTASSWSYIVETSSSDNGTCYPGDFIDYEELREQLSSVSSFERFEIFPKTSSWPNHDSNKGVTAACPHAGAKSFYKNLIWLVKKGNSYPKLSKSYINDKGKEVLVLWGIHHPSTSADQQSLYQNADAYVFVGSSRYSKKFKPEIAIRPKVRDQEGRMNYYWTLVEPGDKITFEATGNLVVPRYAFAMERNAGSGIIISDTPVHDCNTTCQTPKGAINTSLPFQNIHPITIGKCPKYVKSTKLRLATGLRNVPSIQSRGLFGAIAGFIEGGWTGMVDGWYGYHHQNEQGSGYAADLKSTQNAIDEITNKVNSVIEKMNTQFTAVGKEFNHLEKRIENLNKKVDDGFLDIWTYNAELLVLLENERTLDYHDSNVKNLYEKVRSQLKNNAKEIGNGCFEFYHKCDNTCMESVKNGTYDYPKYSEEAKLNREEIDGVKLESTRIYQILAIYSTVASSLVLVVSLGAISFWMCSNGSLQCRICI

SEQ ID NO: 3149 - protein, 566 aa, Artificial Sequence; identical to SEQ ID NO: 2656
  derived and/or modified protein sequence (wt) from hemagglutinin__InfluenzaA__ACU31149

SEQ ID NO: 3150 - protein, 566 aa, Artificial Sequence; identical to SEQ ID NO: 2656
  derived and/or modified protein sequence (wt) from hemagglutinin__InfluenzaA__ACU31150

SEQ ID NO: 3151 - protein, 566 aa, Artificial Sequence; identical to SEQ ID NO: 2656
  derived and/or modified protein sequence (wt) from hemagglutinin__InfluenzaA__ACU31151

SEQ ID NO: 3152 - protein, 566 aa, Artificial Sequence; identical to SEQ ID NO: 2656
  derived and/or modified protein sequence (wt) from hemagglutinin__InfluenzaA__ACU31152

SEQ ID NO: 3153 - protein, 568 aa, Artificial Sequence
  derived and/or modified protein sequence (wt) from hemagglutinin__InfluenzaA__ACU46644
MEKIVLLFAIVSLVKSDQICIGYHANNSTEQVDTIMEKNVTVTHAQDILEKTHNGKLCDLDGGKPLILRDCRVAGWLLGNPMCDEFINVPEWSYIVEKANPVNDLCYPGDFNDYEELKHLLSRINHFEKIQIIPKSSWSSHEASLGVSSACPYQGKSSFFRNVVWLIKKNSTYPTIKRSYNNTNQEDLLVLWWIHHPNDAAEQTKLYQNPTTYISVGTSTLNQRLVPRIATRSKVNGQSGRMEFFWTILKPNDAINFESNGNFIAPEYAYKIVKKGDSTIMKSELEYGNCNTKCQTPMGAINSSMPFHHIHPLTIGECPKYVKSNRLVLATGLRNSPQRERRRKKRGLFGAIAGFIEGGWQGMVDGWYGYHHSNEQGSGYAADKESTQKAIDGVTNKVNSIIDKMNTQFEAVGREFNHLERRIENLNKKMEDGFLDVWTYNAELLVLMENERTLDFHDSNVKNLYDKVRLQLRDNAKELGNGCFEFYHKCDDECMESVRNGTYDYPQYSEEARLKREEISGVKLESIGIYQILSIYSTVASSLALAIMVAGLSLWMCSNGSLQCRICI

SEQ ID NO: 3154 - protein, 566 aa, Artificial Sequence
  derived and/or modified protein sequence (wt) from hemagglutinin__InfluenzaA__ACU56924
MKAILVVLLYTFATANADTLCIGYHANNSTDTVDTVLEKNVTVTHSVNLLEDKHNGKLCKLRGVAPLHLGKCNIAGWILGNPECESLSTASSWSYIVETSSSDNGTCYPGDFIDYEELREQLSSVSSFERFEIFPKTSSWPNHDSNKGVTAACPHAGAKSFYKNLIWLVKKGNSYPKLSKSYINDKGKEVLVLWGIHHPSTSADQQSLYQNADAYVFVGTSRYSKKFKPEIAIRPKVRDREGRMNYYWTLVEPGDKITFEATGNLVVPRYAFAMERNAGSGIIISDTPVHDCNTTCQTPKGAINTSLPFQNIHPITIGKCPKYVKSTKLRLATGLRNVPSIQSRGLFGAIAGFIEGGWTGMVDGWYGYHHQNEQGSGYAADLKSTQNAIDEITNKVNSVIEKMNTQFTAVGKEFNHLEKRIENLNKKVDDGFLDIWTYNAELLVLLENERTLDYHDSNVKNLYEKVRSQLKNNAKEIGNGCFEFYHKCDNTCMESVKNGTYDYPKYSEEAKLNREEIDGVKLESTRIYQILAIYSTVASSLVLVVSLGAISFWMCSNGSLQCRICI

SEQ ID NO: 3155 - protein, 566 aa, Artificial Sequence; identical to SEQ ID NO: 3022
  derived and/or modified protein sequence (wt) from hemagglutinin__InfluenzaA__ACU56931

SEQ ID NO: 3156 - protein, 566 aa, Artificial Sequence; identical to SEQ ID NO: 2669
  derived and/or modified protein sequence (wt) from hemagglutinin__InfluenzaA__ACU64792

SEQ ID NO: 3157 - protein, 566 aa, Artificial Sequence; identical to SEQ ID NO: 2849
  derived and/or modified protein sequence (wt) from hemagglutinin__InfluenzaA__ACU64801

SEQ ID NO: 3158 - protein, 566 aa, Artificial Sequence; identical to SEQ ID NO: 2849
  derived and/or modified protein sequence (wt) from hemagglutinin__InfluenzaA__ACU64812

SEQ ID NO: 3159 - protein, 566 aa, Artificial Sequence; identical to SEQ ID NO: 2318
  derived and/or modified protein sequence (wt) from hemagglutinin__InfluenzaA__ACU79871

SEQ ID NO: 3160 - protein, 566 aa, Artificial Sequence; identical to SEQ ID NO: 2316
  derived and/or modified protein sequence (wt) from hemagglutinin__InfluenzaA__ACU79882

SEQ ID NO: 3161 - protein, 566 aa, Artificial Sequence; identical to SEQ ID NO: 2329
  derived and/or modified protein sequence (wt) from hemagglutinin__InfluenzaA__ACU79893

SEQ ID NO: 3162 - protein, 566 aa, Artificial Sequence; identical to SEQ ID NO: 2329
  derived and/or modified protein sequence (wt) from hemagglutinin__InfluenzaA__ACU79904

SEQ ID NO: 3163 - protein, 565 aa, Artificial Sequence
  derived and/or modified protein sequence (wt) from hemagglutinin__InfluenzaA__ACU79937
MKAKLLVLLCTFTATYADTICIGYHANNSTDTVDTVLEKNVTVTHSVNLLEDSHNGKLCLLKGIAPLQLGNCSVAGWILGNPECESLISKESWSYIVETPNPENGTCYPGYFADYEELREQLSSVSSFERFEIFPKESSWPNHTVTGVTASCSHNGKSSFYRNLLWLTEKNGLYPNLSNSYVNNKEKEVLVLWGVHHPSNIGVQRAIYHTENAYVSVVSSHYSRRFTPEIAKRPKVRGQEGRINYYWTLLEPGDTIIFEANGNLIAPWYAFALSRGFGSGIITSNAPMNECDAKCQTPQGAINSSLPFQNVHPVTIGECPKYVRSTKLRMVTGLRNIPSIQSRGLFGAIAGFIEGGWTGMMDGWYGYHHQNEQGSGYAADQKSTQNAINGITNKVNSVIEKMNTQFTAVGKEFNKLERRMENLNKKVDDGFLDIWTYNAELLVLLENERTLDFHDSNVKNLYEKVKSQLKNNAKEIGNGCFEFYHKCNNECMESVKNGTYDYPKYSEESKLNREKIDGVKLESMGVYQILAIYSTVASSLVLLVSLGAISFWMCSNGSLQCRICI

SEQ ID NO: 3164 - protein, 562 aa, Artificial Sequence
  derived and/or modified protein sequence (wt) from hemagglutinin__InfluenzaA__ACU79948
MAIIYLILLFTAVRGDQICIGYHANNSTEKVDTILERNVTVTHAKDILEKTHNGKLCKLNGIPPLELGDCSIAGWLLGNPECDRLLSVPEWSYIMEKENPRDGLCYPGSFNDYEELKHLLSSVKHFEKVKILPKDRWTQHTTTGGSRACAVSGNPSFFRNMVWLTKKGSDYPVAKGSYNNTSGEQMLIIWGVHHPNDETEQRTLYQNVGTYVSVGTSTLNKRSTPEIATRPKVNGQGGRMEFSWTLLDMWDTINFESTGNLIAPEYGFKISKRGSSGIMKTEGTLENCETKCQTPLGAINTTLPFHNVHPLTIGECPKYVKSEKLVLATGLRNVPQIESRGLFGAIAGFIEGGWQGMVDGWYGYHHSNDQGSGYAADKESTQKAFDGITNNVNSVIEKMNTQFEAVGKEFSNLERRLENLNKKMEDGFLDVWTYNAELLVLMENERTLDFHDSNVKNLYDKVRMQLRDNVKELGNGCFEFYHKCDDECMNSVKNGTYDYPKYEEESKLNRNEIKGVKLSSMGVYQILAIYATVAGSLSLAIMMAGISFWMCSNGSLQCRICI

SEQ ID NO: 3165 - protein, 562 aa, Artificial Sequence
  derived and/or modified protein sequence (wt) from hemagglutinin__InfluenzaA__ACU79959
MAIIYLILLFTAVRGDQICIGYHANNSTEKVDTILERNVTVTHAKDILEKTHNGKLCKLNGIPPLELGDCSIAGWLLGNPECDRLLSVPEWSYIMEKENPRDGLCYPGSFNDYEELKHLLSSVKHFEKVKILPKDRWTQHTTTGGSRACAVSGNPSFFRNMVWLTKKGSDYPVAKGSYNNTSGEQMLIIWGVHHPNDETEQRTLYQNVGTYVSVGTSTLNKRSTPEIATRPKVNGQGGRMEFSWTLLDMWDTINFESTGNLIAPEYGFKISKRGSSGIMKTEGTLENCETKCQTPLGAINTTLPFHNVHPLTIGECPKYVKSEKLVLATGLRNVPQIESRGLFGAIAGFIEGGWQGMVDGWYGYHHSNDQGSGYAADKESTQKAFDGITNKVNSVIEKMNTQFEAVGKEFSNLERRLENLNKKMEDGFLDVWTYNAELLVLMENERTLDFHDSNVKNLYDKVRMQLRDNVKELGNGCFEFYHKCDDECMNSVKNGTYDYPKYEEESKLNRNEIKGVKLSSMGVYQILAIYATVAGSLSLAIMMAGISFWMCSNGSLQCRICI

SEQ ID NO: 3166 - protein, 566 aa, Artificial Sequence
  derived and/or modified protein sequence (wt) from hemagglutinin__InfluenzaA__ACU79970
MKTIIALSYIQCLVFAQKFPGNDNSTATLCLGHHAVPNGTIVKTITNDQIEVTNATELVQSSSTGEICDSPHQILDGENCTLIDALLGDPQCDGFQNKNWDLFVERSKAYSNCYPYDVPDYASLRSLVASSGTLEFNNESFNWTGVTQNGTSSACIRRSNNSFFSKLNWLTHSKFKYPALNVTMPNNENFDKLYIWGVHHPGTDNDQIFLYAQASGRITVSTKRSQQTVIPNIGSRPRVRNIPSRISIYWTIVKPGDILLINSTGNLIAPRGYFKIRSGKSSIMRSDAPIGKCNSECITPNGSIPNDKPFQNVNRITYGACPRYVKQNTLKLATGMRNVPEKQTRGIFGAIAGFIENGWEGMVDGWYGFRHQNSEGIGQAADLKSTQAAIDQINGKLNRLIGKTNEKFHQIEKEFSEVEGRIQDLEKYVEDTKIDLWSYNAELLVALENQHTIDLTDSEMNKLFEKTKKQLRENAEDMGNGCFKIYHKCDNACIGSIRNGTYDHDVYRDEALNNRFQIKGVELKSGYKDWILWISFAISCFLLCIALLGFIMWACQKGNIRCNICI

SEQ ID NO: 3167 - protein, 565 aa, Artificial Sequence
  derived and/or modified protein sequence (wt) from hemagglutinin__InfluenzaA__ACU79981
MKVKLLVLLCTFTATYADTICIGYHANNSTDTVDTVLERNVTVTHSVNLLENSHNGKLCLLKGIAPLQLGNCSVAGWILGNPECELLISKESWSYIVEKPNPENGTCYPGHFADYEELREQLSSVSSFERFEIFPKESSWPNHTVTGVSASCSHNGESSFYRNLLWLTGKNGLYPNLSKSYANNKEKEVLVLWGVHHPPNIGDQKALYHTENAYVSVVSSHYSRKFTPEIAKRPKVRDQEGRINYYWTLLKPGDTIIFEANGNLIAPRYAFALSRGFGSGIINSNAPMDKCDAKCQTPQGAINSSLPFQNVHPVTIGECPKYVRSAKLRMVTGLRNIPSIQSRGLFGAIAGFIEGGWTGMVDGWYGYHHQNEQGSGYAADQKSTQNAINGITNKVNSVIEKMNTQFTAVGKEFNKLERRMENLNKKVDDGFIDIWTYNAELLVLLENERTLDFHDSNVKNLYEKVKSQLKNNAKEIGNGCFEFYHKCNDECMESVKNGTYDYPKYSEESKLNREKIDGVKLESMGVYQILAIYSTVASSLVLLVSLGAISFWMCSNGSLQCRICI

SEQ ID NO: 3168 - protein, 565 aa, Artificial Sequence
  derived and/or modified protein sequence (wt) from hemagglutinin__InfluenzaA__ACU79992
MKVKLLVLLCTFTATYADTICIGYHANNSTDTVDTVLEKNVTVTHSVNLLEDNHNGKLCLLKGKAPLQLGNCSVAGWILGNPECGLLISKESWSYIVERPNPENGTCYPGHFADYEELREQLSSVSSFERFEIFPKESSWPNHTVTGVSASCSHNGESSFYKNLLWLTGKNGLYPNLSKSYANNKEKEVLVLWGVHHPPNIGDQMTLYHKENAYVSVVSSHYSRKFTPEIAKRPKVRDQEGRINYYWTLLEPGDTIIFEANGNLIAPRYAFALSRGFGSGIINSNAPMDECDAKCQTPQGAINSSLPFQNVHPVTIGECPKYVRSAKLRMVTGLRNIPSIQSRGLFGAIAGFIEGGWTGMVDGWYGYHHQNEQGSGYAADQKSTQNAINGITNKVNSVIEKMNTQFTAVGKEFNKLERRMENLNKKVDDGFIDVWTYNAELLVLLENERTLDFHDSNVKNLYEKVKNQLKNNAKEIGNGCFEFYHKCNDECMESVKNGTYDYPKYSEESKLSREKIDGVKLESMGVYQILAIYSTVASSLVLLVSLGAISFWMCSNGSLQCRICI

SEQ ID NO: 3169 - protein, 566 aa, Artificial Sequence; identical to SEQ ID NO: 2434
  derived and/or modified protein sequence (wt) from hemagglutinin__InfluenzaA__ACU80003

SEQ ID NO: 3170 - protein, 565 aa, Artificial Sequence
  derived and/or modified protein sequence (wt) from hemagglutinin__InfluenzaA__ACU80025
MKVKLLVLLCTFAATYADTICIGYHANNSTDTVDTVLEKNVTVTHSVNLLENSHNGKLCLLKGIAPLQLGNCSVAGWILGNPECELLISKESWSYIVEKPNPENGTCYPGHFADYEELREQLSSVSSFERFEIFPKESSWPNHTVTGVSASCSHNGESSFYRNLLWLTGKNGLYPNLSKSYANNKEKEVLVLWGVHHPPNIGDQKALYHTENAYVSVVSSHYSRKFTPEIAKRPKVRDQEGRINYYWTLLEPGDTIIFEANGNLIAPRYAFALSRGFGSGIINSNAPMDKCDAKCQTPQGAINSSLPFQNVHPVTIGECPKYVRSAKLRMVTGLRNIPSIQSRGLFGAIAGFIEGGWTGMVDGWYGYHHQNEQGSGYAADQKSTQNAINGITNKVNSVIEKMNTQFTAVGKEFNKLERRMENLNKKVDDGFIDIWTYNAELLVLLENERTLDFHDSNVKNLYEKVKSQLKNNAKEIGNGCFEFYHKCNDECMESVKNGTYDYPKYSEESKLNREKIDGVKLESMGVYQILAIYSTVASSLVLLVSLGAISFWMCSNGSLQCRICI

SEQ ID NO: 3171 - protein, 566 aa, Artificial Sequence
  derived and/or modified protein sequence (wt) from hemagglutinin__InfluenzaA__ACU80036
MKTIIALSYILCLVFAQKLPGNDNSTATLCLGHHAVPNGTIVKTITNDQIEVTNATELVQSSSTGEICDSPHQILDGENCTLIDALLGDPQCDGFQNKKWDLFVERSKAYSNCYPYDVPDYASLRSLVASSGTLEFNNESFNWTGVTQNGTSSACIRRSNNSFFSRLNWLTHLKFKYPALNVTMPNNEQFDKLYIWGVHHPGTDNDQIFLYAQASGRITVSTKRSQQTVIPNIGSRPRVRNIPSRISIYWTIVKPGDILLINSTGNLIAPRGYFKIRSGKSSIMRSDAPIGKCSSECITPNGSIPNDKPFQNVNRITYGACPRYVKQNTLKLATGMRNVPEKQTRGIFGAIAGFIENGWEGMVDGWYGFRHQNSEGRGQAADLKSTQAAIDQINGKLNRLIGKTNEKFHQIEKEFSEVEGRIQDLEKYVEDTKIDLWSYNAELLVALENQHTIDLTDSEMNKLFEKTKKQLRENAEDIGNGCFKIYHKCDNACIGSIRNGTYDHDVYRDEALNNRFQIKGVELKSGYKDWILWISFAISCFLLCVALLGFIMWACQKGNIRCNICI

SEQ ID NO: 3172 - protein, 565 aa, Artificial Sequence; identical to SEQ ID NO: 2643
  derived and/or modified protein sequence (wt) from hemagglutinin__InfluenzaA__ACU80047

SEQ ID NO: 3173 - protein, 566 aa, Artificial Sequence
  derived and/or modified protein sequence (wt) from hemagglutinin__InfluenzaA__ACU80058
MKTIIALSYILCLVFAQKLPGNDNSTATLCLGHHAVPNGTIVKTITNDQIEVTNATELVQSSSTGGICDSPHQILDGENCTLIDALLGDPQCDGFQNKKWDLFVERSKACSNCYPYDVPDYASLRSLVASSGTLEFNNESFNWTGVTQNGTSSACKRRSNNSFFSRLNWLTHLKFKYPALNVTMPNNEKFDKLYIWGVHHPGTDNDQIFLYAQASGRITVSTKRSQQTVIPNIGSRPRVRNIPSRISIYWTIVKPGDILLINSTGNLIAPRGYFKIRSGKSSIMRSDAPIGKCNSECITPNGSIPNDKPFQNVNRITYGACPRYVKQNTLKLATGMRNVPEKQTRGIFGAIAGFIENGWEGMVDGWYGFRHQNSEGIGQAADLKSTQAAINQINGKLNRLIGKTNEKFHQIEKEFSEVEGRIQDLEKYVEDTKIDLWSYNAELLVALENQHTIDLTDSEMNKLFERTKKQLRENAEDMGNGCFKIYHKCDNACIGSIRNGTYDHDVYRDEALNNRFQIKGVELKSGYKDWILWISFAISCFLLCVALLGFIMWACQKGNIRCNICI

SEQ ID NO: 3174 - protein, 565 aa, Artificial Sequence; identical to SEQ ID NO: 2488
  derived and/or modified protein sequence (wt) from hemagglutinin__InfluenzaA__ACU80069

SEQ ID NO: 3175 - protein, 565 aa, Artificial Sequence
  derived and/or modified protein sequence (wt) from hemagglutinin__InfluenzaA__ACU80080
MKVKLLVLLCTFTATYADTICIGYHANNSTDTVDTVLEKNVTVTHSVNLLENSHNGKLCLLKGIAPLQLGNCSVAGWILGNPECELLISKESWSYIVEKPNPENGTCYPGHFADYEELREQLSSVSSFERFEIFPKESSWPNHTVTGVSASCSHNGESSFYRNLLWLTGKNGLYPNLSKSYANNKEKEVLVLWGVHHPPNIVDQKTLYRTENAYVSVVSSHYSRKFTPEIAKRPKVRDQEGRINYYWTLLEPGDTIIFEANGNLIAPRYAFALSRGFGSGIINSNAPMDKCDAKCQTPQGAINSSLPFQNVHPVTIGECPKYVRSAKLRMVTGLRNIPSIQSRGLFGAIAGFIEGGWTGMVDGWYGYHHQNEQGSGYAADQKSTQNAINGITNKVNSVIEKMNTQFTAVGKEFNKLERRMENLNKKVDDGFIDIWTYNAELLVLLENERTLDFHDSNVKNLYEKVKSQLKNNAKEIGNGCFEFYHKCNDECMESVKNGTYDYPKYSEESKLNREKIDGIKLESMGVYQILAIYSTVASSLVLLVSLGAISFWMCSNGSLQCRICI

SEQ ID NO: 3176 - protein, 565 aa, Artificial Sequence; identical to SEQ ID NO: 2774
  derived and/or modified protein sequence (wt) from hemagglutinin__InfluenzaA__ACU80091

SEQ ID NO: 3177 - protein, 566 aa, Artificial Sequence; identical to SEQ ID NO: 2537
  derived and/or modified protein sequence (wt) from hemagglutinin__InfluenzaA__ACU80102

SEQ ID NO: 3178 - protein, 566 aa, Artificial Sequence
  derived and/or modified protein sequence (wt) from hemagglutinin__InfluenzaA__ACU80113
MKTIIALSYILCLVFAQKFPGNDNSTATLCLGHHAVPNGTIVKTITNDQIEVTNATELVQSSSTGEICDSPHQILDGENCTLIDALLGDPQCDGFQNKNWDLFVERSKAYSNCYPYDVPDYASLRSLVASSGTLEFNNESFNWTGVTQNGTSSACIRRSNNSFFSRLNWLTHSKFKYPALNVTMPNNENFDKLYIWGVHHPGTDNDQIFLYAQASGRITVSTKRSQQTVIPNIGSRPRVRNIPSRISIYWTIVKPGDILLINSTGNLIAPRGYFKIRSGKSSIMRSDAPIGKCNSECITPNGSIPNDKPFQNVNRITYGACPRYVKQNTLKLATGMRNVPEKQTRGIFGAIAGFIENGWEGMVDGWYGFRHQNSEGIGQAADLKSTQAAIDQINGKLNRLIGKTNEKFHQIEKEFSEIEGRIQDLEKYVEDTKIDLWSYNAELLVALENQHTIDLTDSEMNKLFEKTKKQLRENAEDMGNGCFKIYHKCDNACIGSIRNGTYDHDVYRDEALNNRFQIKGVELKSGYKNWILWISFAISCFLLCIALLGFIMWACQKGNIRCNICI

SEQ ID NO: 3179 - protein, 566 aa, Artificial Sequence
  derived and/or modified protein sequence (wt) from hemagglutinin__InfluenzaA__ACU80135
MKTIIALSYILCLVFAQKFPGNDNSTATLCLGHHAVPNGTMVKTITNDQIEVTNATELVQSSSTGEICDSPHQILDGENCTLIDALLGDPQCDGFQNKNWDLFVERSKAYSNCYPYDVPDYASLRSLVASSGTLEFNNESFNWTGVTQNGTSSACIRRSNNSFFSRLNWLTHSKFKYPALNVTMPNNENFDKLYIWGVHHPGTDNDQIFLYAQASGRITVSTKRSQQTVIPNIGSRPRVRNIPSRISIYWTIVKPGDILLINSTGNLIAPRGYFKIRSGKSSIMRSDAPIGKCNSECITPNGSIPNDKPFQNVNRITYGACPRYVKQNTLKLATGMRNVPEKQTRGIFGAIAGFIENGWEGMVDGWYGFRHQNSEGIGQAADLKSTQAAIDQINGKLNRLIGKTNEKFHQIEKEFSEVEGRIQDLEKYVEDTKIDLWSYNAELLVALENQHTIDLTDSEMNKLFEKTKKQLRENAEDMGNGCFKIYHKCDNACIGSIRNGTYDHDVYRDEALNNRFQIKGVELKSGYKDWILWISFAISCFLLCIALLGFIMWACQKGNIRCNICI

SEQ ID NO: 3180 - protein, 566 aa, Artificial Sequence
  derived and/or modified protein sequence (wt) from hemagglutinin__InfluenzaA__ACU80146
MKTIIALSYILCLVFAQKLPGNDNSTATLCLGHHAVPNGTIVKTITNDQIEVTNATELVQSSSTGEICDSPHQILDGENCTLIDALLGDPQCDGFQNKKWDLFVERSKAYSNCYPYDVPDYASLRSLVASSGTLEFNNESFNWTGVTQNGTSSACIRRSNNSFFSRLNWLTHSKFKYPALNVTMPNNEEFDKLYIWGVHHPGTDNDQIFLYAQASGRITVSTKRSQQTVIPNIGSRPRVRNIPSRISIYWTIVKPGDILLINSTGNLIAPRGYFKIRSGKSSIMRSDAPIGKCNSECITPNGSIPNDKPFQNVNRITYGACPRYVKQNTLKLATGMRNVPEKQTRGIFGAIAGFIENGWEGMVDGWYGFRHQNSEGIGQAADLKSTQAAIDQINGKLNRLIGKTNEKFHQIEKEFSEVEGRIQDLEKYVEDTKIDLWSYNAELLVALENQHTIDLTDSEMNKLFEKTKKQLRENAEDMGNGCFKIYHKCDNACIGSIRNGTYDHDVYRDEALNNRFQIKGVELKSGYKDWILWISFAISCFLLCVALLGLIMWACQKGNIRCNICI

SEQ ID NO: 3181 - protein, 566 aa, Artificial Sequence; identical to SEQ ID NO: 2434
  derived and/or modified protein sequence (wt) from hemagglutinin__InfluenzaA__ACU80157

SEQ ID NO: 3182 - protein, 565 aa, Artificial Sequence; identical to SEQ ID NO: 3170
  derived and/or modified protein sequence (wt) from hemagglutinin__InfluenzaA__ACU80168

SEQ ID NO: 3183 - protein, 566 aa, Artificial Sequence; identical to SEQ ID NO: 2434
  derived and/or modified protein sequence (wt) from hemagglutinin__InfluenzaA__ACU80179

SEQ ID NO: 3184 - protein, 566 aa, Artificial Sequence
  derived and/or modified protein sequence (wt) from hemagglutinin__InfluenzaA__ACU80190
MKTIIALSYILCLVFAQKLPGNDNSTATLCLGHHAVPNGTIVKTITNDQIEVTNATELVQSSSTGEICDSPHQILDGENCTLIDALLGDPQCDGFQNKKWDLFVERSKAYSNCYPYDVPDYASLRSLVASSGTLEFNNESFNWTGVTQNGTSSACIRRSNNSFFSRLNWLTHSKFKYPALNVTMPNNEEFDKLYIWGVHHPGTDNDQIFLYAQASGRITVSTKRSQQTVIPNIGSRPRVRNIPSRISIYWTIVKPGDILLINSTGNLIAPRGYFKIRSGKSSIMRSDAPIGKCNSECITPNGSIPNDKPFQNVNRITYGACPRYVKQNTLKLATGMRNVPEKQTRGIFGAIAGFIENGWEGMVDGWYGFRHQNSEGIGQAADLKSTQAAIDQINGKLNRLIGKTNEKFHQIEKEFSEVEGRIQDLEKYVEDTKIDLWSYNAELLVALENQHTIDLTDSEMNKLFEKTKKQLRENAEDMGNGCFKIYHKCDNACIGSIRNGTYDHDVYRDEALNNRFQIKGIELKSGYKDWILWISFAISCFLLCVALLGFIMWACQKGNIRCNICI

SEQ ID NO: 3185 - protein, 566 aa, Artificial Sequence
  derived and/or modified protein sequence (wt) from hemagglutinin__InfluenzaA__ACU80201
MKTIIALSYILCLVFAQKLPGNDNSTATLCLGHHAVPNGTIVKTITNDQIEVTNATELVQSSSTGEICDSPHQILDGENCTLIDALLGDPQCDGFQNKKWDLFVERSKAYSNCYPYDVPDYASLRSLVASSGTLEFNNESFNWTGVTQNGTSSACIRRSNNSFFSRLNWLTHLKFKYPALNVTMPNNEQFDKLYIWGVHHPGTDNDQIFLYAQASGRITVSTKRSQQTVIPNIGSRPRVRNIPSRISIYWTIVKPGDILLINSTGNLIAPRGYFKIRSGKSSIMRSDAPIGKCNSECITPNGSIPNDKPFQNVNRITYGACPRYVKQNTLKLATGMRNVPEKQTRGIFGAIAGFIENGWEGMVDGWYGFRHQNSEGRGQAADLKSTQAAIDQINGKLNRLIGKTNEKFHQIEKEFSEVEGRIQDLEKYVEDTKIDLWSYNAELLVALENQHTIDLTDSEMNKLFEKTKKQLRENAEDMGNGCFKIYHKCDNACIGSIRNGTYDHDVYRDEALNNRFQIKGVELKSGYKDWILWISFAISCFLLCVALLGFIMWACQKGNIKCNICI

SEQ ID NO: 3186 - protein, 566 aa, Artificial Sequence; identical to SEQ ID NO: 2434
  derived and/or modified protein sequence (wt) from hemagglutinin__InfluenzaA__ACU80212

SEQ ID NO: 3187 - protein, 565 aa, Artificial Sequence
  derived and/or modified protein sequence (wt) from hemagglutinin__InfluenzaA__ACU80234
MKVKLLVLLCTFAATYADTICIGYHANNSTDTVDTVLEKNVTVTHSVNLLENSHNGKLCLLKGIAPLQLGNCSVAGWILGNPECELLISKESWSYIVEKPNPENGTCYPGHFADYEELREQLSSVSSFERFEIFPKESSWPNHTVTGVSASCSHNGESSFYKNLLWLTGKNGLYPNLSKSYANNKEKEVLVLWGVHHPPNIGDQKALYHTENAYVSVVSSHYSRKFTPEIAKRPKVRDQEGRINYYWTLLEPGDTIIFEANGNLIAPRYAFALSRGFGSGIINSNAPMDKCDAKCQTPQGAINSSLPFQNVHPVTIGECPKYVRSAKLRMVTGLRNIPSIQSRGLFGAIAGFIEGGWTGMVDGWYGYHHQNEQGSGYAADQKSTQNAINGITNKVNSVIEKMNTQFTAVGKEFNKLERRMENLNKKVDDGFIDIWTYNAELLVLLENERTLDFHDSNVKNLYEKVKSQLKNNAKEIGNGCFEFYHKCNDECMESVKNGTYDYPKYSEESKLNREKIDGVKLESMGVYQILAIYSTVASSLVLLVSLGAISFWMCSNGSLQCRICI

SEQ ID NO: 3188 - protein, 566 aa, Artificial Sequence
  derived and/or modified protein sequence (wt) from hemagglutinin__InfluenzaA__ACU80245
MKTIIALSYILCLVFAQKFPGNDNSTATLCLGHHAVPNGTIVKTITNDQIEVTNATELVQSSSTGEICDSPHQILDGENCTLIDALLGDPQCDGFQNKNWDLFVERSKAYSNCYPYDVPDYASLRSLVASSGTLEFNNESFNWTGVTQNGTSSACIRRSNNSFFSRLNWLTHSKFKYPALNVTMPNNENFDKLYIWGVHHPGTDNDQIFLYAQASGRITVSTKRSQQTVIPNIGSRPRVRNIPSRISIYWTIVKPGDILLINSTGNLIAPRGYFKIRSGKSSIMRSDAPIGRCNSECITPNGSIPNDKPFQNVNRITYGACPRYVKQNTLKLATGMRNVPEKQTRGIFGAIAGFIENGWEGMVDGWYGFRHQNSEGIGQAADLKSTQAAIDQINGKLNRLIGKTNEKFHQIEKEFSEVEGRIQDLEKYVEDTKIDLWSYNAELLVALENQHTIDLTDSEMNKLFEKTKKQLRENAEDMGNGCFKIYHKCDNACIGSIRNGTYDHDVYRDEALNNRFQIKGVELKSGYKDWILWISFAISCFLLCIALLGFIMWACQKGNIRCNICI

SEQ ID NO: 3189 - protein, 566 aa, Artificial Sequence; identical to SEQ ID NO: 2537
  derived and/or modified protein sequence (wt) from hemagglutinin__InfluenzaA__ACU80256

SEQ ID NO: 3190 - protein, 565 aa, Artificial Sequence; identical to SEQ ID NO: 2488
  derived and/or modified protein sequence (wt) from hemagglutinin__InfluenzaA__ACU80267

SEQ ID NO: 3191 - protein, 565 aa, Artificial Sequence; identical to SEQ ID NO: 3170
  derived and/or modified protein sequence (wt) from hemagglutinin__InfluenzaA__ACU80278

SEQ ID NO: 3192 - protein, 566 aa, Artificial Sequence; identical to SEQ ID NO: 2434
  derived and/or modified protein sequence (wt) from hemagglutinin__InfluenzaA__ACU80289

SEQ ID NO: 3193 - protein, 566 aa, Artificial Sequence; identical to SEQ ID NO: 2537
  derived and/or modified protein sequence (wt) from hemagglutinin__InfluenzaA__ACU80300

SEQ ID NO: 3194 - protein, 566 aa, Artificial Sequence
  derived and/or modified protein sequence (wt) from hemagglutinin__InfluenzaA__ACU80311
MRTIIALSYILCLVFAQKFPGNDNSTATLCLGHHAVPNGTIVKTITNDQIEVTNATELVQSSSTGEICDSPHQILDGENCTLIDALLGDPQCDGFQNKNWDLFVERSKAYSNCYPYDVPDYASLRSLVASSGTLEFNNESFNWTGVTQNGTSSACIRRSNNSFFSRLNWLTHSKFKYPALNVTMPNNENFDKLYIWGVHHPGTDNDQIFLYAQASGRITVSTKRSQQTVIPNIGSRPRVRNIPSRISIYWTIVKPGDILLINSTGNLIAPRGYFKIRSGKSSIMRSDAPIGKCNSECITPNGSIPNDKPFQNVNRITYGACPRYVKQNTLKLATGMRNVPEKQTRGIFGAIAGFIENGWEGMVDGWYGFRHQNSEGIGQAADLKSTQAAIDQINGKLNRLIGKTNEKFHQIEKEFSEVEGRIQDLEKYVEDTKIDLWSYNAELLVALENQHTIDLTDSEMNKLFEKTKKQLRENAEDMGNGCFKIYHKCDNACIGSIRNGTYDHDVYRDEALNNRFQIKGVELKSGYKDWILWISFAISCFLLCIALLGFIMWACQKGNIRCNICI

SEQ ID NO: 3195 - protein, 566 aa, Artificial Sequence; identical to SEQ ID NO: 2537
  derived and/or modified protein sequence (wt) from hemagglutinin__InfluenzaA__ACU80322

SEQ ID NO: 3196 - protein, 566 aa, Artificial Sequence; identical to SEQ ID NO: 2434
  derived and/or modified protein sequence (wt) from hemagglutinin__InfluenzaA__ACU80333

SEQ ID NO: 3197 - protein, 566 aa, Artificial Sequence; identical to SEQ ID NO: 2537
  derived and/or modified protein sequence (wt) from hemagglutinin__InfluenzaA__ACU80344

SEQ ID NO: 3198 - protein, 566 aa, Artificial Sequence; identical to SEQ ID NO: 2537
  derived and/or modified protein sequence (wt) from hemagglutinin__InfluenzaA__ACU80355

SEQ ID NO: 3199 - protein, 566 aa, Artificial Sequence; identical to SEQ ID NO: 2537
  derived and/or modified protein sequence (wt) from hemagglutinin__InfluenzaA__ACU80366

SEQ ID NO: 3200 - protein, 566 aa, Artificial Sequence
  derived and/or modified protein sequence (wt) from hemagglutinin__InfluenzaA__ACU80377
MKTIIALSYILCLVFAQKFPGNDNSTATLCLGHHAVPNGTIVKTITNDQIEVTNATELVQSSSTGEICDSPHQILDGENCTLIDALLGDPQCDGFQNKNWDLFVERSKAYSNCYPYDVPDYASLRSLVASSGTLEFNNESFNWTGVTQNGTSSACIRRSNNSFFSRLNWLTHSKFKYPALNVTMPNNENFDKLYIWGVHHPGTDNDQIFLYAQASGRITVSTKRSQQTVIPNIGSRPRVRNIPSRISIYWTIVKPGDILLINSTGNLIAPRGYFKIRSGKSSIMRSDAPIGKCNFECITPNGSIPNDKPFQNVNRITYGACPRYVKQNTLKLATGMRNVPEKQTRGIFGAIAGFIENGWEGMVDGWYGFRHQNSEGIGQAADLKSTQAAIDQINGKLNRLIGKTNEKFHQIEKEFSEVEGRIQDLEKYVEDTKIDLWSYNAELLVALENQHTIDLTDSEMNKLFEKTRKQLRENAEDMGNGCFKIYHKCDNACIGSIRNGTYDHDVYRDEALNNRFQIKGVELKSGYKDWILWISFAMSCFLLCIALLGFIMWACQKGNIRCNICI

SEQ ID NO: 3201 - protein, 566 aa, Artificial Sequence; identical to SEQ ID NO: 2537
  derived and/or modified protein sequence (wt) from hemagglutinin__InfluenzaA__ACU80388

SEQ ID NO: 3202 - protein, 566 aa, Artificial Sequence; identical to SEQ ID NO: 2434
  derived and/or modified protein sequence (wt) from hemagglutinin__InfluenzaA__ACU80399

SEQ ID NO: 3203 - protein, 565 aa, Artificial Sequence
  derived and/or modified protein sequence (wt) from hemagglutinin__InfluenzaA__ACU80410
MKVKLLVLLCTFTATYADTICIGYHANNSTDTVDTVLEKNVTVTHSVNLLENSHNGKLCLLKGIAPLQLGNCSVAGWILGNPECELLISKESWSYIVEKPNPENGTCYPGHFADYEELREQLSSVSSFERFEIFPKESSWPNHTVTGVSASCSHNGESSFYRNLLWLTGKNGLYPNLSKSYANNKEKEVLVLWGVHHPPNIGDQKALYHTENAYVSVVSSHYSRKFTPEIAKRPKVRDQEGRINYYWTLLEPGDTIIFEANGNLIAPRYAFALSRGFGSGIINSNAPMDKCDAKCQTPQGAINSSLPFQNVHPVTIGECPKYVRSAKLRMVTGLRNIPSIQSRGLFGAIAGFIEGGWTGMVDGWYGYHHQNEQGSGYAADQKSTQNAINGITNKVNSVIEKMNTQFTAVGKEFNKLERRMENLNKKVDDGFIDIWTYNAELLVLLENERTLDFHDSNVKNLYEKVKNQLKNNAKEIGNGCFEFYHKCNDECMESVKNGTYDYPKYSEESKLNREKIDGVKLESMGVYQILAIYSTVASSLVLLVSLGAISFWMCSNGSLQCRICI

SEQ ID NO: 3204 - protein, 566 aa, Artificial Sequence
  derived and/or modified protein sequence (wt) from hemagglutinin__InfluenzaA__ACU80424
MKTIIALSYILCLVFAQKFPGNDNSTATLCLGHHAVPNGTIVKTITNDQIEVTNATELVQSSSTGEICDSPHQILDGENCTLIDALLGDPQCDGFQNKNWDLFVERSKAYSNCYPYDVPDYASLRSLVASSGTLEFNNESFNWTGVTQNGTSSACIRRSNNSFFSRLNWLTHSKFKYPALNVTMPNNENFDKLYIWGVHHPGTDNDQIFLYAQASGRITVSTKRSQQTVIPNIGSRPRVRNIPSRISIYWTIVKPGDILLINSTGNLIAPRGYFKIRSGKSSIMRSDAPIGKCNFECITPNGSIPNDKPFQNVNRITYGACPRYVKQNTLKLATGMRNVPEKQTRGIFGAIAGFIENGWEGMVDGWYGFRHQNSEGIGQAADLKSTQAAIDQINGKLNRLIGKTNEKFHQIEKEFSEVEGRIQDLEKYVEDTKIDLWSYNAELLVALENQHTIDLTDSEMNKLFEKTRKQLRENAEDMGNGCFKIYHKCDNACIGSIRNGTYDHDVYRDEALNNRFQIKGVELKSGYKDWILWISFAISCFLLCIALLGFIMWACQKGNIRCNICI

SEQ ID NO: 3205 - protein, 566 aa, Artificial Sequence; identical to SEQ ID NO: 3204
  derived and/or modified protein sequence (wt) from hemagglutinin__InfluenzaA__ACU80435

SEQ ID NO: 3206 - protein, 565 aa, Artificial Sequence
  derived and/or modified protein sequence (wt) from hemagglutinin__InfluenzaA__ACU80446
MKVKLLVLLCTFTATYADTICIGYHANNSTDTVDTVLEKNVTVTHSVNLLENSHNGKLCLLKGIAPLQLGNCSVAGWILGNPECELLISKESWSYIVEKPNPENGTCYPGHFADYEELREQLSSVSSFERFEIFPKESSWPNHTVTGVSASCSHNGESSFYRNLLWLTGKNGLYPNLSKSYANNKEKEVLVLWGVHHPPNIGDQKTLYHTENAYVSVVSSHYSRKFTPEIAKRPKVRDQEGRINYYWTLLEPGDTIIFEANGNLIAPRYAFALSRGFGSGIINSNAPMDKCDAKCQTPQGAINSSLPFQNVHPVTIGECPKYVRSAKLRMVTGLRNIPSIQSRGLFGAIAGFIEGGWTGMVDGWYGYHHQNEQGSGYAADQKSTQNAINGITNKVNSVIEKMNTQFTAVGKEFNKLERRMENLNKKVDDGFIDIWTYNAELLVLLENERTLDFHDSNVKNLYEKVKSQLKNNAKEIGNGCFEFYHKCNDECMESVKNGTYDYPKYSEESKLNREKIDGVKLESMEVYQILAIYSTVASSLVLLVSLGAISFWMCSNGSLQCRICI

SEQ ID NO: 3207 - protein, 566 aa, Artificial Sequence; identical to SEQ ID NO: 2434
  derived and/or modified protein sequence (wt) from hemagglutinin__InfluenzaA__ACU80458

SEQ ID NO: 3208 - protein, 566 aa, Artificial Sequence; identical to SEQ ID NO: 2434
  derived and/or modified protein sequence (wt) from hemagglutinin__InfluenzaA__ACU80470

SEQ ID NO: 3209 - protein, 566 aa, Artificial Sequence; identical to SEQ ID NO: 2537
  derived and/or modified protein sequence (wt) from hemagglutinin__InfluenzaA__ACU80600

SEQ ID NO: 3210 - protein, 566 aa, Artificial Sequence; identical to SEQ ID NO: 3204
  derived and/or modified protein sequence (wt) from hemagglutinin__InfluenzaA__ACU80611

SEQ ID NO: 3211 - protein, 566 aa, Artificial Sequence; identical to SEQ ID NO: 2537
  derived and/or modified protein sequence (wt) from hemagglutinin__InfluenzaA__ACU80622

SEQ ID NO: 3212 - protein, 566 aa, Artificial Sequence; identical to SEQ ID NO: 2434
  derived and/or modified protein sequence (wt) from hemagglutinin__InfluenzaA__ACU80633

SEQ ID NO: 3213 - protein, 566 aa, Artificial Sequence
  derived and/or modified protein sequence (wt) from hemagglutinin__InfluenzaA__ACU80644
MKTIIALSYILCLVFAQKLPGNDNSTATLCLGHHAVPNGTIVKTITNDQIEVTNATELVQSSSTGEICDSPHQILDGENCTLIDALLGDPQCDGFQNKKWDLFVERSKAYSNCYPYDVPDYASLRSLVASSGTLEFNNESFNWTGVTQNGTSSACIRRSNNSFFSRLNWLTHSKFKYPALNVTMPNNEEFDKLYIWGVHHPGTDNDQIFLYAQASGRITVSTKRSQQTVIPNIGSRPRVRNIPSRISIYWTIVKPGDILLINSTGNLIAPRGYFKIRSGKSSIMRSDAPIGKCNSECITPNGSIPNDKPFQNVNRITYGACPRYVKQNTLKLATGMRNVPEKQTRGIFGAIAGFIENGWEGMVDGWYGFRHQNSEGIGQAADLKSTQAAIDQINGKLNRLIGKTNEKFHQIEKEFSEVEGRIQDLEKYVEDTKIDLWSYNAELLVALENQHTIDLTDSEMNKLFEKTKKQLRENAEDMGNGCFKIYHKCDNACIGSIRNGTYDHDVYRDEALNNRFQIKGVELKSGYKDWILWISFAISCFLLCVALLGFIMWACQKGNIRCNICI

SEQ ID NO: 3214 - protein, 566 aa, Artificial Sequence; identical to SEQ ID NO: 2434
  derived and/or modified protein sequence (wt) from hemagglutinin__InfluenzaA__ACU80655

SEQ ID NO: 3215 - protein, 566 aa, Artificial Sequence; identical to SEQ ID NO: 2434
  derived and/or modified protein sequence (wt) from hemagglutinin__InfluenzaA__ACU80666

SEQ ID NO: 3216 - protein, 566 aa, Artificial Sequence; identical to SEQ ID NO: 1928
  derived and/or modified protein sequence (wt) from hemagglutinin__InfluenzaA__ACU80677

SEQ ID NO: 3217 - protein, 566 aa, Artificial Sequence; identical to SEQ ID NO: 2434
  derived and/or modified protein sequence (wt) from hemagglutinin__InfluenzaA__ACU80688

SEQ ID NO: 3218 - protein, 566 aa, Artificial Sequence; identical to SEQ ID NO: 2537
  derived and/or modified protein sequence (wt) from hemagglutinin__InfluenzaA__ACU80699

SEQ ID NO: 3219 - protein, 566 aa, Artificial Sequence; identical to SEQ ID NO: 2537
  derived and/or modified protein sequence (wt) from hemagglutinin__InfluenzaA__ACU80710

SEQ ID NO: 3220 - protein, 566 aa, Artificial Sequence
  derived and/or modified protein sequence (wt) from hemagglutinin__InfluenzaA__ACU80721
MKTIIALSYILCLVFAQKLPGNDNSTATLCLGHHAVPNGTIVKTITNDQTEVTNATELVQSSSTGEICDSPHQILDGENCTLIDALLGDPQCDGFQNKKWDLFVERSKAYSNCYPYDVPDYASLRSLVASSGTLEFNNESFNWTGVTQNGTSSACIRRSNNSFFSRLNWLTHLKFKYPALNVTMPNNEQFDKLYIWGVHHPGTDNDQIFLYAQASGRITVSTKRSQQTVIPNIGSRPRVRNIPSRISIYWTIVKPGDILLINSTGNLIAPRGYFKIRSGKSSIMRSDAPIGKCNSECITPNGSIPNDKPFQNVNRITYGACPRYVKQNTLKLATGMRNVPEKQTRGIFGAIAGFIENGWEGMVDGWYGFRHQNSEGRGQAADLKSTQAAIDQINGKLNRLIGKTNEKFHQIEKEFSEVEGRIQDLEKYVEDTKIDLWSYNAELLVALENQHTIDLTDSEMNKLFEKTKKQLRENAEDMGNGCFKIYHKCDNACIGSIRNGTYDHDVYRDEALNNRFQIKGVELKSGYKDWILWISFAISCFLLCVALLGFIMWACQKGNIRCNICI

SEQ ID NO: 3221 - protein, 566 aa, Artificial Sequence; identical to SEQ ID NO: 2434
  derived and/or modified protein sequence (wt) from hemagglutinin__InfluenzaA__ACU80732

SEQ ID NO: 3222 - protein, 566 aa, Artificial Sequence; identical to SEQ ID NO: 2434
  derived and/or modified protein sequence (wt) from hemagglutinin__InfluenzaA__ACU80743

SEQ ID NO: 3223 - protein, 566 aa, Artificial Sequence
  derived and/or modified protein sequence (wt) from hemagglutinin__InfluenzaA__ACU80754
MKTIIALSYILCLVFAQKLPGNDNSTATLCLGHHAVPNGTIVKTITNDQIEVTNATELVQSSSTGEICDSPHQILDGENCTLIDALLGDPQCDGFQNKKWDLFVERSKAYSNCYPYDVPDYASLRSLVASSGTLEFNNESFNWTGVTQNGTSSACIRRSNNSFFSRLNWLTHLKFKYPALNVTMPNNEQFDKLYIWGVHHPGTDNDQIFLYAQASGRITVSTKRSQQTVIPNIGSRPRVRNIPSRISIYWTIVKPGDILLINSTGNLIAPRGYFKIRSGKSSIMRSDAPIGKCNSECITPNGSIPNDKPFQNVNRITYGACPRYVKQNTLKLATGMRNVPEKQTRGIFGAIAGFIENGWEGMVDGWYGFRHQNSEGRGQAADLKSTQAAIDQINGKLNRLIGKTNEKFHQIEKEFSEVEGRIQDLEKYVEDTKIDLWSYNAELLVALENQHTIDLTDSEMNKLFEKTKKQLRENAEDMGNGCFKIYHKCDNACIGSIRNGTYDHDVYRDEALNNRFQIKGVELKSGYKDWILWISFAISCFLLCVVLLGFIMWACQKGNIRCNICI

SEQ ID NO: 3224 - protein, 566 aa, Artificial Sequence
  derived and/or modified protein sequence (wt) from hemagglutinin__InfluenzaA__ACU80765
MKTIIALSYILCLVFAQKLPGNDNSTATLCLGHHAVPNGTIVKTITNDQIEVTNATELVQSSSTGEICDSPHQILDGENCTLIDALLGDPQCDGFQNKKWDLFVERSKAYSNCYPYDVPDYASLRSLVASSGTLEFNNESFNWTGVTQNGTSSACIRRSNNSFFSRLNWLTHSKFKYPALNVTMPNNEEFDKLYIWGVHHPGTDNDQIFLYAQASGRITVSTKRSQQTVIPNIGSRPRVRNIPSRISIYWTIVKPGDILLINSTGNLIAPRGYFKIRSGKSSIMRSDAPIGKCNSECITPNGSIPNDKPFQNVNRITYGACPRYVKQNTLKLATGMRNVPEKQTRGIFGAIAGFIENGWEGMVDGWYGFRHQNSEGIGQAADLKSTQAAIDQINGKLNRLIGKTNEKFHQIEKEFSEVEGRIQDLEKYVEDTKIDLWSYNAELLVALENQHTIDLTDSEMNKLFEKTKKQLRENAEDMGNGCFKIYHKCDNACIGSIRNGTYDHDVYRDEALNNRFQIKGVELKSGYKDWILWISFAISCFLLCIALLGFIMWACQKGNIRCNICI

SEQ ID NO: 3225 - protein, 566 aa, Artificial Sequence
  derived and/or modified protein sequence (wt) from hemagglutinin__InfluenzaA__ACU80787
MKTIIALSYILCLVFAQKLPGNDNSTATLCLGHHAVPNGTIVKTITNDQIEVTNATELVQSSSTGEICDSPHQILDGENCTLIDALLGDPQCDGFQNKKWDLFVERSKAYSNCYPYDVPDYASLRSLVASSGTLEFNNESFNWTGVTQNGTSSACIRRSNNSFFSRLNWLTHLKFKYPALNVTMPNNEQFDKLYIWGVHHPGTDNDQIFLYAQASGRITVSTKRSQQTVIPNIGSRPRVRNIPSRISIYWTIVKPGDILLINSTGNLIAPRGYFKIRSGKSSIMRSDAPIGKCNSECITPNGSIPNDKPFQNVNRITYGACPRYVKQNTLKLATGMRNVPEKQTRGIFGAIAGFIENGWEGMMDGWYGFRHQNSEGRGQAADLKSTQAAIDQINGKLNRLIGKTNEKFHQIEKEFSEVEGRIQDLEKYVEDTKIDLWSYNAELLVALENQHTIDLTDSEMNKLFEKTKKQLRENAEDMGNGCFKIYHKCDNACIGSIRNGTYDHDVYRDEALNNRFQIKGVELKSGYKDWILWISFAISCFLLCVALLGFIMWACQKGNIRCNICI

SEQ ID NO: 3226 - protein, 566 aa, Artificial Sequence; identical to SEQ ID NO: 2434
  derived and/or modified protein sequence (wt) from hemagglutinin__InfluenzaA__ACU80798

SEQ ID NO: 3227 - protein, 566 aa, Artificial Sequence; identical to SEQ ID NO: 2434
  derived and/or modified protein sequence (wt) from hemagglutinin__InfluenzaA__ACU81103

SEQ ID NO: 3228 - protein, 566 aa, Artificial Sequence
  derived and/or modified protein sequence (wt) from hemagglutinin__InfluenzaA__ACU87270
MKAILVVLLYTFATANADTLCIGYHANNSTDTVDTVLEKNVTVTHSVNLLEDKHNGKLCKLRGVAPLHLGKCNIAGWILGNPECESLSTASSWSYIVETSSSDNGTCYPGDFIDYEELREQLSSVSSFERFEIFPKTSSWPNHDSNKGVTAACPHAGAKSFYKNLIWLVKKGNSYPKLSKSYINDKGKEVLVLWGIHHPSTSADQQSLYQNADAYVFVGTSRYSKKFKPEIAIRPKVRDREGRMNYYWTLIEPGDKITFEATGNLVVPRYAFAMERNAGSGIIISDTPVHDCNTTCQTPKGAINTSLPFQNIHPITIGKCPKYVKSTKLRLATGLRNVPSIQSRGLFGAIAGFIEGGWTGMVDGWYGYHHQNEQGSGYAADLKSTQNAIDEITNKVNSVIEKMNTQFTAVGKEFNHLEKRIENLNKKVDDGFLDIWTYNAELLVLLENERTLDYHDSNVKNLYEKVRSQLKNNAKEIGNGCFEFYHKCDNTCMESVKNGTYDYPKYSEEAKLNREEIDGVKLESTRIYQILAIYSTVASSLVLVVSLGAISFWMCSNGSLQCRICI

SEQ ID NO: 3229 - protein, 566 aa, Artificial Sequence; identical to SEQ ID NO: 2669
  derived and/or modified protein sequence (wt) from hemagglutinin__InfluenzaA__ACV04228

SEQ ID NO: 3230 - protein, 566 aa, Artificial Sequence; identical to SEQ ID NO: 2669
  derived and/or modified protein sequence (wt) from hemagglutinin__InfluenzaA__ACV04238

SEQ ID NO: 3231 - protein, 566 aa, Artificial Sequence
  derived and/or modified protein sequence (wt) from hemagglutinin__InfluenzaA__ACV04248
MEAILVVLLYTFATANADTLCIGYHANNSTDTVDTVLEKNVTVTHSVNLLEDKHNGKLCKLRGVAPLHLGKCNIAGWILGNPECESLSTASSWSYIVETSSSDNGTCYPGDFIDYEELREQLSSVSSFERFEIFPKTSSWPNHDSNKGITAACPHAGAKSFYKNLIWLVKKGNSYPKLSKSYINDKGKEVLVLWGIHHPSTSADQQSLYQNADAYVFVGSSRYSKKFKPEIAIRPKVRDQEGRMNYYWTLVEPGDKITFEATGNLVVPRYAFAMERNAGSGIIISDTPVHDCNTTCQTPKGAINTSLPFHNIHPITIGKCPKYVKSTKLRLATGLRNVPSIQSRGLFGAIAGFIEGGWTGMVDGWYGYHHQNEQGSGYAADLKSTQNAIDEITNKVNSVIEKMNTQFTAVGKEFNHLEKRIENLNKKVDDGFLDIWTYNAELLVLLENERTLDYHDSNVKNLYEKVRSQLKNNAKEIGNGCFEFYHKCDNTCMESVKNGTYDYPKYSEEAKLNREEIDGVKLESTRIYQILAIYSTVASSLVLVVSLGAISFWMCSNGSLQCRICI

SEQ ID NO: 3232 - protein, 566 aa, Artificial Sequence; identical to SEQ ID NO: 2669
  derived and/or modified protein sequence (wt) from hemagglutinin__InfluenzaA__ACV04258

SEQ ID NO: 3233 - protein, 566 aa, Artificial Sequence; identical to SEQ ID NO: 2669
  derived and/or modified protein sequence (wt) from hemagglutinin__InfluenzaA__ACV04268

SEQ ID NO: 3234 - protein, 566 aa, Artificial Sequence; identical to SEQ ID NO: 2669
  derived and/or modified protein sequence (wt) from hemagglutinin__InfluenzaA__ACV04278

SEQ ID NO: 3235 - protein, 566 aa, Artificial Sequence; identical to SEQ ID NO: 2669
  derived and/or modified protein sequence (wt) from hemagglutinin__InfluenzaA__ACV04288

SEQ ID NO: 3236 - protein, 566 aa, Artificial Sequence
  derived and/or modified protein sequence (wt) from hemagglutinin__InfluenzaA__ACV04298
MKAILVVLLYTFATANADTLCIGYHANNSTDTVDTVLEKNVTVTHSVNLLEDKHNGKLCKLRGVAPLHLGKCNIAGWILGNPECESLSTASSWSYIVETSSSDNGTCYPGDFIDYEELREQLSSVSSFERFEIFPKTSSWPNHDSNKGVTAACPHAGAKSFYKNLIWLVKKGNSYPKLSKSYINDKGKEVLVLWGIHHPSTSADQQSLYQNADAYVFVGTSRYSKKFKPEIAIRPKVRDQEGRMNYYWTLVEPGDKITFEATGNLVVPRYAFAMERNAGSGIIISDTPVHDCNTTCQTPKGAINTSLPFQNIHPVTIGKCPKYVKSTKLRLATGLRNVPSIQSRGLFGAIAGFIEGGWTGMVDGWYGYHHQNEQGSGYAADLKSTQNAIDEITNKVNSVIEKMNTQFTAVGKEFNHLEKRIENLNKKVDDGFLDIWTYNAELLVLLENERTLDYHDSNVKNLYEKVRSQLKNNAKEIGNGCFEFYHKCDNTCMESVKNGTYDYPKYSEEAKLNREEIDGVKLESTRIYQILAIYSTVASSLVLVVSLGAISFWMCSNGSLQCRICI

SEQ ID NO: 3237 - protein, 566 aa, Artificial Sequence; identical to SEQ ID NO: 2669
  derived and/or modified protein sequence (wt) from hemagglutinin__InfluenzaA__ACV04308

SEQ ID NO: 3238 - protein, 566 aa, Artificial Sequence
  derived and/or modified protein sequence (wt) from hemagglutinin__InfluenzaA__ACV04318
MKAILVVLLYTFATANADTLCIGYHANNSTDTVDTVLEKNVTVTHSVNLLEDKHNGKLCKLRGVAPLHLGKCNIAGWILGNPECESLSTASSWSYIVETSSSDNGTCYPGDFIDYEELREQLSSVSSFERFEIFPKTSSWPNHDSNKGVTAACPHAGAKSFYKNLIWLVKKGNSYPKLSKSYINDKGKEVLVLWGIHHPSTSADQQSLYQNADAYVFVGTSRYSKKFKPEIAIRPKVRDQEGRMNYYWTLVEPGDKITFEATGNLVVPRYAFAMERNAGSGIIISDTPVHNCNTTCQTPKGAINTSLPFQNIHPITIGKCPKYVKSTKLRLATGLRNVPSIQSRGLFGAIAGFIEGGWTGMVDGWYGYHHQNEQGSGYAADLKSTQNAIDEITNKVNSVIEKMNTQFTAVGKEFNHLEKRIENLNKKVDDGFLDIWTYNAELLVLLENERTLDYHDSNVKNLYEKVRSQLKNNAKEIGNGCFEFYHKCDNTCMESVKNGTYDYPKYSEEAKLNREEIDGVKLESTRIYQILAIYSTVASSLVLVVSLGAISFWMCSNGSLQCRICI

SEQ ID NO: 3239 - protein, 566 aa, Artificial Sequence; identical to SEQ ID NO: 2669
  derived and/or modified protein sequence (wt) from hemagglutinin__InfluenzaA__ACV04328

SEQ ID NO: 3240 - protein, 566 aa, Artificial Sequence; identical to SEQ ID NO: 2669
  derived and/or modified protein sequence (wt) from hemagglutinin__InfluenzaA__ACV04338

SEQ ID NO: 3241 - protein, 566 aa, Artificial Sequence; identical to SEQ ID NO: 2911
  derived and/or modified protein sequence (wt) from hemagglutinin__InfluenzaA__ACV04358

SEQ ID NO: 3242 - protein, 566 aa, Artificial Sequence
  derived and/or modified protein sequence (wt) from hemagglutinin__InfluenzaA__ACV04368
MKAILVVLLYTFATANADTLCIGYHANNSTDTVDTVLEKNVTVTHSVNLLEDKHNGKLCQLRGVAPLHLGKCNIAGWILGNPECESLSTASSWSYIVETSSSDNGTCYPGDFIDYEELREQLSSVSSFERFEIFPKTSSWPNHDSNKGVTAACPHAGAKSFYKNLIWLVKKGNSYPKLSKSYINDKGKEVLVLWGIHHPSTSADQQSLYQNADAYVFVGTSRYSKKFKPEIAIRPKVRDQEGRMNYYWTLVEPGDKITFEATGNLVVPRYAFAMERNAGSGIIISDTPVHDCNTTCQTPKGAINTSLPFQNIHPITIGKCPKYVKSTKLRLATGLRNVPSIQSRGLFGAIAGFIEGGWTGMVDGWYGYHHQNEQGSGYAADLKSTQNAIDEITNKVNSVIEKMNTQFTAVGKEFNHLEKRIENLNKKVDDGFLDIWTYNAELLVLLENERTLDYHDSNVKNLYEKVRSQLKNNAKEIGNGCFEFYHKCDNTCMESVKNGTYDYPKYSEEAKLNREEIDGVKLESTRIYQILAIYSTVASSLVLVVSLGAISFWMCSNGSLQCRICI

SEQ ID NO: 3243 - protein, 566 aa, Artificial Sequence
  derived and/or modified protein sequence (wt) from hemagglutinin__InfluenzaA__ACV04378
MKAILVVLLYTFATANADTLCIGYHANNSTDTVDTVLEKNVTVTHSVNLLEDKHNGKLCKLRGVAPLHLGKCNIAGWILGNPECESLSTASSWSYIVETSSSDNGTCYPGDFIDYEELREQLSSVSSFERFEIFPKTSSWPNHDSNKGVTAACPHAGAKSFYKNLIWLVKKGNSYPKLSKSYINDKGKEVLVLWGIHHPSTSADQQSLYQNADAYVFVGTSRYSKKFKPEIAIRPKVRDQEGRMNYYWTLVEPGDKITFEATGNLVVPRYAFAMERNAGSGIIISDTPVHDCNTTCQTPKGAINTSLPFQNIHPITIGKCPKYVKSTKLRLATGLRNIPSIQSRGLFGAIAGFIEGGWTGMVDGWYGYHHQNEQGSGYAADLKSTQNAIDEITNKVNSVIEKMNTQFTAVGKEFNHLEKRIENLNKKVDDGFLDIWTYNAELLVLLENERTLDYHDSNVKNLYEKVRSQLKNNAKEIGNGCFEFYHKCDNTCMESVKNGTYDYPKYSEEAKLNREEIDGVKLESTRIYQILAIYSTVASSLVLIVSLGAISFWMCSNGSLQCRICI

SEQ ID NO: 3244 - protein, 566 aa, Artificial Sequence; identical to SEQ ID NO: 2911
  derived and/or modified protein sequence (wt) from hemagglutinin__InfluenzaA__ACV04388

SEQ ID NO: 3245 - protein, 566 aa, Artificial Sequence; identical to SEQ ID NO: 2669
  derived and/or modified protein sequence (wt) from hemagglutinin__InfluenzaA__ACV04398

SEQ ID NO: 3246 - protein, 566 aa, Artificial Sequence; identical to SEQ ID NO: 2913
  derived and/or modified protein sequence (wt) from hemagglutinin__InfluenzaA__ACV04408

SEQ ID NO: 3247 - protein, 566 aa, Artificial Sequence; identical to SEQ ID NO: 2669
  derived and/or modified protein sequence (wt) from hemagglutinin__InfluenzaA__ACV04489

SEQ ID NO: 3248 - protein, 566 aa, Artificial Sequence; identical to SEQ ID NO: 2669
  derived and/or modified protein sequence (wt) from hemagglutinin__InfluenzaA__ACV04499

SEQ ID NO: 3249 - protein, 566 aa, Artificial Sequence; identical to SEQ ID NO: 2849
  derived and/or modified protein sequence (wt) from hemagglutinin__InfluenzaA__ACV04509

SEQ ID NO: 3250 - protein, 566 aa, Artificial Sequence; identical to SEQ ID NO: 2669
  derived and/or modified protein sequence (wt) from hemagglutinin__InfluenzaA__ACV04519

SEQ ID NO: 3251 - protein, 566 aa, Artificial Sequence; identical to SEQ ID NO: 2669
  derived and/or modified protein sequence (wt) from hemagglutinin__InfluenzaA__ACV04529

SEQ ID NO: 3252 - protein, 566 aa, Artificial Sequence; identical to SEQ ID NO: 2669
  derived and/or modified protein sequence (wt) from hemagglutinin__InfluenzaA__ACV04549

SEQ ID NO: 3253 - protein, 566 aa, Artificial Sequence; identical to SEQ ID NO: 2669
  derived and/or modified protein sequence (wt) from hemagglutinin__InfluenzaA__ACV04559

SEQ ID NO: 3254 - protein, 566 aa, Artificial Sequence; identical to SEQ ID NO: 2669
  derived and/or modified protein sequence (wt) from hemagglutinin__InfluenzaA__ACV04579

SEQ ID NO: 3255 - protein, 566 aa, Artificial Sequence
  derived and/or modified protein sequence (wt) from hemagglutinin__InfluenzaA__ACV04751
MEAILVVMLYTFATANADTLCIGYHANNSTDTVDTVLEKNVTVTHSVNLLEDKHNGKLCKLRGVAPLRLGKCNIAGWILGNPECESLSTASSWSYIVETSSSDNGTCYPGDFIDYEELREQLSSVSSFERFEIFPKTSSWPNHDSNKGVTAACPHAGAKSFYKNLIWLVKKGNSYPKLSKSYINDKGKEVLVLWGIHHPSTSADQQSLYQNADAYVFVGTSRYSKKFKPEIAIRPKVRDQEGRMNYYWTLVEPGDKITFEATGNLVVPRYAFAMERNAGSGIIISDTPVHNCNTTCQTPKGAINTSLPFQNIHPITIGKCPKYVKSTKLRLATGLRNVPSIQSRGLFGAIAGFIEGGWTGMVDGWYGYHHQNEQGSGYAADLKSTQNAIDEITNKVNSVIEKMNTQFTAVGKEFNHLEKRIENLNKKVDDGFLDIWTYNAELLVLLENERTLDYHDSNVKNLYEKVRSQLKNNTKEIGNGCFEFYHKCDNTCMESVKNGTYDYPKYSEEAKLNREEIDGVKLESTRIYQILAIYSTVASSLVLVVSLGAISFWMCSNGSLQCRICI

SEQ ID NO: 3256 - protein, 566 aa, Artificial Sequence
  derived and/or modified protein sequence (wt) from hemagglutinin__InfluenzaA__ACV04752
MEAILVVLLYTFATANADTLCIGYHANNSTDTVDTVLEKNVTVTHSVNILEDKHNGKLCKLRGVAPLHLGKCNIAGWILENPECESLSTASSWSYIVETSSSDNGTCYPGDFIDYEELREQLSSVSSFERFEIFPKTSSWPNHDSNKGVTAACPHAGAKSFYKNLIWLVKKGNSYPKLSKSYINDKGKEVLVLWGIHHPSTSADQQSLYQNADAYVFVGSSRYSKKFKPEIAIRPKVRDQEGRMNYYWTLVEPGDKITFEATGNLVVPRYAFAMERNAGSGIIISDTPVHDCNTTCQTPKGAINTSLPFHNIHPITIGKCPKYVKSTKLRLATGLRNVPSIQSRGLFGAIAGFIEGGWTGMVDGWYGYHHQNEQGSGYAADLKSTQNAIDEITNKVNSVIEKMNTQFTAVGKEFNHLEKRIENLNKKVDDGFLDIWTYNAELLVLLENERTLDYHDSNVKNLYEKVRSQLKNNAKEIGNGCFEFYHKCDNTCMESVKNGTYDYPKYSEEAKLNREEIDGVKLESTRIYQILAIYSTVASSLVLVVSLGAISFWMCSNGSLQCRICI

SEQ ID NO: 3257 - protein, 566 aa, Artificial Sequence
  derived and/or modified protein sequence (wt) from hemagglutinin__InfluenzaA__ACV04753
MEAILVVLLYTFATANADTLCIGYHANNSTDTVDTVLEKNVTVTHSVNLLEDKHNGKLCKLRGVAPLHLGKCNIAGWILGNPECESLSTASSWSYIVETSSSDNGTCYPGDFIDYEELREQLSSVSSFERFEIFPKTSSWPNHDSNKGVTAACPHAGAKSFYKNLIWLVKKGNSYPKLSKSYINDKGKEVLVLWGIHHPSTSADQQSLYQNADAYVFVGTSRYSKKFKPEIAIRPKVRDREGRMNYYWTLVEPGDKITFEATGNLVVPRYAFAMERNAGSGIIISDTPVHDCNTTCQTPKGAINTSLPFQNIHPITIGKCPKYVKSTKLRLATGLRNVPSIQSRGLFGAIAGFIEGGWTGMVDGWYGYHHQNEQGSGYAADLKSTQNAIDEITNKVNSVIEKMNTQFTAVGKEFNHLEKRIENLNKKVDDGFLDIWTYNAELLVLLENERTLDYHDSNVKNLYEKVRSQLKNNAKEIGNGCFEFYHKCDNTCMESVKNGTYDYPKYSEEAKLNREEIDGVKLESTRIYQILAIYSTVASSLVLVVSLGAISFWMCSNGSLQCRICI

SEQ ID NO: 3258 - protein, 566 aa, Artificial Sequence
  derived and/or modified protein sequence (wt) from hemagglutinin__InfluenzaA__ACV04754
MEAILVVLLYTFATANADTLCIGYHANNSTDTVDTVLEKNVPVTHSVNLLKDKHNGKLCKLRGVAPLHLGKCNIAGWILGNPECESLSTASSWSYIVETSSSDNGTCYPGDFIDYEELREQLSSVSSFERFEIFPKTSSWPNHESNKGVTAACPHAGAKSFYKNLIWLVKKGNSYPKLSKSYINDKGKEVLVLWGIHHPSTSADQQSLYQNADAYVFVGTSRYSKKFKPEIAIRPKVRDQEGRMNYYWTLVEPGDKITFEATGNLVVPRYAFAMERNAGSGIIISDTPVHDCNTTCQTPKGAINTSLPFQNIHPITIGKCPKYVKSTKLRLATGLRNVPSIQSRGVFGAIAGFIEGGWTGMVDGWYGYHHQNEQGSGYAADLKSTQNAIDEITNKVNSVIEKMNTQFTAVGKEFNHLEKRIENLNKKVDDGFLDIWTYNAELLVLLENERTLDYHDSNVKNLYEKVRSQLKNNAKEIGNGCFEFYHKCDNTCMESVKNGTYDYPKYSEEAKLNREEIDGVKLESTRIYQILAIYSTVASSLVLVVSLGAISFWMCSNGSLQCRICI

SEQ ID NO: 3259 - protein, 566 aa, Artificial Sequence; identical to SEQ ID NO: 3154
  derived and/or modified protein sequence (wt) from hemagglutinin__InfluenzaA__ACV04755

SEQ ID NO: 3260 - protein, 566 aa, Artificial Sequence; identical to SEQ ID NO: 2849
  derived and/or modified protein sequence (wt) from hemagglutinin__InfluenzaA__ACV33084

SEQ ID NO: 3261 - protein, 566 aa, Artificial Sequence; identical to SEQ ID NO: 2669
  derived and/or modified protein sequence (wt) from hemagglutinin__InfluenzaA__ACV33094

SEQ ID NO: 3262 - protein, 566 aa, Artificial Sequence; identical to SEQ ID NO: 2669
  derived and/or modified protein sequence (wt) from hemagglutinin__InfluenzaA__ACV33104

SEQ ID NO: 3263 - protein, 566 aa, Artificial Sequence; identical to SEQ ID NO: 2669
  derived and/or modified protein sequence (wt) from hemagglutinin__InfluenzaA__ACV33114

SEQ ID NO: 3264 - protein, 566 aa, Artificial Sequence; identical to SEQ ID NO: 2669
  derived and/or modified protein sequence (wt) from hemagglutinin__InfluenzaA__ACV33124

SEQ ID NO: 3265 - protein, 566 aa, Artificial Sequence; identical to SEQ ID NO: 2669
  derived and/or modified protein sequence (wt) from hemagglutinin__InfluenzaA__ACV33134

SEQ ID NO: 3266 - protein, 566 aa, Artificial Sequence; identical to SEQ ID NO: 3231
  derived and/or modified protein sequence (wt) from hemagglutinin__InfluenzaA__ACV33144

SEQ ID NO: 3267 - protein, 566 aa, Artificial Sequence; identical to SEQ ID NO: 2669
  derived and/or modified protein sequence (wt) from hemagglutinin__InfluenzaA__ACV33154

SEQ ID NO: 3268 - protein, 566 aa, Artificial Sequence; identical to SEQ ID NO: 2669
  derived and/or modified protein sequence (wt) from hemagglutinin__InfluenzaA__ACV33164

SEQ ID NO: 3269 - protein, 566 aa, Artificial Sequence; identical to SEQ ID NO: 2669
  derived and/or modified protein sequence (wt) from hemagglutinin__InfluenzaA__ACV33174

SEQ ID NO: 3270 - protein, 566 aa, Artificial Sequence; identical to SEQ ID NO: 2656
  derived and/or modified protein sequence (wt) from hemagglutinin__InfluenzaA__ACV41981

SEQ ID NO: 3271 - protein, 566 aa, Artificial Sequence; identical to SEQ ID NO: 2695
  derived and/or modified protein sequence (wt) from hemagglutinin__InfluenzaA__ACV41991

SEQ ID NO: 3272 - protein, 566 aa, Artificial Sequence; identical to SEQ ID NO: 2695
  derived and/or modified protein sequence (wt) from hemagglutinin__InfluenzaA__ACV42001

SEQ ID NO: 3273 - protein, 566 aa, Artificial Sequence; identical to SEQ ID NO: 2669
  derived and/or modified protein sequence (wt) from hemagglutinin__InfluenzaA__ACV42008

SEQ ID NO: 3274 - protein, 566 aa, Artificial Sequence; identical to SEQ ID NO: 2669
  derived and/or modified protein sequence (wt) from hemagglutinin__InfluenzaA__ACV42018

SEQ ID NO: 3275 - protein, 566 aa, Artificial Sequence; identical to SEQ ID NO: 2316
  derived and/or modified protein sequence (wt) from hemagglutinin__InfluenzaA__ACV49501

SEQ ID NO: 3276 - protein, 566 aa, Artificial Sequence
  derived and/or modified protein sequence (wt) from hemagglutinin__InfluenzaA__ACV49512
MKTIIALSYIFCLALGQDLPGNDNSTATLCLGHHAVPNGTLVKTITDDQIEVTNATELVQSSSTGKICNNPHRILDGIDCTLIDALLGDPHCDVFQNETWDLFVERSKAFSNCYPYDVPDYASLRSLVASSGTLEFITEGFTWTGVTQNGGSNACKRGPGSGFFSRLNWLTKSGSTYPVLNVTMPNNDNFDKLYIWGVHHPSTNQEQTSLYVQASGRVTVSTRRSQQTIIPNIESRPWVRGLSSRISIYWTIVKPGDVLVINSNGNLIAPRGYFKMRTGKSSIMRSDAPIDTCISECITPNGSIPNDKPFQNVNKITYGACPKYVKQNTLKLATGMRNVPEKQTRGLFGAIAGFIENGWEGMIDGWYGFRHQNSEGTGQAADLKSTQAAIDQINGKLNRVIEKTNEKFHQIEKEFSEVEGRIQDLEKYVEDTKIDLWSYNAELLVALENQHTIDLTDSEMNKLFEKTRRQLRENAEDMGNGCFKIYHKCDNACIESIRNGTYDHDVYRDEALNNRFQIKDVELKSGYKDWILWISFAISCFLLCVVLLGFIMWACQRGNIRCNICI

SEQ ID NO: 3277 - protein, 566 aa, Artificial Sequence; identical to SEQ ID NO: 2329
  derived and/or modified protein sequence (wt) from hemagglutinin__InfluenzaA__ACV49523

SEQ ID NO: 3278 - protein, 565 aa, Artificial Sequence
  derived and/or modified protein sequence (wt) from hemagglutinin__InfluenzaA__ACV49545
MKANLLVLLCALAAADADTICIGYHANNSTDTVDTVLEKNVTVTHSVNLLEDSHNGKLCRLKGIAPLQLGKCNIAGWLLGNPECDPLLPVRSWSYIVETPNSENGICYPGDFIDYEELREQLSSVSSFERFEIFPKESSWPNHNTNGVTAACSHEGKSSFYRNLLWLTEKEGSYPKLKNSYVNKKGKEVLVLWGIHHPPNSKEQQNLYQNENAYVSVVTSNYNRRFTPEIAERPKVRDQAGRMNYYWTLLKPGDTIIFEANGNLIAPMYAFALSRGFGSGIITSNASMHECNTKCQTPLGAINSSLPYQNIHPVTIGECPKYVRSAKLRMVTGLRNIPSIQSRGLFGAIAGFIEGGWTGMIDGWYGYHHQNEQGSGYAADQKSTQNAINGITNKVNTVIEKMNIQFTAVGKEFNKLEKRMENLNKKVDDGFLDIWTYNAELLVLLENERTLDFHDSNVKNLYEKVKSQLKNNAKEIGNGCFEFYHKCDNECMESVRNGTYDYPKYSEESKLNREKVDGVKLESMGIYQILAIYSTVASSLVLLVSLGAISFWMCSNGSLQCRICI

SEQ ID NO: 3279 - protein, 566 aa, Artificial Sequence
  derived and/or modified protein sequence (wt) from hemagglutinin__InfluenzaA__ACV49556
MKARLLILLCALAATDADTICIGYHANNSTDTVDTVLEKNVTVTHSVNLLEDSHNGKLCRLKGIAPLQLGKCNIAGWILGNPECDSLLPASSWSYIVETPNSKNGICYPGDFIDYEELREQLSSVSSFERFEIFPKESSWPKHSTTKGVTAACSHAGKSSFYRNLLWLTKKEDSYPKLSNSYVNKKGKEVLVLWGVHHPSSSKEQQTLYQNENAYVSVVSSNYNRRFIPEIAERPEVKDQAGRINYYWTLLEPGDTIIFEANGNLVAPWYAFALSRGFGSGIITSNASMHECNTKCQTPQGAINSSLPFQNIHPVTIGECPKYVKSAKLRMVTGLRNIPSIQSRGLFGAIAGFIEGGWTGMIDGWYGYHHQNEQGSGYAADQKSTQNAINGITNKVNSVIEKMNTQFTAVGKEFNNLEKRMENLNKKVDDGFLDIWTYNAELLVLLENERTLDFHDSNVKNLYEKVKIQLKNNAKEIGNGCFEFYHKCDNECMESVRNGTYDYPKYSKESKLNREKIDGVKLESMGVYQILAIYSTVASSLVLLVSLGAISFWMCSNGSLQCRICI

SEQ ID NO: 3280 - protein, 566 aa, Artificial Sequence
  derived and/or modified protein sequence (wt) from hemagglutinin__InfluenzaA__ACV49567
MKAKLLILLCALTATDADTICIGYHANNSTDTVDTVLEKNVTVTHSVNLLEDSHNGKLCRLKGIAPLQLGKCNIAGWILGNPECESLLSKRSWSYIAETPNSENGACYPGDFADYEELREQLSSVSSFERFEIFPKERSWPKHNITRGVTAACSHAGKSSFYKNLLWLTETDGSYPKLSKSYVNNKEKEVLVLWGVHHPSNIEDQKTLYRKENAYVSVVSSNYNRRFTPEIAERPKVRGQAGRINYYWTLLEPGDTIIFEANGNLIAPWYAFALSRDFGSGIITSNASMDECDTKCQTPQGAINSSLPFQNIHPVTIGECPKYVKSTKLRMVTGLRNIPSIQSRGLFGAIAGFIEGGWTGMIDGWYGYHHQNEQGSGYAADQKSTQNAINWITNKVNSVIEKMNTQFTAVGKEFNKLEKRMENLNKKVDDGFLDIWTYNAELLVLLENERTLDFHDSNVKNLYEKVKNQLRNNAKEIGNGCFEFYHKCNNECMESVKNGTYDYPKYSEESKLNREKIDGVKLESMGVYQILAIYSTVASSLVLLVSLGAISFWMCSNGSLQCRICI

SEQ ID NO: 3281 - protein, 562 aa, Artificial Sequence
  derived and/or modified protein sequence (wt) from hemagglutinin__InfluenzaA__ACV49578
MAIIYLILLFTAVRGDQICIGYHANNSTEKVDTILERNVTVTHAKDILEKTHNGKLCKLNGIPPLELGDCSIAGWLLGNPECDRLLRVPEWSYIMEKENPKYSLCYPGSFNDYEELKHLLSSVKHFEKVKILPKDRWTQHTTTGGSRACAVSGNPSFFRNMVWLTKKGPNYPVAKGSYNNTSGEQMLIIWGVHHPIDEAEQIALYQKVGTYVSASTSTLNKRSTPEIAARPEVNGLGSRMEFSWTLLDMWDTINFESTGNLVAPEYGFKISKRGSSGIMKTEGTLENCETKCQTPLGAINTTLPFHNVHPLTIGECPKYVKSEKLVLATGLRNVPQIESRGLFGAIAGFIEGGWQGMVDGWYGYHHSNDQGSGYAADKESTQKAFDGITNKVNSVIEKMNTQFEAVGKEFSNLEKRLENLNKKMEDGFLDVWTYNAELLVLMENERTLDFHDSNVKNLYDKVRMQLRDNVKELGNGCFEFYHKCDDECMDSVKNGTYDYPKYEEESKLNRNEIKGVKLSSMGVYQILAIYATVAGSLSLAIMMAGISFWMCSNGSLQCRICI

SEQ ID NO: 3282 - protein, 562 aa, Artificial Sequence; identical to SEQ ID NO: 3281
  derived and/or modified protein sequence (wt) from hemagglutinin__InfluenzaA__ACV49589

SEQ ID NO: 3283 - protein, 562 aa, Artificial Sequence
  derived and/or modified protein sequence (wt) from hemagglutinin__InfluenzaA__ACV49600
MAIIYLILLFTAVRGDQICIGYHANNSTEKVDTILERNVTVTHAKDILEKTHNGKLCKLNGIPPLELGDCSIAGWLLGNPECDRLLSVPEWSYIMEKENPRDGLCYPGSFNDYEELKHLLSSVKHFEKVKILPKDRWTQHTTTGGSRACAVSGNPSFFRNMVWLTEKGSNYPVAKGSYNNTSGEQMLIIWGVHHPNDETEQRTLYQNVGTYVSVGTSTLNKRSTPEIATRPKVNGQGGRMEFSWTLLDMWDTINFESTGNLIAPEYGFKISKRGSSGIMKTEGTLENCETKCQTPLGAINTTLPFHNVHPLTIGECPKYVKSEKLVLATGLRNVPQIESRGLFGAIAGFIEGGWQGMVDGWYGYHHSNDQGSGYAADKESTQKAFDGITNKVNSVIEKMNTQFEAVGKEFSNLERRLENLNKKMEDGFLDVWTYNAELLVLMENERTLDFHDSNVKNLYDKVRMQLRDNVKELGNGCFEFYHKCDDECMNSVKNGTYDYPKYEEESKLNRNEIKGVKLSSMGVYQILAIYATVAGSLSLAIMMAGISFWMCSNGSLQCRICI

SEQ ID NO: 3284 - protein, 562 aa, Artificial Sequence
  derived and/or modified protein sequence (wt) from hemagglutinin__InfluenzaA__ACV49611
MAIIYLILLFTAVRGDQICIGYHANNSTEKVDTILERNVTVTHAKDILEKTHNGKLCKLNGIPPLELGDCSIAGWLLGNPECDRLLSVPEWSYIMEKENPRDGLCYPGSFNDYEELKHLLSSVKHFEKVKILPKDRWTQHTTTGGSRACAVSGNPSFFRNMVWLTEKGSNYPVAKGSYNNTSGEQMLIIWGVHHPNDETEQRTLYQNVGTYVSVGTSTLNKRSTPKIATRPKVNGQGGRMEFSWTLLDMWDTINFESTGNLIAPEYGFKISKRGSSGIMKTEGTLENCETKCQTPLGAINTTLPFHNVHPLTIGECPKYVKSEKLVLATGLRNVPQIESRGLFGAIAGFIEGGWQGMVDGWYGYHHSNDQGSGYAADKESTQKAFDGITNKVNSVIEKMNTQFEAVGKEFSNLERRLENLNKKVEDGFLDVWTYNAELLVLMENERTLDFHDSNVKNLYDKVRMQLRDNVKELGNGCFEFYHKCDDECMNSVKNGTYDYPKYEEESKLNRNEIKGVKLSSMGVYQILAIYATVAGSLSLAIMMAGISFWMCSNGSLQCRICI

SEQ ID NO: 3285 - protein, 566 aa, Artificial Sequence
  derived and/or modified protein sequence (wt) from hemagglutinin__InfluenzaA__ACV49633
MKTIIALSYILCLVFAQKLPGNDNSTATLCLGHHAVPNGTLVKTITNDQIEVTNATELVQSSSTGRICDSPHRILDGKNCTLIDALLGDPHCDGFQNKEWDLFVERSKAYSNCYPYDVPDYASLRSLVASSGTLEFTNEGFNWTGVAQDGTSYACKRGSVKSFFSRLNWLHKLEYKYPALNVTMPNNDKFDKLYIWGVHHPSTDSVQTSLYVQASGRVTVSTKRSQQTVIPNIGSRPWVRGISSRISIYWTIVKPGDILLINSTGNLIAPRGYFKIRSGKSSIMRSDAPIGNCNSECITPNGSIPNDKPFQNVNRITYGACPRYVKQNTLKLATGMRNVPEKQTRGIFGAIAGFIENGWEGMVDGWYGFRHQNSEGTGQAADLKSTQAAINQINGKLNRLIEKTNEKFPQIEKEFSEVEGRIQDLEKYVEDTKIDLWSYNAELLVALENQHTIDLTDSEMNKLFERTRKQLRENAEDMGNGCFKIYHKCDNACIGSIRNGTYDHDVYRDEALNNRFQIKGVELKSGYKDWILWISFAISCFLLCVVLLGFIMWACQKGNIRCNICI

SEQ ID NO: 3286 - protein, 566 aa, Artificial Sequence; identical to SEQ ID NO: 2356
  derived and/or modified protein sequence (wt) from hemagglutinin__InfluenzaA__ACV49644

SEQ ID NO: 3287 - protein, 565 aa, Artificial Sequence; identical to SEQ ID NO: 3175
  derived and/or modified protein sequence (wt) from hemagglutinin__InfluenzaA__ACV49676

SEQ ID NO: 3288 - protein, 566 aa, Artificial Sequence; identical to SEQ ID NO: 2656
  derived and/or modified protein sequence (wt) from hemagglutinin__InfluenzaA__ACV53450

SEQ ID NO: 3289 - protein, 566 aa, Artificial Sequence; identical to SEQ ID NO: 2656
  derived and/or modified protein sequence (wt) from hemagglutinin__InfluenzaA__ACV53460

SEQ ID NO: 3290 - protein, 566 aa, Artificial Sequence; identical to SEQ ID NO: 2656
  derived and/or modified protein sequence (wt) from hemagglutinin__InfluenzaA__ACV53480

SEQ ID NO: 3291 - protein, 566 aa, Artificial Sequence
  derived and/or modified protein sequence (wt) from hemagglutinin__InfluenzaA__ACV53490
MEAILVVLLYTFATANADTLCIGYHANNSTDTVDTVLEKNVTVTHSVNLLEDKHNGKLCKLRGVAPLHLGKCDIAGWILGNPECESLSTASSWSYIVETSSSDNGTCYPGDFIDYEELREQLSSVSSFERFEIFPKTSSWPNHDSNKGVTAACPHAGAKSFYKNLIWLVKKGNSYPKLSKSYINDKGKEVLVLWGIHHPSTSADQQSLYQNADAYVFVGSSRYSKKFKPEIAIRPKVRDQEGRMNYYWTLVEPGDKITFEATGNLVVPRYAFAMERNAGSGIIISDTPVHDCNTTCQTPKGAINTSLPFHNIHPITIGKCPKYVKSTKLRLATGLRNVPSIQSRGLFGAIAGFIEGGWTGMVDGWYGYHHQNEQGSGYAADLKSTQNAIDEITNKVNSVIEKMNTQFTAVGKEFNHLETRIENLNKKVDDGFLDIWTYNAELLVLLENERTLDYHDSNVKNLYEKVRSQLKNNAKEIGNGCFEFYHKCDNTCMESVKNGTYDYPKYSEEAKLNREEIDGVKLESTRIYQILAIYSTVASSLVLVVSLGAISFWMCSNGSLQCRICI

SEQ ID NO: 3292 - protein, 566 aa, Artificial Sequence
  derived and/or modified protein sequence (wt) from hemagglutinin__InfluenzaA__ACV53500
MEAILVVLLYTFATANADTLCIGYHANNSTDTVDTVLEKNVTVTHSVNLLEDKHNGKLCKLRGVAPLHLGKCNIAGWILGNPECESLSTASSWSYIVETSSSDNGTCYPGDFIDYEELREQLSSVSSFERFEIFPKTSSWPNHDSNKGVTAACPHAGAKSFYKNLIWLVKKGNSYPKLSKSYINDKGKEVLVLWGIHHPSTSADQQSLYQNADAYVFVGSSRYSKKFKPEIAIRPKVRDQEGRMNYYWTLVEPGDKITFEATGNLVVPRYAFAMERNAGSGIIISDTPVHDCNTTCQTPKGAINTSLPFHNIHPITIGKCPKYVKSTKLRLATGLRNVPSIQSRGLFGAIAGFIEGGWTGMVDGWYGYHHQNEQGSGYAADLKSTQNAIDEITNKVNSVIEKMNTQFTAVGKEFNHLETRIENLNKKVDDGFLDIWTYNAELLVLLENERTLDYHDSNVKNLYEKVRSQLKNNAKEIGNGCFEFYHKCDNTCMESVKNGTYDYPKYSEEAKLNREEIDGVKLESTRIYQILAIYSTVASSLVLVVSLGAISFWMCSNGSLQCRICI

SEQ ID NO: 3293 - protein, 566 aa, Artificial Sequence
  derived and/or modified protein sequence (wt) from hemagglutinin__InfluenzaA__ACV53880
MKAILVVLLYTFATANADTLCIGYHANNSTDTVDTVLEKNVTVTHSVNLLEDKHNGKLCKLRGVAPLHLGKCNIAGWILGNPECESLSTASSWSYIVETSSSDNGTCYPGDFIDYEELREQLSSVSSFERFEIFPKTSSWPNHDSNKGVTTACPHAGAKSFYKNLIWLVKKGNSYPKLSKSYINDKGKEVLVLWGIHHPSTSADQQSLYQNADAYVFVGTSRYSKKFKPEIAIRPKVRDQEGRMNYYWTLVEPGDKITFEATGNLVVPRYAFAMERNAGSGIIISDTPVHDCNTTCQTPKGAINTSLPFQNIHPITIGKCPKYVKSTKLRLATGLRNVPSIQSRGLFGAIAGFIEGGWTGMVDGWYGYHHQNEQGSGYAADLKSTQNAIDEITNKVNSVIEKMNTQFTAVGKEFNHLEKRIENLNKKVDDGFLDIWTYNAELLVLLENERTLDYHDSNVKNLYEKVRSQLKNNAKEIGNGCFEFYHKCDNTCMESVKNGTYDYPKYSEEAKLNREEIDGVKLESTRIYQILAIYSTVASSLVLVVSLGAISFWMCSNGSLQCRICI

SEQ ID NO: 3294 - protein, 566 aa, Artificial Sequence; identical to SEQ ID NO: 2669
  derived and/or modified protein sequence (wt) from hemagglutinin__InfluenzaA__ACV53881

SEQ ID NO: 3295 - protein, 566 aa, Artificial Sequence; identical to SEQ ID NO: 2656
  derived and/or modified protein sequence (wt) from hemagglutinin__InfluenzaA__ACV53882

SEQ ID NO: 3296 - protein, 566 aa, Artificial Sequence; identical to SEQ ID NO: 2669
  derived and/or modified protein sequence (wt) from hemagglutinin__InfluenzaA__ACV53883

SEQ ID NO: 3297 - protein, 566 aa, Artificial Sequence; identical to SEQ ID NO: 2669
  derived and/or modified protein sequence (wt) from hemagglutinin__InfluenzaA__ACV53885

SEQ ID NO: 3298 - protein, 566 aa, Artificial Sequence
  derived and/or modified protein sequence (wt) from hemagglutinin__InfluenzaA__ACV53899
MKAILVVLLYTFATANADTLCIGYHANNSTDTVDTVLEKNVTVTHSVNLLEDKHNGKLCKLRGVAPLHLGKCNIAGWILGNPECESLSTASSWSYIVETSSSDNGTCYPGDFIDYEELREQLSSVSSFERFEIFPKTSSWPNHDSNKGVTAACPHAGAKSFYKNLIWLVKKGNSYPKLSKSYINDKGKEVLVLWGIHHPSTSADQQSLYQNADAYVFVGTSRYSKKFKPEIAIRPKVRDQEGRMNYYWTLVEPGDKITFEATGNLVVPRYAFAMERNAGSGIIISDTPVHDCNTTCQTPEGAINTSLPFQNIHPITIGKCPKYVKSTKLRLATGLRNVPSIQSRGLFGAIAGFIEGGWTGMVDGWYGYHHQNEQGSGYAADLKSTQNAIDEITNKVNSVIEKMNTQFTAVGKEFNHLEKRIENLNKKVDDGFLDIWTYNAELLVLLENERTLDYHDSNVKNLYEKVRSQLKNNAKEIGNGCFEFYHKCDNTCMESVKNGTYDYPKYSEEAKLNREEIDGVKLESTRIYQILAIYSTVASSLVLVVSLGAISFWMCSNGSLQCRICI

SEQ ID NO: 3299 - protein, 566 aa, Artificial Sequence; identical to SEQ ID NO: 2669
  derived and/or modified protein sequence (wt) from hemagglutinin__InfluenzaA__ACV53909

SEQ ID NO: 3300 - protein, 566 aa, Artificial Sequence; identical to SEQ ID NO: 2669
  derived and/or modified protein sequence (wt) from hemagglutinin__InfluenzaA__ACV67220

SEQ ID NO: 3301 - protein, 566 aa, Artificial Sequence
  derived and/or modified protein sequence (wt) from hemagglutinin__InfluenzaA__ACV67221
MKAILVVLLYTFATANADTLCIGYHANNSTDTVDTVLEKNVTVTHSVNLLEDKHNGKLCKLRGVAPLHLGKCNIAGWILGNPECGSLSTASSWSYIVETSSSDNGTCYPGDFIDYEELREQLSSVSSFERFEIFPKTSSWPNHDSNKGVTAACPHAGAKSFYKNLIWLVKKGNSYPKLSKSYINDKGKEVLVLWGIHHPSTSADQQSLYQSADAYVFVGTSRYSKKFKPEIAIRPKVRDQEGRMNYYWTLVEPGDKITFEATGNLVVPRYAFAMERNAGSGIIISDTPVHDCNTTCQTPKGAINTSLPFQNIHPITIGKCPKYVKSTKLRLATGLRNVPSIQSRGLFGAIAGFIEGGWTGMVDGWYGYHHQNEQGSGYAADLKSTQNAIDEITNKVNSVIEKMNTQFTAVGKEFNHLEKRIENLNKKVDDGFLDIWTYNAELLVLLENERTLDYHDSNVKNLYEKVRSQLKNNAKEIGNGCFEFYHKCDNTCMESVKNGTYDYPKYSEEAKLNREEIDGVKLESTRIYQILAIYSTVASSLVLVVSLGAISFWMCSNGSLQCRICI

SEQ ID NO: 3302 - protein, 566 aa, Artificial Sequence; identical to SEQ ID NO: 2656
  derived and/or modified protein sequence (wt) from hemagglutinin__InfluenzaA__ACV67222

SEQ ID NO: 3303 - protein, 566 aa, Artificial Sequence; identical to SEQ ID NO: 2695
  derived and/or modified protein sequence (wt) from hemagglutinin__InfluenzaA__ACV67223

SEQ ID NO: 3304 - protein, 566 aa, Artificial Sequence; identical to SEQ ID NO: 2911
  derived and/or modified protein sequence (wt) from hemagglutinin__InfluenzaA__ACV67224

SEQ ID NO: 3305 - protein, 566 aa, Artificial Sequence; identical to SEQ ID NO: 2849
  derived and/or modified protein sequence (wt) from hemagglutinin__InfluenzaA__ACV67225

SEQ ID NO: 3306 - protein, 566 aa, Artificial Sequence; identical to SEQ ID NO: 2669
  derived and/or modified protein sequence (wt) from hemagglutinin__InfluenzaA__ACV67226

SEQ ID NO: 3307 - protein, 566 aa, Artificial Sequence
  derived and/or modified protein sequence (wt) from hemagglutinin__InfluenzaA__ACV67227
MKAILVVLLYTFATANADTLCIGYHANNSTDTVDTVLEKNVTVTHSVNLLEDKHNGKLCKLRGVAPLHLGKCNIAGWILGNPECESLSTASSWSYIVETSSSDNGTCYPGDFIDYEELREQLSSVSSFERFEIFPKTSSWPNHDSNKGVTAACPHAGAKSFYKNLIWLVKKGNSYPKLSKSYINDKGKEVLVLWGIHHPSTSADQQSLYQNADAYVFVGTSRYSKKFKPEIAIRPKVRDQEGRMNYYWTLVEPGDKITFEATGNLVVPRYAFAMERNAGSGIIISNTPVHDCNTTCQTPKGAINTSLPFQNIHPITIGKCPKYVKSTKLRLATGLRNVPSIQSRGLFGAIAGFIEGGWTGMVDGWYGYHHQNEQGSGYAADLKSTQNAIDEITNKVNSVIEKMNTQFTAVGKEFNHLEKRIENLNKKVDDGFLDIWTYNAELLVLLENERTLDYHDSNVKNLYEKVRSQLKNNAKEIGNGCFEFYHKCDNTCMESVKNGTYDYPKYSEEAKLNREEIDGVKLESTRIYQILAIYSTVASSLVLVVSLGAISFWMCSNGSLQCRICI

SEQ ID NO: 3308 - protein, 566 aa, Artificial Sequence; identical to SEQ ID NO: 2911
  derived and/or modified protein sequence (wt) from hemagglutinin__InfluenzaA__ACV67228

SEQ ID NO: 3309 - protein, 566 aa, Artificial Sequence
  derived and/or modified protein sequence (wt) from hemagglutinin__InfluenzaA__ACV67229
MKAILVVLLYTFATANADTLCIGYHANNSTDTVDTVLEKNVTVTHSVNLLEDKHNGKLCKLRGVAPLHLGKCNIAGWILGNPECESLSTASSWSYIVETSSSDNGTCYPGDFIDYEELREQLSSVSSFERFEIFPKTSSWPNHDSNKGVTAACPHAGAKSFYKNLIWLVKKGNSYPKLSKSYINDKGKEVLVLWGIHHPSTSADQQSLYQNADAYVFVGTSRYSKKFKPEIAIRPKVRDQEGRMNYYWTLVEPGDKITFEATGNLVVPRYAFAMERNAGSGIIISDTPVHDCNTTCQTPKGAINTSLPFQNIHPITIGKCPKYVKSTKLRLATGLRNVPSIQSRGLFGAIAGFIEGGWTGMVDGWYGYHHQNEQGSGYAADLKSTQNPIDEITNKVNSVIEKMNTQFTAVGKEFNHLEKRIENLNKKVDDGFLDIWTYNAELLVLLENERTLDYHDSNVKNLYEKVRSQLKNNAKEIGNGCFEFYHKCDNTCMESVKNGTYDYPKYSEEAKLNREEIDGVKLESTRIYQILAIYSTVASSLVLVVSLGAISFWMCSNGSLQCRICI

SEQ ID NO: 3310 - protein, 566 aa, Artificial Sequence; identical to SEQ ID NO: 2656
  derived and/or modified protein sequence (wt) from hemagglutinin__InfluenzaA__ACV67230

SEQ ID NO: 3311 - protein, 566 aa, Artificial Sequence; identical to SEQ ID NO: 2669
  derived and/or modified protein sequence (wt) from hemagglutinin__InfluenzaA__ACV67231

SEQ ID NO: 3312 - protein, 566 aa, Artificial Sequence; identical to SEQ ID NO: 2669
  derived and/or modified protein sequence (wt) from hemagglutinin__InfluenzaA__ACV67232

SEQ ID NO: 3313 - protein, 566 aa, Artificial Sequence; identical to SEQ ID NO: 2656
  derived and/or modified protein sequence (wt) from hemagglutinin__InfluenzaA__ACV67233

SEQ ID NO: 3314 - protein, 566 aa, Artificial Sequence; identical to SEQ ID NO: 2911
  derived and/or modified protein sequence (wt) from hemagglutinin__InfluenzaA__ACV67234

SEQ ID NO: 3315 - protein, 566 aa, Artificial Sequence
  derived and/or modified protein sequence (wt) from hemagglutinin__InfluenzaA__ACV67235
MKAILVVLLYTFATANADTLCIGYHANNSTDTVDTVLEKNVTVTHSVNLLEDKHNGKLCKLRGVAPLHLGKCNIAGWILGNPECESLSTASSWSYIVETSSSDNGTCYPGDFIDYEELREQLSSVSSFERFEIFPKTSSWPNHDSNKGVTAACPHAGAKSFYKNLIWLVKKGNSYPKLSKSYINDKGKEVLVLWGIHHPSTSADQQSLYQNADAYVFVGSSRYSKKFKPEIAIRPKVRDQEGRMNYYWTLVEPGDKITFEATGNLVVPRYAFAMERNAGSGIIISDTPVHDCNTTCQTPKGAINTSLPFQNIHPITIGKCPKYVKSTKLRLATGLRNVPSIQSRGLFGAIAGFIEGGWTGMVDGWYGYHHQNEQGSGYAADLKSTQNAIDEITNKVNSVIEKMNTQFTAVGKEFNHLEKRIENLNKKVDDGFLDIWTYNAELLVLLENERTLDYHDSNVKNLYEKVRSQLKNNANEIGNGCFEFYHKCDNTCMESVKNGTYDYPKYSEEAKLNREEIDGVKLESTRIYQILAIYSTVASSLVLVVSLGAISFWMCSNGSLQCRICI

SEQ ID NO: 3316 - protein, 566 aa, Artificial Sequence; identical to SEQ ID NO: 2913
  derived and/or modified protein sequence (wt) from hemagglutinin__InfluenzaA__ACV67236

SEQ ID NO: 3317 - protein, 566 aa, Artificial Sequence; identical to SEQ ID NO: 2656
  derived and/or modified protein sequence (wt) from hemagglutinin__InfluenzaA__ACV67238

SEQ ID NO: 3318 - protein, 566 aa, Artificial Sequence
  derived and/or modified protein sequence (wt) from hemagglutinin__InfluenzaA__ACV67239
MKAILVVLLYTFTTANADTLCIGYHANNSTDTVDTVLEKNVTVTHSVNLLEDKHNGKLCKLRGVAPLHLGKCNIAGWILGNPECESLSTASSWSYIVETSSSDNGTCYPGDFIDYEELREQLSSVSSFERFEIFPKTSSWPNHDSNKGVTAACPHAGAKSFYKNLIWLVKKGNSYPKLSKSYINDKGKEVLVLWGIHHPSTSADQQSLYQNADAYVFVGSSRYSKKFKPEIAIRPKVRDQEGRMNYYWTLVEPGDKITFEATGNLVVPRYAFAMERNAGSGIIISDTPVHDCNTTCQTPKGAINTSLPFQNIHPITIGKCPKYVKSTKLRLATGLRNVPSIQSRGLFGAIAGFIEGGWTGMVDGWYGYHHQNEQGSGYAADLKSTQNAIDEITNKVNSVIEKMNTQFTAVGKEFNHLEKRIENLNKKVDDGFLDIWTYNAELLVLLENERTLDYHDSNVKNLYEKVRSQLKNNAKEIGNGCFEFYHKCNNTCMESVKNGTYDYPKYSEEAKLNREEIDGVKLESTRIYQILAIYSTVASSLVLVVSLGAISFWMCSNGSLQCRICI

SEQ ID NO: 3319 - protein, 566 aa, Artificial Sequence; identical to SEQ ID NO: 2913
  derived and/or modified protein sequence (wt) from hemagglutinin__InfluenzaA__ACV67240

SEQ ID NO: 3320 - protein, 566 aa, Artificial Sequence
  derived and/or modified protein sequence (wt) from hemagglutinin__InfluenzaA__ACV67241
MKAILVVLLYTFATANADTLCIGYHANNSTDTVDTVLEKNVTVTHSVNLLEDKHNGKLCKLRGVAPLHLGKCNIAGWILGNPECESLSTASSWSYIVETSSSDNGTCYPGDFIDYEELREQLSSVSSFERFEIFPKTSSWPNHDSNKGVTAACPHAGAKSFYKNLIWLVKNGNSYPKLSKSYINDKGKEVLVLWGIHHPSTSADQQSLYQNADAYVFVGTSRYSKKFKPEIAIRPKVRDQEGRMNYYWTLVEPGDKITFEATGNLVVPRYAFAMERNAGSGIIISDTPVHDCNTTCQTPKGAINTSLPFQNIHPITIGKCPKYVKSTKLRLATGLRNVPSIQSRGLFGAIAGFIEGGWTGMVDGWYGYHHQNEQGSGYAADLKSTQNAIDEITNKVNSVIEKMNTQFTAVGKEFNHLEKRIENLNKKVDDGFLDIWTYNAELLVLLENERTLDYHDSNVKNLYEKVRSQLKNNAKEIGNGCFEFYHKCDNTCMESVKNGTYDYPKYSEEAKLNREEIDGVKLESTRIYQILAIYSTVASSLVLVVSLGAISFWMCSNGSLQCRICI

SEQ ID NO: 3321 - protein, 566 aa, Artificial Sequence; identical to SEQ ID NO: 2911
  derived and/or modified protein sequence (wt) from hemagglutinin__InfluenzaA__ACV67242

SEQ ID NO: 3322 - protein, 566 aa, Artificial Sequence; identical to SEQ ID NO: 2849
  derived and/or modified protein sequence (wt) from hemagglutinin__InfluenzaA__ACV67244

SEQ ID NO: 3323 - protein, 566 aa, Artificial Sequence; identical to SEQ ID NO: 2762
  derived and/or modified protein sequence (wt) from hemagglutinin__InfluenzaA__ACV67246

SEQ ID NO: 3324 - protein, 566 aa, Artificial Sequence; identical to SEQ ID NO: 3293
  derived and/or modified protein sequence (wt) from hemagglutinin__InfluenzaA__ACV67247

SEQ ID NO: 3325 - protein, 566 aa, Artificial Sequence; identical to SEQ ID NO: 2656
  derived and/or modified protein sequence (wt) from hemagglutinin__InfluenzaA__ACV70073

SEQ ID NO: 3326 - protein, 566 aa, Artificial Sequence; identical to SEQ ID NO: 2656
  derived and/or modified protein sequence (wt) from hemagglutinin__InfluenzaA__ACV70093

SEQ ID NO: 3327 - protein, 566 aa, Artificial Sequence; identical to SEQ ID NO: 2656
  derived and/or modified protein sequence (wt) from hemagglutinin__InfluenzaA__ACV70103

SEQ ID NO: 3328 - protein, 566 aa, Artificial Sequence; identical to SEQ ID NO: 2656
  derived and/or modified protein sequence (wt) from hemagglutinin__InfluenzaA__ACV70113

SEQ ID NO: 3329 - protein, 566 aa, Artificial Sequence; identical to SEQ ID NO: 2656
  derived and/or modified protein sequence (wt) from hemagglutinin__InfluenzaA__ACV70123

SEQ ID NO: 3330 - protein, 566 aa, Artificial Sequence; identical to SEQ ID NO: 2656
  derived and/or modified protein sequence (wt) from hemagglutinin__InfluenzaA__ACV70154

SEQ ID NO: 3331 - protein, 566 aa, Artificial Sequence
  derived and/or modified protein sequence (wt) from hemagglutinin__InfluenzaA__ACV70164
MKAILVVLLYTFTTANADTLCIGYHANNSTDTVDTVLEKNVTVTHSVNLLEDKHNGKLCKLRGVAPLHLGKCNIAGWILGNPECESLSTASSWSYIVETSSSDNGTCYPGDFIDYEELREQLSSVSSFERFEIFPKTSSWPNHDSNKGVTAACPHAGAKSFYKNLIWLVKKGNSYPKLSKSYINDKGKEVLVLWGIHHPSTSADQQSLYQNADAYVFVGSSRYSKKFKPEIAIRPKVRDQEGRMNYYWTLVEPGDKITFEATGNLVVPRYAFAMERNAGSGIIISDTPVHDCNTTCQTLKGAINTSLPFQNIHPITIGKCPKYVKSTKLRLATGLRNVPSIQSRGLFGAIAGFIEGGWTGMVDGWYGYHHQNEQGSGYAADLKSTQNAIDEITNKVNSVIEKMNTQFTAVGKEFNHLEKRIENLNKKVDDGFLDIWTYNAELLVLLENERTLDYHDSNVKNLYEKVRSQLKNNAKEIGNGCFEFYHKCDNTCMESVKNGTYDYPKYSEEAKLNREEIDGVKLESTRIYQILAIYSTVASSLVLVVSLGAISFWMCSNGSLQCRICI

SEQ ID NO: 3332 - protein, 566 aa, Artificial Sequence; identical to SEQ ID NO: 2656
  derived and/or modified protein sequence (wt) from hemagglutinin__InfluenzaA__ACV70174

SEQ ID NO: 3333 - protein, 566 aa, Artificial Sequence; identical to SEQ ID NO: 2656
  derived and/or modified protein sequence (wt) from hemagglutinin__InfluenzaA__ACV70184

SEQ ID NO: 3334 - protein, 566 aa, Artificial Sequence; identical to SEQ ID NO: 2656
  derived and/or modified protein sequence (wt) from hemagglutinin__InfluenzaA__ACV70194

SEQ ID NO: 3335 - protein, 566 aa, Artificial Sequence; identical to SEQ ID NO: 2656
  derived and/or modified protein sequence (wt) from hemagglutinin__InfluenzaA__ACV70204

SEQ ID NO: 3336 - protein, 566 aa, Artificial Sequence; identical to SEQ ID NO: 2656
  derived and/or modified protein sequence (wt) from hemagglutinin__InfluenzaA__ACV70214

SEQ ID NO: 3337 - protein, 566 aa, Artificial Sequence; identical to SEQ ID NO: 2656
  derived and/or modified protein sequence (wt) from hemagglutinin__InfluenzaA__ACV70224

SEQ ID NO: 3338 - protein, 566 aa, Artificial Sequence; identical to SEQ ID NO: 2656
  derived and/or modified protein sequence (wt) from hemagglutinin__InfluenzaA__ACV70234

SEQ ID NO: 3339 - protein, 566 aa, Artificial Sequence; identical to SEQ ID NO: 2656
  derived and/or modified protein sequence (wt) from hemagglutinin__InfluenzaA__ACV70254

SEQ ID NO: 3340 - protein, 566 aa, Artificial Sequence; identical to SEQ ID NO: 2656
  derived and/or modified protein sequence (wt) from hemagglutinin__InfluenzaA__ACV70264

SEQ ID NO: 3341 - protein, 566 aa, Artificial Sequence; identical to SEQ ID NO: 2656
  derived and/or modified protein sequence (wt) from hemagglutinin__InfluenzaA__ACV70274

SEQ ID NO: 3342 - protein, 566 aa, Artificial Sequence; identical to SEQ ID NO: 2656
  derived and/or modified protein sequence (wt) from hemagglutinin__InfluenzaA__ACV70284

SEQ ID NO: 3343 - protein, 566 aa, Artificial Sequence; identical to SEQ ID NO: 2656
  derived and/or modified protein sequence (wt) from hemagglutinin__InfluenzaA__ACV70294

SEQ ID NO: 3344 - protein, 566 aa, Artificial Sequence; identical to SEQ ID NO: 2656
  derived and/or modified protein sequence (wt) from hemagglutinin__InfluenzaA__ACV70304

SEQ ID NO: 3345 - protein, 566 aa, Artificial Sequence; identical to SEQ ID NO: 3331
  derived and/or modified protein sequence (wt) from hemagglutinin__InfluenzaA__ACV70314

SEQ ID NO: 3346 - protein, 566 aa, Artificial Sequence
  derived and/or modified protein sequence (wt) from hemagglutinin__InfluenzaA__ACV70324
MKAILVVLLYTFATANADTLCIGYHANNSTDTVDTVLEKNVTVTHSVNLLEDKHNGKLCKLRGVAPLHLGKCNIAGWILGNPECESLFTASSWSYIVETSSSDNGTCYPGDFIDYEELREQLSSVSSFERFEIFPKTSSWPNHDSNKGVTAACPHAGAKSFYKNLIWLVKKGNSYPKLSKSYINDKGKEVLVLWGIHHPSTSADQQSLYQNADAYVFVGSSRYSKKFKPEIAIRPKVRDQEGRMNYYWTLVEPGDKITFEATGNLVVPRYAFAMERNAGSGIIISDTPVHDCNTTCQTPKGAINTSLPFQNIHPITIGKCPKYVKSTKLRLATGLRNVPSIQSRGLFGAIAGFIEGGWTGMVDGWYGYHHQNEQGSGYAADLKSTQNAIDEITNKVNSVIEKMNTQFTAVGKEFNHLEKRIENLNKKVDDGFLDIWTYNAELLVLLENERTLDYHDSNVKNLYEKVRSQLKNNAKEIGNGCFEFYHKCDNTCMESVKNGTYDYPKYSEEAKLNREEIDGVKLESTRIYQILAIYSTVASSLVLVVSLGAISFWMCSNGSLQCRICI

SEQ ID NO: 3347 - protein, 566 aa, Artificial Sequence; identical to SEQ ID NO: 2656
  derived and/or modified protein sequence (wt) from hemagglutinin__InfluenzaA__ACV70334

SEQ ID NO: 3348 - protein, 566 aa, Artificial Sequence; identical to SEQ ID NO: 2656
  derived and/or modified protein sequence (wt) from hemagglutinin__InfluenzaA__ACV70344

SEQ ID NO: 3349 - protein, 566 aa, Artificial Sequence; identical to SEQ ID NO: 2656
  derived and/or modified protein sequence (wt) from hemagglutinin__InfluenzaA__ACV70354

SEQ ID NO: 3350 - protein, 566 aa, Artificial Sequence; identical to SEQ ID NO: 2656
  derived and/or modified protein sequence (wt) from hemagglutinin__InfluenzaA__ACV70364

SEQ ID NO: 3351 - protein, 566 aa, Artificial Sequence; identical to SEQ ID NO: 2656
  derived and/or modified protein sequence (wt) from hemagglutinin__InfluenzaA__ACV70374

SEQ ID NO: 3352 - protein, 566 aa, Artificial Sequence; identical to SEQ ID NO: 2656
  derived and/or modified protein sequence (wt) from hemagglutinin__InfluenzaA__ACV70384

SEQ ID NO: 3353 - protein, 566 aa, Artificial Sequence; identical to SEQ ID NO: 2656
  derived and/or modified protein sequence (wt) from hemagglutinin__InfluenzaA__ACV70394

SEQ ID NO: 3354 - protein, 566 aa, Artificial Sequence; identical to SEQ ID NO: 2656
  derived and/or modified protein sequence (wt) from hemagglutinin__InfluenzaA__ACV70404

SEQ ID NO: 3355 - protein, 566 aa, Artificial Sequence; identical to SEQ ID NO: 3331
  derived and/or modified protein sequence (wt) from hemagglutinin__InfluenzaA__ACV70414

SEQ ID NO: 3356 - protein, 566 aa, Artificial Sequence; identical to SEQ ID NO: 2656
  derived and/or modified protein sequence (wt) from hemagglutinin__InfluenzaA__ACV70424

SEQ ID NO: 3357 - protein, 566 aa, Artificial Sequence; identical to SEQ ID NO: 2656
  derived and/or modified protein sequence (wt) from hemagglutinin__InfluenzaA__ACV70434

SEQ ID NO: 3358 - protein, 566 aa, Artificial Sequence; identical to SEQ ID NO: 2656
  derived and/or modified protein sequence (wt) from hemagglutinin__InfluenzaA__ACV70444

SEQ ID NO: 3359 - protein, 566 aa, Artificial Sequence; identical to SEQ ID NO: 2656
  derived and/or modified protein sequence (wt) from hemagglutinin__InfluenzaA__ACV70454

SEQ ID NO: 3360 - protein, 566 aa, Artificial Sequence; identical to SEQ ID NO: 2656
  derived and/or modified protein sequence (wt) from hemagglutinin__InfluenzaA__ACV70464

SEQ ID NO: 3361 - protein, 566 aa, Artificial Sequence; identical to SEQ ID NO: 2656
  derived and/or modified protein sequence (wt) from hemagglutinin__InfluenzaA__ACV70474

SEQ ID NO: 3362 - protein, 566 aa, Artificial Sequence; identical to SEQ ID NO: 2656
  derived and/or modified protein sequence (wt) from hemagglutinin__InfluenzaA__ACV70484

SEQ ID NO: 3363 - protein, 566 aa, Artificial Sequence; identical to SEQ ID NO: 2656
  derived and/or modified protein sequence (wt) from hemagglutinin__InfluenzaA__ACV70494

SEQ ID NO: 3364 - protein, 566 aa, Artificial Sequence; identical to SEQ ID NO: 2656
  derived and/or modified protein sequence (wt) from hemagglutinin__InfluenzaA__ACV70504

SEQ ID NO: 3365 - protein, 566 aa, Artificial Sequence; identical to SEQ ID NO: 2656
  derived and/or modified protein sequence (wt) from hemagglutinin__InfluenzaA__ACV70514

SEQ ID NO: 3366 - protein, 566 aa, Artificial Sequence; identical to SEQ ID NO: 2656
  derived and/or modified protein sequence (wt) from hemagglutinin__InfluenzaA__ACV70524

SEQ ID NO: 3367 - protein, 566 aa, Artificial Sequence; identical to SEQ ID NO: 2849
  derived and/or modified protein sequence (wt) from hemagglutinin__InfluenzaA__ACV70534

SEQ ID NO: 3368 - protein, 566 aa, Artificial Sequence; identical to SEQ ID NO: 2656
  derived and/or modified protein sequence (wt) from hemagglutinin__InfluenzaA__ACV70544

SEQ ID NO: 3369 - protein, 566 aa, Artificial Sequence; identical to SEQ ID NO: 2656
  derived and/or modified protein sequence (wt) from hemagglutinin__InfluenzaA__ACV70564

SEQ ID NO: 3370 - protein, 566 aa, Artificial Sequence; identical to SEQ ID NO: 2656
  derived and/or modified protein sequence (wt) from hemagglutinin__InfluenzaA__ACV70584

SEQ ID NO: 3371 - protein, 566 aa, Artificial Sequence; identical to SEQ ID NO: 3331
  derived and/or modified protein sequence (wt) from hemagglutinin__InfluenzaA__ACV70594

SEQ ID NO: 3372 - protein, 566 aa, Artificial Sequence; identical to SEQ ID NO: 2656
  derived and/or modified protein sequence (wt) from hemagglutinin__InfluenzaA__ACV70604

SEQ ID NO: 3373 - protein, 566 aa, Artificial Sequence; identical to SEQ ID NO: 2656
  derived and/or modified protein sequence (wt) from hemagglutinin__InfluenzaA__ACV70614

SEQ ID NO: 3374 - protein, 566 aa, Artificial Sequence; identical to SEQ ID NO: 2656
  derived and/or modified protein sequence (wt) from hemagglutinin__InfluenzaA__ACV70624

SEQ ID NO: 3375 - protein, 566 aa, Artificial Sequence; identical to SEQ ID NO: 2656
  derived and/or modified protein sequence (wt) from hemagglutinin__InfluenzaA__ACV70634

SEQ ID NO: 3376 - protein, 566 aa, Artificial Sequence; identical to SEQ ID NO: 2656
  derived and/or modified protein sequence (wt) from hemagglutinin__InfluenzaA__ACV70644

SEQ ID NO: 3377 - protein, 566 aa, Artificial Sequence; identical to SEQ ID NO: 2656
  derived and/or modified protein sequence (wt) from hemagglutinin__InfluenzaA__ACV70654

SEQ ID NO: 3378 - protein, 566 aa, Artificial Sequence; identical to SEQ ID NO: 2656
  derived and/or modified protein sequence (wt) from hemagglutinin__InfluenzaA__ACV70664

SEQ ID NO: 3379 - protein, 566 aa, Artificial Sequence; identical to SEQ ID NO: 2656
  derived and/or modified protein sequence (wt) from hemagglutinin__InfluenzaA__ACV70674

SEQ ID NO: 3380 - protein, 566 aa, Artificial Sequence; identical to SEQ ID NO: 2656
  derived and/or modified protein sequence (wt) from hemagglutinin__InfluenzaA__ACV70684

SEQ ID NO: 3381 - protein, 566 aa, Artificial Sequence; identical to SEQ ID NO: 2656
  derived and/or modified protein sequence (wt) from hemagglutinin__InfluenzaA__ACV70694

SEQ ID NO: 3382 - protein, 566 aa, Artificial Sequence; identical to SEQ ID NO: 2656
  derived and/or modified protein sequence (wt) from hemagglutinin__InfluenzaA__ACV70704

SEQ ID NO: 3383 - protein, 566 aa, Artificial Sequence; identical to SEQ ID NO: 2656
  derived and/or modified protein sequence (wt) from hemagglutinin__InfluenzaA__ACV70714

SEQ ID NO: 3384 - protein, 566 aa, Artificial Sequence; identical to SEQ ID NO: 2656
  derived and/or modified protein sequence (wt) from hemagglutinin__InfluenzaA__ACV70724

SEQ ID NO: 3385 - protein, 566 aa, Artificial Sequence; identical to SEQ ID NO: 3293
  derived and/or modified protein sequence (wt) from hemagglutinin__InfluenzaA__ACV70734

SEQ ID NO: 3386 - protein, 566 aa, Artificial Sequence; identical to SEQ ID NO: 2656
  derived and/or modified protein sequence (wt) from hemagglutinin__InfluenzaA__ACV70744

SEQ ID NO: 3387 - protein, 566 aa, Artificial Sequence; identical to SEQ ID NO: 2656
  derived and/or modified protein sequence (wt) from hemagglutinin__InfluenzaA__ACV70754

SEQ ID NO: 3388 - protein, 566 aa, Artificial Sequence; identical to SEQ ID NO: 2656
  derived and/or modified protein sequence (wt) from hemagglutinin__InfluenzaA__ACV70764

SEQ ID NO: 3389 - protein, 566 aa, Artificial Sequence; identical to SEQ ID NO: 2656
  derived and/or modified protein sequence (wt) from hemagglutinin__InfluenzaA__ACV70784

SEQ ID NO: 3390 - protein, 566 aa, Artificial Sequence
  derived and/or modified protein sequence (wt) from hemagglutinin__InfluenzaA__ACV70794
MKAILVVLLYTFATANADTLCIGYHANNSTDTVDTVLEKNVTVTHSVNLLEDKHNGKLCKLRGVAPLHLGKCNIAGWILGNPECESLSTASSWSYIVETSSSDNGTCYPGDFIDYEELREQLSSVSSFERFEIFPKTSSWPNHDSNKGATAACPHAGAKGFYKNLIWLVKKGNSYPKLSKSYINDKGKEVLVLWGIHHPSTSADQQSLYQNADAYVFVGSSRYSKKFKPEIAIRPKVRDQEGRMNYYWTLVEPGDKITFEATGNLVVPRYAFAMERNAGSGIIISDTPVHDCNTTCQTPKGAINTSLPFQNIHPITIGKCPKYVKSTKLRLATGLRNVPSIQSRGLFGAIAGFIEGGWTGMVDGWYGYHHQNEQGSGYAADLKSTQNAIDEITNKVNSVIEKMNTQFTAVGKEFNHLEKRIENLNKKVDDGFLDIWTYNAELLVLLENERTLDYHDSNVKNLYEKVRSQLKNNAKEIGNGCFEFYHKCDNTCMESVKNGTYDYPKYSEEAKLNREEIDGVKLESTRIYQILAIYSTVASSLVLVVSLGAISFWMCSNGSLQCRICI

SEQ ID NO: 3391 - protein, 566 aa, Artificial Sequence; identical to SEQ ID NO: 2656
  derived and/or modified protein sequence (wt) from hemagglutinin__InfluenzaA__ACV70804

SEQ ID NO: 3392 - protein, 566 aa, Artificial Sequence; identical to SEQ ID NO: 3331
  derived and/or modified protein sequence (wt) from hemagglutinin__InfluenzaA__ACV70824

SEQ ID NO: 3393 - protein, 566 aa, Artificial Sequence; identical to SEQ ID NO: 2656
  derived and/or modified protein sequence (wt) from hemagglutinin__InfluenzaA__ACV70834

SEQ ID NO: 3394 - protein, 566 aa, Artificial Sequence
  derived and/or modified protein sequence (wt) from hemagglutinin__InfluenzaA__ACV70844
MKAILVVLLYTFATANADTLCIGYHANNSTDTVDTVLEKNVTVTHSVNLLEDKHNGKLCKLRGVAPLHLGKCNIAGWILGNPECESLSTASSWSYIVETSSSDNGTCYPGDFIDYEELREQLSSVSSFERFEIFPKTSSWPNHDSNKGVTAACPHAGAKGFYKNLIWLVKKGNSYPKLSKSYINDKGKEVLVLWGIHHPSTSADQQSLYQNADAYVFVGSSRYSKKFKPEIAIRPKVRDQEGRMNYYWTLVEPGDKITFEATGNLLVPRYAFAMERNAGSGIIISDTPVHDCNTTCQTPKGAINTSLPFQNIHPITIGKCPKYVKSTKLRLATGLRNVPSIQSRGLFGAIAGFIEGGWTGMVDGWYGYHHQNEQGSGYAADLKSTQNAIDEITNKVNSVIEKMNTQFTAVGKEFNHLEKRIENLNKKVDDGFLDIWTYNAELLVLLENERTLDYHDSNVKNLYEKVRSQLKNNAKEIGNGCFEFYHKCDNTCMESVKNGTYDYPKYSEEAKLNREEIDGVKLESTRIYQILAIYSTVASSLVLVVSLGAISFWMCSNGSLQCRICI

SEQ ID NO: 3395 - protein, 566 aa, Artificial Sequence; identical to SEQ ID NO: 2656
  derived and/or modified protein sequence (wt) from hemagglutinin__InfluenzaA__ACV70854

SEQ ID NO: 3396 - protein, 566 aa, Artificial Sequence
  derived and/or modified protein sequence (wt) from hemagglutinin__InfluenzaA__ACV70864
MKAILVVLLYTFATANADTLCIGYHANNSTDTVDTVLEKNVTVTHSVNLLEDKHNGKLCKLRGVAPLHLGKCNIAGWILGNPECESLSTASSWSYIVETSSSDNGTCYPGDFIDYEELREQLSSVSSFERFEIFPKTSSWPNHDSNKGVTAACPHAGAKSFYKNLIWLVKKGTSYPKLSKSYINDKGKEVLVLWGIHHPSTSADQQSLYQNADAYVFVGSSRYSKKFKPEIAIRPKVRDQEGRMNYYWTLVEPGDKITFEATGNLVVPRYAFAMERNAGSGIIISDTPVHDCNTTCQTPKGAINTSLPFQNIHPITIGKCPKYVKSTKLRLATGLRNVPSIQSRGLFGAIAGFIEGGWTGMVDGWYGYHHQNEQGSGYAADLKSTQNAIDEITNKVNSVIEKMNTQFTAVGKEFNHLEKRIENLNKKVDDGFLDIWTYNAELLVLLENERTLDYHDSNVKNLYEKVRSQLKNNAKEIGNGCFEFYHKCDNTCMESVKNGTYDYPKYSEEAKLNREEIDGVKLESTRIYQILAIYSTVASSLVLVVSLGAISFWMCSNGSLQCRICI

SEQ ID NO: 3397 - protein, 566 aa, Artificial Sequence; identical to SEQ ID NO: 2656
  derived and/or modified protein sequence (wt) from hemagglutinin__InfluenzaA__ACV70874

SEQ ID NO: 3398 - protein, 566 aa, Artificial Sequence; identical to SEQ ID NO: 2849
  derived and/or modified protein sequence (wt) from hemagglutinin__InfluenzaA__ACV70884

SEQ ID NO: 3399 - protein, 566 aa, Artificial Sequence
  derived and/or modified protein sequence (wt) from hemagglutinin__InfluenzaA__ACV70904
MKAILVVLLYTFATANADTLCIGYHANNSTDTVDTVLEKNVTVTHSVNLLEDKHNGKLCKLRGVAPLHLGKCNIAGWILGNPECESLSTASSWSYIVETSSSDNGTCYPGDFIDYEELREQLSSVSSFERFEIFPKTSSWPNHDSNKGVTAACPHAGAKSFYKNLIWLVKKGNSYPKLSKSYINDKGKEVLVLWGIHHPSTSADQQSLYQNADAYVFVGSSRYSKKFKPEIAIRPKVRDQEGRMNYYWTLVEPGDKITFEATGNLVVPRYAFAMERNAGSGIIISDTPVHDCNTTCQTPKGAINTSLPFQNIHPITIGKCPKYVKSTKLRLATGLRNIPSIQSRGLFGAIAGFIEGGWTGMVDGWYGYHHQNEQGSGYAADLKSTQNAIDEITNKVNSVIEKMNTQFTAVGKEFNHLEKRIENLNKKVDDGFLDIWTYNAELLVLLENERTLDYHDSNVKNLYEKVRSQLKNNAKEIGNGCFEFYHKCDNTCMESVKNGTYDYPKYSEEAKLNREEIDGVKLESTRIYQILAIYSTVASSLVLVVSLGAISFWMCSNGSLQCRICI

SEQ ID NO: 3400 - protein, 566 aa, Artificial Sequence; identical to SEQ ID NO: 2656
  derived and/or modified protein sequence (wt) from hemagglutinin__InfluenzaA__ACV70914

SEQ ID NO: 3401 - protein, 566 aa, Artificial Sequence; identical to SEQ ID NO: 2656
  derived and/or modified protein sequence (wt) from hemagglutinin__InfluenzaA__ACV70924

SEQ ID NO: 3402 - protein, 566 aa, Artificial Sequence; identical to SEQ ID NO: 2656
  derived and/or modified protein sequence (wt) from hemagglutinin__InfluenzaA__ACV70934

SEQ ID NO: 3403 - protein, 566 aa, Artificial Sequence; identical to SEQ ID NO: 2656
  derived and/or modified protein sequence (wt) from hemagglutinin__InfluenzaA__ACV70944

SEQ ID NO: 3404 - protein, 566 aa, Artificial Sequence
  derived and/or modified protein sequence (wt) from hemagglutinin__InfluenzaA__ACV70954
MKAILVVLLYTFATANADTLCIGYHANNSTDTVDTVLEKNVTVTHSVNLLEDKHNGKLCKLRGVAPLHLGKCNIAGWILGNPECESLSTASSWSYIVETSSSDNGTCYPGDFIDYEELREQLSSVSSFERFEIFPKTSSWPNHDSNKGVTAACPHAGAKSFYKNLIWLVKKGNSYPKLSKSYINDKGKEVLVLWGIHHPSTSADQQSLYQNADAYVFVGSSRYSKKFKPEIAIRPKVRDQEGRMNYYWTLVEPGDKITFEATGNLLVPRYAFAMERNAGSGIIISDTPVHDCNTTCQTPKGAINTSLPFQNIHPITIGKCPKYVKSTKLRLATGLRNVPSIQSRGLFGAIAGFIEGGWTGMVDGWYGYHHQNEQGSGYAADLKSTQNAIDEITNKVNSVIEKMNTQFTAVGKEFNHLEKRIENLNKKVDDGFLDIWTYNAELLVLLENERTLDYHDSNVKNLYEKVRSQLKNNAKEIGNGCFEFYHKCDNTCMESVKNGTYDYPKYSEEAKLNREEIDGVKLESTRIYQILAIYSTVASSLVLVVSLGAISFWMCSNGSLQCRICI

SEQ ID NO: 3405 - protein, 566 aa, Artificial Sequence; identical to SEQ ID NO: 2656
  derived and/or modified protein sequence (wt) from hemagglutinin__InfluenzaA__ACV70964

SEQ ID NO: 3406 - protein, 566 aa, Artificial Sequence; identical to SEQ ID NO: 2656
  derived and/or modified protein sequence (wt) from hemagglutinin__InfluenzaA__ACV70974

SEQ ID NO: 3407 - protein, 566 aa, Artificial Sequence; identical to SEQ ID NO: 3399
  derived and/or modified protein sequence (wt) from hemagglutinin__InfluenzaA__ACV70984

SEQ ID NO: 3408 - protein, 566 aa, Artificial Sequence; identical to SEQ ID NO: 3404
  derived and/or modified protein sequence (wt) from hemagglutinin__InfluenzaA__ACV70994

SEQ ID NO: 3409 - protein, 566 aa, Artificial Sequence; identical to SEQ ID NO: 2656
  derived and/or modified protein sequence (wt) from hemagglutinin__InfluenzaA__ACV71004

SEQ ID NO: 3410 - protein, 566 aa, Artificial Sequence
  derived and/or modified protein sequence (wt) from hemagglutinin__InfluenzaA__ACV82230
MKTIIALSYILCLVFAQKLPGNDNSTATLCLGHHAVPNGTIVKTITNDQIEVTNATELVQSSSTGEICDSPHQILDGKNCTLIDALLGDPQCDGFQNKKWDLFVERSQAYSNCYPYDVPDYASLRSLVASSGTLEFNNESFNWTGVTQNGTSSACIRRSKNSFFSRLNWLTHLNFKYQALNVTMPNNEQFDKLYIWGVHHPGTDKDQIFLYAQASGRITVSTKRSQQTVIPNIGSRPRVRNIPSRISIYWTIVKPGDILLINSTGNLIAPRGYFKIQSGKSSIMRSDAPIGKCNSECITPNGSIPNDKPFQNVNRITYGACPRYVKQNTLKLATGMRNVPEKQTRGIFGAIAGFIENGWEGMVDGWYGFRHQNSEGRGQAADLKSTQAAIDQINGKLNRLIGKTNEKFHQIEKEFSEVEGRIQDLEKYVEDTKIDLWSYNAELLVALENQHTIDLTDSEMNKLFEKTKKQLRENAEDMGNGCFKIYHKCDNACIGSIRNGTYDHDVYRDEALNNRFQIKGVELKSGYKDWILWISFAISCFLLCVALLGFIMWACQKGNIRCNICI

SEQ ID NO: 3411 - protein, 566 aa, Artificial Sequence
  derived and/or modified protein sequence (wt) from hemagglutinin__InfluenzaA__ACV82232
MKTIIALSYILCLVFAQKLPGNDNSTATLCLGHHAVPNGTIVKTITNDQIEVTNATELVQSSSTGEICDSPHQILDGENCTLIDALLGDPQCDGFQNKKWDLFVERSKAYSNCYPYDVPDYASLRSLVASSGTLEFNNESFNWTGVTQNGTSSACIRRSNNSFFSRLNWLTHLNFKYPALNVTMPNNEQFDKLYIWGVHHPGTDKDQIFLYAQASGRITVSTKRSQQAVIPNIGSRPRVRNIPSRISIYWTIVKPGDILLINSTGNLIAPRGYFKIRSGKSSIMRSDAPIGKCNSECITPNGSIPNDKPFQNVNRITYGACPRYVKQNTLKLATGMRNVPEKQTRGIFGAIAGFIENGWEGMVDGWYGFRHQNSEGRGQAADLKSTQAAIDQINGKLNRLIGKTNEKFHQIEKEFSEVEGRIQDLEKYVEDTKIDLWSYNAELLVALENQHTIDLTDSEMNKLFEKTKKQLRENAEDMGNGCFKIYHKCDNACIGSIRNGTYDHDVYRDEALNNRFQIKGVELKSGYKDWILWISFAISCFLLCVALLGFIMWACQKGNIRCNICI

SEQ ID NO: 3412 - protein, 565 aa, Artificial Sequence
  derived and/or modified protein sequence (wt) from hemagglutinin__InfluenzaA__ACV82233
MKVKLLVLLCTFTATYADTICIGYHANNSTDTVDTVLEKNVTVTHSVNLLENNHNGKLCLLKGIAPLQLGNCSVAGWILGNPECELLISKESWSYIVEKPNPENGTCYPGHFADYEELREQLSSVSSFERFEIFPKESSWPNHTVTGVSASCSHNGENSFYRNLLWLTGKNGLYPNLSKSYANNKEKEVLVLWGVHHPPNIADQKTLYHTENAYVSVVSSHYSRKFTPEIAKRPKIRDQEGRINYYWTLLEPGDTIIFEANGNLIAPRYAFALSRGFGSGIINSNAPMDKCDAKCQTPQGAINSSLPFQNVHPVTIGECPKYVRSAKLRMVTGLRNIPSIQSRGLFGAIAGFIEGGWTGMVDGWYGYHHQNEQGSGYAADQKSTQNAINGITNKVNSVIEKMNTQFTAVGKEFNKLERRMENLNKKVDDGFIDIWTYNAELLVLLENERTLDFHDSNVKNLYEKVKSQLKNNAKEIGNGCFEFYHKCNDECMESVKNGTYDYPKYSEESKLNREKIDGVKLESMGVYQILAIYSTVASSLVLLVSLGAISFWMCSNGSLQCRICI

SEQ ID NO: 3413 - protein, 566 aa, Artificial Sequence
  derived and/or modified protein sequence (wt) from hemagglutinin__InfluenzaA__ACV83662
MKAILVVLLYTFATANADTLCIGYHANNSTDTVDTVLEKNVTVTHSVNLLEDKHNGKLCKLRGVAPLHLGKCNIAGWILGNPECESLSTASSWSYIVETSSSDNGTCYPGDFIDYEELREQLSSVSSFERFEIFPKTSSWPNHDSNKGVTAACPHAGAKSFYKNLIWLVKKGNSYPKLSKSYINDKGKEVLVLWGIHHPSTSADQQSLYQNADAYVFVGTSRYSKKFKPEIAIRPKVRDREGRMNYYWTLVEPGDKITFEATGNLVVPRYAFAMVRNAGSGIIISDTPVHDCNTTCQTPKGAINTSLPFQNIHPITIGKCPKYVKSTKLRLATGLRNVPSIQSRGLFGAIAGFIEGGWTGMVDGWYGYHHQNEQGSGYAADLKSTQNAIDEITNKVNSVIEKMNTQFTAVGKEFNHLEKRIENLNKKVDDGFLDIWTYNAELLVLLENERTLDYHDSNVKNLYEKVRSQLKNNAKEIGNGCFEFYHKCDNTCMESVKNGTYDYPKYSEEAKLNREEIDGVKLESTRIYQILAIYSTVASSLVLVVSLGAISFWMCSNGSLQCRICI

SEQ ID NO: 3414 - protein, 566 aa, Artificial Sequence
  derived and/or modified protein sequence (wt) from hemagglutinin__InfluenzaA__ACV83663
MKAILVVLLYTFATANADTLCIGYHANNSTDTVDTVLEKNVTVTHSVNLLEDKHNGKLCKLRGVAPLHLGKCNIAGWILGNPECESLSTASSWSYIVETSSSDNGTCYPGDFIDYEELREQLSSVSSFERFEIFPKTSSWPNHDSNKGVTAACPHAGAKSFYKNLIWLVKKGNSYPKLSKSYINDKGKEVLVLWGIHHPSTSADQQSLYQNADAYVFVGTSRYSKKFKPEIAIRPKVRGQEGRMNYYWTLVEPGDKITFEATGNLVVPRYAFAMERNAGSGIIISDTPVHDCNTTCQTPKGAINTSLPFQNIHPITIGKCPKYVKSTKLRLATGLRNVPSIQSRGLFGAIAGFIEGGWTGMVDGWYGYHHQNEQGSGYAADLKSTQNAIDEITNKVNSVIEKMNTQFTAVGKEFNHLEKRIENLNKKVDDGFLDIWTYNAELLVLLENERTLDYHDSNVKNLYEKVRSQLKNNAKEIGNGCFEFYHKCDNTCMESVKNGTYDYPKYSEEAKLNREEIDGVKLESTRIYQILAIYSTVASSLVLVVSLGAISFWMCSNGSLQCRICI

SEQ ID NO: 3415 - protein, 566 aa, Artificial Sequence; identical to SEQ ID NO: 3414
  derived and/or modified protein sequence (wt) from hemagglutinin__InfluenzaA__ACV83664

SEQ ID NO: 3416 - protein, 566 aa, Artificial Sequence
  derived and/or modified protein sequence (wt) from hemagglutinin__InfluenzaA__ACV83665
MEAILVVLLYTFATANADTLCIGYHANNSTDTVDTVLEKNVTVTHSVNLLEDKHNGKLCKLRGVAPLHLGKCNIAGWILGNPECESLSTASSWSYIVETSSSDNGTCYPGDFIDYEELREQLSSVSSFERFEIFPKTSSWPNHDSNKGVTAACPHAGAKSFYKNLIWLVKKGNSYPKLSKSYINDKGKEVLVLWGIHHPSTIADQQSLYQNADAYVFVGSSRYSKKFKPEIAIRPKVRDQEGRMNYYWTLVEPGDKITFEATGNLVVPRYAFAMERNAGSGIIISDTPVHDCNTTCQTPKGAINTSLPFHNIHPITIGKCPKYVKSTKLRLATGLRNVPSIQSRGLFGAIAGFIEGGWTGMVDGWYGYHHQNEQGSGYAADLKSTQNAIDEITNKVNSVIEKMNTQFTAVGKEFNHLEKRIENLNKKVDDGFLDIWTYNAELLVLLENERTLDYHDSNVKNLYEKVRSQLKNNAKEIGNGCFEFYHKCDNTCMESVKNGTYDYPKYSEEAKLNREEIDGVKLESTRIYQILAIYSTVASSLVLVVSLGAISFWMCSNGSLQCRICI

SEQ ID NO: 3417 - protein, 566 aa, Artificial Sequence
  derived and/or modified protein sequence (wt) from hemagglutinin__InfluenzaA__ACV83667
MKAILVVLLYTFATANADTLCIGYHANNSTDTVDTVLEKNVTVTHSVNLLEDKHNGKLCKLRGVAPLHLGKCNIAGWILGNPECESLSTASSWSYIVETSSSDNGTCYPGDFIDYEELREQLSSVSSFERFEIFPKTSSWPNHDSNKGVTAACPHAGAKSFYKNLIWLVKKGNSYPKLSKSYINDKGKEVLVLWGIHHPSTSADQQSLYQNADAYVFVGTSRYSKKFKPEIAIRPKVRNQEGRMNYYWTLVEPGDKITFEATGNLVVPRYAFAMERNAGSGIIISDTPVHDCNTTCQTPKGAINTSLPFQNIHPITIGKCPKYVKSTKLRLATGLRNVPSIQSRGLFGAIAGFIEGGWTGMVDGWYGYHHQNEQGSGYAADLKSTQNAIDEITNKVNSVIEKMNTQFTAVGKEFNHLEKRIENLNKKVDDGFLDIWTYNAELLVLLENERTLDYHDSNVKNLYEKVRSQLKNNAKEIGNGCFEFYHKCDNTCMESVKNGTYDYPKYSEEAKLNREEIDGVKLESTRIYQILAIYSTVASSLVLVVSLGAISFWMCSNGSLQCRICI

SEQ ID NO: 3418 - protein, 566 aa, Artificial Sequence; identical to SEQ ID NO: 2669
  derived and/or modified protein sequence (wt) from hemagglutinin__InfluenzaA__ACV83668

SEQ ID NO: 3419 - protein, 566 aa, Artificial Sequence; identical to SEQ ID NO: 2669
  derived and/or modified protein sequence (wt) from hemagglutinin__InfluenzaA__ACV83670

SEQ ID NO: 3420 - protein, 566 aa, Artificial Sequence; identical to SEQ ID NO: 2911
  derived and/or modified protein sequence (wt) from hemagglutinin__InfluenzaA__ACV83671

SEQ ID NO: 3421 - protein, 566 aa, Artificial Sequence; identical to SEQ ID NO: 3231
  derived and/or modified protein sequence (wt) from hemagglutinin__InfluenzaA__ACV88399

SEQ ID NO: 3422 - protein, 566 aa, Artificial Sequence; identical to SEQ ID NO: 3231
  derived and/or modified protein sequence (wt) from hemagglutinin__InfluenzaA__ACV88409

SEQ ID NO: 3423 - protein, 566 aa, Artificial Sequence; identical to SEQ ID NO: 2656
  derived and/or modified protein sequence (wt) from hemagglutinin__InfluenzaA__ACV88419

SEQ ID NO: 3424 - protein, 565 aa, Artificial Sequence; identical to SEQ ID NO: 3278
  derived and/or modified protein sequence (wt) from hemagglutinin__InfluenzaA__ACV89502

SEQ ID NO: 3425 - protein, 566 aa, Artificial Sequence
  derived and/or modified protein sequence (wt) from hemagglutinin__InfluenzaA__ACV89516
MKARLLILLCALAATDADTICIGYHANNSTDTVDTVLEKNVTVTHSVNLLEDSHNGKLCRLKGIAPLQLGKCNIAGWILGNPECDSLLPASSWSYIVETPNSKNGICYPGDFIDYEELREQLSSVSSFERFEIFPKESSWPKHSTTKGVTAACSHAGKSSFYRNLLWLTKKGDSYPKLSNSYVNKKGKEVLVLWGVHHPSSSKEQQTLYQNENAYVSVVSSNYNRRFIPEIAERPEVKDQAGRINYYWTLLEPGDTIIFEANGNLVAPWYAFALSRGFGSGIITSNASMHECNTKCQTPQGAINSSLPFQNIHPVTIGECPKYVKSAKLRMVTGLRNIPSIQSRGLFGAIAGFIEGGWTGMIDGWYGYHHQNEQGSGYAADQKSTQNAINGITNKVNSVIEKMNTQFTAVGKEFNNLEKRMENLNKKVDDGFLDIWTYNAELLVLLENERTLDFHDSNVKNLYEKVKIQLKNNAKEIGNGCFEFYHKCDNECMESVRNGTYDYPKYSKESKLNREKIDGVKLESMGVYQILAIYSTVASSLVLLVSLGAISFWMCSNGSLQCRICI

SEQ ID NO: 3426 - protein, 565 aa, Artificial Sequence
  derived and/or modified protein sequence (wt) from hemagglutinin__InfluenzaA__ACV90512
MNVKLLVLLCTFTATYADTICIGYHANNSTDTVDTVLEKNVTVTHSVNLLENSHNGKLCLLKGIAPLQLGNCSVAGWILGNPECELLISKESWSYIVEKPNPENGTCYPGHFADYEELREQLSSVSSFERFEIFPKESSWPNHTVTGVSASCSHNGENSFYRNLLWLTGKNGLYPNLSKSYANNKEKEVLVLWGVHHPPNIADQKTLYHTENAYVSVVSSHYSRKFTPEIAKRPKVRDQEGRINYYWTLLEPGDTIIFEANGNLIAPRYAFALSRGFGSGIINSNAPIDKWDAKCQTPQGAINSSLPFQNVHPVTIGEWPKYVRSAKLRMVTGLRNIPSIQSRGLFGAIAGFIEGGWTGMVDGWYGYHHQNEQGSGYAADQKSTQNAINGITNKMNSVIEKMNTQFTAVGKEFNKLERRMENLNKKVDDGFIDIWTYNAELLVLLENERTLDFHDSNVKNLYEKVKSQLKNNAKEIGNGCFEFYHKCNDECMESVKNGTYDYPKYSEESKLNREKIDGVTLESMGVYQILAIYSTVASSLVLLVSLGAISFWMCSNGSLQCRICI

SEQ ID NO: 3427 - protein, 566 aa, Artificial Sequence; identical to SEQ ID NO: 2669
  derived and/or modified protein sequence (wt) from hemagglutinin__InfluenzaA__ACV91672

SEQ ID NO: 3428 - protein, 566 aa, Artificial Sequence; identical to SEQ ID NO: 2669
  derived and/or modified protein sequence (wt) from hemagglutinin__InfluenzaA__ACV91676

SEQ ID NO: 3429 - protein, 566 aa, Artificial Sequence; identical to SEQ ID NO: 2669
  derived and/or modified protein sequence (wt) from hemagglutinin__InfluenzaA__ACV91680

SEQ ID NO: 3430 - protein, 566 aa, Artificial Sequence
  derived and/or modified protein sequence (wt) from hemagglutinin__InfluenzaA__ACX31591
MKTIIALSYILCLVFAQKLPGNDNSTATLCLGHHAVPNGTIVKTITNDQIEVTNATELVQSSSTGEICDSPHQILDGKNCTLIDALLGDPQCDGFQNKKWDLFVERSKAYSNCYPYDVPDYASLRSLVASSGTLEFNNESFNWTGVTQNGTSSACIRRSKNSFFSRLNWLTHLNFKYQALNVTMPNNEQFDKLYIWGVHHPGTDKDQIFLYAQASGRITVSTKRSQQTVIPNIGSRPRVRNIPSRISIYWTIVKPGDILLINSTGNLIAPRGYFKIQSGKSSIMRSDAPIGKCNSECITPNGSIPNDKPFQNVNRITYGACPRYVKQNTLKLATGMRNVPEKQTRGIFGAIAGFIENGWEGMVDGWYGFRHQNSEGRGQAADLKSTQAAIDQINGKLNRLIGKTNEKFHQIEKEFSEVEGRIQDLEKYVEDTKIDLWSYNAELLVALENQHTIDLTDSEMNKLFEKTKKQLRENAEDMGNGCFKIYHKCDNACIGSIRNGTYDHDVYRDEALNNRFQIKGVELKSGYKDWILWISFAISCFLLCVALLGFIMWACQKGNIRCNICI

SEQ ID NO: 3431 - protein, 566 aa, Artificial Sequence
  derived and/or modified protein sequence (wt) from hemagglutinin__InfluenzaA__ACX31933
MKAILVVLLYTFATANADTLCIGYHANNSTDTVDTVLEKNVTVTHSVNLLEDKHNGKLCKLRGVAPLHLGKCNIAGWILGNPECESLSTASSWSYIVETSSSGNGTCYPGDFIDYEELREQLSSVSSFERFEIFPKTSSWPNHDSNKGVTAACPHAGAKSFYKNLIWLVKKGNSYPKLSKSYINDKGKEVLVLWGIHHPSTSADQQSLYQNADAYVFVGTSRYSKKFKPEIAIRPKVRDQEGRMNYYWTLVEPGDKITFEATGNLVVPRYAFAMERNAGSGIIISDTPVHDCNTTCQTPKGAINTSLPFQNIHPITIGKCPKYVKSTKLRLATGLRNVPSIQSRGLFGAIAGFIEGGWTGMVDGWYGYHHQNEQGSGYAADLKSTQNAIDEITNKVNSVIEKMNTQFTAVGKEFNHLEKRIENLNKKVDDGFLDIWTYNAELLVLLENERTLDYHDSNVKNLYEKVRSQLKNNAKEIGNGCFEFYHKCDNTCMESVKNGTYDYPKYSEEAKLNREEINGVKLESTRIYQILAIYSTVASSLVLVVSLGAISFWMCSNGSLQCRICI

SEQ ID NO: 3432 - protein, 566 aa, Artificial Sequence
  derived and/or modified protein sequence (wt) from hemagglutinin__InfluenzaA__ACX31934
MKAILVVLLYTFATANADTLCIGYHANNSTDTVDTVLEKNVTVTHSVNLLEDKHNGKLCKLRGVAPLHLGKCNIAGWILGNPECESLSTASSWSYIVETSSSDNGTCYPGDFIDYEELREQLSSVSSFERFEIFPKTSSWPNHDSNKGVTAACPHAGAKSFYKNLIWLVKKGNSYPKLSKSYINDKGKEVLVLWGIHHPSTSADQQSLYQNADAYVFVGTSRYSKKFKPEITIRPKVRGQEGRMNYYWTLVEPGDKITFEATGNLVVPRYAFAMERNAGSGIIISDTPVHDCNTTCQTPKGAINTSLPFQNIHPITIGKCPKYVKSTKLRLATGLRNVPSIQSRGLFGAIAGFIEGGWTGMVDGWYGYHHQNEQGSGYAADLKSTQNAIDEITNKVNSVIEKMNTQFTAVGKEFNHLEKRIENLNKKVDDGFLDIWTYNAELLVLLENERTLDYHDSNVKNLYEKVRSQLKNNAKEIGNGCFEFYHKCDNTCMESVKNGTYDYPKYSEEAKLNREEIDGVKLESTRIYQILAIYSTVASSLVLVVSLGAISFWMCSNGSLQCRICI

SEQ ID NO: 3433 - protein, 566 aa, Artificial Sequence; identical to SEQ ID NO: 2669
  derived and/or modified protein sequence (wt) from hemagglutinin__InfluenzaA__ACX31935

SEQ ID NO: 3434 - protein, 566 aa, Artificial Sequence; identical to SEQ ID NO: 2669
  derived and/or modified protein sequence (wt) from hemagglutinin__InfluenzaA__ACX31936

SEQ ID NO: 3435 - protein, 566 aa, Artificial Sequence; identical to SEQ ID NO: 2760
  derived and/or modified protein sequence (wt) from hemagglutinin__InfluenzaA__ACX31939

SEQ ID NO: 3436 - protein, 566 aa, Artificial Sequence; identical to SEQ ID NO: 2760
  derived and/or modified protein sequence (wt) from hemagglutinin__InfluenzaA__ACX31940

SEQ ID NO: 3437 - protein, 566 aa, Artificial Sequence; identical to SEQ ID NO: 2669
  derived and/or modified protein sequence (wt) from hemagglutinin__InfluenzaA__ACX31943

SEQ ID NO: 3438 - protein, 566 aa, Artificial Sequence; identical to SEQ ID NO: 2669
  derived and/or modified protein sequence (wt) from hemagglutinin__InfluenzaA__ACX31946

SEQ ID NO: 3439 - protein, 566 aa, Artificial Sequence; identical to SEQ ID NO: 2669
  derived and/or modified protein sequence (wt) from hemagglutinin__InfluenzaA__ACX31947

SEQ ID NO: 3440 - protein, 566 aa, Artificial Sequence; identical to SEQ ID NO: 2669
  derived and/or modified protein sequence (wt) from hemagglutinin__InfluenzaA__ACX31948

SEQ ID NO: 3441 - protein, 566 aa, Artificial Sequence
  derived and/or modified protein sequence (wt) from hemagglutinin__InfluenzaA__ACX31949
MKAILVVLLYTFATANADTLCIGYHANNSTDTVDTVLEKNVTVTHSVNLLEDKHNGKLCKLRGVAPLHLGKCNIAGWILGNPECESLSTASSWSYIVETSSSDNGTCYPGDFIDYEELREQLSSVSSFERFEIFPKTSSWPNHDSNKGVTAACPHAGAKSFYKNLIWLVKKGNSYPKLSKSYINDKGKEVLVLWGIHHPSTSADQQSLYQNADAYVFVGTSRYSKKFKPEIAIRPKVRDQEGRMNYYWTLVEPGDKITFEATGNLVVPRYAFAMERNAGSGIIISDTPVHYCNTTCQTPKGAINTSLPFQNIHPITIGKCPKYVKSTKLRLATGLRNVPSIQSRGLFGAIAGFIEGGWTGMVDGWYGYHHQNEQGSGYAADLKSTQNAIDEITNKVNSVIEKMNTQFTAVGKEFNHLEKRIENLNKKVDDGFLDIWTYNAELLVLLENERTLDYHDSNVKNLYEEVRSQLKNNAKEIGNGCFEFYHKCDNTCMESVKNGTYDYPKYSEEAKLNREEIDGVKLESTRIYQILAIYSTVASSLVLVVSLGAISFWMCSNGSLQCRICI

SEQ ID NO: 3442 - protein, 566 aa, Artificial Sequence; identical to SEQ ID NO: 2669
  derived and/or modified protein sequence (wt) from hemagglutinin__InfluenzaA__ACX31950

SEQ ID NO: 3443 - protein, 566 aa, Artificial Sequence; identical to SEQ ID NO: 2669
  derived and/or modified protein sequence (wt) from hemagglutinin__InfluenzaA__ACX31951

SEQ ID NO: 3444 - protein, 566 aa, Artificial Sequence; identical to SEQ ID NO: 2669
  derived and/or modified protein sequence (wt) from hemagglutinin__InfluenzaA__ACX31954

SEQ ID NO: 3445 - protein, 566 aa, Artificial Sequence; identical to SEQ ID NO: 2669
  derived and/or modified protein sequence (wt) from hemagglutinin__InfluenzaA__ACX31955

SEQ ID NO: 3446 - protein, 566 aa, Artificial Sequence; identical to SEQ ID NO: 2656
  derived and/or modified protein sequence (wt) from hemagglutinin__InfluenzaA__ACX31956

SEQ ID NO: 3447 - protein, 566 aa, Artificial Sequence; identical to SEQ ID NO: 2669
  derived and/or modified protein sequence (wt) from hemagglutinin__InfluenzaA__ACX31957

SEQ ID NO: 3448 - protein, 566 aa, Artificial Sequence; identical to SEQ ID NO: 2656
  derived and/or modified protein sequence (wt) from hemagglutinin__InfluenzaA__ACX31958

SEQ ID NO: 3449 - protein, 566 aa, Artificial Sequence; identical to SEQ ID NO: 2911
  derived and/or modified protein sequence (wt) from hemagglutinin__InfluenzaA__ACX31960

SEQ ID NO: 3450 - protein, 566 aa, Artificial Sequence
  derived and/or modified protein sequence (wt) from hemagglutinin__InfluenzaA__ACX31961
MKAILVVMLYTFATANADTLCIGYHANNSTDTVDTVLEKNVTVTHSVNLLEDKHNGKLCKLRGVAPLHLGKCNIAGWILGNPECESLSTASSWSYIVETSSSDNGTCYPGDFIDYEELREQLSSVSSFERFEIFPKTSSWPNHDSNKGVTAACPHAGAKSFYKNLIWLVKKGNSYPKLSKSYINDKGKEVLVLWGIHHPSTSADQQSLYQNADAYVFVGSSRYSKKFKPEIAIRPKVRDQEGRMNYYWTLVEPGDKITFEATGNLVVPRYAFAMERNAGSGIIISDTPVHDCNTTCQTPKGAINTSLPFQNIHPITIGKCPKYVKSTKLRLATGLRNVPSIQSRGLFGAIAGFIEGGWTGMVDGWYGYHHQNEQGSGYAADLKSTQNAIDEITNKVNSVIEKMNTQFTAVGKEFNHLEKRIENLNKKVDDGFMDIWTYNAELLVLLENERTLDYHDSNVKNLYEKVRSQLKNNAKEIGNGCFEFYHKCDNTCMESVKNGTYDYPKYSEEAKLNREEIDGVKLESTRIYQILAIYSTVASSLVLVVSLGAISFWMCSNGSLQCRICI

SEQ ID NO: 3451 - protein, 566 aa, Artificial Sequence; identical to SEQ ID NO: 2669
  derived and/or modified protein sequence (wt) from hemagglutinin__InfluenzaA__ACX31962

SEQ ID NO: 3452 - protein, 566 aa, Artificial Sequence; identical to SEQ ID NO: 2669
  derived and/or modified protein sequence (wt) from hemagglutinin__InfluenzaA__ACX31964

SEQ ID NO: 3453 - protein, 566 aa, Artificial Sequence; identical to SEQ ID NO: 2656
  derived and/or modified protein sequence (wt) from hemagglutinin__InfluenzaA__ACX35237

SEQ ID NO: 3454 - protein, 566 aa, Artificial Sequence; identical to SEQ ID NO: 2669
  derived and/or modified protein sequence (wt) from hemagglutinin__InfluenzaA__ACX35247

SEQ ID NO: 3455 - protein, 566 aa, Artificial Sequence; identical to SEQ ID NO: 2669
  derived and/or modified protein sequence (wt) from hemagglutinin__InfluenzaA__ACX35257

SEQ ID NO: 3456 - protein, 566 aa, Artificial Sequence; identical to SEQ ID NO: 2669
  derived and/or modified protein sequence (wt) from hemagglutinin__InfluenzaA__ACX35267

SEQ ID NO: 3457 - protein, 566 aa, Artificial Sequence; identical to SEQ ID NO: 2669
  derived and/or modified protein sequence (wt) from hemagglutinin__InfluenzaA__ACX35277

SEQ ID NO: 3458 - protein, 566 aa, Artificial Sequence; identical to SEQ ID NO: 2669
  derived and/or modified protein sequence (wt) from hemagglutinin__InfluenzaA__ACX35287

SEQ ID NO: 3459 - protein, 566 aa, Artificial Sequence; identical to SEQ ID NO: 2669
  derived and/or modified protein sequence (wt) from hemagglutinin__InfluenzaA__ACX35297

SEQ ID NO: 3460 - protein, 566 aa, Artificial Sequence
  derived and/or modified protein sequence (wt) from hemagglutinin__InfluenzaA__ACX35307
MKAILVVLLYTFATANADTLCIGYHANNSTDTVDTVLEKNVTVTHSVNLLEDKHNGKLCKLRGVAPLHLGKCNIAGWILGNPECESLSTASSWSYIVETSSSDNGTCYPGDFIDYEELREQLSSVSSFERFEIFPKTSSWPNHDSNKGVTAACPHAGAKSFYKNLIWLVKKGNSYPKLSKSYINDKGKEVLVLWGIHHPSTSADQQSLYQNADAYVFVGTSRYSKKFKPEIAIRPKVRDQEGRMNYYWTLVGPGDKITFEATGNLVVPRYAFAMERNAGSGIIISDTPVHDCNTTCQTPKGAINTSLPFQNIHPITIGKCPKYVKSTKLRLATGLRNVPSIQSRGLFGAIAGFIEGGWTGMVDGWYGYHHQNEQGSGYAADLKSTQNAIDEITNKVNSVIEKMNTQFTAVGKEFNHLEKRIENLNKKVDDGFLDIWTYNAELLVLLENERTLDYHDSNVKNLYEKVRSQLKNNAKEIGNGCFEFYHKCDNTCMESVKNGTYDYPKYSEEAKLNREEIDGVKLESTRIYQILAIYSTVASSLVLVVSLGAISFWMCSNGSLQCRICI

SEQ ID NO: 3461 - protein, 566 aa, Artificial Sequence; identical to SEQ ID NO: 2911
  derived and/or modified protein sequence (wt) from hemagglutinin__InfluenzaA__ACX35317

SEQ ID NO: 3462 - protein, 566 aa, Artificial Sequence
  derived and/or modified protein sequence (wt) from hemagglutinin__InfluenzaA__ACX35327
MKAILVVLLYTFATANADTLCIGYHANNSTDTVDTVLEKNVTVTHSVNLLEDKHNGKLCKLRGVAPLHLGKCNIAGWILGNPECESLSTASSWSYIVETSSSDNGTCYPGDFIDYEELREQLSSVSSFERFEIFPKTSSWPNHDSNKGVTAACPHAGAKSFYKNLIWLVKKGNSYPKLSKSYINDKGKEVLVLWGIHHPSTSADQQSLYQNADSYVFVGTSRYSKKFKPEIAIRPKVRDQEGRMNYYWTLVEPGDKITFEATGNLVVPRYAFAMERNAGSGIIISDTPVHDCNTTCQTPKGAINTSLPFQNIHPITIGKCPKYVKSTKLRLATGLRNVPSIQSRGLFGAIAGFIEGGWTGMVDGWYGYHHQNEQGSGYAADLKSTQNAIDEITNKVNSVIEKMNTQFTAVGKEFNHLEKRIENLNKKVDDGFLDIWTYNAELLVLLENERTLDYHDSNVKNLYEKVRSQLKNNAKEIGNGCFEFYHKCDNTCMESVKNGTYDYPKYSEEAKLNREEIDGVKLESTRIYQILAIYSTVASSLVLVVSLGAISFWMCSNGSLQCRICI

SEQ ID NO: 3463 - protein, 566 aa, Artificial Sequence
  derived and/or modified protein sequence (wt) from hemagglutinin__InfluenzaA__ACX36501
MKAILVVLLYTFATANADTLCIGYHANNSTDTVDTVLEKNVTVTHSVNLLEDKHNGKLCKLRGVAPLHLGKCNIAGWILGNPECESLSTASSWSYIVETSSSDNGTCYPGDFIDYEELREQLSSVSSFERFEIFPKTSSWPNHDSNKGVTAACPHAGAKSFYKNLIWLVKKGNSYPKLSKSYINDKGKEVLVLWGIHHPSTSADQQSIYQNADAYVFVGTSRYSKKFKPEIAIRPKVRDQEGRMNYYWTLVEPGDKITFEATGNLVVPRYAFAMERNAGSGIIISDTPVHDCNTTCQTPKGAINTSLPFQNIHPITIGKCPKYVKSTKLRLATGLRNVPSIQSRGLFGAIAGFIEGGWTGMVDGWYGYHHQNEQGSGYAADLKSTQNAIDEITNKVNSVIEKMNTQFTAVGKEFNHLEKRIENLNKKVDDGFLDIWTYNAELLVLLENERTLDYHDSNVKNLYEKVRSQLKNNAKEIGNGCFEFYHKCDNTCMESVKNGTYDYPKYSEEAKLNREEIDGVKLESTRIYQILAIYSTVASSLVLVVSLGAISFWMCSNGSLQCRICI

SEQ ID NO: 3464 - protein, 566 aa, Artificial Sequence
  derived and/or modified protein sequence (wt) from hemagglutinin__InfluenzaA__ACX36502
MKAILVVLLYTFATANADTLCIGYHANNSTDTVDTILEKNVTVTHSVNLLEDKHNGKLCKLRGVAPLHLGKCNIAGWILGNPECESLSTASSWSYIVETSSSDNGTCYPGDFIDYEELREQLSSVSSFERFEIFPKTSSWPNHDSNKGVTAACPHAGAKSFYKNLIWLVKKGNSYPKLSKSYINDKGKEVLVLWGIHHPSTSADQQSIYQNADAYVFVGTSRYSKKFKPEIAIRPKVRDQEGRMNYYWTLVEPGDKITFEATGNLVVPRYAFAMERNAGSGIIISDTPVHDCNTTCQTPKGAINTSLPFQNIHPITIGKCPKYVKSTKLRLATGLRNVPSIQSRGLFGAIAGFIEGGWTGMVDGWYGYHHQNEQGSGYAADLKSTQNAIDEITNKVNSVIEKMNTQFTAVGKEFNHLEKRIENLNKKVDDGFLDIWTYNAELLVLLENERTLDYHDSNVKNLYEKVRSQLKNNAKEIGNGCFEFYHKCDNTCMESVKNGTYDYPKYSEEAKLNREEIDGVKLESTRIYQILAIYSTVASSLVLVVSLGAISFWMCSNGSLQCRICI

SEQ ID NO: 3465 - protein, 566 aa, Artificial Sequence
  derived and/or modified protein sequence (wt) from hemagglutinin__InfluenzaA__ACX36503
MKAILVVLLYTFATANADTLCIGYHANNSTDTVDTILEKNVTVTHSVNLLEDKHNGKLCKLRGVAPLHLGKCNIAGWILGNPECESLSTASSWSYIVETSSSDNGTCYPGDFIDYEELREQLSSVSSFERFEIFPKTSSWPNHDSNKGVTAACPHAGAKSFYKNLIWLVKKGNSYPKLSKSYINDKGKEVLVLWGIHHPSTSADQQSIYQNADAYVFVGTSRYSKKFKPEIAIRPKVRDQEGRMNYYWTLVEPGDKITFEATGNLVVPRYAFAMERNAGSGIIISDTPVHDCNTTCQTPKGAINTSLPFQNIHPITIGKCPKYVKSTKLRLATGLRNVPSIQSRGLFGAIAGFIEGGWTGMVDGWYGYHHQNEQGSGYAADLKSTQNAIDEITNKVNSVIEKMNTQFTAVGKEFNHLEKRIENLNKKVDDGFLDIWTYNAELLVLLENERTLDYHDSNVKNLYEKVRSQLKNNTKEIGNGCFEFYHKCDNTCMESVKNGTYDYPKYSEEAKLNREEIDGVKLESTRIYQILAIYSTVASSLVLVVSLGAISFWMCSNGSLQCRICI

SEQ ID NO: 3466 - protein, 566 aa, Artificial Sequence
  derived and/or modified protein sequence (wt) from hemagglutinin__InfluenzaA__ACX47367
MKAILVVLLYTFATANADTLCIGYHANNSTDTVDTVLEKNVTVTHSVNLLEDKHNGKLCKLRGVAPLHLGKCNIAGWILGNPECESLSTASSWSYIVETSSSDNGTCYPGDFIDYEELREQLSSVSSFERFEIFPKTSSWPNHDPNKGVTAACPHAGAKSFYKNLIWLVKKGNSYPKLSKSYINDKGKEVLVLWGIHHPSTSADQQSLYQNADAYVFVGTSRYSKKFKPEIAIRPKVRDQEGRMNYYWTLVKPGDKITFEATGNLVVPRYAFAMERNAGSGIIISDTPVHDCNTTCQTPKGAINTSLPFQNIHPITIGKCPKYVKSTKLRLATGLRNVPSIQSRGLFGAIAGFIEGGWTGMVDGWYGYHHQNEQGSGYAADLKSTQNAIDEITNKVNSVIEKMNTQFTAVGKEFNHLEKRIENLNKKVDDGFLDIWTYNAELLVLLENERTLDYHDSNVKNLYEKVRSQLKNNAKEIGNGCFEFYHKCDNTCMESVKNGTYDYPKYSEEAKLNREEIDGVKLESTRIYQILAIYSTVASSLVLVVSLGAISFWMCSNGSLQCRICI

SEQ ID NO: 3467 - protein, 566 aa, Artificial Sequence
  derived and/or modified protein sequence (wt) from hemagglutinin__InfluenzaA__ACX47368
MKAILVVLLYTFATANADTLCIGYHANNSTDTVDTVLEKNVTVTHSVNLLEDKHNGKLCKLRGVAPLHLGKCNIAGWILGNPECESLSTASSWSYIVETSSSDNGTCYPGDFIDYEELREQLSSVSSFERFEIFPKTSSWPNHDPNKGVTAACPHAGAKSFYKNLIWLVKKGNSYPKLSKSYINDKGKEVLVLWGIHHPSTSADQQSLYQNADAYVFVGTSRYSKKFKPEIAIRPKVRDQEGRMNYYWTLVEPGDKITFEATGNLVVPRYAFAMERNAGSGIIISDTPVHDCNTTCQTPKGAINTSLPFQNIHPITIGKCPKYVKSTKLRLATGLRNVPSIQSRGLFGAIAGFIEGGWTGMVDGWYGYHHQNEQGSGYAADLKSTQNAIDEITNKVNSVIEKMNTQFTAVGKEFNHLEKRIENLNKKVDDGFLDIWTYNAELLVLLENERTLDYHDSNVKNLYEKVRSQLKNNAKEIGNGCFEFYHKCDNTCMESVKNGTYDYPKYSEEAKLNREEIDGVKLESTRIYQILAIYSTVASSLVLVVSLGAISFWMCSNGSLQCRICI

SEQ ID NO: 3468 - protein, 566 aa, Artificial Sequence; identical to SEQ ID NO: 3467
  derived and/or modified protein sequence (wt) from hemagglutinin__InfluenzaA__ACX47369

SEQ ID NO: 3469 - protein, 566 aa, Artificial Sequence
  derived and/or modified protein sequence (wt) from hemagglutinin__InfluenzaA__ACX47370
MKAILVVLLYTFATANADTLCIGYHANNSTDTVDTVLEKNVTVTHSVNLLEDKHNGKLCKLRGVAPLHLGKCNIAGWILGNPECESLSTASSWSYIVETSSSDNGTCYPGDFIDYEELREQLSSVSSFERFEIFPKTSSWPNHDPNKGVTAACPHAGAKSFYKNLIWLVKKGNSYPKLSKSYINDKGKEVLVLWGIHHPSTSADRQSLYQNADAYVFVGTSRYSKKFKPEIAIRPKVRDQEGRMNYYWTLVEPGDKITFEATGNLVVPRYAFAMERNAGSGIIISDTPVHDCNTTCQTPKGAINTSLPFQNIHPITIGKCPKYVKSTKLRLATGLRNVPSIQSRGLFGAIAGFIEGGWTGMVDGWYGYHHQNEQGSGYAADLKSTQNAIDEITNKVNSVIEKMNTQFTAVGKEFNHLEKRIENLNKKVDDGFLDIWTYNAELLVLLENERTLDYHDSNVKNLYEKVRSQLKNNAKEIGNGCFEFYHKCDNTCMESVKNGTYDYPKYSEEAKLNREEIDGVKLESTRIYQILAIYSTVASSLVLVVSLGAISFWMCSNGSLQCRICI

SEQ ID NO: 3470 - protein, 566 aa, Artificial Sequence; identical to SEQ ID NO: 3467
  derived and/or modified protein sequence (wt) from hemagglutinin__InfluenzaA__ACX47371

SEQ ID NO: 3471 - protein, 566 aa, Artificial Sequence; identical to SEQ ID NO: 3467
  derived and/or modified protein sequence (wt) from hemagglutinin__InfluenzaA__ACX47372

SEQ ID NO: 3472 - protein, 566 aa, Artificial Sequence; identical to SEQ ID NO: 3467
  derived and/or modified protein sequence (wt) from hemagglutinin__InfluenzaA__ACX47373

SEQ ID NO: 3473 - protein, 566 aa, Artificial Sequence; identical to SEQ ID NO: 3467
  derived and/or modified protein sequence (wt) from hemagglutinin__InfluenzaA__ACX47374

SEQ ID NO: 3474 - protein, 566 aa, Artificial Sequence
  derived and/or modified protein sequence (wt) from hemagglutinin__InfluenzaA__ACX47375
MKAILVVLLYTFATANADTLCIGYHANNSTDTVDTVLEKNVTVTHSVNLLEDKHNGKLCKLRGVAPLHLGKCNIAGWILGNPECESLSTASSWSYIVETSSSDNGTCYPGDFIDYEELREQLSSVSSFERFEIFPKTSSWPNHDPNKGVTAACPHAGAKSFYKNLIWLVKKGNSYPKLSKSYINDKGKEVLVLWGIHHPSTSADQQSLYQNADAYVFVGTSRYSKKFKPEIAIRPKVRDQEGRMNYYWTLVEPGDKITFEATGNLVVPRYAFAMERNAGSGIIISDTPVHDCNTTCQTPNGAINTSLPFQNIHPITIGKCPKYVKSTKLRLATGLRNVPSIQSRGLFGAIAGFIEGGWTGMVDGWYGYHHQNEQGSGYAADLKSTQNAIDEITNKVNSVIEKMNTQFTAVGKEFNHLEKRIENLNKKVDDGFLDIWTYNAELLVLLENERTLDYHDSNVKNLYEKVRSQLKNNAKEIGNGCFEFYHKCDNTCMESVKNGTYDYPKYSEEAKLNREEIDGVKLESTRIYQILAIYSTVASSLVLVVSLGAISFWMCSNGSLQCRICI

SEQ ID NO: 3475 - protein, 566 aa, Artificial Sequence; identical to SEQ ID NO: 3467
  derived and/or modified protein sequence (wt) from hemagglutinin__InfluenzaA__ACX47376

SEQ ID NO: 3476 - protein, 566 aa, Artificial Sequence; identical to SEQ ID NO: 3467
  derived and/or modified protein sequence (wt) from hemagglutinin__InfluenzaA__ACX47377

SEQ ID NO: 3477 - protein, 566 aa, Artificial Sequence
  derived and/or modified protein sequence (wt) from hemagglutinin__InfluenzaA__ACX47380
MKAILVVLLYTFATANADTLCIGYHANNSTDTVDTVLEKNVTVTHSVNLLEDKHNGKLCKLRGVAPLHLGKCNIAGWILGNPECESLSTTSSWSYIVETSSSDNGTCYPGDFIDYEELREQLSSVSSFERFEIFPKTSSWPNHDSNKGVTAACPHAGAKSFYKNLIWLVKKGNSYPKLSKSYINDKGKEVLVLWGIHHPSTSADQQSLYQNADAYVFVGTSRYSKKFKPEIAIRPKVRDQEGRMNYYWTLVEPGDKITFEATGNLVVPRYAFVMERNAGSGIIISDTPVHDCNTTCQTPKGAINTSLPFQNIHPITIGKCPKYVKSTKLRLATGLRNVPSIQSRGLFGAIAGFIEGGWTGMVDGWYGYHHQNEQGSGYAADLKSTQNAIDEITNKVNSVIEKMNTQFTAVGKEFNHLEKRIENLNKKVDDGFLDIWTYNAELLVLLENERTLDYHDSNVKNLYEKVRSQLKNNAKEIGNGCFEFYHKCDNTCMESVKNGTYDYPKYSEEAKLNREEIDGVKLESTRIYQILAIYSTVASSLVLVVSLGAISFWMCSNGSLQCRICI

SEQ ID NO: 3478 - protein, 566 aa, Artificial Sequence; identical to SEQ ID NO: 3477
  derived and/or modified protein sequence (wt) from hemagglutinin__InfluenzaA__ACX47381

SEQ ID NO: 3479 - protein, 566 aa, Artificial Sequence; identical to SEQ ID NO: 3477
  derived and/or modified protein sequence (wt) from hemagglutinin__InfluenzaA__ACX47382

SEQ ID NO: 3480 - protein, 566 aa, Artificial Sequence
  derived and/or modified protein sequence (wt) from hemagglutinin__InfluenzaA__ACX47383
MKAILVVLLYTFATANADTLCIGYHANNSTDTVDTVLEKNVTVTHSVNLLEDKHNGKLCKLRGVAPLHLGKCNIAGWILGNPECESLSTTSSWSYIVETSSSDNGTCYPGDFIDYEELREQLSSVSSFERFEIFPKTSSWPNHDSNKGVTAACPHAGAKSFYKNLIWLVKKGNSYPKLSKSYINDKGKEVLVLWGIHHPSTSADQQSLYQNADAYVFVGTSRYSKKFKPEIAIRPKVRDQEGRMNYYWTLVEPGDKITFEATGNLVVPRYAFAMERNAGSGIIISDTPVHDCNTTCQTPKGAINTSLPFQNIHPITIGKCPKYVKSTKLRLATGLRNVPSIQSRGLFGAIAGFIEGGWTGMVDGWYGYHHQNEQGSGYAADLKSTQNAIDEITNKVNSVIEKMNTQFTAVGKEFNHLEKRIENLNKKVDDGFLDIWTYNAELLVLLENERTLDYHDSNVKNLYEKVRSQLKNNAKEIGNGCFEFYHKCDNTCMESVKNGTYDYPKYSEEAKLNREKIDGVKLESTRIYQILAIYSTVASSLVLVVSLGAISFWMCSNGSLQCRICI

SEQ ID NO: 3481 - protein, 566 aa, Artificial Sequence
  derived and/or modified protein sequence (wt) from hemagglutinin__InfluenzaA__ACX47384
MKAILVVLLYTFATANADTLCIGYHANNSTDTVDTVLEKNVTVTHSVNLLEDKHNGKLCKLRGVAPLHLGKCNIAGWILGNPECESLSTTSSWSYIVETSSSDNGTCYPGDFIDYEELREQLSSVSSFERFEIFPKTSSWPNHDSNKGVTAACPHAGAKSFYKNLIWLVKKGNSYPKLSKSYINDKGKEVLVLWGIHHPSTSADQQSLYQNADAYVFVGTSRYSKKFKPEIAIRPKVRDQEGRMNYYWTLVEPGDKITFEATGNLVVPRYAFAMERNAGSGIIISDTPVHDCNTTCQTPKGAINTSLPFQNIHPITIGKCPKYVKSTKLRLATGLRNVPSIQSRGLFGAIAGFIEGGWTGMVDGWYGYHHQNEQGSGYAADLKSTQNAIDEITNKVNSVIEKMNTQFTAVGKEFNHLEKRIENLNKKVDDGFLDIWTYNAELLVLLENERTLDYHDSNVKNLYEKVRSQLKNNAKEIGNGCFEFYHKCDNTCMESVKNGTYDYPKYSEEAKLNREEIDGVKLESTRIYQILAIYSTVASSLVLVVSLGAISFWMCSNGSLQCRICI

SEQ ID NO: 3482 - protein, 566 aa, Artificial Sequence; identical to SEQ ID NO: 3481
  derived and/or modified protein sequence (wt) from hemagglutinin__InfluenzaA__ACX47385

SEQ ID NO: 3483 - protein, 566 aa, Artificial Sequence; identical to SEQ ID NO: 3481
  derived and/or modified protein sequence (wt) from hemagglutinin__InfluenzaA__ACX47387

SEQ ID NO: 3484 - protein, 566 aa, Artificial Sequence; identical to SEQ ID NO: 2669
  derived and/or modified protein sequence (wt) from hemagglutinin__InfluenzaA__ACX55834

SEQ ID NO: 3485 - protein, 566 aa, Artificial Sequence; identical to SEQ ID NO: 3467
  derived and/or modified protein sequence (wt) from hemagglutinin__InfluenzaA__ACX61574

SEQ ID NO: 3486 - protein, 566 aa, Artificial Sequence; identical to SEQ ID NO: 2669
  derived and/or modified protein sequence (wt) from hemagglutinin__InfluenzaA__ACX61575

SEQ ID NO: 3487 - protein, 566 aa, Artificial Sequence
  derived and/or modified protein sequence (wt) from hemagglutinin__InfluenzaA__ACX83577
MKAILVVLLYTFATANADTLCIGYHANNSTDTVDTVLEKNVTVTHSVNLLEDKHNGKLCKLRGVAPLHLGKCNIAGWILGNPECESFSTSSSWSYIVETSSSDNGTCYPGDFIDYEELREQLSSVSSFERFEIFPKTSSWPNHDSNKGVTAACPHAGAKSFYKNLIWLVKKGNSYPKLSKSYINDKGKEVLVLWGIHHPSTSADQQSLYQNADAYVFVGTSRYSKKFKPEIAIRPKVRGQEGRMNYYWTLVEPGDKITFEATGNLVVPRYAFAMERNAGSGIIISDTPVHDCNTTCQTPKGAINTSLPFQNIHPITIGKCPKYVKSTKLRLATGLRNVPSIQSRGLFGAIAGFIEGGWTGMVDGWYGYHHQNEQGSGYAADLKSTQNAIDEITNKVNSVIEKMNTQFTAVGKEFNHLEKRIENLNKKVDDGFLDIWTYNAELLVLLENERTLDYHDSNVKNLYEKVRSQLKNNAKEIGNGCFEFYHKCDNTCMESVKNGTYDYPKYSEEAKLNREEIDGVKLESTRIYQILAIYSTVASSLVLVVSLGAISFWMCSNGSLQCRICI

SEQ ID NO: 3488 - protein, 566 aa, Artificial Sequence
  derived and/or modified protein sequence (wt) from hemagglutinin__InfluenzaA__ACX94091
MKAILVVLLYTFATANADTLCIGYHANNSTDTVDTVLEKNVTVTHSVNLLEDKHNGKLCKLRGVAPLHLGKCNIAGWILGNPECESLSTASSWSYIVETSSSDNGTCYPGDFIDYEELREQLSSVSSFERFEIFPKTISWPNHDSNKGVTAACPHAGAKSFYKNLIWLVKKGNSYPKLSKSYINDKGKEVLVLWGIHHPSTSADQQSLYQNADAYVFVGTSRYSKKFKPEIAIRPKVRDQEGRMNYYWTLVEPGDKITFEATGNLVVPRYAFAMERNAGSGIIISDTPVHDCNTTCQTPKGAINTSLPFQNIHPITIGKCSKYVKSTKLRLATGLRNVPSIQSRGLFGAIAGFIEGGWTGMVDGWYGYHHQNEQGSGYAADLKSTQNAIDEITNKVNSVIEKMNTQFTAVGKEFNHLEKRIENLNKKVDDGFLDIWTYNAELLVLLENERTLDYHDSNVKNLYEKVRSQLKNNAKEIGNGCFEFYHKCDNTCMESVKNGTYDYPKYSEEAKLNREEIDGVKLESTRIYQILAIYSTVASSLVLVVSLGAISFWMCSNGSLQCRICI

SEQ ID NO: 3489 - protein, 566 aa, Artificial Sequence
  derived and/or modified protein sequence (wt) from hemagglutinin__InfluenzaA__ACY26192
MKAILVVLLYTFATANADTLCIGYHANNSTDTVDTVLEKNVTVTHSVNLLEDKHNGKLCKLRGVAPLHLGKCNIAGWILGNPECESLSTASSWSYIVETSSSDNGTCYPGDFIDYEELREQLSSVSSFERFEIFPKTSSWPNHDSNKGVTAACPHAGAKSFYKNLIWLVKKGNSYPKLSKSYINDKGKEVLVLWGIHHPSTSADQQSLYQNADAYVFVGTSRYSKKFKPEIAIRPKVRDQEGRMNYYWTLVEPGDKITFEATGNLVVPRYAFAMERNAGSGIIISDTPVHNCNTTCQTPKGAINTSLPFQNIHPITIGKCPKYVKSTKLRLATGLRNVPSIQSRGLFGAIAGFIEGGWTGMVDGWYGYHHQNEQGSGYAADLKSTQDAIDEITNKVNSVIEKMNTQFTAVGKEFNHLEKRIENLNKKVDDGFLDIWTYNAELLVLLENERTLDYHDSNVKNLYEKVRSQLKNNAKEIGNGCFEFYHKCDNTCMESVKNGTYDYPKYSEEAKLNREEIDGVKLESTRIYQILAIYSTVASSLVLVVSLGAISFWMCSNGSLQCRICI

SEQ ID NO: 3490 - protein, 566 aa, Artificial Sequence; identical to SEQ ID NO: 3238
  derived and/or modified protein sequence (wt) from hemagglutinin__InfluenzaA__ACY26202

SEQ ID NO: 3491 - protein, 566 aa, Artificial Sequence; identical to SEQ ID NO: 2669
  derived and/or modified protein sequence (wt) from hemagglutinin__InfluenzaA__ACY46103

SEQ ID NO: 3492 - protein, 566 aa, Artificial Sequence; identical to SEQ ID NO: 2669
  derived and/or modified protein sequence (wt) from hemagglutinin__InfluenzaA__ACY46113

SEQ ID NO: 3493 - protein, 566 aa, Artificial Sequence
  derived and/or modified protein sequence (wt) from hemagglutinin__InfluenzaA__ACY46123
MKAILVVLLYTFATANADTLCIGYHANNSTDTVDTVLEKNVTVTHSVNLLEDKHNGKLCKLRGVAPLHLGKCNIAGWILGNPECESLSTASSWSYIVETSSSDNGTCYPGDFIDYEELREQLSSVSSFERFEIFPKTSSWPNHDSNKGVTAACPHAGAKSFYKNLIWLVKKGNSYPKLSKSYINDKGKEVLVLWGIHHPSTSADQQSLYQNADAYVFVGTSRYSKKFKPEIAIRPKVGDQEGRMNYYWTLVEPGDKITFEATGNLVVPRYAFAMERNAGSGIIISDTPVHDCNTTCQTPKGAINTSLPFQNIHPITIGKCPKYVKSTKLRLATGLRNVPSIQSRGLFGAIAGFIEGGWTGMVDGWYGYHHQNEQGSGYAADLKSTQNAIDEITNKVNSVIEKMNTQFTAVGKEFNHLEKRIENLNKKVDDGFLDIWTYNAELLVLLENERTLDYHDSNVKNLYEKVRSQLKNNAKEIGNGCFEFYHKCDNTCMESVKNGTYDYPKYSEEAKLNREEIDGVKLESTRIYQILAIYSTVASSLVLVVSLGAISFWMCSNGSLQCRICI

SEQ ID NO: 3494 - protein, 566 aa, Artificial Sequence; identical to SEQ ID NO: 2669
  derived and/or modified protein sequence (wt) from hemagglutinin__InfluenzaA__ACY46133

SEQ ID NO: 3495 - protein, 566 aa, Artificial Sequence; identical to SEQ ID NO: 2669
  derived and/or modified protein sequence (wt) from hemagglutinin__InfluenzaA__ACY46163

SEQ ID NO: 3496 - protein, 566 aa, Artificial Sequence
  derived and/or modified protein sequence (wt) from hemagglutinin__InfluenzaA__ACY46173
MKAILVVLLYTFATANADTLCIGYHANNSTDTVDTVLEKNVTVTHSVNLLEDKHNGKLCKLRGVAPLHLGKCNIAGWILGNPECESLSTASSWSYIVETSSSDNGTCYPGDFIDYEELREQLSSVSSFERFEIFPKTSSWPNHDSNKGVTAACPHAGAKSFYKNLIWLVKKGNSYPKLSKSYINDKGKEVLVLWGIHHPSTSADQQSLYQNADAYVFVGSSKYSKKFKPEIAIRPKVRDQEGRMNYYWTLVEPGDKITFEATGNLVVPRYAFAMERNAGSGIIISDTPVHDCNTTCQTPKGAINTSLPFQNIHPITIGKCPKYVKSTKLRLATGLRNVPSIQSRGLFGAIAGFIEGGWTGMVDGWYGYHHQNEQGSGYAADLKSTQNAIDEITNKVNSVIEKMNTQFTAVGKEFNHLEKRIENLNKKVDDGFLDIWTYNAELLVLLENERTLDYHDSNVKNLYEKVRSQLKNNAKEIGNGCFEFYHKCDNTCMESVKNGTYDYPKYSEEAKLNREEIDGVKLESTRIYQILAIYSTVASSLVLVVSLGAISFWMCSNGSLQCRICI

SEQ ID NO: 3497 - protein, 566 aa, Artificial Sequence; identical to SEQ ID NO: 2669
  derived and/or modified protein sequence (wt) from hemagglutinin__InfluenzaA__ACY46213

SEQ ID NO: 3498 - protein, 566 aa, Artificial Sequence; identical to SEQ ID NO: 2669
  derived and/or modified protein sequence (wt) from hemagglutinin__InfluenzaA__ACY46223

SEQ ID NO: 3499 - protein, 566 aa, Artificial Sequence; identical to SEQ ID NO: 2669
  derived and/or modified protein sequence (wt) from hemagglutinin__InfluenzaA__ACY46233

SEQ ID NO: 3500 - protein, 566 aa, Artificial Sequence; identical to SEQ ID NO: 2669
  derived and/or modified protein sequence (wt) from hemagglutinin__InfluenzaA__ACY46243

SEQ ID NO: 3501 - protein, 566 aa, Artificial Sequence; identical to SEQ ID NO: 2669
  derived and/or modified protein sequence (wt) from hemagglutinin__InfluenzaA__ACY46253

SEQ ID NO: 3502 - protein, 566 aa, Artificial Sequence; identical to SEQ ID NO: 2669
  derived and/or modified protein sequence (wt) from hemagglutinin__InfluenzaA__ACY46263

SEQ ID NO: 3503 - protein, 566 aa, Artificial Sequence; identical to SEQ ID NO: 2669
  derived and/or modified protein sequence (wt) from hemagglutinin__InfluenzaA__ACY46273

SEQ ID NO: 3504 - protein, 566 aa, Artificial Sequence; identical to SEQ ID NO: 2669
  derived and/or modified protein sequence (wt) from hemagglutinin__InfluenzaA__ACY46283

SEQ ID NO: 3505 - protein, 566 aa, Artificial Sequence
  derived and/or modified protein sequence (wt) from hemagglutinin__InfluenzaA__ACY46293
MKAILVVLLYTFATANADTLCIGYHANNSTDTVDTVLEKNVTVTHSVNLLEDKHNGKLCKLRGVAPLHLGKCNIAGWILGNPECESLSTASSWSYIVETSSSDNGTCYPGDFIDYEELREQLSSVSSFERFEIFPKTSSWPNHDSNKGVTAACPHAGAKSFYKNLIWLVKKGNSYPKLSKSYINDKGKEVLVLWGIHHPSTSADQQSLYQNADAYVFVGTSRYSKKFKPEIAIRPKVRDQEGRMNYYWTLVEPGDKITFEATGNLVVPRYAFAMERNAGSGIIISDTPVHDCNTTCQTPKGAINTSLPFQNIHPITIGKCPKYVKSTKLRLAAGLRNVPSIQSRGLFGAIAGFIEGGWTGMVDGWYGYHHQNEQGSGYAADLKSTQNAIDEITNKVNSVIEKMNTQFTAVGKEFNHLEKRIENLNKKVDDGFLDIWTYNAELLVLLENERTLDYHDSNVKNLYEKVRSQLKNNAKEIGNGCFEFYHKCDNTCMESVKNGTYDYPKYSEEAKLNREEIDGVKLESTRIYQILAIYSTVASSLVLVVSLGAISFWMCSNGSLQCRICI

SEQ ID NO: 3506 - protein, 566 aa, Artificial Sequence; identical to SEQ ID NO: 2669
  derived and/or modified protein sequence (wt) from hemagglutinin__InfluenzaA__ACY46303

SEQ ID NO: 3507 - protein, 566 aa, Artificial Sequence; identical to SEQ ID NO: 2669
  derived and/or modified protein sequence (wt) from hemagglutinin__InfluenzaA__ACY46313

SEQ ID NO: 3508 - protein, 566 aa, Artificial Sequence; identical to SEQ ID NO: 2669
  derived and/or modified protein sequence (wt) from hemagglutinin__InfluenzaA__ACY46323

SEQ ID NO: 3509 - protein, 566 aa, Artificial Sequence; identical to SEQ ID NO: 2669
  derived and/or modified protein sequence (wt) from hemagglutinin__InfluenzaA__ACY46343

SEQ ID NO: 3510 - protein, 566 aa, Artificial Sequence; identical to SEQ ID NO: 2669
  derived and/or modified protein sequence (wt) from hemagglutinin__InfluenzaA__ACY46353

SEQ ID NO: 3511 - protein, 566 aa, Artificial Sequence
  derived and/or modified protein sequence (wt) from hemagglutinin__InfluenzaA__ACY46373
MKAILIVLLYTFATANADTLCIGYHANNSTDTVDTVLEKNVTVTHSVNLLEDKHNGKLCKLRGVAPLHLGKCNIAGWILGNPECESLSTASSWSYIVETSSSDNGTCYPGDFIDYEELREQLSSVSSFERFEIFPKTSSWPNHDSNKGVTAACPHAGAKSFYKNLIWLVKKGNSYPKLSKSYINDKGKEVLVLWGIHHPSTSADQQSLYQNADAYVFVGTSRYSKKFKPEIAIRPKVRDQEGRMNYYWTLVEPGDKITFEATGNLVVPRYAFAMERNAGSGIIISDTPVHDCNTTCQTPKGAINTSLPFQNIHPITIGKCPKYVKSTKLRLATGLRNVPSIQSRGLFGAIAGFIEGGWTGMVDGWYGYHHQNEQGSGYAADLKSTQNAIDEITNKVNSVIEKMNTQFTAVGKEFNHLEKRIENLNKKVDDGFLDIWTYNAELLVLLENERTLDYHDSNVKNLYEKVRSQLKNNAKEIGNGCFEFYHKCDNTCMESVKNGTYDYPKYSEEAKLNREEIDGVKLESTRIYQILAIYSTVASSLVLVVSLGAISFWMCSNGSLQCRICI

SEQ ID NO: 3512 - protein, 566 aa, Artificial Sequence
  derived and/or modified protein sequence (wt) from hemagglutinin__InfluenzaA__ACY46383
MKAILVVLLYTFATANADTLCIGYHANNSTDTVDTVLEKNVTVTHSVNLLEDKHNGKLCKLRGVAPLHLGKCNIAGWILGNPECESLSTASSWSYIVETSSSDNGTCYPGDFIDYEELREQLSSVSSFERFEIFPKTSSWPNHDSNKGVTAACPHAGAKSFYKNLIWLVKKGNSYPKLSKSYINDKGKEVLVLWGIHHPSTSADQQSLYQNADAYVFVGSSRYSKKFKPEIAIRPKVRDQEGRMNYYWTLVEPGDKITFEATGNLVVPRYAFAMERNAGSGIIISDTPVHDCNTTCQTPKGAINTSLPFHNIHPITIGKCPKYVKSTKLRLATGLRNVPSIQSRGLFGAIAGFIEGGWTGMVDGWYGYHHQNEQGSGYAADLKSTQNAIDEITNKVNSVIEKMNTQFTAVGKEFNHLEKRIENLNKKVDDGFLDIWTYNAELLVLLENERTLDYHDSNVKNLYEKVRSQLKNNAKEIGNGCFEFYHKCDNTCMESVKNGTYDYPKYSEEAKLNREEIDGVKLESTRIYQILAIYSTVASSLVLVVSLGAISFWMCSNGSLQCRICI

SEQ ID NO: 3513 - protein, 566 aa, Artificial Sequence; identical to SEQ ID NO: 2669
  derived and/or modified protein sequence (wt) from hemagglutinin__InfluenzaA__ACY46393

SEQ ID NO: 3514 - protein, 566 aa, Artificial Sequence; identical to SEQ ID NO: 2669
  derived and/or modified protein sequence (wt) from hemagglutinin__InfluenzaA__ACY46403

SEQ ID NO: 3515 - protein, 566 aa, Artificial Sequence; identical to SEQ ID NO: 2669
  derived and/or modified protein sequence (wt) from hemagglutinin__InfluenzaA__ACY46413

SEQ ID NO: 3516 - protein, 566 aa, Artificial Sequence; identical to SEQ ID NO: 2669
  derived and/or modified protein sequence (wt) from hemagglutinin__InfluenzaA__ACY46433

SEQ ID NO: 3517 - protein, 566 aa, Artificial Sequence; identical to SEQ ID NO: 2669
  derived and/or modified protein sequence (wt) from hemagglutinin__InfluenzaA__ACY46443

SEQ ID NO: 3518 - protein, 566 aa, Artificial Sequence; identical to SEQ ID NO: 2669
  derived and/or modified protein sequence (wt) from hemagglutinin__InfluenzaA__ACY46453

SEQ ID NO: 3519 - protein, 566 aa, Artificial Sequence
  derived and/or modified protein sequence (wt) from hemagglutinin__InfluenzaA__ACY46463
MKAILVVMLYTFATANADTLCIGYHANNSTDTVDTVLEKNVTVTHSVNLLEDKHNGKLCKLRGVAPLHLGKCNIAGWILGNPECESLSTASSWSYIVETSSSDNGTCYPGDFIDYEELREQLSSVSSFERFEIFPKTSSWPNHDSNKGVTAACPHAGAKSFYKNLIWLVKKGNSYPKLSKSYINDKGKEVLVLWGIHHPSTSADQQSLYQNADAYVFVGTSRYSKKFKPEIAIRPKVRDQEGRMNYYWTLVEPGDKITFEATGNLVVPRYAFAMVRNAGSGIIISDTPVHDCNTTCQTPKGAINTSLPFQNIHPITIGKCPKYVKSTKLRLATGLRNVPSIQSRGLFGAIAGFIEGGWTGMVDGWYGYHHQNEQGSGYAADLKSTQNAIDEITNKVNSVIEKMNTQFTAVGKEFNHLEKRIENLNKKVDDGFLDIWTYNAELLVLLENERTLDYHDSNVKNLYEKVRSQLKNNAKEIGNGCFEFYHKCDNTCMESVKNGTYDYPKYSEEAKLNREEIDGVKLESTRIYQILAIYSTVASSLVLVVSLGAISFWMCSNGSLQCRICI

SEQ ID NO: 3520 - protein, 566 aa, Artificial Sequence; identical to SEQ ID NO: 2669
  derived and/or modified protein sequence (wt) from hemagglutinin__InfluenzaA__ACY46473

SEQ ID NO: 3521 - protein, 566 aa, Artificial Sequence; identical to SEQ ID NO: 2656
  derived and/or modified protein sequence (wt) from hemagglutinin__InfluenzaA__ACY46493

SEQ ID NO: 3522 - protein, 566 aa, Artificial Sequence
  derived and/or modified protein sequence (wt) from hemagglutinin__InfluenzaA__ACY46513
MKAILVVLLYTFATANADTLCIGYHANNSTDTVDTVLEKNVTVTHSVNLLEDKHNGKLCKLRGVAPLHLGKCNIAGWILGNPECESLSTASSWSYIVETSSSDNGTCYPGDFIDYEELREQLSSVSSFERFEIFPKTSSWPNHDSNKGVTAACPHAGAKSFYKNLIWLVKKGNSYPKLSKSYINDKGKEVLVLWGIHHPSTSADQQSLYQNADAYVFVGSSKYSKKFKPEIAIRPKVRDQEGRMNYYWTLVEPGDKITFEATGNLVVPRYAFAMERNAGSGIIISDTPVHDCNTTCQTPKGAINTSLPFQNIHPITIGKCPKYVKSTKLRLATGLRNVPSIQSRGLFGAIAGFIEGGWTGMVDGWYGYHHQNEQGSGYAADLKSTQNAIDEITNKVNSVIEKMNTQFTAVGKEFNHLEKRIENLNKKVDDGFLDIWTYNAELLVLLDNERTLDYHDSNVKNLYEKVRSQLKNNAKEIGNGCFEFYHKCDNTCMESVKNGTYDYPKYSEEAKLNREEIDGVKLESTRIYQILAIYSTVASSLVLVVSLGAISFWMCSNGSLQCRICI

SEQ ID NO: 3523 - protein, 566 aa, Artificial Sequence; identical to SEQ ID NO: 2669
  derived and/or modified protein sequence (wt) from hemagglutinin__InfluenzaA__ACY46523

SEQ ID NO: 3524 - protein, 566 aa, Artificial Sequence; identical to SEQ ID NO: 2669
  derived and/or modified protein sequence (wt) from hemagglutinin__InfluenzaA__ACY46533

SEQ ID NO: 3525 - protein, 566 aa, Artificial Sequence; identical to SEQ ID NO: 2669
  derived and/or modified protein sequence (wt) from hemagglutinin__InfluenzaA__ACY46562

SEQ ID NO: 3526 - protein, 566 aa, Artificial Sequence; identical to SEQ ID NO: 2669
  derived and/or modified protein sequence (wt) from hemagglutinin__InfluenzaA__ACY46572

SEQ ID NO: 3527 - protein, 566 aa, Artificial Sequence; identical to SEQ ID NO: 2669
  derived and/or modified protein sequence (wt) from hemagglutinin__InfluenzaA__ACY46582

SEQ ID NO: 3528 - protein, 566 aa, Artificial Sequence; identical to SEQ ID NO: 2669
  derived and/or modified protein sequence (wt) from hemagglutinin__InfluenzaA__ACY46592

SEQ ID NO: 3529 - protein, 566 aa, Artificial Sequence; identical to SEQ ID NO: 2669
  derived and/or modified protein sequence (wt) from hemagglutinin__InfluenzaA__ACY46622

SEQ ID NO: 3530 - protein, 566 aa, Artificial Sequence
  derived and/or modified protein sequence (wt) from hemagglutinin__InfluenzaA__ACY46672
MKAILVVLLYTFATANADTLCIGYHANNSTDTVDTVLEKNVTVTHSVNLLEDKHNGKLCKLRGVAPLHLGKCNIAGWILGNPECESLSTASSWSYIVETSSSDNGTCYPGDFIDYEELREQLSSVSSFERFEIFPKTSSWPNHDSNKGVTAACPHAGAKSFYKNLIWLVKKGNSYPKLSKSYINDKGKEVLVLWGIHHPSTSADQQSLYQNADAYVFVGTSRYSKKFKPEIAIRPKVRDQEGRMNYYWTLVEPGDKITFEATGNLVVPRYAFAMVRNAGSGIIISDTPVHDCNTTCQTPKGAINTSLPFQNIHPITIGKCPKYVKSTKLRLATGLRNVPSIQSRGLFGAIAGFIEGGWTGMVDGWYGYHHQNEQGSGYAADLKSTQNAIDEITNKVNSVIEKMNTQFTAVGKEFNHLEKRIENLNKKVDDGFLDIWTYNAELLVLLENERTLDYHDSNVKNLYEKVRSQLKNNAKEIGNGCFEFYHKCDNTCMESVKNGTYDYPKYSEEAKLNREEIDGVKLESTRIYQILAIYSTVASSLVLVVSLGAISFWMCSNGSLQCRICI

SEQ ID NO: 3531 - protein, 566 aa, Artificial Sequence; identical to SEQ ID NO: 2669
  derived and/or modified protein sequence (wt) from hemagglutinin__InfluenzaA__ACY46682

SEQ ID NO: 3532 - protein, 566 aa, Artificial Sequence; identical to SEQ ID NO: 2669
  derived and/or modified protein sequence (wt) from hemagglutinin__InfluenzaA__ACY46692

SEQ ID NO: 3533 - protein, 566 aa, Artificial Sequence; identical to SEQ ID NO: 2669
  derived and/or modified protein sequence (wt) from hemagglutinin__InfluenzaA__ACY46712

SEQ ID NO: 3534 - protein, 566 aa, Artificial Sequence
  derived and/or modified protein sequence (wt) from hemagglutinin__InfluenzaA__ACY46722
MKAILVVLLYTFATANADTLCIGYHANNSTDTVDTVLEKNVTVTHSVNLLEDKHNGKLCKLRGVAPLHLGKCNIAGWILGNPECESLSTASSWSYIVETSSSDNGTCYPGDFIDYEELREQLSSVSSFERFEIFPKTSSWPNHDSNKGVTAACPHAGAKSFYKNLIWLVKKGNSYPKLSKSYINDKGKEVLVLWGIHHPSTSAGQQSLYQNADAYVFVGTSRYSKKFKPEIAIRPKVRDQEGRMNYYWTLVEPGDKITFEATGNLVVPRYAFAMERNAGSGIIISDTPVHDCNTTCQTPKGAINTSLPFQNIHPITIGKCPKYVKSTKLRLATGLRNVPSIQSRGLFGAIAGFIEGGWTGMVDGWYGYHHQNEQGSGYAADLKSTQNAIDEITNKVNSVIEKMNTQFTAVGKEFNHLEKRIENLNKKVDDGFLDIWTYNAELLVLLENERTLDYHDSNVKNLYEKVRSQLKNNAKEIGNGCFEFYHKCDNTCMESVKNGTYDYPKYSEEAKLNREEIDGVKLESTRIYQILAIYSTVASSLVLVVSLGAISFWMCSNGSLQCRICI

SEQ ID NO: 3535 - protein, 566 aa, Artificial Sequence
  derived and/or modified protein sequence (wt) from hemagglutinin__InfluenzaA__ACY46742
MKAILVVLLYTFATANADTLCIGYHANNSTDTVDTVLEKNVTVTHSVNLLEDKHNGKLCKLRGVAPLHLGKCNIAGWILGNPECESLSTASSWSYIVETSSSDNGTCYPGNFIDYEELREQLSSVSSFERFEIFPKTSSWPNHDSNKGVTAACPHAGAKSFYKNLIWLVKKGNSYPKLSKSYINDKGKEVLVLWGIHHPSTSADQQSLYQNADAYVFVGTSRYSKKFKPEIAIRPKVRDQEGRMNYYWTLVEPGDKITFEATGNLVVPRYAFAMERNAGSGIIISDTPVHDCNTTCQTPKGAINTSLPFQNIHPITIGKCPKYVKSTKLRLATGLRNVPSIQSRGLFGAIAGFIEGGWTGMVDGWYGYHHQNEQGSGYAADLKSTQNAIDEITNKVNSVIEKMNTQFTAVGKEFNHLEKRIENLNKKVDDGFLDIWTYNAELLVLLENERTLDYHDSNVKNLYEKVRSQLKNNAKEIGNGCFEFYHKCDNTCMESVKNGTYDYPKYSEEAKLNREEIDGVKLESTRIYQILAIYSTVASSLVLVVSLGAISFWMCSNGSLQCRICI

SEQ ID NO: 3536 - protein, 566 aa, Artificial Sequence; identical to SEQ ID NO: 2669
  derived and/or modified protein sequence (wt) from hemagglutinin__InfluenzaA__ACY46762

SEQ ID NO: 3537 - protein, 566 aa, Artificial Sequence; identical to SEQ ID NO: 2669
  derived and/or modified protein sequence (wt) from hemagglutinin__InfluenzaA__ACY46772

SEQ ID NO: 3538 - protein, 566 aa, Artificial Sequence; identical to SEQ ID NO: 2669
  derived and/or modified protein sequence (wt) from hemagglutinin__InfluenzaA__ACY46903

SEQ ID NO: 3539 - protein, 566 aa, Artificial Sequence; identical to SEQ ID NO: 2695
  derived and/or modified protein sequence (wt) from hemagglutinin__InfluenzaA__ACY77534

SEQ ID NO: 3540 - protein, 565 aa, Artificial Sequence
  derived and/or modified protein sequence (wt) from hemagglutinin__InfluenzaA__ACY77544
MKAILVVMLYTFATANADTLCIGYHANNSTDTVDTVLEKNVTVTHSVNLLEDKHNGKLCKLRGVAPLHLGKCNIAGWILGNPECESLSTASSWSYIVETSSSDNGTCYPGDFIDYEELREQLSSVSSFERFEIFPKTSSWPNHDSNKGVTAACPHAGAKSFYKNLIWLVKKGNSYPKLSKSYINDKGKEVLVLWGIHHPSTSADQQSLYQNADAYVFVGSSRYSKKFKPEIAIRPKVRDQEGRMNYYWTLVEPGDKITFEATGNLVVPRYAFAMERNAGSGIIISDTTVHDCNTTCQTPKGAINTSLPFQNIHPITIGKCPKYVKSTKLRLATGLRNVPSIQSRGLFGAIAGFIEGGWTGMVDGWYGYHHQNEQGSGYAADLKSTQNAIDEITNKVNSVIEKMNTQFTAVGKEFNHLEKRIENLNKKVDDGFLDIWTYNAELLVLLENERTLDYHDSNVKNLYEKVRSQLKNNAKEIGNGCFEFYHKCDNTCMESVKNGTYDYPKYSEEAKLNREEIDGVKLESTRIYQILAIYSTVASSLVLVVSLGAISFWMCSWSLQCRICI

SEQ ID NO: 3541 - protein, 565 aa, Artificial Sequence
  derived and/or modified protein sequence (wt) from hemagglutinin__InfluenzaA__ACY77554
MKAILVVLLYTFATANADTLCIGYHANNSTDTVDTVLEKNVTVTHSVNLLEDKHNGKLCKLRGVAPLHLGKCNIAGWILGNPECESLSTASSWSYIVETSSSDNGTCYPGDFIDYEELREQLSSVSSFERFEIFPKTSSWPNHDSNKGVTAACPHAGAKSFYKNLIWLVKKGNSYPKLSKSYINDKGKEVLVLWGIHHPSTSADQQSLYQNADAYVFVGTSRYSKKFKPEIAIRPKVRDQEGRMNYYWTLVEPGDKITFEATGNLVVPRYAFAMERNAGSGIIISDTPVHNCNTTCQTPKGAINTSLPFQNIHPITIGKCPKYVKSTKLRLATGLRNVPSIQSRGLFGAIAGFIEGGWTGMVDGWYGYHHQNEQGSGYAADLKSTQNAIDEITNKVNSVIEKMNTQFTAVGKEFNHLEKRIENLNKKVDDGFLDIWTYNAELLVLLENERTLDYHDSNVKNLYEKVRSQLKNNAKEIGNGCFEFYHKCDNTCMESVKNGTYDYPKYSEEAKLNREEIDGVKLESTRIYQILAIYSTVASSLVLVVSLGAISFWMCSGHLQCRICI

SEQ ID NO: 3542 - protein, 564 aa, Artificial Sequence
  derived and/or modified protein sequence (wt) from hemagglutinin__InfluenzaA__ACY77573
MKAILVVLLYTFATANADTLCIGYHANNSTDTVDTVLEKNVTVTHSVNLLEDKHNGKLCKLRGVAPLHLGKCNIAGWILGNPECESLSTASSWSYIVETSSSDNGTCYPGDFIDYEELREQLSSVSSFERFEIFPKTSSWPNHDSNKGVTAACPHAGAKSFYKNLIWLVKKGNSYPKLSKSYINDKGKEVLVLWGIHHPSTSADQQSLYQNADAYVFVGSSRYSKKFKPEIAIRPKVRDQEGRMNYYWTLVEPGDKITFEATGNLVVPRYAFAMERNAGSGIIISDTPVHDCNTTCQTPKGAINTSLPFQNIHPITIGKCPKYVKSTKLRLATGLRNVPSIQSRGLFGAIAGFIEGGWTGMVDGWYGYHHQNEQGSGYAADLKSTQSAIDEITNKVNSVIEKMNTQLTGQCKEFNHLEKRIENLNKKVDDGFLDIWTYNAELLVLLENERTLDYHDSNVKNLYEKVRSQLKNNANEIGNGCFEFYHKCDNTCMESVKNGTYDYPKYSEEAKLNREEIDGVKLESTRIYQILAIYSTVASSLVLVVSLGAISFWMCSGHSCRICI

SEQ ID NO: 3543 - protein, 566 aa, Artificial Sequence
  derived and/or modified protein sequence (wt) from hemagglutinin__InfluenzaA__ACY77593
MKAILVVMLYTFATANADTLCIGYHANNSTDTVDTVLEKNVTVTHSVNLLEDKHNGKLCKLRGVAPLHLGKCNIAGWILGNPECESLSTASSWSYIVETSSSDNGTCYPGDFIDYEELREQLSSVSSFERFEIFPKTSSWPNHDSNKGVTAACPHAGAKSFYKNLIWLVKKGNSYPKLSKSYINDKGKEVLVLWGIHHPSTSADQQSLYQNADAYVFVGSSRYSKKFKPEIAIRPKVRDQEGRMNYYWTLVEPGDKITFEATGNLVVPRYAFAMERNAGSGIIISDTTVHDCNTTCQTPKGAINTSLPFQNIHPITIGKCPKYVKSTKLRLATGLRNVPSIQSRGLFGAIAGFIEGGWTGMVDGWYGYHHQNEQGSGYAADLKSTQNAIDEITNKVNSVIEKMNTQFTAVGKEFNHLEKRIENLNKKVDDGFLDIWTYNAELLVLLENERTLDYHDSNVKNLYEKVRSQLKNNAKEIGNGCFEFYHKCDNTCMESVKNGTYDYPKYSEEAKLNREEIDGVKLESTRIYQILAIYSTVASSLVLVVSLGAISFWMCSNGSLQCRICI

SEQ ID NO: 3544 - protein, 565 aa, Artificial Sequence
  derived and/or modified protein sequence (wt) from hemagglutinin__InfluenzaA__ACY77603
MKAILVVMLYTFATANADTLCIGYHANNSTDTVDTVLEKNVTVTHSVNLLEDKHNGKLCKLRGVAPLHLGKCNIAGWILGNPECESLSTASSWSYIVETSSSDNGTCYPGDFIDYEELREQLSSVSSFERFEIFPKTSSWPNHDSNKGVTAACPHAGAKSFYKNLIWLVKKGNSYPKLSKSYINDKGKEVLVLWGIHHPSTSADQQSLYQNADAYVFVGSSRYSKKFKPEIAIRPKVRDQEGRMNYYWTLVEPGDKITFEATGNLVVPRYAFAMERNAGSGIIISDTPVHDCNTTCQTPKGAINTSLPFQNIHPITIGKCPKYVKSTKLRLATGLRNVPSIQSRGLFGAIAGFIEGGWTGMVDGWYGYHHQNEQGSGYAADLKSTQNAIDEITNKVNSVIEKMNTQFTAVGKEFNHLEKRIENLNKKVDDGFLDIWTYNAELLVLLENERTLDYHDSNVKNLYEKVRSQLKNNAKEIGNGCFEFYHKCDNTCMESVKNGTYDYPKYSEEAKLNREEIDGVKLESTRIYQILAIYSTVASSLVLVVSLGAISFWMCSWSLQCRICI

SEQ ID NO: 3545 - protein, 564 aa, Artificial Sequence
  derived and/or modified protein sequence (wt) from hemagglutinin__InfluenzaA__ACY77613
MKAILVVLLYTFATANADTLCIGYHANNSTDTVDTVLEKNVTVTHSVNLLEDKHNGKLCKLRGVAPLHLGKCNIAGWILGNPECESLSTASSWSYIVETSSSDNGTCYPGDFIDYEELREQLSSVSSFERFEIFPKTSSWPNHDSNKGVTAACPHAGAKSFYKNLIWLVKKGNSYPKLSKSYINDKGKEVLVLWGIHHPSTSADQQSLYQNADAYVFVGTSRYSKKFKPEIAIRPKVRDQEGRMNYYWTLVEPGDKITFEATGNLVVPRYAFAMERNAGSGIIISDTPVHDCNTTCQTPKGAINTSLPFQNIHPITIGKCPKYVKSTKLRLATGLRNVPSIQSRGLFGAIAGFIEGGWTGMVDGWYGYHHQNEQGSGYAADLKSTQNAIDEITNKVNSVIEKMNTQFTGQCKEFNHLEKRIENLNKKVDDGFLDIWTYNAELLVLLENERTLDYHDSNVKNLYEKVRSQLKNNAKEIGNGCFEFYHKCDNTCMESVKNGTYDYPKYSEEAKLNREEIDGVKLESTRIYQILAIYSTVASSLVLVVSLGAISFWMCSGHSCRICI

SEQ ID NO: 3546 - protein, 566 aa, Artificial Sequence; identical to SEQ ID NO: 2669
  derived and/or modified protein sequence (wt) from hemagglutinin__InfluenzaA__ACY77623

SEQ ID NO: 3547 - protein, 568 aa, Artificial Sequence
  derived and/or modified protein sequence (wt) from hemagglutinin__InfluenzaA__ACY77653
MKAILVVLLYTFATANADTLCIGYHANNSTDTVDTVLEKNVTVTHSVNILEDKHNGKLCKLRGVAPLHLGKCNIAGWILGNPECESLSTASSWSYIVETSSSDNGTCYPGDFIDYEELREQLSSVSSFERFEIFPKTSSWPNHDSNKGVTAACPHAGAKSFYKNLIWLVKKGNSYPKLSKSYINDKGKEVLVLWGIHHPSTSADQQSLYQNADAYVFVGSSRYSKKFKPEIAIRPKVRDQEGRMNYYWTLVEPGDKITFEATGNLVVPRYAFAMERNAGSGIIISDTPVHDCNTTCQTPKGAINTSLPFQNIHPITIGKCPKYVKSTKLRLATGLRNVPSIQSRGLFGAIAGFIEGGWTGMVDGWYGYHHQNEQGSGYAADLKSTQNAIDEITNKVNSVIEKMNTQFTAVGKEFNHLEKRIENLNKKVDDGFLDIWTYNAELLVLLENERTLDYHDSNVKNLYEKVRSQLKNNAKEVGNGCFEFYHKCDNTCMESVKNGTYDYPKYSEEAKLNREEIDGVKLESTRIYQILAIYSTVASSLVLVVSLGAISFWMCSGHSGSLQCRICI

SEQ ID NO: 3548 - protein, 565 aa, Artificial Sequence
  derived and/or modified protein sequence (wt) from hemagglutinin__InfluenzaA__ACY77663
MKAILVVLLYTFATANADTLCIGYHANNSTDTVDTVLEKNVTVTHSVNLLEDKHNGKLCKLRGVAPLHLGKCNIAGWILGNPECESLSTASSWSYIVETSSSDNGTCYPGDFIDYEELREQLSSVSSFERFEIFPKTSSWPNHDSNKGVTAACPHAGAKSFYKNLIWLVKKGNSYPKLSKSYINDKGKEVLVLWGIHHPSTSADQQSLYQNADAYVFVGTSRYSKKFKPEIAIRPKVRDQEGRMNYYWTLVEPGDKITFEATGNLVVPRYAFAMERNAGSGIIISDTPVHDCNTTCQTPKGAINTSLPFQNIHPITIGKCPKYVKSTKLRLATGLRNVPSIQSRGLFGAIAGFIEGGWTGMVDGWYGYHHQNEQGSGYAADLKSTQNAIDEITNKVNSVIEKMNTQFTAVGKEFNHLEKRIENLNKKVDDGFLDIWTYNAELLVLLENERTLDYHDSNVKNLYEKVRSQLKNNAKEIGNGCFEFYHKCDNTCMESVKNGTYDYPKYSEEAKLNREEIDGVKLESTRIYQILAIYSTVASSLVLVVSLGAISFWMCSWSLLCRICI

SEQ ID NO: 3549 - protein, 565 aa, Artificial Sequence
  derived and/or modified protein sequence (wt) from hemagglutinin__InfluenzaA__ACY77683
MKAILVVLLYTFATANADTLCIGYHANNSTDTVDTVLEKNVTVTHSVNILEDKHNGKLCKLRGVAPLHLGKCNIAGWILGNPECESLSTASSWSYIVETSSSDNGTCYPGDFIDYEELREQLSSVSSFERFEIFPKTSSWPNHDSNKGVTAACPHAGAKSFYKNLIWLVKKGNSYPKLSKSYINDKGKEVLVLWGIHHPSTSADQQSLYQNADAYVFVGSSRYSKKFKPEIAIRPKVRDQEGRMNYYWTLVEPGDKITFEATGNLVVPRYAFAMERNAGSGIIISDTPVHDCNTTCQTPKGAINTSLPFQNIHPITIGKCPKYVKSTKLRLATGLRNVPSIQSRGLFGAIAGFIEGGWTGMVDGWYGYHHQNEQGSGYAADLKSTQNAIDEITNKVNSVIEKMNTQFTAVGKEFNHLEKRIENLNKKVDDGFLDIWTYNAELLVLLENERTLDYHDSNVKNLYEKVRSQLKNNAKEVGNGCFEFYHKCDNTCMESVKNGTYDYPKYSEEAKLNREEIDGVKLESTRIYQILAIYSTVASSLVLVVSLGAISFWMCSWSLQCRICI

SEQ ID NO: 3550 - protein, 565 aa, Artificial Sequence
  derived and/or modified protein sequence (wt) from hemagglutinin__InfluenzaA__ACY77693
MKAILVVLLYTFATANADTLCIGYHANNSTDTVDTVLEKNVTVTHSVNILEDKHNGKLCKLRGVAPLHLGKCNIAGWILGNPECESLSTASSWSYIVETSSSDNGTCYPGDFIDYEELREQLSSVSSFERFEIFPKTSSWPNHDSNKGVTAACPHAGAKSFYKNLIWLVKKGNSYPKLSKSYINDKGKEVLVLWGIHHPSTSADQQSLYQNADAYVFVGSSRYSKKFKPEITIRPKVRDQEGRMNYYWTLVEPGDKITFEATGNLVVPRYAFAMERNAGSGIIISDTPVHDCNTTCQTPKGAINTSLPFQNIHPITIGKCPKYVKSTKLRLATGLRNVPSIQSRGLFGAIAGFIEGGWTGMVDGWYGYHHQNEQGSGYAADLKSTQNAIDEITNKVNSVIEKMNTQFTGQCKEFNHLEKRIENLNKKVDDGFLDIWTYNAELLVLLENERTLDYHDSNVKNLYEKVRSQLKNNAKEVGNGCFEFYHKCDNTCMESVKNGTYDYPKYSEEAKLNREEIDGVKLESTRIYQILAIYSTVASSLVLVVSLGAISFWMCSWSLQCRICI

SEQ ID NO: 3551 - protein, 565 aa, Artificial Sequence
  derived and/or modified protein sequence (wt) from hemagglutinin__InfluenzaA__ACY77703
MKAILVVLLYTFATANADTLCIGYHANNSTDTVDTVLEKNVTVTHSVNILEDKHNGKLCKLRGVAPLHLGKCNIAGWILGNPECESLSTASSWSYIVETSSSDNGTCYPGDFIDYEELREQLSSVSSFERFEIFPKTSSWPNHDSNKGVTAACPHAGAKSFYKNLIWLVKKGNSYPKLSKSYINDKGKEVLVLWGIHHPSTSADQQSLYQNADAYVFVGSSRYSKKFKPEIAIRPKVRDQEGRMNYYWTLVEPGDKITFEATGNLVVPRYAFAMERNAGSGIIISDTPVHDCNTTCQTPKGAINTSLPFQNIHPITIGKCPKYVKSTKLRLATGLRNVPSIQSRGLFGAIAGFIEGGWTGMVDGWYGYHHQNEQGSGYAADLKSTQNAIDEITNKVNSVIEKMNTQFTGQCKEFNHLEKRIENLNKKVDDGFLDIWTYNAELLVLLENERTLDYHDSNVKNLYEKVRSQLKNNAKEVGNGCFEFYHKCDNTCMESVKNGTYDYPKYSEEAKLNREEIDGVKLESTRIYQILAIYSTVASSLVLVVSLGAISFWMCSWSLQCRICI

SEQ ID NO: 3552 - protein, 565 aa, Artificial Sequence
  derived and/or modified protein sequence (wt) from hemagglutinin__InfluenzaA__ACY77713
MKAILVVLLYTFATANADTLCIGYHANNSTDTVDTVLEKNVTVTHSVNILEDKHNGKLCKLRGVAPLHLGKCNIAGWILGNPECESLSTASSWSYIVETSSSDNGTCYPGDFIDYEELREQLSSVSSFERFEIFPKTSSWPNHDSNKGVTAACPHAGAKSFYKNLIWLVKKGNSYPKLSKSYINDKGKEVLVLWGIHHPSTSADQQSLYQNADAYVFVGSSRYSKKFKPEIAIRPKVRDQEGRMNYYWTLVEPGDKITFEATGNLVVPRYAFAMERNAGSGIIISDTPVHDCNTTCQTPKGAINTSLPFQNIHPITIGKCPKYVKSTKLRLATGLRNVPSIQSRGLFGAIAGFIEGGWTGMVDGWYGYHHQNEQGSGYAADLKSTQNAIDEITNKVNSVIEKMNTQFTGQCKEFNHLEKRIENLNKKVDDGFLDIWTYNAELLVLLENERTLDYHDSNVKNLYEKVRSQLKNNAKEVGNGCFEFYHKCDNTCMESVKNGTYDYPKYSEEAKLNREEIDGVKLESTRIYQILAIYSTVASSLVLVVSLGAISFWMCSGHLQCRICI

SEQ ID NO: 3553 - protein, 566 aa, Artificial Sequence; identical to SEQ ID NO: 2982
  derived and/or modified protein sequence (wt) from hemagglutinin__InfluenzaA__ACY77723

SEQ ID NO: 3554 - protein, 564 aa, Artificial Sequence
  derived and/or modified protein sequence (wt) from hemagglutinin__InfluenzaA__ACY77733
MKAILVVLLYTFATANADTLCIGYHANNSTDTVDTVLEKNVTVTHSVNILEDKHNGKLCKLRGVAPLHLGKCNIAGWILGNPECESLSTASSWSYIVETSSSDNGTCYPGDFIDYEELREQLSSVSSFERFEIFPKTSSWPNHDSNKGVTAACPHAGAKSFYKNLIWLVKTGNSYPKLSKSYINDKGKEVLVLWGIHHPSTSADQQSLYQNADAYVFVGSSRYSKKFKPEIAIRPKVRDQEGRMNYYWTLVEPGDKITFEATGNLVVPRYAFAMERNAGSGIIISDTPVHDCNTTCQTPKGAINTSLPFQNIHPITIGKCPKYVKSTKLRLATGLRNVPSIQSRGLFGAIAGFIEGGWTGMVDGWYGYHHQNEQGSGYAADLKSTQNAIDEITNKVNSVIEKMNTQFTAVGKEFNHLEKRIENLNKKVDDGFLDIWTYNAELLVLLENERTLDYHDSNVKNLYEKVRSQLKNNAKEIGNGCFEFYHKCDNTCMESVKNGTYDYPKYSEEAKLNREEIDGVKLESTRIYQILAIYSTVASSLVLVVSLGAISFWMCSGLQCRICI

SEQ ID NO: 3555 - protein, 565 aa, Artificial Sequence
  derived and/or modified protein sequence (wt) from hemagglutinin__InfluenzaA__ACY77743
MKAILVVLLYTFATANADTLCIGYHANNSTDTVDTVLEKNVTVTHSVNLLEDKHNGKLCKLRGVAPLHLGKCNIAGWILGNPECESLSTASSWSYIVETSSSDNGTCYPGDFIDYEELREQLSSVSSFERFEIFPKTSSWPNHDSNKGVTAACPHAGAKSFYKNLIWLVKKGNSYPKLSKSYINDKGKEVLVLWGIHHPSTSADQQSLYQNADAYVFVGSSRYSKKFKPEIAIRPKVRDQEGRMNYYWTLVEPGDKITFEATGNLVVPRYAFAMERNAGSGIIISDTPVHDCNTTCQTPKGAINTSLPFQNIHPITIGKCPKYVKSTKLRLATGLRNVPSIQSRGLFGAIAGFIEGGWTGMVDGWYGYHHQNEQGSGYAADLKSTQNAIDEITNKVNSVIEKMNTQFTAVGKEFNHLEKRIENLNKKVDDGFLDIWTYNAELLVLLENERTLDYHDSNVKNLYEKVRSQLKNNAKEVGNGCFEFYHKCDNTCMESVKNGTYDYPKYSEEAKLNREEIDGVKLESTRIYQILAIYSTVASSLVLVVSLGAISFWMCSWSLQCRICI

SEQ ID NO: 3556 - protein, 566 aa, Artificial Sequence; identical to SEQ ID NO: 2669
  derived and/or modified protein sequence (wt) from hemagglutinin__InfluenzaA__ACY77753

SEQ ID NO: 3557 - protein, 564 aa, Artificial Sequence
  derived and/or modified protein sequence (wt) from hemagglutinin__InfluenzaA__ACY77783
MKAILVVLLYTFATANADTLCIGYHANNSTDTVDTVLEKNVTVTHSVNLLGDKHNGKLCKLRGVAPLHLGKCNIAGWILGNPECESLSTASSWSYIVETSSSDNGTCYPGDFIDYEELREQLSSVSSFERFEIFPKTSSWPNHDSDKGVTAACPHAGAKSFYKNLIWLVKKGNSYPKLSKSYINDKGKEVLVLWGIHHPSTSADQQSLYQNADTYVFVGTSRYSKKFKPEIAIRPKVRDQEGRMNYYWTLVEPGDKITFEATGNLVVPRYAFAMERNAGSGIIISDTPVHDCNTTCQTPKGAINTSLPFQNIHPITIGKCPKYVKSTKLRLATGLRNVPSIQSRGLFGAIAGFIEGGWTGMVDGWYGYHHQNEQGSGYAADLKSTQNAIDEITNKVNSVIEKMNTQFTAVGKEFNHLEKRIENLNKKVDDGFLDIWTYNAELLVLLENERTLDYHDSNVKSLYEKVRSQLKNNAKEIGNGCFEFYHKCDNTCMESVKNGTYDYPKYSEEAKLNREEIDGVKLESTRIYQILAIYSTVASSLVLVVSLGAISFWMCSGHSCRICI

SEQ ID NO: 3558 - protein, 565 aa, Artificial Sequence
  derived and/or modified protein sequence (wt) from hemagglutinin__InfluenzaA__ACY77813
MKAILVVLLYTFATANADTLCIGYHANNSTDTVDTVLEKNVTVTHSVNLLEDKHNGKLCKLRGVAPLHLGKCNIAGWILGNPECESLSTASSWSYIVETSSSDNGTCYPGDFIDYEELREQLSSVSSFERFEIFPKTSSWPNHDSNKGVTAACPHAGAKSFYKNLIWLVKKGNSYPKLSKSYINDKGKEVLVLWGIHHPSTSADQQSLYQNADAYVFVGTSRYSKKFKPEIAIRPKVRDQEGRMNYYWTLVEPGDKITFEATGNLVVPRYAFAMERNAGSGIIISDTPVHDCNTTCQTPKGAINTSLPFQNIHPITIGKCPKYVKSTKLRLATGLRNVPSIQSRGLFGAIAGFIEGGWTGMVDGWYGYHHQNEQGSGYAADLKSTQNAIDEITNKVNSVIEKMNTQFTGQCKEFNHLEKRIENLNKKVDDGFLDIWTYNAELLVLLENERTLDYHDSNVKNLYEKVRSQLKNNAKEIGNGCFEFYHKCDNTCMESVKNGTYDYPKYSEEAKLNREEIDGVKLESTRIYQILAIYSTVASSLVLVVSLGAISFWMCSGHLQCRICI

SEQ ID NO: 3559 - protein, 565 aa, Artificial Sequence
  derived and/or modified protein sequence (wt) from hemagglutinin__InfluenzaA__ACY77823
MKAILVVLLYTFATANADTLCIGYHANNSTDTVDTVLEKNVTVTHSVNLLEDKHNGKLCKLRGVAPLHLGKCNIAGWILGNPECESLSTASSWSYIVETSSSDNGTCYPGDFIDYEELREQLSSVSSFERFEIFPKTSSWPNHDSNKGVTAACPHAGAKSFYKNLIWLVKKGNSYPKLSKSYINDKGKEVLVLWGIHHPSTSADQQSLYQNADAYVFVGTSRYSKKFKPEIAIRPKVRDQEGRMNYYWTLVEPGDKITFEATGNLVVPRYAFAMERNAGSGIIISDTPVHDCNTTCQTPKGAINTSLPFQNIHPITIGKCPKYVKSTKLRLATGLRNVPSIQSRGLFGAIAGFIEGGWTGMVDGWYGYHHQNEQGSGYAADLKSTQNAIDEITNKVNSVIEKMNTQFTGQCKEFNHLEKRIENLNKKVDDGFLDIWTYNAELLVLLENERTLDYHDSNVKNLYEKVRSQLKNNAKEIGNGCFEFYHKCDNTCMESVKNGTYDYPKYSEEAKLNREEIDGVKLESTRIYQILAIYSTVASSLVLVVSLGAISFWMCSWSLQCRICI

SEQ ID NO: 3560 - protein, 565 aa, Artificial Sequence
  derived and/or modified protein sequence (wt) from hemagglutinin__InfluenzaA__ACY77833
MKAILVVLLYTFATANADTLCIGYHANNSTDTVDTVLEKNVTVTHSVNLLEDKHNGKLCKLRGVAPLHLGKCNIAGWILGNPECESLSTASSWSYIVETSSSDNGTCYPGDFIDYEELREQLSSVSSFERFEIFPKTSSWPNHDSNKGVTAACPHAGAKSFYKNLIWLVKKGNSYPKLSKSYINDKGKEVLVLWGIHHPSTSADQQSLYQNADAYVFVGTSRYSKKFKPEIAIRPKVRDQEGRMNYYWTLVEPGDKITFEATGNLVVPRYAFAMERNAGSGIIISDTPVHDCNTTCQTPKGAINTSLPFQNIHPITIGKCPKYVKSTKLRLATGLRNVPSIQSRGLFGAIAGFIEGGWTGMVDGWYGYHHQNEQGSGYAADLKSTQNAIDEITNKVNSVIEKMNTQFTAVGKEFNHLEKRIENLNKKVDDGFLDIWTYNAELLVLLENERTLDYHDSNVKNLYEKVRSQLKNNAKEIGNGCFEFYHKCDNTCMESVKNGTYDYPKYSEEAKLNREEIDGVKLESTRIYQILAIYSTVASSLVLVVSLGAISFWMCSWSLQCRICI

SEQ ID NO: 3561 - protein, 565 aa, Artificial Sequence
  derived and/or modified protein sequence (wt) from hemagglutinin__InfluenzaA__ACY77843
MKAILVVMLYTFATANADTLCIGYHANNSTDTVDTVLEKNVTVTHSVNLLEDKHNGKLCKLRGVAPLHLGKCNIAGWILGNPECESLSTASSWSYIVETSSSDNGTCYPGDFIDYEELREQLSSVSSFERFEIFPKTSSWPNHDSNKGVTAACPHAGAKSFYKNLIWLVKKGNSYPKLSKSYINDKGKEVLVLWGIHHPSTSADQQSLYQNADAYVFVGSSRYSKKFKPEIAIRPKVRDQEGRMNYYWTLVEPGDKITFEATGNLVVPRYAFAMERNAGSGIIISDTTVHDCNTTCQTPKGAINTSLPFQNIHPITIGKCPKYVKSTKLRLATGLRNVPSIQSRGLFGAIAGFIEGGWTGMVDGWYGYHHQNEQGSGYAADLKSTQNAIDEITNKVNSVIEKMNTQFTAVGKEFNHLEKRIENLNKKVDDGFLDIWTYNAELLVLLENERTLDYHDSNVKNLYEKVRSQLKNNAKEIGNGCFEFYHKCDNTCMESVKNGTYDYPKYSEEAKLNREEIDGVKLESTRIYQILAIYSTVASSLVLVVSLGAISFWMCSGHLQCRICI

SEQ ID NO: 3562 - protein, 566 aa, Artificial Sequence
  derived and/or modified protein sequence (wt) from hemagglutinin__InfluenzaA__ACY77863
MKAILVVLLYTFATANADTLCIGYHANNSTDTVDTVLEKNVTVTHSVNLLEDKHNGKLCKLRGVAPLHLGKCNIAGWILGNPECESLSTASSWSYIVETSSSDNGTCYPGDFIDYEELREQLSSVSSFERFEIFPKTSSWPNHDSNKGVTAACPHAGAKSFYKNLIWLVKKGNSYPKLSKSYINDKGKEVLVLWGIHHPSTSADQQSLYQNADAYVFVGTSRYSKKFKPEIAIRPKVRDQEGRMNYYWTLVEPGDKITFEATGNLVVPRYAFAMERNAGSGIIISDTPVHDCNTTCQTPKGAINTSLPFQNIHPITIGKCPKYVKSTKLRLATGLRNVPSIQSRGLFGAIAGFIEGGWTGMVDGWYGYHHQNEQGSGYAADLKSTQNAIDEITNKVNSVIEKMNTQFTAVGKEFNHLEKRIENLNKKVDDGFLDIWTYNAELLVLLENERTLDYHDSNVKNLYEKVRSQLKNNAKEIGNGCFEFYHKCDNTCMESVKNGTYDYPKYSEEAKLNREEIDGVKLESTRIYQILAIYSTVASSLVLVVSLGAISFWMCSGMSLQCRICI

SEQ ID NO: 3563 - protein, 566 aa, Artificial Sequence; identical to SEQ ID NO: 2656
  derived and/or modified protein sequence (wt) from hemagglutinin__InfluenzaA__ACY77874

SEQ ID NO: 3564 - protein, 566 aa, Artificial Sequence; identical to SEQ ID NO: 2656
  derived and/or modified protein sequence (wt) from hemagglutinin__InfluenzaA__ACY77884

SEQ ID NO: 3565 - protein, 566 aa, Artificial Sequence
  derived and/or modified protein sequence (wt) from hemagglutinin__InfluenzaA__ACY77904
MKAILVVLLYTFATANADTLCIGYHANNSTDTVDTVLEKNVTVTHSVNLLEDKHNGKLCKLRGVAPLHLGKCNIAGWILGNPECESLSTASSWSYIVETSSSDNGTCYPGDFIDYEELREQLSSVSSFERFEIFPKTSSWPNHDSNKGVTAACPHAGAKSFYKNLIWLVKKGNSYPKLSKSYINDKGKEVLVLWGIHHPSTSADQQSLYQNADAYVFVGSSKYSKKFKPEIAIRPKVRDQEGRMNYYWTLVEPGDKITFEATGNLVVPRYAFAMERNAGSGIIISDTPVHDCNTTCQTPKGAINTSLPFQNIHPITIGKCPKHVKSTKLRLATGLRNVPSIQSRGLFGAIAGFIEGGWTGMVDGWYGYHHQNEQGSGYAADLKSTQNAIDEITNKVNSVIEKMNTQFTAVGKEFNHLEKRIENLNKKVDDGFLDIWTYNAELLVLLENERTLDYHDSNVKNLYEKVRSQLKNNAKEIGNGCFEFYHKCDNTCMESVKNGTYDYPKYSEEAKLNREEIDGVKLESTRIYQILAIYSTVASSLVLVVSLGAISFWMCSNGSLQCRICI

SEQ ID NO: 3566 - protein, 566 aa, Artificial Sequence; identical to SEQ ID NO: 2849
  derived and/or modified protein sequence (wt) from hemagglutinin__InfluenzaA__ACY77914

SEQ ID NO: 3567 - protein, 566 aa, Artificial Sequence
  derived and/or modified protein sequence (wt) from hemagglutinin__InfluenzaA__ACY77924
MKAILVVLLYTFATANADTLCIGYHANNSTDTVDTVLEKNVTVTHSVNLLEDKHDGKLCKLRGVAPLHLGKCNIAGWILGNPECESLSTASSWSYIVETSSSDNGTCYPGDFIDYEELREQLSSVSSFERFEIFPKTSSWPNHDSNKGVTAACPHAGAKSFYKNLIWLVKKGNSYPKLSKSYINDKGKEVLVLWGIHHPSTSADQQSLYQNADAYVFVGTSRYSKKFKPEIAIRPKVRDQEGRMNYYWTLVEPGDKITFEATGNLVVPRYAFAMERNAGSGIIISDTPVHDCNTTCQTPKGAINTSLPFQNIHPITIGKCPKYVKSTKLRLATGLRNVPSIQSRGLFGAIAGFIEGGWTGMVDGWYGYHHQNEQGSGYAADLKSTQNAIDEITNKVNSVIEKMNTQFTAVGKEFNHLEKRIENLNKKVDDGFLDIWTYNAELLVLLENERTLDYHDSNVKNLYEKVRSQLKNNAKEIGNGCFEFYHKCDNTCMESVKNGTYDYPKYSEEAKLNREEIDGVKLESTRIYQILAIYSTVASSLVLVVSLGAISFWMCSNGSLQCRICI

SEQ ID NO: 3568 - protein, 566 aa, Artificial Sequence; identical to SEQ ID NO: 3417
  derived and/or modified protein sequence (wt) from hemagglutinin__InfluenzaA__ACY77934

SEQ ID NO: 3569 - protein, 566 aa, Artificial Sequence
  derived and/or modified protein sequence (wt) from hemagglutinin__InfluenzaA__ACY77944
MKAILVVLLYTFATANADTLCIGYHANNSTDTVDTVLEKNVTVTHSVNLLEDKHNGKLCKLRGVAPLHLGKCNIAGWILGNPECESLSTASSWSYIVETSSSDNGTCYPGDFIDYEELREQLSSVSSFERFEIFPKTSSWPNHDSNKGVTAACPHAGAKSFYKNLIWLVKKGNSYPKLSKSYINDKGKEVLVLWGIHHPSTSADQQSLYQNADAYVFVGSSRYSKKFKPEIAIRPKVRDQEGRMNYYWTLVEPGDKITFEATGNLVVPRYAFAMERNAESGIIISDTPVHDCNTTCQTPKGAINTSLPFQNIHPITIGKCPKYVKSTKLRLATGLRNVPSIQSRGLFGAIAGFIEGGWTGMVDGWYGYHHQNEQGSGYAADLKSTQNAIDEITNKVNSVIEKMNTQFTAVGKEFNHLEKRIENLNKKVDDGFLDIWTYNAELLVLLENERTLDYHDSNVKNLYEKVRSQLKNNAKEIGNGCFEFYHKCDNTCMESVKNGTYDYPKYSEEAKLNREEIDGVKLESTRIYQILAIYSTVASSLVLVVSLGAISFWMCSNGSLQCRICI

SEQ ID NO: 3570 - protein, 566 aa, Artificial Sequence; identical to SEQ ID NO: 2656
  derived and/or modified protein sequence (wt) from hemagglutinin__InfluenzaA__ACY77954

SEQ ID NO: 3571 - protein, 566 aa, Artificial Sequence; identical to SEQ ID NO: 2656
  derived and/or modified protein sequence (wt) from hemagglutinin__InfluenzaA__ACY77964

SEQ ID NO: 3572 - protein, 566 aa, Artificial Sequence; identical to SEQ ID NO: 2656
  derived and/or modified protein sequence (wt) from hemagglutinin__InfluenzaA__ACY77974

SEQ ID NO: 3573 - protein, 566 aa, Artificial Sequence; identical to SEQ ID NO: 2656
  derived and/or modified protein sequence (wt) from hemagglutinin__InfluenzaA__ACY77984

SEQ ID NO: 3574 - protein, 566 aa, Artificial Sequence; identical to SEQ ID NO: 2656
  derived and/or modified protein sequence (wt) from hemagglutinin__InfluenzaA__ACY77994

SEQ ID NO: 3575 - protein, 566 aa, Artificial Sequence
  derived and/or modified protein sequence (wt) from hemagglutinin__InfluenzaA__ACY79633
MKEILVVLLYTFATANADTLCIGYHANNSTDTVDTVLEKNVTVTHSVNLLEDKHNGKLCKLRGVAPLHLGKCNIAGWILGNPECESLSTASSWSYIVETSSSDNGTCYPGDFIDYEELREQLSSVSSFERFEIFPKTSSWPNHDSNKGVTAACPHAGAKSFYKNLIWLVKKGNSYPKLSKSYINDKGKEVLVLWGIHHPSTSADQQSLYQNADAYVFVGTSRYSKKFKPEIAIRPKVRDQEGRMNYYWTLVEPGDKITFEATGNLVVPRYAFAMERNARSGIIISDTPVHDCNTTCQTPKGAINTSLPFQNIHPITIGKCPKYVKSTKLRLATGLRNVPSIQSRGLFGAIAGFIEGGWTGMVDGWYGYHHQNEQGSGYAADLKSTQNAIDEITNKVNSVIEKMNTQFTAVGKEFNHLEKRIENLNKKVDDGFLDIWTYNAELLVLLENERTLDYHDSNVKNLYEKVRSQLKNNAKEIGNGCFEFYHKCDNTCMESVKNGTYDYPKYSEEAKLNREEIDGVKLESTRIYQILAIYSTVASSLVLVVSLGAISFWMCSNGSLQCRICI

SEQ ID NO: 3576 - protein, 566 aa, Artificial Sequence; identical to SEQ ID NO: 3467
  derived and/or modified protein sequence (wt) from hemagglutinin__InfluenzaA__ACZ01953

SEQ ID NO: 3577 - protein, 566 aa, Artificial Sequence
  derived and/or modified protein sequence (wt) from hemagglutinin__InfluenzaA__ACZ05050
MKAILVVLLYTFATANADTLCIGYHANNSTDTVDTVLEKNVTVTHSVNLLEDKHNGKLCKLRGVAPLHLGKCNIAGWILGNPECESLSTASSWSYIVETSSSDNGTCYPGDFIDYEELREQLSSVSSFERFEIFPKTSSWPNHDSNKGVTAACSHAGAKSFYKNLIWLVKKGNSYPKLSKSYINDKGKEVLVLWGIHHPSTSADQQSLYQNADAYVFVGSSRYSKKFKPEIAIRPKVRDQEGRMNYYWTLVEPGDKITFEATGNLVVPRYAFAMERNAGSGIIISDTPVHDCNTTCQTPKGAINTSLPFQNIHPITIGKCPKYVKSTKLRLATGLRNVPSIQSRGLFGAIAGFIEGGWTGMVDGWYGYHHQNEQGSGYAADLKSTQNAIDEITNKVNSVIEKMNTQFTAVGKEFNHLEKRIENLNKKVDDGFLDIWTYNAELLVLLENERTLDYHDSNVKNLYEKVRSQLKNNAKEIGNGCFEFYHKCDNTCMESVKNGTYDYPKYSEEAKLNREEIDGVKLESTRIYQILAIYSTVASSLVLVVSLGAISFWMCSNGSLQCRICI

SEQ ID NO: 3578 - protein, 566 aa, Artificial Sequence
  derived and/or modified protein sequence (wt) from hemagglutinin__InfluenzaA__ACZ05061
MEAILVVLLYTFTTANADTLCIGYHANNSTDTVDTVLEKNVTVTHSVNLLEDKHNGKLCKLRGVAPLHLGKCNIAGWILGNPECESLSTASSWSYIVETSSSDNGTCYPGDFIDYEELREQLSSVSSFERFEIFPKTSSWPNHDSNKGVTAACPHAGAKSFYKNLIWLVKKGNSYPKLSKSYINDKGKEVLVLWGIHHPSTSADQQSLYQNADAYVFVGSSRYSKKFKPEIAIRPKVRDQEGRMNYYWTLVEPGDKITFEATGNLVVPRYAFAMERNAGSGIIISDTPVHDCNTTCQTLKGAINTSLPFQNIHPITIGKCPKYVKSTKLRLATGLRNVPSIQSRGLFGAIAGFIEGGWTGMVDGWYGYHHQNEQGSGYAADLKSTQNAIDEITNKVNSVIEKMNTQFTAVGKEFNHLEKRIENLNKKVDDGFLDIWTYNAELLVLLENERTLDYHDSNVKNLYEKVRSQLKNNAKEIGNGCFEFYHKCDNTCMESVKNGTYDYPKYSEEAKLNREEIDGVKLESTRIYQILAIYSTVASSLVLVVSLGAISFWMCSNGSLQCRICI

SEQ ID NO: 3579 - protein, 566 aa, Artificial Sequence; identical to SEQ ID NO: 2656
  derived and/or modified protein sequence (wt) from hemagglutinin__InfluenzaA__ACZ05071

SEQ ID NO: 3580 - protein, 566 aa, Artificial Sequence; identical to SEQ ID NO: 2656
  derived and/or modified protein sequence (wt) from hemagglutinin__InfluenzaA__ACZ05081

SEQ ID NO: 3581 - protein, 566 aa, Artificial Sequence; identical to SEQ ID NO: 2656
  derived and/or modified protein sequence (wt) from hemagglutinin__InfluenzaA__ACZ05091

SEQ ID NO: 3582 - protein, 566 aa, Artificial Sequence; identical to SEQ ID NO: 2656
  derived and/or modified protein sequence (wt) from hemagglutinin__InfluenzaA__ACZ05101

SEQ ID NO: 3583 - protein, 566 aa, Artificial Sequence; identical to SEQ ID NO: 2656
  derived and/or modified protein sequence (wt) from hemagglutinin__InfluenzaA__ACZ05111

SEQ ID NO: 3584 - protein, 566 aa, Artificial Sequence
  derived and/or modified protein sequence (wt) from hemagglutinin__InfluenzaA__ACZ05121
MKAILVVLLYTFATANADTLCIGYHANNSTDTVDTVLEKNVTVTHSVNLLEDKHNGKLCKLRGVAPLHLGKCNIAGWILGNPECESLSTASSWSYIVETSSSDNGTCYPGDFIDYEELREQLSSVSSFERFEIFPKTSSWPNHDSNKGVTAACPHAGAKSFYNNLIWLVKKGNSYPKLSKSYINDKGKEVLVLWGIHHPSTSADQQSLYQNADAYVFVGSSRYSKKFKPEIAIRPKVRDQEGRMNYYWTLVEPGDKITFEATGNLVVPRYAFAMERNAGSGIIISDTPVHDCNTTCQTPKGAINTSLPFQNIHPITIGKCPKYVKSTKLRLATGLRNVPSIQSRGLFGAIAGFIEGGWTGMVDGWYGYHHQNEQGSGYAADLKSTQNAIDEITNKVNSVIEKMNTQFTAVGKEFNHLEKRIENLNKKVDDGFLDIWTYNAELLVLLENERTLDYHDSNVKNLYEKVRSQLKNNAKEIGNGCFEFYHKCDNTCMGSVKNGTYDYPKYSEEAKLNREEIDGVKLESTRIYQILAIYSTVASSLVLVVSLGAISFWMCSNGSLQCRICI

SEQ ID NO: 3585 - protein, 566 aa, Artificial Sequence; identical to SEQ ID NO: 2656
  derived and/or modified protein sequence (wt) from hemagglutinin__InfluenzaA__ACZ05131

SEQ ID NO: 3586 - protein, 566 aa, Artificial Sequence; identical to SEQ ID NO: 2656
  derived and/or modified protein sequence (wt) from hemagglutinin__InfluenzaA__ACZ05141

SEQ ID NO: 3587 - protein, 566 aa, Artificial Sequence; identical to SEQ ID NO: 2656
  derived and/or modified protein sequence (wt) from hemagglutinin__InfluenzaA__ACZ05151

SEQ ID NO: 3588 - protein, 566 aa, Artificial Sequence
  derived and/or modified protein sequence (wt) from hemagglutinin__InfluenzaA__ACZ05172
MKTIIALSYILCLVFAQKLPGNDNSTATLCLGHHAVPNGTIVKTITNDQIEVTNATELVQSSSTGEICDSPHQILDGKNCTLIDALLGDPQCDGFQNKKWDLFVERSKAYSNCYPYDVPDYASLRSLVASSGTLEFNNESFNWTGVTQDGTSSACIRRSKNSFFSRLNWLTHLNFKYPALNVTMPNNEQFDKLYIWGVHHPGTDKDQIFLYAQASGRITVSTKRSQQTAIPNIGSRPRVRNIPSRISIYWTIVKPGDILLINSTGNLIAPRGYFKIRSGKSSIMRSDAPIGKCNSECITPNGSIPNDKPFQNVNRITYGACPRYVKQNTLKLATGMRNVPEKQTRGIFGAIAGFIENGWEGMVDGWYGFRHQNSEGRGQAADLKSTQAAIDQINGKLNRLIGKTNEKFHQIEKEFSEVEGRIQDLEKYVEDTKIDLWSYNAELLVALENQHTIDLTDSEMNKLFEKTKKQLRENAEDMGNGCFKIYHKCDNACIGSIRNGTYDHDVYRDEALNNRFQIKGVELKSGYKDWILWISFAISCFLLCVALLGFIMWACQKGNIRCNICI

SEQ ID NO: 3589 - protein, 565 aa, Artificial Sequence; identical to SEQ ID NO: 3131
  derived and/or modified protein sequence (wt) from hemagglutinin__InfluenzaA__ACZ05194

SEQ ID NO: 3590 - protein, 566 aa, Artificial Sequence; identical to SEQ ID NO: 3588
  derived and/or modified protein sequence (wt) from hemagglutinin__InfluenzaA__ACZ05205

SEQ ID NO: 3591 - protein, 566 aa, Artificial Sequence
  derived and/or modified protein sequence (wt) from hemagglutinin__InfluenzaA__ACZ05216
MKTIIALSYILCLVFAQKIPGNDNNTATLCLGHHAVPNGTIVKTITNDQIEVTNATELVQSSSTGEICDSPHQILDGENCTLIDALLGDPQCDGFQNKKWDLFVERSKAYSNCYPYDVPDYASLRSLVASSGTLEFNNESFNWTGVTQNGTSSACIRRSNNSFFSRLNWLTHLKFKYPALNVTMPNNEQFDKLYIWGVHHPGTDNDQIFLYAQASGRITVSTKRSQQTVIPNIGSRPRVRNIPSRISIYWTIVKPGDILLINSTGNLIAPRGYFKIRSGKSSIMRSDAPIGKCNSECITPNGSIPNDKPFQNVNRITYGACPRYVKQNTLKLATGMRNVPEKQTRGIFGAIAGFIENGWEGMVDGWYGFRHQNSEGRGQAADLKSTQAAIDQINGKLNRLIGKTNEKFHQIEKEFSEVEGRIQDLEKYVEDTKIDLWSYNAELLVALENQHTIDLTDSEMNKLFEKTKKQLRENAEDMGNGCFKIYHKCDNACIGSIRNGTYDHDVYRDEALNNRFQIKGVELKSGYKDWILWISFAISCFLLCVALLGFIMWACQKGNIRCNICI

SEQ ID NO: 3592 - protein, 566 aa, Artificial Sequence; identical to SEQ ID NO: 3588
  derived and/or modified protein sequence (wt) from hemagglutinin__InfluenzaA__ACZ05227

SEQ ID NO: 3593 - protein, 566 aa, Artificial Sequence
  derived and/or modified protein sequence (wt) from hemagglutinin__InfluenzaA__ACZ05238
MKTIIALSYILCLVFAQKLPGNDNSTATLCLGHHAVPNGTIVKTITNDQIEVTNATELVQSSSTGEICDSPHQILDGKNCTLIDALLGDPQCDGFQNKKWDLFVERSKAYSNCYPYDVPDYASLRSLVASSGTLEFNNESFNWAGVTQNGTSSACIRRSKNSFFSRLNWLTHLNFKYPALNVTMPNNEQFDKLYIWGVHHPGTDKDQIFLYAQASGRITVSTKRSQQTAIPNIGSRPRVRNIPSRISIYWTIVKPGDILLINSTGNLIAPRGYFKIRSGKSSIMRSDAPIGKCNSECITPNGSIPNDKPFQNVNRITYGACPRYVKQNTLKLATGMRNVPEKQTRGIFGAIAGFIENGWEGMVDGWYGFRHQNSEGRGQAADLKSTQAAIDQINGKLNRLIGKTNEKFHQIEKEFSEVEGRIQDLEKYVEDTKIDLWSYNAELLVALENQHTIDLTDSEMNKLFEKTKKQLRENAEDMGNGCFKIYHKCDNACIGSIRNGTYDHDVYRDEALNNRFQIKGVELKSGYKDWILWISFAISCFLLCVALLGFIMWACQKGNIRCNICI

SEQ ID NO: 3594 - protein, 566 aa, Artificial Sequence; identical to SEQ ID NO: 3588
  derived and/or modified protein sequence (wt) from hemagglutinin__InfluenzaA__ACZ05249

SEQ ID NO: 3595 - protein, 566 aa, Artificial Sequence; identical to SEQ ID NO: 3588
  derived and/or modified protein sequence (wt) from hemagglutinin__InfluenzaA__ACZ05260

SEQ ID NO: 3596 - protein, 566 aa, Artificial Sequence
  derived and/or modified protein sequence (wt) from hemagglutinin__InfluenzaA__ACZ05271
MKTIIALSYILCLVFAQKLPGNDNSTATLCLGHHAVPNGTIVKTITNDQIEVTNATELVQSSSTGEICDSPHQILDGENCTLIDALLGDPQCDGFQNKKWDLFVERSKAYSNCYPYDVPDYASLRSLVASSGTLEFNNESFNWTGVTQNGTSSACIRRSNNSFFSRLNWLTHLKFKYPALNVTMPNNEQFDKLYIWGVHHPGTDNDQIFLYAQASGRITVSTKRSQQTVIPNIGSRPRVRNIPSRISIYWTIVKPGDILLINSTGNLIAPRGYFKIRSGKSSIMRSDAPIGKCNSECITPNGSIPNDKPFQNVNRITYGACPRYVKQNTLKLATGMRNVPERQTRGIFGAIAGFIENGWEGMVDGWYGFRHQNSEGRGQAADLKSTQAAIDQINGKLNRLIGKTNEKFHQIEKEFSEVEGRIQDLEKYVEDTKIDLWSYNAELLVALENQHTIDLTDSEMNKLFEKTKKQLRENAEDMGNGCFKIYHKCDNACIGSIRNGTYDHDVYRDEALNNRFQIKGVELKSGYKDWILWISFAISCFLLCVALLGFIMWACQKGNIRCNICI

SEQ ID NO: 3597 - protein, 566 aa, Artificial Sequence
  derived and/or modified protein sequence (wt) from hemagglutinin__InfluenzaA__ACZ05282
MKTTIALSYILCLVFAQKLPGNDNSTATLCLGHHAVPNGTIVKTITNDQIEVTNATELVQSSSTGEICDSPHQILDGENCTLIDALLGDPQCDGFQNKKWDLFVERSKAYSNCYPYDVPDYASLRSLVASSGTLEFNNESFNWTGVTQNGTSSACIRRSNNSFFSRLNWLTHLKFKYPALNVTMPNNEQFDKLYIWGVHHPGTDNDQIFLYAQASGRITVSTKRSQQTVIPNIGSRPRVRNIPSRISIYWTIVKPGDILLINSTGNLIAPRGYFKIQSGKSSIMRSDAPIGKCNSECITPNGSIPNDKPFQNVNRITYGACPRYVKQNTLKLATGMRNVPEKQTRGIFGAIAGFIENGWEGMVDGWYGFRHQNSEGRGQAADLKSTQAAIDQINGKLNRLIGKTNEKFHQIEKEFSEVEGRIQDLEKYVEDTKIDLWSYNAELLVALENQHTIDLTDSEMNKLFEKTKKQLRENAEDMGNGCFKIYHKCDNACIGSIRNGTYDHDVYRDEALNNRFQIKGVELKSGYKDWILWISFAISCFLLCVALLGFIMWACQKGNIRCNICI

SEQ ID NO: 3598 - protein, 566 aa, Artificial Sequence; identical to SEQ ID NO: 3588
  derived and/or modified protein sequence (wt) from hemagglutinin__InfluenzaA__ACZ05304

SEQ ID NO: 3599 - protein, 566 aa, Artificial Sequence; identical to SEQ ID NO: 3411
  derived and/or modified protein sequence (wt) from hemagglutinin__InfluenzaA__ACZ05315

SEQ ID NO: 3600 - protein, 566 aa, Artificial Sequence; identical to SEQ ID NO: 3588
  derived and/or modified protein sequence (wt) from hemagglutinin__InfluenzaA__ACZ05326

SEQ ID NO: 3601 - protein, 566 aa, Artificial Sequence
  derived and/or modified protein sequence (wt) from hemagglutinin__InfluenzaA__ACZ05337
MKTIIALSYILCLVFTQKLPGNDNSTATLCLGHHAVPNGTIVKTITNDQIEVTNATELVQSSSTGEICDSPHQILDGKNCTLIDALLGDPQCDGFQNKKWDLFVERSKAYSNCYPYDVPDYASLRSLVASSGTLEFNNERFNWTGVTQNGTSSACIRRSKNSFFSRLNWLTHLNFKYPALNVTMPNNEQFDKLYIWGVHHPGTDKDQIFLYAQASGRITVSTKRSQQTVIPNIGSRPRVRNIPSRISIYWTIVKPGDILLISSTGNLIAPRGYFKIRSGKSSIMRSDAPIGKCNSECITPNGSIPNDKPFQNVNRITYGACPRYVKQNTLKLATGMRNVPEKQTRGIFGAIAGFIENGWEGMVDGWYGFRHQNSEGRGQAADLKSTQAAIDQINGKLNRLIGKTNEKFHQIEKEFSEVEGRIQDLEKYVEDTKIDLWSYNAELLVALENQHTIDLTDSEMNKLFEKTKKQLRENAEDMGNGCFKIYHKCDNACIGSIRNGTYDHDVYRDEALNNRFQIKGVELKSGFKDWILWISFAISCFLLCVALLGFIMWACQKGNIRCNICI

SEQ ID NO: 3602 - protein, 566 aa, Artificial Sequence; identical to SEQ ID NO: 3588
  derived and/or modified protein sequence (wt) from hemagglutinin__InfluenzaA__ACZ05348

SEQ ID NO: 3603 - protein, 566 aa, Artificial Sequence; identical to SEQ ID NO: 3593
  derived and/or modified protein sequence (wt) from hemagglutinin__InfluenzaA__ACZ05359

SEQ ID NO: 3604 - protein, 566 aa, Artificial Sequence; identical to SEQ ID NO: 3588
  derived and/or modified protein sequence (wt) from hemagglutinin__InfluenzaA__ACZ05370

SEQ ID NO: 3605 - protein, 566 aa, Artificial Sequence
  derived and/or modified protein sequence (wt) from hemagglutinin__InfluenzaA__ACZ05392
MKTIIALSYILCLVFAQKLPGNDNSTATLCLGHHAVPNGTIVKTITNDQIEVTNATELVQSSSTGEICDSPHQILDGKNCTLIDALLGDPQCDGFQNKKWDLFVERSKAYSNCYPYDVPDYASLRSLVASSGTLEFNNESFNWTGVTQNGASSACIRRSKNSFFSRLNWLTHLNFKYPALNVTMPNNEQFDKLYIWGVHHPGTDKDQIFLYAQASGRITVSTKRSQQTAIPNIGSRPRVRNIPSRISIYWTIVKPGDILLINSTGNLIAPRGYFKIRSGKSSIMRSDAPIGKCNSECITPNGSIPNDKPFQNVNRITYGACPRYVKQNTLKLATGMRNVPEKQTRGIFGAIAGFIENGWEGMVDGWYGFRHQNSEGRGQAADLKSTQAAIDQINGKLNRLIGKTNEKFHQIEKEFSEVEGRIQDLEKYVEDTKIDLWSYNAELLVALENQHTIDLTDSEMNKLFEKTKKQLRENAEDMGNGCFKIYHKCDNACIGSIRNGTYDHDVYRDEALNNRFQIKGVELKSGYKDWILWISFAISCFLLCVALLGFIMWACQKGNIRCNICI

SEQ ID NO: 3606 - protein, 566 aa, Artificial Sequence; identical to SEQ ID NO: 3588
  derived and/or modified protein sequence (wt) from hemagglutinin__InfluenzaA__ACZ05403

SEQ ID NO: 3607 - protein, 566 aa, Artificial Sequence
  derived and/or modified protein sequence (wt) from hemagglutinin__InfluenzaA__ACZ05436
MKTIIALSYILCLVFAQKLPGNDNSTATLCLGHHAVPNGTIVKTITNDQIEVTNATELVQSSSTGEICDSPHQILDGKSCTLIDALLGDPQCDGFQNKKWDLFVERSKAYSNCYPYDVPDYASLRSLVASSGTLEFNNESFNWTGVTQNGTSSACIRRSKNSFFSRLNWLTHLNFKYPALNVTMPNNEQFDKLYIWGVHHPGTDKDQIFLYAQASGRITVSTKRSQQTAIPNIGSRPRVRNIPSRISIYWTIVKPGDILLINSTGNLIAPRGYFKIRSGKSSIMRSDAPIGKCNSECITPNGSIPNDKPFQNVNRITYGACPRYVKQNTLKLATGMRNVPEKQTRGIFGAIAGFIENGWEGMVDGWYGFRHQNSEGRGQAADLKSTQAAIDQINGKLNRLIGKTNEKFHQIEKEFSEVEGRIQDLEKYVEDTKIDLWSYNAELLVALENQHTIDLTDSEMNKLFEKTKKQLRENAEDMGNGCFKIYHKCDNACIGSIRNGTYDHDVYRDEALNNRFQIKGVELKSGYKDWILWISFAISCFLLCVALLGFIMWACQKGNIRCNICI

SEQ ID NO: 3608 - protein, 566 aa, Artificial Sequence; identical to SEQ ID NO: 3588
  derived and/or modified protein sequence (wt) from hemagglutinin__InfluenzaA__ACZ05458

SEQ ID NO: 3609 - protein, 566 aa, Artificial Sequence; identical to SEQ ID NO: 3588
  derived and/or modified protein sequence (wt) from hemagglutinin__InfluenzaA__ACZ05469

SEQ ID NO: 3610 - protein, 566 aa, Artificial Sequence; identical to SEQ ID NO: 3607
  derived and/or modified protein sequence (wt) from hemagglutinin__InfluenzaA__ACZ05480

SEQ ID NO: 3611 - protein, 566 aa, Artificial Sequence; identical to SEQ ID NO: 3411
  derived and/or modified protein sequence (wt) from hemagglutinin__InfluenzaA__ACZ05513

SEQ ID NO: 3612 - protein, 566 aa, Artificial Sequence; identical to SEQ ID NO: 3588
  derived and/or modified protein sequence (wt) from hemagglutinin__InfluenzaA__ACZ05524

SEQ ID NO: 3613 - protein, 566 aa, Artificial Sequence
  derived and/or modified protein sequence (wt) from hemagglutinin__InfluenzaA__ACZ05535
MKTIIALSYILCLVFAQKLPGNDNSTATLCLGHHAVPNGTIVKTITNDQIEVTNATELVQSSSTGEICDSPHQILDGKNCTLIDALLGDPQCDGFQNKKWDLFVERSKAYSNCYPYDVPDYASLRSLVASSGTLEFNNESFNWTGVTQNGTSSACIRRSKNSFFSRLNWLTHLNFKYPALNVTMPNNEQFDKLYIWGVHHPGTDKDQIFLYAQASGRITVSTKRSQQTAIPNIGSRPRVRNIPSRISIYWTIVKPGDILLINSTGNLIAPRGYFKIRSGKSSIMRSDAPIGKCNSECITPNGSIPNDKPFQNVNRITYGACPRYVKQNTLKLATGMRNVPEKQTRGIFGAIAGFIENGWEGMVDGWYGFRHQNSEGRGQAADLKSTQAAIDQINGKLNRLIGKTNEKFHQIEKEFSEVEGRIQDLEKYVEDTKIDLWSYNAELLVALENQHTIDLTDSEMNKLFEKTKKQLRENAEDMGNGCFKIYHKCDNACIGSIRNGTYDHDVYRDEALNNRFQIKGVELKSGYKDWILWISFAISCFLLCVALLGFIMWACQKGNIRCNICI

SEQ ID NO: 3614 - protein, 566 aa, Artificial Sequence; identical to SEQ ID NO: 3613
  derived and/or modified protein sequence (wt) from hemagglutinin__InfluenzaA__ACZ05546

SEQ ID NO: 3615 - protein, 566 aa, Artificial Sequence; identical to SEQ ID NO: 3588
  derived and/or modified protein sequence (wt) from hemagglutinin__InfluenzaA__ACZ05557

SEQ ID NO: 3616 - protein, 565 aa, Artificial Sequence
  derived and/or modified protein sequence (wt) from hemagglutinin__InfluenzaA__ACZ05579
MKVKLLVLLCTFTATYADTICIGYHANNSTDTVDTVLEKNVTVTHSVNLLENSHNGKLCLLKGIAPLQLGNCSVAGWILGNPECELLISKESWSYIVEKPNPENGTCYPGHFADYEELREQLSSVSSFERFEIFPKESSWPNHTVTGVSASCSHNGESSFYRNLLWLTVKNGLYPNLSKSYANNKEKEVLVLWGVHHPPNIVDQKTLYRTENAYVSVVSSHYSRKFTPEIAKRPKVRDQEGRINYYWTLLEPGDTIIFEANGNLIAPRYAFALSRGFGSGIINSNAPMDKCDAKCQTPRGAINSSLPFQNVHPVTIGECPKYVRSAKLRMVTGLRNIPSIQSRGLFGAIAGFIEGGWTGMVDGWYGYHHQNEQGSGYAADQKSTQNAINGITNKVNSVIEKMNTQFTAVGKEFNKLERRMENLNKKVDDGFIDIWTYNAELLVLLENERTLDFHDSNVKNLYEKVKSQLKNNAKEIGNGCFEFYHKCNDECMESVKNGTYDYPKYSEESKLNREKIDGVKLESMGVYQILAIYSTVASSLVLLVSLGAISFWMCSNGSLQCRICI

SEQ ID NO: 3617 - protein, 565 aa, Artificial Sequence
  derived and/or modified protein sequence (wt) from hemagglutinin__InfluenzaA__ACZ05590
MKVKLLVLLCTFTATYADTICIGYHANNSTDTVDTVLEKNVTVTHSVNLLENSHNGKLCLLKGIAPLQLGNCSVAGWILGNPECELLISKESWSYIVEKPNPENGTCYPGHFADYEELREQLSSVSSFERFEIFPKESSWPNHTVTGVSASCSHNGESSFYRNLLWLTGKNGLYPNLSKSYANNKEKEVLVLWGVHHPPSISDQKTLYHTEDAYVSVVSSHYSRKFTPEIAKRPKVRDQEGRINYYWTLLEPGDTIIFEANGNLIAPRYAFALSRGFGSGIINSNAPMGKCDAKCQTPQGAINSSLPFQNVHPVTIGECPKYVRSAKLRMVTGLRNIPSIQSRGLFGAIAGFIEGGWTGMVDGWYGYHHQNEQGSGYAADQKSTQNAINGITNKVNSVIEKMNTQFTAVGKEFNKLERRMENLNKKVDDGFIDIWTYNAELLVLLENERTLDFHDSNVKNLYEKVKSQLKNNAKEIGNGCFEFYHKCNDECMESVKNGTYDYPKYSEESKLNREKIDGVKLESMGVYQILAIYSTVASSLVLLVSLGAISFWMCSNGSLQCRICI

SEQ ID NO: 3618 - protein, 566 aa, Artificial Sequence; identical to SEQ ID NO: 3613
  derived and/or modified protein sequence (wt) from hemagglutinin__InfluenzaA__ACZ05950

SEQ ID NO: 3619 - protein, 566 aa, Artificial Sequence; identical to SEQ ID NO: 3588
  derived and/or modified protein sequence (wt) from hemagglutinin__InfluenzaA__ACZ05961

SEQ ID NO: 3620 - protein, 566 aa, Artificial Sequence
  derived and/or modified protein sequence (wt) from hemagglutinin__InfluenzaA__ACZ05972
MKTIIALSYILCLVFAQKLPGNDNSTATLCLGHHAVPNGTIVKTITNDQIEVTNATELVQSSSTGEICDSPHQILDGKNCTLIDALLGDPQCDGFQNKKWDLFVERSKAYSNCYPYDVPDYASLRSLVASSGTLEFNNESFNWTGVTQNGTSSACIRRSKNSFFSRLNWLTHLNFKYPALNVTMPNNEQFDKLYIWGVHHPGTDKDQIFLYAQASGRITVSTKRSQQTAIPNIGSRPRVRNIPSRISIYWTIVKPGDILLINSTGNLIAPRGYFKIRSGKSSIMRSDAPIGKCNSECITPNGSIPNDKPFQNVNRITYGACPRYVKQNTLKLATGMRNVPEKQTRGIFGAIAGFIENGWEGMVDGWYGFRHQNSEGRGQAADLKSTQAAIDQINGKLNRLIGKTNEKFHQIEKEFSEVEGRIQDLEKYVEDTKIDLWSYNAELLVALENQHTIDLTDSEMNKLFEKTKKQLRENAEDMGNGCFKIYHKCDNACIGSIRNGTYDHDVYRDEALNNRFQIKGVELKSGYKDWILWISFAISCSLLCVALLGFIMWACQKGNIRCNICI

SEQ ID NO: 3621 - protein, 566 aa, Artificial Sequence
  derived and/or modified protein sequence (wt) from hemagglutinin__InfluenzaA__ACZ05983
MKTIIALSYILCLVFAQKLPGNDNSTATLCLGHHAVPNGTIVKTITNDQIEVTNATELVQSSSTGEICDSPHQILDGKNCTLIDALLGDPQCDGFQNKKWDLFVERSKAYSNCYPYDVPDYASLRSLVASSGTLEFNNESFNWTGVTQNGTSSACIRRSKNSFFSRLNWLTHLNFKYPALNVTMPNNEQFDKLYIWGVHHPGTDKDQIFLYAQASGRITVSTKRSQQTAIPNIGSRPRVRNIPSRISIYWTIVKPGDILLINSTGNLIAPRGYFKIRSGKSSIMRSDAPIGKCNSECITPNGSIPNDKPFQNVNRNTYGACPRYVKQNTLKLATGMRNVPEKQTRGIFGAIAGFIENGWEGMVDGWYGFRHQNSEGRGQAADLKSTQAAIDQINGKLNRLIGKTNEKFHQIEKEFSEVEGRIQDLEKYVEDTKIDLWSYNAELLVALENQHTIDLTDSEMNKLFEKTKKQLRENAEDMGNGCFKIYHKCDNACIGSIRNGTYDHDVYRDEALNNRFQIKGVELKSGYKDWILWISFAISCFLLCVALLGFIMWACQKGNIRCNICI

SEQ ID NO: 3622 - protein, 566 aa, Artificial Sequence
  derived and/or modified protein sequence (wt) from hemagglutinin__InfluenzaA__ACZ05994
MKTIIALSYILCLVFAQKLPGNDNSTATLCLGHHAVPNGTIVKTITNDQIEVTNATELVQSSSTGEICDSPHQILDGKNCTLIDALLGDPQCDGFQNKKWDLFVERSKAYSNCYPYDVPDYASLRSLVASSGTLEFNNESFNWTGVTQNGTSSACIRRSKNSFFSRLNWLTHLNFKYPALNVTVPNNEQFDKLYIWGVHHPGTDKDQIFLYAQASGRITVSTKRSQQTAIPNIGSRPRVRNIPSRISIYWTIVKPGDILLINSTGNLIAPRGYFKIRSGKSSIMRSDAPIGKCNSECITPNGSIPNDKPFQNVNRITYGACPRYVKQNTLKLATGMRNVPEKQTRGIFGAIAGFIENGWEGMVDGWYGFRHQNSEGRGQAADLKSTQAAIDQINGKLNRLIGKTNEKFHQIEKEFSEVEGRIQDLEKYVEDTKIDLWSYNAELLVALENQHTIDLTDSEMNKLFEKTKKQLRENAEDMGNGCFKIYHKCDNACIGSIRNGTYDHDVYRDEALNNRFQIKGVELKSGYKDWILWISFAISCFLLCVALLGFIMWACQKGNIRCNICI

SEQ ID NO: 3623 - protein, 566 aa, Artificial Sequence; identical to SEQ ID NO: 3588
  derived and/or modified protein sequence (wt) from hemagglutinin__InfluenzaA__ACZ06005

SEQ ID NO: 3624 - protein, 566 aa, Artificial Sequence; identical to SEQ ID NO: 3588
  derived and/or modified protein sequence (wt) from hemagglutinin__InfluenzaA__ACZ06016

SEQ ID NO: 3625 - protein, 565 aa, Artificial Sequence
  derived and/or modified protein sequence (wt) from hemagglutinin__InfluenzaA__ACZ16013
MKVKLLVLLCTFTATYADTICIGYHANNSTDTVDTVLEKNVTVTHSVNLLENSHNGKLCLLKGIAPLQLGNCSVAGWILGNPECELLISKESWSYIVEKPNPENGTCYPGHFADYEELREQLSSVSSFERFEIFPKESSWPNHTVTGVSASCSHNGENSFYRNLLWLTGKNGLYPNLSKSYANNKEKEVLVLWGVHHPPNIADQKTLYHTEKAYVSVVSSHYSRKFTPEIAKRPKVRDQEGRINYYWTLLEPGDTIIFEANGNLIAPRYAFALSRGFGSGIINSNAPMDKCDAKCQTPQGAINSSLPFQNVHPVTIGECPKYVRSAKLRMVTGLRNIPSIQSRGLFGAIAGFIEGGWTGMVDGWYGYHHQNEQGSGYAADQKSTQNAINGITNKVNSVIEKMNTQFTAVGKEFNKLERRMENLNKKVDDGFIDIWTYNAELLVLLENERTLDFHDSNVKNLYEKVKSQLKNNAKEIGNGCFEFYHKCNDECMESVKNGTYDYPKYSEESKLNREKIDGVKLESMGVYQILAIYSTVASSLVLLVSLGAISFWMCSNGSLQCRICI

SEQ ID NO: 3626 - protein, 565 aa, Artificial Sequence
  derived and/or modified protein sequence (wt) from hemagglutinin__InfluenzaA__ACZ16023
MKVKLLVLLCTFTATYADTICIGYHANNSTDTVDTVLEKNVTVTHSVNLLENSHNGKLCLLKGIAPLQLGNCSVAGWILGNPECELLISKESWSYIVEKPNPENGTCYPGHFADYEELREQLSSVSSFERFEIFPKESSWPNHTVTGVSASCSHNGENSFYRNLLWLTGKNGLYPNLSKSYANNKEKEVLVLWGVHHPPNIADQKTLYHTENAYVSVVSSHYSRKFTPEIAKRPKVRDQEGRINYYWTLLEPGDTIIFEANGNLIAPRYAFALSRGFGSGIINSNAPMDKCDAKCQTPQGAINSSLPFQNVHPVTIGECPKYVRSAKLRMVTGLRNIPSIQSRGLFGAIAGFIEGGWTGMVDGWYGYHHQNEQGSGYAADQKSTQNAINGITNKVNSVIEKMNTQFTAVGKEFNKLERRMENLNKKVDDGFIDIWTYNAELLVLLENERTLDFHDSNVKNLYEKVKSQLKNNAKEIGNGCFEFYHKCNDECMESVKNGTYDYPKYSEESKLNREKIDGVKLESMGVYQILAIYSTVASSLVLLVSLGAISFWMCSNGSLQCRICI

SEQ ID NO: 3627 - protein, 565 aa, Artificial Sequence
  derived and/or modified protein sequence (wt) from hemagglutinin__InfluenzaA__ACZ16033
MKVKLLVLLCTFTATYADTICIGYHANNSTDTVDTVLEKNVTVTHSVNLLENSHNGKLCLLKGIAPLQLGNCSVAGWILGNPECELLISKESWSYIVEKPNPENGTCYPGHFADYEELREQLSSVSSFERFEIFPKESSWPNHTVTGASASCSHNGENSFYRNLLWLTGKNGLYPNLSKSYANNKEKEVLVLWGVHHPPNIADQKTLYHTENAYVSVVSSHYSRKFTPEIAKRPKVRDQEGRINYYWTLLEPGDTIIFEANGNLIAPRYAFALSRGFGSGIINSNAPMDKCDAKCQTPQGAINSSLPFQNIHPVTIGECPKYVRSAKLRMVTGLRNIPSIQSRGLFGAIAGFIEGGWTGMVDGWYGYHHQNEQGSGYAADQKSTQNAINGITNKVNSVIEKMNTQFTAVGKEFNKLERRMENLNKKVDDGFIDIWTYNAELLVLLENERTLDFHDSNVKNLYEKVKSQLKNNAKEIGNGCFEFYHKCNDECMESVKNGTYDYPKYSEESKLNKEKIDGVKLESMGVYQILAIYSTVASSLVLLVSLGAISFWMCSNGSLQCRICI

SEQ ID NO: 3628 - protein, 566 aa, Artificial Sequence; identical to SEQ ID NO: 2656
  derived and/or modified protein sequence (wt) from hemagglutinin__InfluenzaA__ACZ16040

SEQ ID NO: 3629 - protein, 566 aa, Artificial Sequence; identical to SEQ ID NO: 2656
  derived and/or modified protein sequence (wt) from hemagglutinin__InfluenzaA__ACZ16050

SEQ ID NO: 3630 - protein, 566 aa, Artificial Sequence; identical to SEQ ID NO: 2656
  derived and/or modified protein sequence (wt) from hemagglutinin__InfluenzaA__ACZ16060

SEQ ID NO: 3631 - protein, 566 aa, Artificial Sequence
  derived and/or modified protein sequence (wt) from hemagglutinin__InfluenzaA__ACZ16070
MKAILVVLLYTFATANADTLCIGYHANNSTDTVDTVLEKNVTVTHSVSLLEDKHNGKLCKLRGVAPLHLGKCNIAGWILGNPECESLSTASSWSYIVETSSSDNGTCYPGDFIDYEELREQLSSVSSFERFEIFPKTSSWPNHDSNKGVTAACPHAGAKSFYKNLIWLVKKGNSYPKLSKSYINDKGKEVLVLWGIHHPSTSADQQSLYQNADAYVFVGSSRYSKKFKPEIAIRPKVRDQEGRMNYYWTLVEPGDKITFEATGNLVVPRYAFAMERNAGSGIIISDTPVHDCNTTCQTPKGAINTSLPFQNIHPITIGKCPKYVKSTKLRLATGLRNVPSIQSRGLFGAIAGFIEGGWTGMVDGWYGYHHQNEQGSGYAADLKSTQNAIDEITNKVNSVIEKMNTQFTAVGKEFNHLEKRIENLNKKVDDGFLDIWTYNAELLVLLENERTLDYHDSNVKNLYEKVRSQLKNNAKEIGNGCFEFYHKCDNTCMESVKNGTYDYPKYSEEAKLNREEIDGVKLESTRIYQILAIYSTVASSLVLVVSLGAISFWMCSNGSLQCRICI

SEQ ID NO: 3632 - protein, 566 aa, Artificial Sequence
  derived and/or modified protein sequence (wt) from hemagglutinin__InfluenzaA__ACZ16080
MKAILVVLLYTFATANADTLCIGYHANNSTDTVDTVLEKNVTVTHSVNLLEDKHNGKLCKLRGVAPLHLGKCNIAGWILGNPECESLSTASSWSYIVETSSSDNGTCYPGDFIDYEELREQLSSVSSFERFEIFPKTSSWPNHDSNKGVTAACPHAGAKSFYKNLIWLVKKGNSYPKLSKSYINDKGKEVLVLWGIHHPSTSADQQSLYQNADAYVFVGSSRYSKKFKPEIAIRPKVRDQEGRMNYYWTLVEPGDKITFEATGNLVVPRYAFAMERNDGSGIIISDTPVHDCNTTCQTPKGAINTSLPFQNIHPITIGKCPKYVKSTKLRLATGLRNVPSIQSRGLFGAIAGFIEGGWTGMVDGWYGYHHQNEQGSGYAADLKSTQNAIDEITNKVNSVIEKMNTQFTAVGKEFNHLEKRIENLNKKVDDGFLDIWTYNAELLVLLENERTLDYHDSNVKNLYEKVRSQLKNNAKEIGNGCFEFYHKCDNTCMESVKNGTYDYPKYSEEAKLNREEIDGVKLESTRIYQILAIYSTVASSLVLVVSLGAISFWMCSNGSLQCRICI

SEQ ID NO: 3633 - protein, 566 aa, Artificial Sequence
  derived and/or modified protein sequence (wt) from hemagglutinin__InfluenzaA__ACZ16090
MKAILLVLLYTFATANADTLCIGYHANNSTDTVDTVLEKNVTVTHSVNLLEDKHNGKLCKLRGVAPLHLGKCNIAGWILGNPECESLSTASSWSYIVETSSSDNGTCYPGDFIDYEELREQLSSMSSFERFEIFPKTSSWPNHDSNKGVTAACPHAGAKSFYKNLIWLVKKGNSYPKLSKSYINDKGKEVLVLWGIHHPSTSADQQSLYQNADAYVFVGSSRYSKKFKPEIAIRPKVRDQEGRMNYYWTLVEPGDKITFEATGNLVVPRYAFAMERNAGSGIIISDTPVHDCNTTCQTPKGAINTSLPFQNIHPITIGKCPKYVKSTKLRLATGLRNVPSIQSRGLFGAIAGFIEGGWTGMVDGWYGYHHQNEQGSGYAADLKSTQNAIDEITNKVNSVIEKMNTQFTAVGKEFNHLEKRIENLNKKVDDGFLDIWTYNAELLVLLENERTLDYHDSNVKNLYEKVRSQLKNNAKEIGNGCFEFYHKCDNTCMESVKNGTYDYPKYSEEAKLNREEIDGVKLESTRIYQILAIYSTVASSLVLVVSLGAISFWMCSNGSLQCRICI

SEQ ID NO: 3634 - protein, 566 aa, Artificial Sequence; identical to SEQ ID NO: 2656
  derived and/or modified protein sequence (wt) from hemagglutinin__InfluenzaA__ACZ16100

SEQ ID NO: 3635 - protein, 566 aa, Artificial Sequence; identical to SEQ ID NO: 2656
  derived and/or modified protein sequence (wt) from hemagglutinin__InfluenzaA__ACZ16110

SEQ ID NO: 3636 - protein, 566 aa, Artificial Sequence; identical to SEQ ID NO: 2656
  derived and/or modified protein sequence (wt) from hemagglutinin__InfluenzaA__ACZ16120

SEQ ID NO: 3637 - protein, 566 aa, Artificial Sequence; identical to SEQ ID NO: 3404
  derived and/or modified protein sequence (wt) from hemagglutinin__InfluenzaA__ACZ16130

SEQ ID NO: 3638 - protein, 566 aa, Artificial Sequence; identical to SEQ ID NO: 2656
  derived and/or modified protein sequence (wt) from hemagglutinin__InfluenzaA__ACZ16140

SEQ ID NO: 3639 - protein, 566 aa, Artificial Sequence; identical to SEQ ID NO: 2656
  derived and/or modified protein sequence (wt) from hemagglutinin__InfluenzaA__ACZ16150

SEQ ID NO: 3640 - protein, 566 aa, Artificial Sequence; identical to SEQ ID NO: 2656
  derived and/or modified protein sequence (wt) from hemagglutinin__InfluenzaA__ACZ16160

SEQ ID NO: 3641 - protein, 566 aa, Artificial Sequence; identical to SEQ ID NO: 2849
  derived and/or modified protein sequence (wt) from hemagglutinin__InfluenzaA__ACZ16170

SEQ ID NO: 3642 - protein, 566 aa, Artificial Sequence
  derived and/or modified protein sequence (wt) from hemagglutinin__InfluenzaA__ACZ16180
MKAILVVLLYTFATANADTLCIGYHANNSTDTVDTVLEKNVTVTHSVNLLEDKHNGKLCKLRGVAPLHLGKCNIAGWILGNPECESLYTASSWSYIVETSSSDNGTCYPGDFIDYEELREQLSSVSSFERFEIFPKTSSWPNHDSNKGVTAACPHAGAKSFYKNLIWLVKKGNSYPKLSKSYINDKGKEVLVLWGIHHPSTSADQQSLYQNADAYVFVGSSRYSKKFKPEIAIRPKVRDQEGRMNYYWTLVEPGDKITFEATGNLVVPRYAFAMERNAGSGIIISDTPVHDCNTTCQTPKGAINTSLPFQNIHPITIGKCPKYVKSTKLRLATGLRNVPSIQSRGLFGAIAGFIEGGWTGMVDGWYGYHHQNEQGSGYAADLKSTQNAIDEITNKVNSVIEKMNTQFTAVGKEFNHLEKRIENLNKKVDDGFLDIWTYNAELLVLLENERTLDYHDSNVKNLYEKVRSQLKNNAKEIGNGCFEFYHKCDNTCMESVKNGTYDYPKYSEEAKLNREEIDGVKLESTRIYQILAIYSTVASSLVLVVSLGAISFWMCSNGSLQCRICI

SEQ ID NO: 3643 - protein, 566 aa, Artificial Sequence; identical to SEQ ID NO: 2656
  derived and/or modified protein sequence (wt) from hemagglutinin__InfluenzaA__ACZ16190

SEQ ID NO: 3644 - protein, 566 aa, Artificial Sequence
  derived and/or modified protein sequence (wt) from hemagglutinin__InfluenzaA__ACZ16200
MKAILVVLLYTFATANPDTLCIGYHANNSTDTVDTVLEKNVTVTHSVNLLEDKHNGKLCKLRGVAPLHLGKCNIAGWILGNPECESLSTASSWSYIVETSSSDNGTCYPGDFIDYEELREQLSSVSSFERFEIFPKTSSWPNHDSNKGVTAACPHAGAKSFYKNLIWLVKKGNSYPKLSKSYINDKGKEVLVLWGIHHPSTSADQQSLYQNADAYVFVGSSRYSKKFKPEIAIRPKVRDQEGRMNYYWTLVEPGDKITFEATGNLVVPRYAFAMERNAGSGIIISDTPVHDCNTTCQTPKGAINTSLPFQNIHPITIGKCPKYVKSTKLRLATGLRNVPSIQSRGLFGAIAGFIEGGWTGMVDGWYGYHHQNEQGSGYAADLKSTQNAIDEITNKVNSVIEKMNTQFTAVGKEFNHLEKRIENLNKKVDDGFLDIWTYNAELLVLLENERTLDYHDSNVKNLYEKVRSQLKNNAKEIGNGCFEFYHKCDNTCMESVKNGTYDYPKYSEEAKLNREEIDGVKLESTRIYQILAIYSTVASSLVLVVSLGAISFWMCSNGSLQCRICI

SEQ ID NO: 3645 - protein, 566 aa, Artificial Sequence; identical to SEQ ID NO: 2656
  derived and/or modified protein sequence (wt) from hemagglutinin__InfluenzaA__ACZ16210

SEQ ID NO: 3646 - protein, 566 aa, Artificial Sequence; identical to SEQ ID NO: 2656
  derived and/or modified protein sequence (wt) from hemagglutinin__InfluenzaA__ACZ16220

SEQ ID NO: 3647 - protein, 566 aa, Artificial Sequence; identical to SEQ ID NO: 3404
  derived and/or modified protein sequence (wt) from hemagglutinin__InfluenzaA__ACZ16230

SEQ ID NO: 3648 - protein, 566 aa, Artificial Sequence
  derived and/or modified protein sequence (wt) from hemagglutinin__InfluenzaA__ACZ16240
MKAILVVLLYTFATANADTLCIGYHANNSTDTVDTVLEKNVTVTHSVNILEDKHNGKLCKLRGVAPLHLGKCNIAGWILGNPECESLSTASSWSYIVETSSSDNGTCYPGDFIDYEELREQLSSVSSFERFEIFPKTSSWPNHDSNKGVTAACPHAGAKSFYKNLIWLVKKGNSYPKLSKSYINDKGKEVLVLWGIHHPSTSADQQSLYQNADAYVFVGSSRYSKKFKPEIAIRPKVRDQEGRMNYYWTLVEPGDKITFEATGNLVVPRYAFAMERNAGSGIIISDTPVHDCNTTCQTPKGAINTSLPFQNIHPITIGKCPKYVKSTKLRLATGLRNVPSIQSRGLFGAIAGFIEGGWTGMVDGWYGYHHQNEQGSGYAADLKSTQNALDEITNKVNSVIEKMNTQFTAVGKEFNHLEKRIENLNKKVDDGFLDIWTYNAELLVLLENERTLDYHDSNVKNLYEKVRSQLKNNAKEIGNGCFEFYHKCDNTCMESVKNGTYDYPKYSEEAKLNREEIDGVKLESTRIYQILAIYSTVASSLVLVVSLGAISFWMCSNGSLQCRICI

SEQ ID NO: 3649 - protein, 566 aa, Artificial Sequence; identical to SEQ ID NO: 2656
  derived and/or modified protein sequence (wt) from hemagglutinin__InfluenzaA__ACZ16260

SEQ ID NO: 3650 - protein, 566 aa, Artificial Sequence
  derived and/or modified protein sequence (wt) from hemagglutinin__InfluenzaA__ACZ16270
MKAILVVLLYTFATANADTLCIGYHANNSTDTVDTVLEKNVTVTHSVNLLEDKHNGKLCKLRGVAPLHLGKCNIAGWILGNPECESLSTASSWSYIVETSSSDNGTCYPGDFIDYEELREQLSSVSSFERFEIFPKTSSWPNHDSNKGVTAACPHAGAKSFYKNLIWLVKKGNSYPKLSKSYINDKGKEVLVLWGIHHPSTSADQQNLYQNADAYVFVGSSRYSKKFKPEIAIRPKVRDQEGRMNYYWTLVEPGDKITFEATGNLVVPRYAFAMERNAGSGIIISDTPVHDCNTTCQTPKGAINTSLPFQNIHPITIGKCPKYVKSTKLRLATGLRNVPSIQSRGLFGAIAGFIEGGWTGMVDGWYGYHHQNEQGSGYAADLKSTQNAIDEITNKVNSVIEKMNTQFTAVGKEFNHLEKRIENLNKKVDDGFLDIWTYNAELLVLLENERTLDYHDSNVKNLYEKVRSQLKNNAKEIGNGCFEFYHKCDNTCMESVKNGTYDYPKYSEEAKLNREEIDGVKLESTRIYQILAIYSTVASSLILVVSLGAISFWMCSNGSLQCRICI

SEQ ID NO: 3651 - protein, 566 aa, Artificial Sequence; identical to SEQ ID NO: 3331
  derived and/or modified protein sequence (wt) from hemagglutinin__InfluenzaA__ACZ16280

SEQ ID NO: 3652 - protein, 566 aa, Artificial Sequence; identical to SEQ ID NO: 2656
  derived and/or modified protein sequence (wt) from hemagglutinin__InfluenzaA__ACZ16290

SEQ ID NO: 3653 - protein, 566 aa, Artificial Sequence
  derived and/or modified protein sequence (wt) from hemagglutinin__InfluenzaA__ACZ16300
MKAILVVLLYTFATANADTLCIGYHANNSTDTVDTVLEKNVIVTHSVNLLEDKHNGKLCKLRGVAPLHLGKCNIAGWILGNPECESLSTASSWSYIVETSSSDNGTCYPGDFIDYEELREQLSSVSSFERFEIFPKTSSWPNHDSNKGVTAACPHAGAKSFYKNLIWLVKKGNSYPKLSKSYINDKGKEVLVLWGIHHPSTSADQQSLYQNADAYVFVGSSRYSKKFKPEIAIRPKVRDQEGRMNYYWTLVEPGDKITFEATGNLLVPRYAFAMERNAGSGIIISDTPVHDCNTTCQTPKGAINTSLPFQNIHPITIGKCPKYVKSTKLRLATGLRNVPSIQSRGLFGAIAGFIEGGWTGMVDGWYGYHHQNEQGSGYAADLKSTQNAIDEITNKVNSVIEKMNTQFTAVGKEFNHLEKRIENLNKKVDDGFLDIWTYNAELLVLLENERTLDYHDSNVKNLYEKVRSQLKNNAKEIGNGCFEFYHKCDNTCMESVKNGTYDYPKYSEEAKLNREEIDGVKLESTRIYQILAIYSTVASSLVLVVSLGAISFWMCSNGSLQCRICI

SEQ ID NO: 3654 - protein, 566 aa, Artificial Sequence; identical to SEQ ID NO: 3399
  derived and/or modified protein sequence (wt) from hemagglutinin__InfluenzaA__ACZ16310

SEQ ID NO: 3655 - protein, 566 aa, Artificial Sequence
  derived and/or modified protein sequence (wt) from hemagglutinin__InfluenzaA__ACZ16320
MKAILVVLLYTFATANADTLCIGYHANNSTDTVDTVLEKNVTVTHSVNLLEDKHNGKLCKLRGVAPLHLGKCNIAGWILGNPECESLSTASSWSYIVETSSSDNGTCYPGDFIDYEELREQLSSVSSFERFEIFPKTSSWPNHDSNKGVTAACPHAGAKSFYKNLIWLVKKGNSYPKLSKSYINDKGKEVLVLWGIHHPSTSADQQSLYQNADAYVFVGSSRYSKKFKPEIAIRPKVRDQEGRMNYYWTLVEPGDKITFEATGNLVVPRYAFAMERNAGSGIIISDTPVHDCNTTCQTPKGAINTSLPFQNIHPITIGKCPKYVKSTRLRLATGLRNVPSIQSRGLFGAIAGFIEGGWTGMVDGWYGYHHQNEQGSGYAADLKSTQNAIDEITNKVNSVIEKMNTQFTAVGKEFNHLEKRIENLNKKVDDGFLDIWTYNAELLVLLENERTLDYHDSNVKNLYEKVRSQLKNNAKEIGNGCFEFYHKCDNTCMESVKNGTYDYPKYSEEAKLNREEIDGVKLESTRIYQILAIYSTVASSLVLVVSLGAISFWMCSNGSLQCRICI

SEQ ID NO: 3656 - protein, 566 aa, Artificial Sequence; identical to SEQ ID NO: 3399
  derived and/or modified protein sequence (wt) from hemagglutinin__InfluenzaA__ACZ16330

SEQ ID NO: 3657 - protein, 566 aa, Artificial Sequence; identical to SEQ ID NO: 2849
  derived and/or modified protein sequence (wt) from hemagglutinin__InfluenzaA__ACZ16340

SEQ ID NO: 3658 - protein, 566 aa, Artificial Sequence; identical to SEQ ID NO: 2656
  derived and/or modified protein sequence (wt) from hemagglutinin__InfluenzaA__ACZ16350

SEQ ID NO: 3659 - protein, 566 aa, Artificial Sequence; identical to SEQ ID NO: 2656
  derived and/or modified protein sequence (wt) from hemagglutinin__InfluenzaA__ACZ16360

SEQ ID NO: 3660 - protein, 566 aa, Artificial Sequence; identical to SEQ ID NO: 2849
  derived and/or modified protein sequence (wt) from hemagglutinin__InfluenzaA__ACZ16370

SEQ ID NO: 3661 - protein, 566 aa, Artificial Sequence; identical to SEQ ID NO: 2656
  derived and/or modified protein sequence (wt) from hemagglutinin__InfluenzaA__ACZ16380

SEQ ID NO: 3662 - protein, 566 aa, Artificial Sequence; identical to SEQ ID NO: 2656
  derived and/or modified protein sequence (wt) from hemagglutinin__InfluenzaA__ACZ16390

SEQ ID NO: 3663 - protein, 566 aa, Artificial Sequence; identical to SEQ ID NO: 2656
  derived and/or modified protein sequence (wt) from hemagglutinin__InfluenzaA__ACZ16400

SEQ ID NO: 3664 - protein, 566 aa, Artificial Sequence; identical to SEQ ID NO: 2656
  derived and/or modified protein sequence (wt) from hemagglutinin__InfluenzaA__ACZ16410

SEQ ID NO: 3665 - protein, 566 aa, Artificial Sequence; identical to SEQ ID NO: 3293
  derived and/or modified protein sequence (wt) from hemagglutinin__InfluenzaA__ACZ16420

SEQ ID NO: 3666 - protein, 566 aa, Artificial Sequence; identical to SEQ ID NO: 2656
  derived and/or modified protein sequence (wt) from hemagglutinin__InfluenzaA__ACZ16430

SEQ ID NO: 3667 - protein, 566 aa, Artificial Sequence; identical to SEQ ID NO: 2656
  derived and/or modified protein sequence (wt) from hemagglutinin__InfluenzaA__ACZ16440

SEQ ID NO: 3668 - protein, 566 aa, Artificial Sequence
  derived and/or modified protein sequence (wt) from hemagglutinin__InfluenzaA__ACZ16450
MKAILVVLLYTFATANADTLCIGYHANNSTDTVDTVLEKNVTVTHSVNLLEDKHNGKLCKLRGVAPLHLGKCNIAGWILGNPECESLSTASSWSYIVETSSSDNGTCYPGDFIDYEELREQLSSVSSFERFEIFPKTSSWPNHDSNKGVTAACPHAGAKSFYKNLIWLVKKGNSYPKLSKSYINDKGKEVLVLWGIHHPSTSADQQSLYQNADAYVFVGSSRYSKKFKPEIAIRPKVRDQEGRMNYYWTLVKPGDKITFEATGNLVVPRYAFAMERNAGSGIIISDTPVHDCNTTCQTPKGAINTSLPFQNIHPITIGKCPKYVKSTKLRLATGLRNVPSIQSRGLFGAIAGFIEGGWTGMVDGWYGYHHQNEQGSGYAADLKSTQNAIDEITNKVNSVIEKMNTQFTAVGKEFNHLEKRIENLNKKVDDGFLDIWTYNAELLVLLENERTLDYHDSNVKNLYEKVRSQLKNNAKEIGNGCFEFYHKCDNTCMESVKNGTYDYPKYSEEAKLNREEIDGVKLESTRIYQILAIYSTVASSLVLVVSLGAISFWMCSNGSLQCRICI

SEQ ID NO: 3669 - protein, 566 aa, Artificial Sequence; identical to SEQ ID NO: 2849
  derived and/or modified protein sequence (wt) from hemagglutinin__InfluenzaA__ACZ16460

SEQ ID NO: 3670 - protein, 566 aa, Artificial Sequence; identical to SEQ ID NO: 2656
  derived and/or modified protein sequence (wt) from hemagglutinin__InfluenzaA__ACZ16470

SEQ ID NO: 3671 - protein, 566 aa, Artificial Sequence; identical to SEQ ID NO: 2656
  derived and/or modified protein sequence (wt) from hemagglutinin__InfluenzaA__ACZ16480

SEQ ID NO: 3672 - protein, 566 aa, Artificial Sequence; identical to SEQ ID NO: 3404
  derived and/or modified protein sequence (wt) from hemagglutinin__InfluenzaA__ACZ16490

SEQ ID NO: 3673 - protein, 566 aa, Artificial Sequence; identical to SEQ ID NO: 2656
  derived and/or modified protein sequence (wt) from hemagglutinin__InfluenzaA__ACZ16500

SEQ ID NO: 3674 - protein, 566 aa, Artificial Sequence; identical to SEQ ID NO: 2849
  derived and/or modified protein sequence (wt) from hemagglutinin__InfluenzaA__ACZ16510

SEQ ID NO: 3675 - protein, 566 aa, Artificial Sequence; identical to SEQ ID NO: 2656
  derived and/or modified protein sequence (wt) from hemagglutinin__InfluenzaA__ACZ16530

SEQ ID NO: 3676 - protein, 566 aa, Artificial Sequence
  derived and/or modified protein sequence (wt) from hemagglutinin__InfluenzaA__ACZ16540
MKAILVVLLYTFATANADTLCIGYHANNSTDTVDTVLEKNVTVTHSVNILEDKHNGKLCKLRGVAPLHLGKCNIAGWILGNPECESLSTASSWSYIVETSSSDNGTCYPGDFIDYEELREQLSSVSSFERFEIFPKTSSWPNHDSNKGVTAACPHAGAKSFYKNLIWLVKKGNSYPKLSKSYINDKGKEVLVLWGIHHPSTSADQQSLYQNADAYVFVGSSRYSKKFKPEIAIRPKVRDQEGRMNYYWTLVEPGDKITFEATGNLVVPRYAFAMERNAGSGIIISDTPVHDCNTTCQTPKGAINTSLPFQNIHPITIGKCPKYVKSTKLRLATGLRNVPSIQSRGLLGAIAGFIEGGWTGMVDGWYGYHHQNEQGSGYAADLKSTQNAIDEITNKVNSVIEKMNTQFTAVGKEFNHLEKRIENLNKKVDDGFLDIWTYNAELLVLLENERTLDYHDSNVKNLYEKVRSQLKNNAKEIGNGCFEFYHKCDNTCMESVKNGTYDYPKYSEEAKLNREEIDGVKLESTRIYQILAIYSTVASSLVLVVSLGAISFWMCSNGSLQCRICI

SEQ ID NO: 3677 - protein, 566 aa, Artificial Sequence; identical to SEQ ID NO: 3399
  derived and/or modified protein sequence (wt) from hemagglutinin__InfluenzaA__ACZ16550

SEQ ID NO: 3678 - protein, 566 aa, Artificial Sequence; identical to SEQ ID NO: 2656
  derived and/or modified protein sequence (wt) from hemagglutinin__InfluenzaA__ACZ16583

SEQ ID NO: 3679 - protein, 566 aa, Artificial Sequence; identical to SEQ ID NO: 3399
  derived and/or modified protein sequence (wt) from hemagglutinin__InfluenzaA__ACZ16593

SEQ ID NO: 3680 - protein, 566 aa, Artificial Sequence; identical to SEQ ID NO: 2656
  derived and/or modified protein sequence (wt) from hemagglutinin__InfluenzaA__ACZ16603

SEQ ID NO: 3681 - protein, 566 aa, Artificial Sequence; identical to SEQ ID NO: 3399
  derived and/or modified protein sequence (wt) from hemagglutinin__InfluenzaA__ACZ16630

SEQ ID NO: 3682 - protein, 566 aa, Artificial Sequence; identical to SEQ ID NO: 2656
  derived and/or modified protein sequence (wt) from hemagglutinin__InfluenzaA__ACZ16640

SEQ ID NO: 3683 - protein, 566 aa, Artificial Sequence; identical to SEQ ID NO: 2656
  derived and/or modified protein sequence (wt) from hemagglutinin__InfluenzaA__ACZ16650

SEQ ID NO: 3684 - protein, 566 aa, Artificial Sequence; identical to SEQ ID NO: 2656
  derived and/or modified protein sequence (wt) from hemagglutinin__InfluenzaA__ACZ16660

SEQ ID NO: 3685 - protein, 566 aa, Artificial Sequence; identical to SEQ ID NO: 2656
  derived and/or modified protein sequence (wt) from hemagglutinin__InfluenzaA__ACZ16670

SEQ ID NO: 3686 - protein, 566 aa, Artificial Sequence; identical to SEQ ID NO: 2656
  derived and/or modified protein sequence (wt) from hemagglutinin__InfluenzaA__ACZ16680

SEQ ID NO: 3687 - protein, 566 aa, Artificial Sequence; identical to SEQ ID NO: 2656
  derived and/or modified protein sequence (wt) from hemagglutinin__InfluenzaA__ACZ16690

SEQ ID NO: 3688 - protein, 566 aa, Artificial Sequence; identical to SEQ ID NO: 2656
  derived and/or modified protein sequence (wt) from hemagglutinin__InfluenzaA__ACZ16700

SEQ ID NO: 3689 - protein, 566 aa, Artificial Sequence; identical to SEQ ID NO: 2656
  derived and/or modified protein sequence (wt) from hemagglutinin__InfluenzaA__ACZ16710

SEQ ID NO: 3690 - protein, 566 aa, Artificial Sequence; identical to SEQ ID NO: 2656
  derived and/or modified protein sequence (wt) from hemagglutinin__InfluenzaA__ACZ16720

SEQ ID NO: 3691 - protein, 566 aa, Artificial Sequence; identical to SEQ ID NO: 3399
  derived and/or modified protein sequence (wt) from hemagglutinin__InfluenzaA__ACZ16730

SEQ ID NO: 3692 - protein, 566 aa, Artificial Sequence; identical to SEQ ID NO: 3399
  derived and/or modified protein sequence (wt) from hemagglutinin__InfluenzaA__ACZ16740

SEQ ID NO: 3693 - protein, 566 aa, Artificial Sequence; identical to SEQ ID NO: 2656
  derived and/or modified protein sequence (wt) from hemagglutinin__InfluenzaA__ACZ16750

SEQ ID NO: 3694 - protein, 566 aa, Artificial Sequence; identical to SEQ ID NO: 2656
  derived and/or modified protein sequence (wt) from hemagglutinin__InfluenzaA__ACZ16760

SEQ ID NO: 3695 - protein, 566 aa, Artificial Sequence; identical to SEQ ID NO: 2849
  derived and/or modified protein sequence (wt) from hemagglutinin__InfluenzaA__ACZ16770

SEQ ID NO: 3696 - protein, 566 aa, Artificial Sequence; identical to SEQ ID NO: 2656
  derived and/or modified protein sequence (wt) from hemagglutinin__InfluenzaA__ACZ16780

SEQ ID NO: 3697 - protein, 566 aa, Artificial Sequence; identical to SEQ ID NO: 2656
  derived and/or modified protein sequence (wt) from hemagglutinin__InfluenzaA__ACZ16790

SEQ ID NO: 3698 - protein, 566 aa, Artificial Sequence; identical to SEQ ID NO: 2656
  derived and/or modified protein sequence (wt) from hemagglutinin__InfluenzaA__ACZ16800

SEQ ID NO: 3699 - protein, 566 aa, Artificial Sequence; identical to SEQ ID NO: 2656
  derived and/or modified protein sequence (wt) from hemagglutinin__InfluenzaA__ACZ16810

SEQ ID NO: 3700 - protein, 566 aa, Artificial Sequence; identical to SEQ ID NO: 3331
  derived and/or modified protein sequence (wt) from hemagglutinin__InfluenzaA__ACZ16820

SEQ ID NO: 3701 - protein, 566 aa, Artificial Sequence; identical to SEQ ID NO: 2656
  derived and/or modified protein sequence (wt) from hemagglutinin__InfluenzaA__ACZ16830

SEQ ID NO: 3702 - protein, 566 aa, Artificial Sequence
  derived and/or modified protein sequence (wt) from hemagglutinin__InfluenzaA__ACZ16840
MKAILVVLLYTFATANADTLCIGYHANNSTDTVDTVLEKNVTVTHSVNLLEDKHNGKLCKLRGVAPLHLGKCNIAGWILGNPECESLSTASSWSYIVETSSSDNGTCYPGDFIDYEELREQLSSVSSFERFEIFPKTSSWPNHDSNKGVTAACPHAGAKSFYKNLIWLVKKGNSYPKLSKSYINDKGKEVLVLWGIHHPSTSADQQSLYQNADAYVFVGSSRYSKKFKPEIAIRTKVRDQEGRMNYYWTLVEPGDKITFEATGNLVVPRYAFAMERNAGSGIIISDTPVHDCNTTCQTPKGAINTSLPFQNIHPITIGKCPKYVKSTKLRLATGLRNVPSIQSRGLFGAIAGFIEGGWTGMVDGWYGYHHQNEQGSGYAADLKSTQNAIDEITNKVNSVIEKMNTQFTAVGKEFNHLEKRIENLNKKVDDGFLDIWTYNAELLVLLENERTLDYHDSNVKNLYEKVRSQLKNNAKEIGNGCFEFYHKCDNTCMESVKNGTYDYPKYSEEAKLNREEIDGVKLESTRIYQILAIYSTVASSLVLVVSLGAISFWMCSNGSLQCRICI

SEQ ID NO: 3703 - protein, 566 aa, Artificial Sequence; identical to SEQ ID NO: 2656
  derived and/or modified protein sequence (wt) from hemagglutinin__InfluenzaA__ACZ16850

SEQ ID NO: 3704 - protein, 566 aa, Artificial Sequence
  derived and/or modified protein sequence (wt) from hemagglutinin__InfluenzaA__ACZ16860
MKAILVVLLYTFATANADTLCIGYHANNSTDTVDTVLEKNVTVTHSVNLLEDKHNGKLCKLRGVAPLHLGKCNIAGWILGNPECESLSTASSWSYIVETSSSDNGTCYPGDFIDYEELREQLSSVSSFERFEIFPKTSSWPNHDSNKGVTAACPHAGAKSFYKNLIWLVKKGNSYPKLSKSYINDKGKEVLVLWGIHHPSTSADQQSLYQNADAYVFVGSSRYSKKFKPEIAIRPKVRDQEGRMNYYWTLVEPGDKITFEATGNLVAPRYAFAMERNAGSGIIISDTPVHDCNTTCQTPKGAINTSLPFQNIHPITIGKCPKYVKSTKLRLATGLRNVPSIQSRGLFGAIAGFIEGGWTGMVDGWYGYHHQNEQGSGYAADLKSTQNAIDEITNKVNSVIEKMNTQFTAVGKEFNHLEKRIENLNKKVDDGFLDIWTYNAELLVLLENERTLDYHDSNVKNLYEKVRSQLKNNAKEIGNGCFEFYHKCDNTCMESVKNGTYDYPKYSEEAKLNREEIDGVKLESTRIYQILAIYSTVASSLVLVVSLGAISFWMCSNGSLQCRICI

SEQ ID NO: 3705 - protein, 566 aa, Artificial Sequence; identical to SEQ ID NO: 3399
  derived and/or modified protein sequence (wt) from hemagglutinin__InfluenzaA__ACZ16870

SEQ ID NO: 3706 - protein, 566 aa, Artificial Sequence
  derived and/or modified protein sequence (wt) from hemagglutinin__InfluenzaA__ACZ16880
MKAILVVLLYTFATANADTLCIGYHANNSTDTVDTVLEKNVTVTHSVNLLEDKHNGKLCKLRGVAPLHLGKCNIAGWILGNPECESLSTASSWSYIVETSSSDNGTCYPGDFIDYEELREQLSSVSSFERFEIFPKTSSWPNHDSNKGVTAACPHAGAKSFYKNLIWLVKKGNSYPKLSKSYINDKGKEVLVLWGIHHPSTSADQQSLYQNADAYVFVGSSRYSKKFKPEIAIRPKVRDQEGRMNYYWTLVEPGDKITFEATGNLVVPRYAFAMERNDGSGIIISDTPVHDCNTTCQTPKGAINTSLPFQNIHPITIGKCPKYVKSTKLRLATGLRNVPSIQSRGLFGAIAGFIEGGWTGMVDGWYGYHHQNEQGSGYAADLKSTQNAIDEITNKVNSVIEKMNTQFTAVGKEFNHLEKRIENLNKKVDDGFLDIWTYNAELLVLLENERTLDYHDSNVKNLYEKVRSQLKNNAKEIGNGCFEFYHKCNNTCMESVKNGTYDYPKYSEEAKLNREEIDGVKLESTRIYQILAIYSTVASSLVLVVSLGAISFWMCSNGSLQCRICI

SEQ ID NO: 3707 - protein, 566 aa, Artificial Sequence; identical to SEQ ID NO: 3404
  derived and/or modified protein sequence (wt) from hemagglutinin__InfluenzaA__ACZ16890

SEQ ID NO: 3708 - protein, 566 aa, Artificial Sequence; identical to SEQ ID NO: 2656
  derived and/or modified protein sequence (wt) from hemagglutinin__InfluenzaA__ACZ16900

SEQ ID NO: 3709 - protein, 566 aa, Artificial Sequence; identical to SEQ ID NO: 2656
  derived and/or modified protein sequence (wt) from hemagglutinin__InfluenzaA__ACZ16910

SEQ ID NO: 3710 - protein, 566 aa, Artificial Sequence; identical to SEQ ID NO: 2656
  derived and/or modified protein sequence (wt) from hemagglutinin__InfluenzaA__ACZ16920

SEQ ID NO: 3711 - protein, 566 aa, Artificial Sequence; identical to SEQ ID NO: 2669
  derived and/or modified protein sequence (wt) from hemagglutinin__InfluenzaA__ACZ16930

SEQ ID NO: 3712 - protein, 566 aa, Artificial Sequence; identical to SEQ ID NO: 2669
  derived and/or modified protein sequence (wt) from hemagglutinin__InfluenzaA__ACZ16940

SEQ ID NO: 3713 - protein, 566 aa, Artificial Sequence; identical to SEQ ID NO: 2656
  derived and/or modified protein sequence (wt) from hemagglutinin__InfluenzaA__ACZ16950

SEQ ID NO: 3714 - protein, 566 aa, Artificial Sequence; identical to SEQ ID NO: 2911
  derived and/or modified protein sequence (wt) from hemagglutinin__InfluenzaA__ACZ16960

SEQ ID NO: 3715 - protein, 566 aa, Artificial Sequence
  derived and/or modified protein sequence (wt) from hemagglutinin__InfluenzaA__ACZ16970
MKAILVVLLYTFATANADTLCIGYHANNSTDTVDTVLEKNVTVTHSVNLLEDKHNGKLCKLRGVAPLHLGKCNIAGWILGNPECESLSTASSWSYIVETSSSDNGTCYPGDFIDYEELREQLSSVSSFERFEIFPKTSSWPNHDSNKGVTAACPHAGAKSFYKNLIWLVKEGNSYPKLSKSYINDKGKEVLVLWGIHHPSTSADQQSLYQNADAYVFVGTSRYSKKFKPEIAIRPKVRDQEGRMNYYWTLVEPGDKITFEATGNLVVPRYAFAMERNAGSGIIISDTPVHDCNTTCQTPKGAINTSLPFQNIHPITIGKCPKYVKSTKLRLATGLRNVPSIQSRGLFGAIAGFIEGGWTGMVDGWYGYHHQNEQGSGYAADLKSTQNAIDEITNKVNSVIEKMNTQFTAVGKEFNHLEKRIENLNKKVDDGFLDIWTYNAELLVLLENERTLDYHDSNVKNLYEKVRSQLKNNAKEIGNGCFEFYHKCDNTCMESVKNGTYDYPKYSEEAKLNREEIDGVKLESTRIYQILAIYSTVASSLVLVVSLGAISFWMCSNGSLQCRICI

SEQ ID NO: 3716 - protein, 566 aa, Artificial Sequence; identical to SEQ ID NO: 2669
  derived and/or modified protein sequence (wt) from hemagglutinin__InfluenzaA__ACZ16980

SEQ ID NO: 3717 - protein, 566 aa, Artificial Sequence; identical to SEQ ID NO: 2669
  derived and/or modified protein sequence (wt) from hemagglutinin__InfluenzaA__ACZ17000

SEQ ID NO: 3718 - protein, 566 aa, Artificial Sequence
  derived and/or modified protein sequence (wt) from hemagglutinin__InfluenzaA__ACZ17010
MKAILVVLLYTFATANADTLCIGYHANNSTDTVDTVLEKNVTVTHSVNLLEDKHNGKLCKLRGVAPLHLGKCNIAGWILGNPECESLSTASSWSYIVETSSSDNGTCYPGDFIDYEELREQLSSVSSFERFEIFPKTSSWPNHDSNKGVTAACPHAGAKSFYKNLIWLVKKGNSYPKLSKSYINDKGKEVLVLWGIHHPSTSADQQSLYQNADAYVFVGSSKYSKKFKPEIAIRPKVRDQEGRMNYYWTLVEPGDKITFEATGNLVVPRYAFAMERNAGSGIIISDTPVHDCNTTCQTPKGAINTSLPFQNIHPITIGKCPKYVKSTKLRLATGLRNVPSIQSRGLFGAIAGFIEGGWTGMVDGWYGYHHQNEQGSGYAADLKSTQNAIDKITNKVNSVIEKMNTQFTAVGKEFNHLEKRIENLNKKVDDGFLDIWTYNAELLVLLENERTLDYHDSNVKNLYEKVRSQLKNNAKEIGNGCFEFYHKCDNTCMESVKNGTYDYPKYSEEAKLNREEIDGVKLESTRIYQILAIYSTVASSLVLVVSLGAISFWMCSNGSLQCRICI

SEQ ID NO: 3719 - protein, 566 aa, Artificial Sequence; identical to SEQ ID NO: 2669
  derived and/or modified protein sequence (wt) from hemagglutinin__InfluenzaA__ACZ17020

SEQ ID NO: 3720 - protein, 566 aa, Artificial Sequence
  derived and/or modified protein sequence (wt) from hemagglutinin__InfluenzaA__ACZ17030
MKATLVVLLYTFATANADTLCIGYHANNSTDTVDTVLEKNVTVTHSVNLLEDKHNGKLCKLRGVAPLHLGKCNIAGWILGNPECESLSTASSWSYIVEASSSDNGTCYPGDFIDYEELREQLSSVSSFERFEIFPKTSSWPNHDSNKGVTAACPHAGAKSFYKNLIWLVKKGNSYPKLSKSYINDKGKEVLVLWGIHHPSTSADQQSLYQNADAYVFVGTSRYSKKFKPEIAIRPKVRDQEGRMNYYWTLVEPGDKITFEATGNLVVPRYAFAMERNAGSGIIISDTPVHDCNTTCQTPKGAINTSLPFQNIHPITIGKCPKYVKSTKLRLATGLRNVPSIQSRGLFGAIAGFIEGGWTGMVDGWYGYHHQNEQGSGYAADLKSTQNAIDEITNKVNSVIEKMNTQFTAVGKEFNHLEKRIENLNKKVDDGFLDIWTYNAELLVLLENERTLDYHDSNVKNLYEKVRSQLKNNAKEIGNGCFEFYHKCDNTCMESVKNGTYDYPKYSEEAKLNREEIDGVKLESTRIYQILAIYSTVASSLVLVVSLGAISFWMCSNGSLQCRICI

SEQ ID NO: 3721 - protein, 566 aa, Artificial Sequence
  derived and/or modified protein sequence (wt) from hemagglutinin__InfluenzaA__ACZ17040
MKAILVVLLYTFATANADTLCIGYHANNSTDTVDTVLEKNVTVTHSVNLLEDKHNGKLCKLRGVAPLHLGKCNIAGWILGNPECESLSTASSWSYIVETSSSDNGTCYPGDFIDYEELREQLSSVSSFERFEIFPKTSSWPNHDSNKGVTAACPHAGAKSFYKNLIWLVKKGNSYPKLSKSYINDKGKEVLVLWGIHHPSTSADQQSLYQNADAYVFVGTSRYSKKFKPEIAIRPKVRDQEGRMNYYWTLVEPGDKITFEATGNLVVPRYAFAMERNAGSGIIISDTPVHDCNTTCQTPKGAINTSLPFQNIHPITIGKCPKYVKSTKLRLATGLRNVPSIQSRGLFGAIAGFIEGGWTGMVDGWYGYHHQNEQGSGYAADLKSTQNAIDEITNKVNSVIEKMNTQFTAVGKEFNHLEKRIENLNKKVDDGFLDIWTYNAELLVLLENERTLDYHDSNVKNLYEKVRSQLKNNAKEIGNGCFEFYHKCDNTCMESVKNGTYDYPKYSKEAKLNREEIDGVKLESTRIYQILAIYSTVASSLVLVVSLGAISFWMCSNGSLQCRICI

SEQ ID NO: 3722 - protein, 566 aa, Artificial Sequence; identical to SEQ ID NO: 2669
  derived and/or modified protein sequence (wt) from hemagglutinin__InfluenzaA__ACZ17050

SEQ ID NO: 3723 - protein, 566 aa, Artificial Sequence; identical to SEQ ID NO: 2669
  derived and/or modified protein sequence (wt) from hemagglutinin__InfluenzaA__ACZ17060

SEQ ID NO: 3724 - protein, 566 aa, Artificial Sequence; identical to SEQ ID NO: 2669
  derived and/or modified protein sequence (wt) from hemagglutinin__InfluenzaA__ACZ17070

SEQ ID NO: 3725 - protein, 566 aa, Artificial Sequence; identical to SEQ ID NO: 2849
  derived and/or modified protein sequence (wt) from hemagglutinin__InfluenzaA__ACZ17080

SEQ ID NO: 3726 - protein, 566 aa, Artificial Sequence
  derived and/or modified protein sequence (wt) from hemagglutinin__InfluenzaA__ACZ17090
MKAILVVLLYTFATANADTLCIGYHANNSTDTVDTVLEKNVTVTHSVNLLGDKHNGKLCKLRGVAPLHLGKCNIAGWILGNPECESLSTASSWSYIVETSSSDNGTCYPGDFIDYEELREQLSSVSSFERFEIFPKTSSWPNHDSNKGVTAACPHAGAKSFYKNLIWLVKKGNSYPKLSKSYINDKGKEVLVLWGIHHPSTSADQQSLYQNADAYVFVGTSRYSKKFKPEIAIRPKVRDQEGRMNYYWTLVEPGDKITFEATGNLVVPRYAFAMERNAGSGIIISDTPVHDCNTTCQTPKGAINTSLPFQNIHPITIGKCPKYVKSTKLRLATGLRNVPSIQSRGLFGAIAGFIEGGWTGMVDGWYGYHHQNEQGSGYAADLKSTQNAIDEITNKVNSVIEKMNTQFTAVGKEFNHLEKRIENLNKKVDDGFLDIWTYNAELLVLLENERTLDYHDSNVKNLYEKVKSQLKNNAKEIGNGCFEFYHKCDNTCMESVKNGTYDYPKYSEEAKLNREEIDGVKLESTRIYQILAIYSTVASSLVLVVSLGAISFWMCSNGSLQCRICI

SEQ ID NO: 3727 - protein, 566 aa, Artificial Sequence; identical to SEQ ID NO: 2656
  derived and/or modified protein sequence (wt) from hemagglutinin__InfluenzaA__ACZ17100

SEQ ID NO: 3728 - protein, 566 aa, Artificial Sequence
  derived and/or modified protein sequence (wt) from hemagglutinin__InfluenzaA__ACZ17110
MKAILVVLLYTFATANADTLCIGYHANNSTDTVDTVLEKNVTVTHSVNLLEDKHNGKLCKLRGVAPLHLGKCNIAGWILGNPECESLSTASSWSYIVETSSSDNGTCYPGDFIDYEELREQLSSVSSFERFEIFPKTSSWPNHDSNKGVTAACPHAGAKSFYKNLIWLVKKGNSYPELSKSYINDKGKEVLVLWGIHHPSTSADQQSLYQNADAYVFVGTSRYSKKFKPEIAIRPKVRDQEGRMNYYWTLVEPGDKITFEATGNLVVPRYAFAMERNAGSGIIISDTPVHDCNTTCQTPKGAINTSLPFQNIHPITIGKCPKYVKSTKLRLATGLRNVPSIQSRGLFGAIAGFIEGGWTGMVDGWYGYHHQNEQGSGYAADLKSTQNAIDEITNKVNSVIEKMNTQFTAVGKEFNHLEKRIENLNKKVDDGFLDIWTYNAELLVLLENERTLDYHDSNVKNLYEKVRSQLKNNAKEIGNGCFEFYHKCDNTCMESVKNGTYDYPKYSEEAKLNREEIDGVKLESTRIYQILAIYSTVASSLVLVVSLGAISFWMCSNGSLQCRICI

SEQ ID NO: 3729 - protein, 566 aa, Artificial Sequence
  derived and/or modified protein sequence (wt) from hemagglutinin__InfluenzaA__ACZ17120
MKAILVVLLYTFATANADTLCIGYHANNSTDTVDTVLEKNVTVTHSVNLLEDKHNGKLCKLRGVAPLHLGKCNIAGWILGNPECESLSTASSWSYIVETSSSDNGTCYPGDFIDYEELREQLSSVSSFERFEIFPKTSSWPNHDSNKGVTAACPHAGAKSFYKNLIWLVKKGNSYPKLSKSYINDKGKEVLVLWGIHHPSTSADQQSLYQNADAYVFVGTSRYSKKFKPEIAIRPKVRDQEGRMNYYWTLVEPGDKITFEATGNLVVPRYAFAMERNAGSGIIISDTPVHDCNTTCQTPKGAINTSLPFQNIHPITIGKCPKYVKSTKLRLATGLRNVPSIQSRGLFGAIAGFIEGGWTGMVDGWYGYHHQNEQGSGYAADLKSTQNAIDEITNKVNSVIEKMNTQFTAVGKEFNHLEKRIENLNKKVDDGFLDIWTYNAELLVLLENERTLDYHDSNVKNLYEKVRSQLKTNAKEIGNGCFEFYHKCDNTCMESVKNGTYDYPKYSEEAKLNREEIDGVKLESTRIYQILAIYSTVASSLVLVVSLGAISFWMCSNGSLQCRICI

SEQ ID NO: 3730 - protein, 566 aa, Artificial Sequence
  derived and/or modified protein sequence (wt) from hemagglutinin__InfluenzaA__ACZ17130
MKAILVVLLYTFATANADTLCIGYHANNSTDTVDTVLEKNVTVTHSVNLLEDKHNGKLCKLRGVAPLHLGKCNIAGWILGNPECESLSTASSWSYIVETSSSDNGTCYPGDFIDYEELREQLSSVSSFERFEIFPKTSSWPNHDSNKGVTAACPHAGAKSFYKNLIWLVKKGNSYPKLSKSYINDKGKEVLVLWGIHHPSTSADQQSLYQNADAYVFVGTSRYSKKFKPEIAIRPKVRDQEGRMNYYWTLVEPGDKITFEATGNLVVPRYAFAMERNAGSGIIISDTPVHDCNTTCQTPKGAINTSLPFQNIHPITIGKCPKYVKSTKLRLATGLRNVPSIQSRGLFGAIAGFIEGGWTGMVDGWYGYHHQNEQGSGYAADLKSTQNAIDEITNKVNSVIEKMNAQFTAVGKEFNHLEKRIENLNKKVDDGFLDIWTYNAELLVLLENERTLDYHDSNVKNLYEKVRSQLKNNAKEIGNGCFEFYHKCDNTCMESVKNGTYDYPKYSEEAKLNREEIDGVKLESTRIYQILAIYSTVASSLVLVVSLGAISFWMCSNGSLQCRICI

SEQ ID NO: 3731 - protein, 566 aa, Artificial Sequence; identical to SEQ ID NO: 3467
  derived and/or modified protein sequence (wt) from hemagglutinin__InfluenzaA__ACZ17140

SEQ ID NO: 3732 - protein, 566 aa, Artificial Sequence; identical to SEQ ID NO: 3298
  derived and/or modified protein sequence (wt) from hemagglutinin__InfluenzaA__ACZ17150

SEQ ID NO: 3733 - protein, 566 aa, Artificial Sequence; identical to SEQ ID NO: 3298
  derived and/or modified protein sequence (wt) from hemagglutinin__InfluenzaA__ACZ17160

SEQ ID NO: 3734 - protein, 566 aa, Artificial Sequence; identical to SEQ ID NO: 3298
  derived and/or modified protein sequence (wt) from hemagglutinin__InfluenzaA__ACZ17170

SEQ ID NO: 3735 - protein, 566 aa, Artificial Sequence
  derived and/or modified protein sequence (wt) from hemagglutinin__InfluenzaA__ACZ17190
MKAILVVLLYTFATANADTLCIGYHANNSTDTVDTVLEKNVTVTHSVNLLEDKHNGKLCKLRGVAPLHLGKCNIAGWILGNPECESLSTASSWSYIVETSSSDNGTCYPGDFIDYEELREQLSSVSSFERFEIFPKTSSWPNHDSNKGVTAACPHAGAKSFYKNLIWLVKKGNSYPKLSKSYINDKGKEVLVLWGIHHPSTSADQQSLYQNADAYVFVGTSRYSKKFKPEIAIRPKVRDQEGRMNYYWTLVEPGDKITFEATGNLVVPRYAFAMERNAGSGIIISDTPVHDCSTTCQTPEGAINTSLPFQNIHPITIGKCPKYVKSTKLRLATGLRNVPSIQSRGLFGAIAGFIEGGWTGMVDGWYGYHHQNEQGSGYAADLKSTQNAIDEITNKVNSVIEKMNTQFTAVGKEFNHLEKRIENLNKKVDDGFLDIWTYNAELLVLLENERTLDYHDSNVKNLYEKVRSQLKNNAKEIGNGCFEFYHKCDNTCMESVKNGTYDYPKYSEEAKLNREEIDGVKLESTRIYQILAIYSTVASSLVLVVSLGAISFWMCSNGSLQCRICI

SEQ ID NO: 3736 - protein, 566 aa, Artificial Sequence; identical to SEQ ID NO: 3735
  derived and/or modified protein sequence (wt) from hemagglutinin__InfluenzaA__ACZ17200

SEQ ID NO: 3737 - protein, 566 aa, Artificial Sequence; identical to SEQ ID NO: 2669
  derived and/or modified protein sequence (wt) from hemagglutinin__InfluenzaA__ACZ17220

SEQ ID NO: 3738 - protein, 566 aa, Artificial Sequence
  derived and/or modified protein sequence (wt) from hemagglutinin__InfluenzaA__ACZ17230
MKAILVVLLYTFATANADTLCIGYHANNSTDTVDTVLEKNVTVTHSVNLLEDKHNGKLCKLRGVAPLHLGKCNIAGWILGNPECESLSTASSWSYIVETSSSDNGTCYPGDFIDYEELKEQLSSVSSFERFEIFPKTSSWPNHDSNKGVTAACPHAGAKSFYKNLIWLVKKGNSYPKLSKSYINDKGKEVLVLWGIHHPSTSADQQSLYQNADAYVFVGTSRYSKKFKPEIAIRPKVRDQEGRMNYYWTLVEPGDKITFEATGNLVVPRYAFAMERNAGSGIIISDTPVHDCNTTCQTPKGAINTSLPFQNIHPITIGKCPKYVKSTKLRLATGLRNVPSIQSRGLFGAIAGFIEGGWTGMVDGWYGYHHQNEQGSGYAADLKSTQNAIDEITNKVNSVIEKMNTQFTAVGKEFNHLEKRIENLNKKVDDGFLDIWTYNAELLVLLENERTLDYHDSNVKNLYEKVRSQLKNNAKEIGNGCFEFYHKCDNTCMESVKNGTYDYPKYSEEAKLNREEIDGVKLESTRIYQILAIYSTVASSLVLVVSLGAISFWMCSNGSLQCRICI

SEQ ID NO: 3739 - protein, 566 aa, Artificial Sequence; identical to SEQ ID NO: 2669
  derived and/or modified protein sequence (wt) from hemagglutinin__InfluenzaA__ACZ17240

SEQ ID NO: 3740 - protein, 566 aa, Artificial Sequence; identical to SEQ ID NO: 2669
  derived and/or modified protein sequence (wt) from hemagglutinin__InfluenzaA__ACZ17250

SEQ ID NO: 3741 - protein, 566 aa, Artificial Sequence; identical to SEQ ID NO: 2669
  derived and/or modified protein sequence (wt) from hemagglutinin__InfluenzaA__ACZ17260

SEQ ID NO: 3742 - protein, 566 aa, Artificial Sequence
  derived and/or modified protein sequence (wt) from hemagglutinin__InfluenzaA__ACZ17270
MKAILVVLLYTFATANADTLCIGYHANNSTDTVDTVLEKNVTVTHSVNLLEDKHNGKLCKLRGVAPLHLGRCNIAGWILGNPECESLSTASSWSYIVETSSSDNGTCYPGDFIDYEELREQLSSVSSFERFEIFPKTSSWPNHDSNKGVTAACPHAGAKSFYKNLIWLVKKGNSYPKLSKSYINDKGKEVLVLWGIHHPSTSADQQSLYQNADAYVFVGTSRYSKKFKPEIAIRPKVRDQEGRMNYYWTLVEPGDKITFEATGNLVVPRYAFAMERNAGSGIIISDTPVHDCNTTCQTPKGAINTSLPFQNIHPITIGKCPKYVKSTKLRLATGLRNVPSIQSRGLFGAIAGFIEGGWTGMVDGWYGYHHQNEQGSGYAADLKSTQNAIDEITNKVNSVIEKMNTQFTAVGKEFNHLEKRIENLNKKVDDGFLDIWTYNAELLVLLENERTLDYHDSNVKKLYEKVRSQLKNNAKEIGNGCFEFYHKCDNTCMESVKNGTYDYPKYSEEAKLNREEIDGVKLESTRVYQILAIYSTVASSLVLVVSLGAISFWMCSNGSLQCRICI

SEQ ID NO: 3743 - protein, 566 aa, Artificial Sequence; identical to SEQ ID NO: 2849
  derived and/or modified protein sequence (wt) from hemagglutinin__InfluenzaA__ACZ17290

SEQ ID NO: 3744 - protein, 566 aa, Artificial Sequence; identical to SEQ ID NO: 2849
  derived and/or modified protein sequence (wt) from hemagglutinin__InfluenzaA__ACZ17300

SEQ ID NO: 3745 - protein, 566 aa, Artificial Sequence; identical to SEQ ID NO: 2849
  derived and/or modified protein sequence (wt) from hemagglutinin__InfluenzaA__ACZ17310

SEQ ID NO: 3746 - protein, 566 aa, Artificial Sequence; identical to SEQ ID NO: 2669
  derived and/or modified protein sequence (wt) from hemagglutinin__InfluenzaA__ACZ17398

SEQ ID NO: 3747 - protein, 566 aa, Artificial Sequence; identical to SEQ ID NO: 2669
  derived and/or modified protein sequence (wt) from hemagglutinin__InfluenzaA__ACZ17408

SEQ ID NO: 3748 - protein, 566 aa, Artificial Sequence; identical to SEQ ID NO: 2669
  derived and/or modified protein sequence (wt) from hemagglutinin__InfluenzaA__ACZ17418

SEQ ID NO: 3749 - protein, 566 aa, Artificial Sequence
  derived and/or modified protein sequence (wt) from hemagglutinin__InfluenzaA__ACZ17438
MKAILVVLLYTFATANADTLCIGYHANNSTDTVDTVLEKNVTVTHSVNLLEDKHNGKLCKLRGVAPLHLGKCNIAGWILGNPECESLSTASSWSYIVETSSSDNGTCYPGDFIDYEELREQLSSVSSFERFEIFPKTSSWPNHDSNKGVTAACPHAGAKSFYKNLIWLVKKGNSYPKLSKSYINDKGKEVLVLWGIHHPSTSADQQSLYQNADSYVFVGSSRYSKKFKPEIAIRPKVRDQEGRMNYYWTLVEPGDKITFEATGNLVVPRYAFAMERNAGSGIIISDTPVHDCNTTCQTPKGAINTSLPFQNIHPITIGKCPKYVKSTKLRLATGLRNVPSIQSRGLFGAIAGFIEGGWTGMVDGWYGYHHQNEQGSGYAADLKSTQNAIDEITNKVNSVIEKMNTQFTAVGKEFNHLEKRIENLNKKVDDGFLDIWTYNAELLVLLENERTLDYHDSNVKNLYEKVRSQLKNNAKEIGNGCFEFYHKCDNTCMESVKNGTYDYPKYSEEAKLNREEIDGVKLESTRIYQILAIYSTVASSLVLVVSLGAISFWMCSNGSLQCRICI

SEQ ID NO: 3750 - protein, 566 aa, Artificial Sequence; identical to SEQ ID NO: 2656
  derived and/or modified protein sequence (wt) from hemagglutinin__InfluenzaA__ACZ17448

SEQ ID NO: 3751 - protein, 566 aa, Artificial Sequence; identical to SEQ ID NO: 2669
  derived and/or modified protein sequence (wt) from hemagglutinin__InfluenzaA__ACZ17458

SEQ ID NO: 3752 - protein, 566 aa, Artificial Sequence; identical to SEQ ID NO: 2656
  derived and/or modified protein sequence (wt) from hemagglutinin__InfluenzaA__ACZ17478

SEQ ID NO: 3753 - protein, 566 aa, Artificial Sequence; identical to SEQ ID NO: 2669
  derived and/or modified protein sequence (wt) from hemagglutinin__InfluenzaA__ACZ17488

SEQ ID NO: 3754 - protein, 566 aa, Artificial Sequence
  derived and/or modified protein sequence (wt) from hemagglutinin__InfluenzaA__ACZ18240
MKAILVVLLYTFATANADTLCIGYHANNSTDTVDTVLEKNVTVTHSVNLLEDKHNGKLCKLRGVAPLHLGKCNIAGWILGNPECESLSTTSSWSYIVETSSSDNGTCYPGDFIDYEELREQLSSVSSFERFEIFPKTSSWPNHDPNKGVTAACPHAGAKSFYKNLIWLVKKGNSYPKLSKSYINDKGKEVLVLWGIHHPSTSADQQSLYQNADAYVFVGTSRYSKKFKPEIAIRPKVRDQEGRMNYYWTLVEPGDKITFEATGNLVVPRYAFAMERNAGSGIIISDTPVHDCNTTCQTPKGAINTSLPFQNIHPITIGKCPKYVKSTKLRLATGLRNVPSIQSRGLFGAIAGFIEGGWTGMVDGWYGYHHQNEQGSGYAADLKSTQNAIDEITNKVNSVIEKMNTQFTAVGKEFNHLEKRIENLNKKVDDGFLDIWTYNAELLVLLENERTLDYHDSNVKNLYEKVRSQLKNNAKEIGNGCFEFYHKCDNTCMESVKNGTYDYPKYSEEAKLNREEIDGVKLESTRIYQILAIYSTVASSLVLVVSLGAISFWMCSNGSLQCRICI

SEQ ID NO: 3755 - protein, 566 aa, Artificial Sequence; identical to SEQ ID NO: 2669
  derived and/or modified protein sequence (wt) from hemagglutinin__InfluenzaA__ACZ18241

SEQ ID NO: 3756 - protein, 566 aa, Artificial Sequence
  derived and/or modified protein sequence (wt) from hemagglutinin__InfluenzaA__ACZ27800
MKAILVVLLYTFATANADTLCIGYHANNSTDTVDTVLEKNVTVTHSVNLLEDKHNGKLCKLRGVAPLHLGKCNIAGWILGNPECESLSTASSWSYIVETSSSDNGTCYPGDFIDYEELREQLSSVSSFERFEIFPKTSSWPNHDSNKGVTAACPHAGAKSFYKNLIWLVKKGNSYPKLSKSYINDKGKEVLVLWGIHHPSTSADQQSLYQNADAYVFVGSSRYSKEFKPEIAIRPKVRGQEGRMNYYWTLVEPGDKITFEATGNLVVPRYAFAMERNAGSGIIISDTPVHDCNTTCQTPKGAINTSLPFQNIHPITIGKCPKYVKSTKLRLATGLRNVPSIQSRGLFGAIAGFIEGGWTGMVDGWYGYHHQNEQGSGYAADLKSTQNAIDEITNKVNSVIEKMNTQFTAVGKEFNHLEKRIENLNKKVDDGFLDIWTYNAELLVLLENERTLDYHDSNVKNLYEKVRSQLKNNAKEIGNGCFEFYHKCDNTCMESVKNGTYDYPKYSEEAKLNREEIDGVKLESTRIYQILAIYSTVASSLVLVVSLGAISFWMCSNGSLQCRICI

SEQ ID NO: 3757 - protein, 566 aa, Artificial Sequence; identical to SEQ ID NO: 2669
  derived and/or modified protein sequence (wt) from hemagglutinin__InfluenzaA__ACZ27810

SEQ ID NO: 3758 - protein, 566 aa, Artificial Sequence; identical to SEQ ID NO: 2669
  derived and/or modified protein sequence (wt) from hemagglutinin__InfluenzaA__ACZ27820

SEQ ID NO: 3759 - protein, 566 aa, Artificial Sequence; identical to SEQ ID NO: 2669
  derived and/or modified protein sequence (wt) from hemagglutinin__InfluenzaA__ACZ27830

SEQ ID NO: 3760 - protein, 566 aa, Artificial Sequence; identical to SEQ ID NO: 3022
  derived and/or modified protein sequence (wt) from hemagglutinin__InfluenzaA__ACZ27840

SEQ ID NO: 3761 - protein, 566 aa, Artificial Sequence; identical to SEQ ID NO: 2656
  derived and/or modified protein sequence (wt) from hemagglutinin__InfluenzaA__ACZ45006

SEQ ID NO: 3762 - protein, 566 aa, Artificial Sequence
  derived and/or modified protein sequence (wt) from hemagglutinin__InfluenzaA__ACZ45007
MKAILVVLLYTFATANADTLCIGYHANNSTDTVDTVLEKNVTVTHSVNLLEDKHNGKLCKLRGVAPLHLGKCNIAGWILGNPECESLSTASSWSYIVETSSSDNGTCYPGDFIDYEELREQLSSVSSFERFEIFPKTSSWPNHDSNKGVTAACPHAGAKSFYKNLIWLVKKGNSYPKLSKSYINDKGKEVLVLWGIHHPSTSADQQSLYQNADAYVFVGTSRYSKKFKPEIAIRPKVRDQEGRMNYYWTLVEPGDKITFEATGNLVVPRYAFAMERNAGSGIIISDTPVHDCNTTCQTPKGAINTSLPFQNIHPITIGKCPKYVKSTKLRLATGLRNVPSIQSRGLFGAIAGFIEGGWTGMVDGWYGYHHQNEQGSGDAADLKSTQNAIDEITNKVNSVIEKMNTQFTAVGKEFNHLEKRIENLNKKVDDGFLDIWTYNAELLVLLENERTLDYHDSNVKNLYEKVRSQLKNNAKEIGNGCFEFYHKCDNTCMESVKNGTYDYPKYSEEAKLNREEIDGVKLESTRIYQILAIYSTVASSLVLVVSLGAISFWMCSNGSLQCRICI

SEQ ID NO: 3763 - protein, 566 aa, Artificial Sequence; identical to SEQ ID NO: 3022
  derived and/or modified protein sequence (wt) from hemagglutinin__InfluenzaA__ACZ45008

SEQ ID NO: 3764 - protein, 566 aa, Artificial Sequence; identical to SEQ ID NO: 3022
  derived and/or modified protein sequence (wt) from hemagglutinin__InfluenzaA__ACZ45009

SEQ ID NO: 3765 - protein, 566 aa, Artificial Sequence; identical to SEQ ID NO: 2911
  derived and/or modified protein sequence (wt) from hemagglutinin__InfluenzaA__ACZ45010

SEQ ID NO: 3766 - protein, 566 aa, Artificial Sequence; identical to SEQ ID NO: 2669
  derived and/or modified protein sequence (wt) from hemagglutinin__InfluenzaA__ACZ45012

SEQ ID NO: 3767 - protein, 566 aa, Artificial Sequence
  derived and/or modified protein sequence (wt) from hemagglutinin__InfluenzaA__ACZ45013
MKAILVVLLYTFATANADTLCIGYHANNSTDTVDTVLEKNVTVTHSVNLLEDKHNGKLCKLRGVAPLHLGKCNIAGWILGNPECESLSTASSWSYIVETSSSDNGTCYPGDFIDYEELREQLSSVSSFERFEIFPKTSSWPNHDSSKGVTAACPHAGAKSFYKNLIWLVKKGNSYPKLSKSYINDKGKEVLVLWGIHHPSTSADQQSLYQNADAYVFVGTSRYSKKFKPEIAIRPKVREQEGRMNYYWTLVEPGDKITFEATGNLVVPRYAFAMERNAGSGIIISDTPVHDCNTTCQTPKGAINTSLPFQNIHPITIGKCPKYVKSTKLRLATGLRNVPSIQSRGLFGAIAGFIEGGWTGMVDGWYGYHHQNEQGSGYAADLKSTQNAIDEITNKVNSVIEKMNTQFTAVGKEFNHLEKRIENLNKKVDDGFLDIWTYNAELLVLLENERTLDYHDSNVKNLYEKVRSQLKNNAKEIGNGCFEFYHKCDNTCMESVKNGTYDYPKYSEEAKLNREEIDGVKLESTRIYQILAIYSTVASSLVLVVSLGAISFWMCSNGSLQCRICI

SEQ ID NO: 3768 - protein, 566 aa, Artificial Sequence; identical to SEQ ID NO: 2669
  derived and/or modified protein sequence (wt) from hemagglutinin__InfluenzaA__ACZ45014

SEQ ID NO: 3769 - protein, 566 aa, Artificial Sequence; identical to SEQ ID NO: 2669
  derived and/or modified protein sequence (wt) from hemagglutinin__InfluenzaA__ACZ45016

SEQ ID NO: 3770 - protein, 566 aa, Artificial Sequence
  derived and/or modified protein sequence (wt) from hemagglutinin__InfluenzaA__ACZ45028
MKAILVVLLYTFATANADTLCIGYHANNSTDTVDTVLEKNVTVTHSVNLLEDKHNGKLCKLRGVAPLHLGKCNIAGWILGNPECESLSTASSWSYIVETSSSDNGTCYPGDFIDYEELREQLSSVSSFERFEIFPKTSSWPNHDSNKGVTAACPHAGAKSFYKNLIWLVKKGNSYPKLSKSYINDKGKEVLVLWGIHHPSTSADQQSLYQNADAYVFVGTSRYSKKFKPEIAIRPKVRDQEGRMNYYWTLVEPGDKITFEATGNLVVPRYAFAMERNAGSGIIISDTPVHDCNTTCQTPKGAINTSLPFQNIHPITIGKCPKYVKSTKLRLATGLRNIPSIQSRGLFGAIAGFIEGGWTGMVDGWYGYHHQNEQGSGYAADLKSTQNAIDEITNKVNSVIEKMNTQFTAVGKEFNHLEKRIENLNKKVDDGFLDIWTYNAELLVLLENERTLDYHDSNVKNLYEKVRSQLKNNAKEIGNGCFEFYHKCDNTCMESVKNGTYDYPKYSEEAKLNREEIDGVKLESTRIYQILAIYSTVASSLVLVVSLGAISFWMCSNGSLQCRICI

SEQ ID NO: 3771 - protein, 566 aa, Artificial Sequence
  derived and/or modified protein sequence (wt) from hemagglutinin__InfluenzaA__ACZ45029
MKAILVVLLYTFATANADTLCIGYHANNSTDTVDTVLEKNVTVTHSVNLLEDKHNGKLCKLRGVAPLHLGKCNIAGWILGNPECESLSTASSWSYIVETSSSGNGTCYPGDFIDYEELREQLSSVSSFERFEIFPKTSSWPNHDSNKGVTAACPHAGAKSFYKNLIWLVKKGNSYPKLSKSYINDKGKEVLVLWGIHHPSTSADQQSLYQNADAYVFVGTSRYSKKFKPEIAIRPKVRDQEGRMNYYWTLVEPGDKITFEATGNLVVPRYAFAMERNAGSGIIISDTPVHDCNTTCQTPKGAINTSLPFQNIHPITIGKCPKYVKSTKLRLATGLRNVPSIQSRGLFGAIAGFIEGGWTGMVDGWYGYHHQNEQGSGYAADLKSTQNAIDEITNKVNSVIEKMNTQFTAVGKEFNHLEKRIENLNKKVDDGFLDIWTYNAELLVLLENERTLDYHDSNVKNLYEKVRSQLKNNAKEIGNGCFEFYHKCDNTCMESVKNGTYDYPKYSEEAKLNREEIDGVKLESTRIYQILAIYSTVASSLVLVVSLGAISFWMCSNGSLQCRICI

SEQ ID NO: 3772 - protein, 566 aa, Artificial Sequence
  derived and/or modified protein sequence (wt) from hemagglutinin__InfluenzaA__ACZ45030
MKAILVVLLYTFATANADTLCIGYHANNSTDTVDTVLEKNVTVTHSVNLLEDKHNGKLCKLRGVAPLHLGKCNIAGWILGNPECESLSTASSWSYIVETSSSDNGTCYPGDFIDYEELREQLSSVSSFERFEIFPKTSSWPNHDSNKGVTAACPHAGAKSFYKNLIWLVKKGNSYPKLSKSYINDKGKEVLVLWGIHHPSTSADQQSLYQNADAYVFVGTSTYSKKFKPEIAIRPKVRDQEGRMNYYWTLVEPGDKITFEATGNLVVPRYAFTMERNAGSGIIISDTPVHDCNTTCQTPKGAINTSLPFQNIHPITIGKCPKYVKSTKLRLATGLRNIPSIQSRGLFGAIAGFIEGGWTGMVDGWYGYHHQNEQGSGYAADLKSTQNAIDEITNKVNSVIEKMNTQFTAVGKEFNHLEKRIENLNKKVDDGFLDIWTYNAELLVLLENERTLDYHDSNVKNLYEKVRSQLKNNAKEIGNGCFEFYHKCDNTCMESVKNGTYDYPKYSEEAKLNREEIDGVKLESTRIYQILAIYSTVASSLVLVVSLGAISFWMCSNGSLQCRICI

SEQ ID NO: 3773 - protein, 566 aa, Artificial Sequence
  derived and/or modified protein sequence (wt) from hemagglutinin__InfluenzaA__ACZ45031
MKAILVVLLYTFATANADTLCIGYHANNSTDTVDTVLEKNVTVTHSVNLLEDKHNGKLCKLRGVAPLHLGKCNIAGWILGNPECESLSTASSWSYIVETSSSDNGTCYPGDFIDYEELREQLSSVSSFERFEIFPKTSSWPNHDSNKGVTAACPHAGAKSFYKNLIWLVKKGNSYPKLSKSYINDKGKEVLVLWGIHHPSTSADQQSLYQNADAYVFVGTSRYSKKFKPEIAIRPKVREQEGRMNYYWTLVEPGDKITFEATGNLVVPRYAFTMERNVGSGIIISDTPVHDCNTTCQTPKGAINTSLPFQNIHPITIGKCPKYVKSTKLRLATGLRNVPSIQSRGLFGAIAGFIEGGWTGMVDGWYGYHHQNEQGSGYAADLKSTQNAIDEITNKVNSVIEKMNTQFTAVGKEFNHLEKRIENLNKKVDDGFLDIWTYNAELLVLLENERTLDYHDSNVKNLYEKVRSQLKNNAKEIGNGCFEFYHKCDNTCMESVKNGTYDYPKYSEEAKLNREEIDGVKLESTRIYQILAIYSTVASSLVLVVSLGAISFWMCSNGSLQCRICI

SEQ ID NO: 3774 - protein, 566 aa, Artificial Sequence
  derived and/or modified protein sequence (wt) from hemagglutinin__InfluenzaA__ACZ45034
MKAILVVLLYTFATANADTLCIGYHANNSTDTVDTVLEKNVTVTHSVNLLEDKHNGKLCKLRGVAPLHLGKCNIAGWILGNPECESLSTASSWSYIVETSSSDNGTCYPGDFIDYEELREQLSSVSSFERFEIFPKTSSWPNHDSNKGVTAACPHAGAKSFYKNLIWLVKKGNSYPKLSKSYINDKGKEVLVLWGIHHPSTSADQQSLYQNADAYVFVGTSRYSKKFKPEIAIRPKVRDQEGRMNYYWTLVEPGDKITFEATGNLVVPRYAFAMERNAGSGIIISDTPVHDCNTTCQTPKGAINTSLPFQNVHPITIGKCPKYVKSTKLRLATGLRNVPPIQSRGLFGAIAGFIEGGWTGMVDGWYGYHHQNEQGSGYAADLKSTQNAIDEITNKVNSVIEKMNTQFTAVGKEFNHLEKRIENLNKKVDDGFLDIWTYNAELLVLLENERTLDYHDSNVKNLYEKVRSQLKNNAKEIGNGCFEFYHKCDNTCMESVKNGTYDYPKYSEEAKLNREEIDGVKLESTRIYQILAIYSTVASSLVLVVSLGAISFWMCSNGSLQCRICI

SEQ ID NO: 3775 - protein, 566 aa, Artificial Sequence; identical to SEQ ID NO: 2669
  derived and/or modified protein sequence (wt) from hemagglutinin__InfluenzaA__ACZ45036

SEQ ID NO: 3776 - protein, 566 aa, Artificial Sequence; identical to SEQ ID NO: 2669
  derived and/or modified protein sequence (wt) from hemagglutinin__InfluenzaA__ACZ45037

SEQ ID NO: 3777 - protein, 566 aa, Artificial Sequence; identical to SEQ ID NO: 3770
  derived and/or modified protein sequence (wt) from hemagglutinin__InfluenzaA__ACZ45038

SEQ ID NO: 3778 - protein, 566 aa, Artificial Sequence; identical to SEQ ID NO: 3022
  derived and/or modified protein sequence (wt) from hemagglutinin__InfluenzaA__ACZ45039

SEQ ID NO: 3779 - protein, 566 aa, Artificial Sequence; identical to SEQ ID NO: 2669
  derived and/or modified protein sequence (wt) from hemagglutinin__InfluenzaA__ACZ45040

SEQ ID NO: 3780 - protein, 566 aa, Artificial Sequence; identical to SEQ ID NO: 2669
  derived and/or modified protein sequence (wt) from hemagglutinin__InfluenzaA__ACZ52567

SEQ ID NO: 3781 - protein, 566 aa, Artificial Sequence; identical to SEQ ID NO: 2669
  derived and/or modified protein sequence (wt) from hemagglutinin__InfluenzaA__ACZ52568

SEQ ID NO: 3782 - protein, 566 aa, Artificial Sequence; identical to SEQ ID NO: 3238
  derived and/or modified protein sequence (wt) from hemagglutinin__InfluenzaA__ACZ52569

SEQ ID NO: 3783 - protein, 566 aa, Artificial Sequence
  derived and/or modified protein sequence (wt) from hemagglutinin__InfluenzaA__ACZ53956
MKTIIALSYIFCLALAQKLPGNDNSTATLCLGHHAVPNGTLVKTITNDQIEVTNATELVQSSSTGRICDSPHQILDGENCTLIDALLGDPHCDGFQNKEWDLFVERSKAYSNCYPYDVPDYASLRSLVASSGTLEFNNESFNWTGVAQNGTSSACKRRSIKSFFSTLNWLHQLQNRYPALNVTMPNNDKFDKLYIWGVHHPSTDSDQISVYAQASGRVTVSTKRSQQTVIPNIGSRPWVRGVSSRISIYWTIVKPGDILLINSTGNLIAPRGYFKIRSGKSSIMRSDAPIGKCNSECITPNGSIPNDKPFQNVNRITYGACPRYVKQNTLKLATGMRNVPEKQTRGIFGAIAGFIENGWEGMMDGWYGFRHQNSEGTGQAADLKSTQAAINQINGKLNRLIEKTNEKFHQIEKEFSEVEGRIQDLEKYVEDTKIDLWSYNAELLVALENQHTIDLTDSEMNKLFERTRKQLRENAEDMGNGCFKIYHKCDNACIGSIRNGTYDHDVYRDEALNNRFQIKGVELKSGYKDWILWISFAISCFLLCVVLLGFIMWACQRGNIRCNICI

SEQ ID NO: 3784 - protein, 566 aa, Artificial Sequence
  derived and/or modified protein sequence (wt) from hemagglutinin__InfluenzaA__ACZ53967
MKTIIALSYIFCLALAQKLPGNDNSTATLCLGHHAVPNGTLVKTITNDQIEVTNATELVQSSSTGRICDSPHQILDGENCTLIDALLGDPHCDGFQNKEWDLFVERSKAYSNCYPYDVPDYASLRSLVASSGTLEFNNESFNWTGVAQNGTSSACKRRSIKSFFSTLNWLHQLQNRYPALNVTMPNNDKFDKLYIWGVHHPSTDSDQTSLYAQASGRVTVSTKRSQQTVIPNIGSRPWVRGVSSRISIYWTIVKPGDVLVINSNGNLIAPRGYFKMRSGKSSIMRSDAPIGKCNSECITPNGSIPNDKPFQNVNRITYGACPRYVKQNTLKLATGMRNVPEKQTRGIFGAIAGFIENGWEGMMDGWYGFRHQNSEGTGQAADLKSTQAAINQINGKLNKLIEKTNEKFHQIEKEFSEVEGRIQDLEKYVEDTKIDLWSYNAELLVALENQHTIDLTDSEMNKLFERTRKQLRENAEDMGNGCFKIYHKCDNACIGSIRNGTYDHDVYRDEALNNRFQIKGVELKSGYKDWILWISFAISCFLLCVVLLGSIMWACQRGNIRCNICI

SEQ ID NO: 3785 - protein, 566 aa, Artificial Sequence
  derived and/or modified protein sequence (wt) from hemagglutinin__InfluenzaA__ACZ53978
MKTIIALSYIFCLALAQKLPGNDNSTATLCLGHHAVPNGTLVKTITNDQIEVTNATELVQSSSTGRICDSPHQILDGENCTLIDALLGDPHCDGFQNKEWDLFVERSKAYSNCYPYDVPDYASLKSLIASSGTLEFNNESFNWIGVSQNGTSSACKRISITVSFNKLNWLHQLKYRYPALNVTMPNNDKFDKLYIWGVHHPSTDSDQTSLYAQASGRVTVSTKRSQQTVIPNIGSRPWVRGVSSRISIYWTIVKPGDVLVINSNGNLIAPRGYFKMRSGKSSIMRSDAPIGKCNSECITPNGSIPNDKPFQNVNRITYGACPRYVKQNTLKLATGMRNVPEKQTRGIFGAIAGFIENGWEGMVDGWYGFRHQNSEGTGQAADLKSTQAAINQITGKLNKLIEKTNEKFHQIEKEFSEVEGRIQDLEKYVEDTKIDLWSYNAELLVALENQHTIDLTDSEMNKLFERTRKQLRENAEDMGNGCFKIYHKCDNACIGSIRNGTYDHDVYRDEALNNRFQIKGVELKSGYKDWILWISFAISCFLLCVVLLGFIMWACQRGNIRCNICI

SEQ ID NO: 3786 - protein, 566 aa, Artificial Sequence
  derived and/or modified protein sequence (wt) from hemagglutinin__InfluenzaA__ACZ56080
MKAILVVLLYTFATANADTLCIGYHANNSTDTVDTVLEKNVTVTHSVNLLEDKHNGKLCKLRGVAPLHLGKCNIAGWILGNPECESLSTASSWSYIVETSSSDNGTCYPGDFIDYEELREQLSSVSSFERFEIFPKTSSWPNHDSNKGVTAACSHAGAKSFYKNLIWLVKKGNSYPKLSKSYINDKGKEVLVLWGIHHPSTSADQQSLYQNADAYVFVGTSRYSKKFKPEIAIRPKVRGQEGRMNYYWTLVEPGDKITFEATGNLVVPRYAFAMERNAGSGIIISDTPVHDCNTTCQTPKGAINTSLPFQNIHPITIGKCPKYVKSTKLRLATGLRNVPSIQSRGLFGAIAGFIEGGWTGMVDGWYGYHHQNEQGSGYAADLKSTQNAIDEITNKVNSVIEKMNTQFTAVGKEFNHLEKRIENLNKKVDDGFLDIWTYNAELLVLLENERTLDYHDSNVKNLYEKVRSQLKNNAKEIGNGCFEFYHKCDNTCMESVKNGTYDYPKYSEEAKLNREEIDGVKLESTRIYQILAIYSTVASSLVLVVSLGAISFWMCSNGSLQCRICI

SEQ ID NO: 3787 - protein, 566 aa, Artificial Sequence
  derived and/or modified protein sequence (wt) from hemagglutinin__InfluenzaA__ACZ61118
MKAILVVLLYTFATANADTLCIGYHANNSTDTVDTVLEKNVTVTHSVNLLEDKHNGKLCKLRGVAPLHLGKCNIAGWILGNPECESLSTASSWSYIVETSSSDNGTCYPGDFIDYEELREQLSSVSSFERFEIFPKTSSWPNHDSNKGVTAACPHAGAKSFYKNLIWLVKKGNSYPKLSKSYINDKGKEVLVLWGIHHQSTSADQQSLYQNADAYVFVGSSRYSKKFKPEIAIRPKVRDQEGRMNYYWTLVEPGDKITFEATGNLVVPRYAFAMERNAGSGIIISDTPVHDCNTTCQTPKGAINTSLPFQNIHPITIGKCPKYVKSTKLRLATGLRNVPSIQSRGLFGAIAGFIEGGWTGMVDGWYGYHHQNEQGSGYAADLKSTQNAIDEITNKVNSVIEKMNTQFTAVGKEFNHLEKRIENLNKKVDDGFLDIWTYNAELLVLLENERTLDYHDSNVKNLYEKVRSQLKNNAKEIGNGCFEFYHKCDNTCMESVKNGTYDYPKYSEEAKLNREEIDGVKLESTRIYQILAIYSTVASSLVLVVSLGAISFWMCSNGSLQCRICI

SEQ ID NO: 3788 - protein, 566 aa, Artificial Sequence
  derived and/or modified protein sequence (wt) from hemagglutinin__InfluenzaA__ACZ61119
MEAILVVLLYTFATANADTLCIGYHANNSTDTVDTVLEKNVTVTHSVNLLEDKHNGKLCKLRGVAPLHLGKCNIAGWILGNPECESLSTASSWSYIVETSSSDNGTCYPGDFIDYEELREQLSSVSSFERFEIFPKTSSWPNHDSNKGVTAACPHAGAKSFYKNLIWLVKKGNSYPKLSKSYINDKGKEVLVLWGIHHPSTSADQQSLYQNADAYVFVGSSRYSKKFKPEIAIRPKVRDQEGRMNYYWTLVEPGDKITFEATGNLVVPRYAFAMERNAGSGIIISDTPVHDCNTTCQTPKGAINTSLPFHNIHPITIGKCPKYVKSTKLRLATGLRNVPSIQSRGLFGAIAGFIEGGWTGMVDGWYGYHHQNEQGSGYAADLKSTQNAIDEITNKVNSVIEKMNTQFTAVGKEFNHLEKRIENLNKKVDDGFLDIWTYNAELLILLENERTLDYHDSNVKNLYEKVRSQLKNNAKEIGNGCFEFYHKCDNTCMESVKNGTYDYPKYSEEAKLNREEIDGVKLESTRIYQILAIYSTVASSLVLVVSLGAISFWMCSNGSLQCRICI

SEQ ID NO: 3789 - protein, 566 aa, Artificial Sequence; identical to SEQ ID NO: 2669
  derived and/or modified protein sequence (wt) from hemagglutinin__InfluenzaA__ACZ61122

SEQ ID NO: 3790 - protein, 566 aa, Artificial Sequence; identical to SEQ ID NO: 2669
  derived and/or modified protein sequence (wt) from hemagglutinin__InfluenzaA__ACZ61123

SEQ ID NO: 3791 - protein, 566 aa, Artificial Sequence; identical to SEQ ID NO: 3467
  derived and/or modified protein sequence (wt) from hemagglutinin__InfluenzaA__ACZ74627

SEQ ID NO: 3792 - protein, 565 aa, Artificial Sequence
  derived and/or modified protein sequence (wt) from hemagglutinin__InfluenzaA__ACZ81554
MKVKLLVLLCTFTATYADTICIGYHANNSTDTVDTVLEKNVTVTHSVNLLENNHNGKLCLLKGIAPLQLGNCTVAGWILGNPECELLISKESWSYIVEKPNPENGTCYPGHFADYEELREQLSSVSSFERFEIFPKESSWPNHTVTGVSASCSHNGENSFYRNLLWLTGKNGLYPNLSKSYANNKEKEVLVLWGVHHPPNIADQKTLYHTENAYVSVVSSHYSRKFTPEIAKRPKIRDQEGRINYYWTLLEPGDTIIFEANGNLIAPRYAFALSRGFGSGIINSNAPMDKCDAKCQTPQGAINSSLPFQNVHPVTIGECPKYVRSAKLRMVTGLRNIPSIQSRGLFGAIAGFIEGGWTGMVDGWYGYHHQNEQGSGYAADQKSTQNAINGITNKVNSVIEKMNTQFTAVGKEFNKLERRMENLNKKVDDGFIDIWTYNAELLVLLENERTLDFHDSNVKNLYEKVKSQLKNNAKEIGNGCFEFYHKCNDECMESVKNGTYDYPKYSEESKLNREKIDGVKLESMGVYQILAIYSTVASSLVLLVSLGAISFWMCSNGSLQCRICI

SEQ ID NO: 3793 - protein, 565 aa, Artificial Sequence
  derived and/or modified protein sequence (wt) from hemagglutinin__InfluenzaA__ACZ81555
MKVKLLVLLCTFTATYADTICIGYHANNSTDTVDTVLEKNVTVTHSVNLLENSHNGKLCLLKGIAPLQLGNCSVAGWILGNPECELLISKESWSYIVEKPNPENGTCYPGHFADYEELREQLSSVSSFERFEIFPKESSWPNHTVTGVSASCSHNGENSFYRNLLWLTGKNGLYPNLSKSYANNKEKEVLVLWGVHHPPNIGDQKTLYHTENAYVSVVSSHYSRKFTPEIAKRPKVRDQEGRINYYWALLEPGDTIIFEANGNLIAPRYAFALSRGFGSGIINSNAPMDKCDAKCQTPQGAINSSLPFQNVHPVTIGECPKYVRSAKLRMVTGLRNIPSIQSRGLFGAIAGFIEGGWTGMVDGWYGYHHQNEQGSGYAADQKSTQNAINGITNKVNSVIEKMNTQFTAVGKEFNKLERRMENLNKKVDDGFIDIWTYNAELLVLLENERTLDFHDSNVKNLYEKVKSQLKNNAKEIGNGCFEFYHKCNDECMESVKNGTYDYPKYSEESKLNREKIDGVKLESMGVYQILAIYSTVASSLVLLVSLGAISFWMCSNGSLQCRICI

SEQ ID NO: 3794 - protein, 565 aa, Artificial Sequence
  derived and/or modified protein sequence (wt) from hemagglutinin__InfluenzaA__ACZ81556
MKVKLLVLLCTFTATYADTICIGYHANNSTDTVDTVLEKNVTVTHSVNLLENSHNGKLCLLKGIAPLQLGNCSVAGWILGNPECELLISKESWSYIVEKPNPENGTCYPGHFADYEELREQLSSVSSFERFEIFPKESSWPNHTVTGASASCSHNGENSFYRNLLWLTGKNGLYPNLSKSYANNKEKEVLVLWGVHHPPNIADQKTLYHTENAYVSVVSSHYSRKFTPEIAKRPKVRDQEGRINYYWTLLEPGDTIIFEANGNLIAPRYAFALSRGFGSGIINSNAPMDKCDAKCQTPQGAINSSLPFQNVHPVTIGECPKYVRSAKLRMVTGLRNIPSIQSRGLFGAIAGFIEGGWTGMVDGWYGYHHQNEQGSGYAADQKSTQNAINGITNKVNSVIEKMNTQFTAVGKEFNKLERRMENLNKKVDDGFIDIWTYNAELLVLLENERTLDFHDSNVKNLYEKVKSQLKNNAKEIGNGCFEFYHKCNDECMESVKNGTYDYPKYSEESKLNKEKIDGVKLESMGVYQILAIYSTVASSLVLLVSLGAISFWMCSNGSLQCRICI

SEQ ID NO: 3795 - protein, 566 aa, Artificial Sequence
  derived and/or modified protein sequence (wt) from hemagglutinin__InfluenzaA__ACZ81557
MKTIIALSYILCLVFAQKLPGNDNSTATLCLGHHAVPNGTIVKTITNDQIEVTNATELVQSSSTGEICGSPHQILDGKNCTLIDALLGDPQCDGFQNKKWDLFVERSKAYSNCYPYDVPDYASLRSLVASSGTLEFNNESFNWTGVTQNGTSSACIRRSKNSFFSRLNWLTHLNFKYQALNVTMPNNEQFDKLYIWGVHHPGTDKDQIFLYAQASGRITVSTKRSQQTVIPNIGSRPRVRNIPSRISIYWTIVKPGDILLINSTGNLIAPRGYFKIQSGKSSIMRSDAPIGKCNSECITPNGSIPNDKPFQNVNRITYGACPRYVKQNTLKLATGMRNVPEKQTRGIFGAIAGFIENGWEGMVDGWYGFRHQNSEGRGQAADLKSTQAAIDQINGKLNRLIGKTNEKFHQIEKEFSEVEGRIQDLEKYVEDTKIDLWSYNAELLVALENQHTIDLTDSEMNKLFEKTKKQLRENAEDMGNGCFKIYHKCDNACIGSIRNGTYDHDVYRDEALNNRFQIKGVELKSGYKDWILWISFAISCFLLCVALLGFIMWACQKGNIRCNICI

SEQ ID NO: 3796 - protein, 566 aa, Artificial Sequence
  derived and/or modified protein sequence (wt) from hemagglutinin__InfluenzaA__ACZ81558
MKTIIALSYILCLVFAQKLPGNDNSTATLCLGHHAVPNGTIVKTITNDQIEVTNATELVQSSSTGEICDSPHQILDGKNCTLIDALLGDPHCDGFQNKKWDLFVERSKAYSNCYPYDVPDYASLRSLVASSGTLEFNNESFNWTGVTQNGTSSACIRRSKNSFFSRLNWLTHLNFKYPALNVTMPNNEQFDKLYIWGVHHPGTDKDQIFLYAQASGRITVSTKRSQQTAIPNIGSRPRVRNIPSRISIYWTIVKPGDILLINSTGNLIAPRGYFKIRSGKSSIMRSDAPIGKCNSECITPNGSIPNDKPFQNVNRITYGACPRYVKQNTLKLATGMRNVPEKQTRGIFGAIAGFIENGWEGMVDGWYGFRHQNSEGRGQAADLKSTQAAIDQINGKLNRLIEKTNEKFHQIEKEFSEVEGRIQDLEKYVEDTKIDLWSYNAELLVALENQHTIDLTDSEMNKLFEKTKKQLRENAEDMGNGCFKIYHKCDNACIGSIRNGTYDHDVYRDEALNNRFQIKGVELKSGYKDWILWISFAISCFLLCVALLGFIMWACQKGNIRCNICI

SEQ ID NO: 3797 - protein, 566 aa, Artificial Sequence
  derived and/or modified protein sequence (wt) from hemagglutinin__InfluenzaA__ACZ81559
MKTIIALSYILCLVFAQKLPGNDNSTATLCLGHHAVPNGTIVKTITNDQIEVTNATELVQSSSTGEICDSPHQILDGKNCTLIDALLGDPHCDGFQNKKWDLFVERSKAYSNCYPYDVPDYASLRSLVASSGTLEFNNESFNWTGVTQNGTSSACIRRSKNSFFSRLNWLTHLNFKYPALNVTMPNNEQFDKLYIWGVHHPGTDKDQIFLYAQASGRITVSTKRSQQTAIPNIGSRPRVRNIPSRISIYWTIVKPGDILLINSTGNLIAPRGYFKIRSGKSSIMRSDAPIGKCNSECITPNGSIPNDKPFQNVNRITYGACPRYVKQNTLKLATGMRNVPEKQTRGIFGAIAGFIENGWEGMVDGWYGFRHQNSEGRGQAADLKSTQAAIDQINGKLNRLIGKTNEKFHQIEKEFSEVEGRIQDLEKYVEDTKIDLWSYNAELLVALENQHTIDLTDSEMNKLFEKTKKQLRENAEDMGNGCFKIYHKCDNACIGSIRNGTYDHDVYRDEALNNRFQIKGVELKSGYKDWILWISFAISCFLLCVALLGFIMWACQKGNIRCNICI

SEQ ID NO: 3798 - protein, 566 aa, Artificial Sequence; identical to SEQ ID NO: 2669
  derived and/or modified protein sequence (wt) from hemagglutinin__InfluenzaA__ACZ81632

SEQ ID NO: 3799 - protein, 566 aa, Artificial Sequence; identical to SEQ ID NO: 2669
  derived and/or modified protein sequence (wt) from hemagglutinin__InfluenzaA__ACZ81642

SEQ ID NO: 3800 - protein, 566 aa, Artificial Sequence
  derived and/or modified protein sequence (wt) from hemagglutinin__InfluenzaA__ACZ81652
MKAILVVLLYTFATANADTLCIGYHANNSTDTVDTVLERNVTVTHSVNLLEDKHNGKLCKLRGVAPLHLGKCNIAGWILGNPECESLSTASSWSYIVETSSSDNGTCYPGDFIDYEELREQLSSVSSFERFEIFPKTSSWPNHDSNKGVTAACPHAEAKSFYKNLIWLVKKGNSYPKLSKSYINDKGKEVLVLWGIHHPSTSADQQSLYQNADAYVFVGTSRYSKKFKPEIAIRPKVRGQEGRMNYYWTLVEPGDKITFEATGNLVVPRYAFAMERNAGSGIIISDTPVHDCNTTCQTPKGAINTSLPFQNIHPITIGKCPKYVKSTKLRLATGLRNVPSIQSRGLFGAIAGFIEGGWTGMVDGWYGYHHQNEQGSGYAADLKSTQNAIDEITNKVNSVIEKMNTQFTAVGKEFNHLEKRIENLNKKVDDGFLDIWTYNAELLVLLENERTLDYHDSNVKNLYEKVRSQLKNNAKEIGNGCFEFYHKCDNTCMESVKNGTYDYPKYSEEAKLNREEIDGVKLESTRIYQILAIYSTVASSLVLVVSLGAISFWMCSNGSLQCRICI

SEQ ID NO: 3801 - protein, 566 aa, Artificial Sequence
  derived and/or modified protein sequence (wt) from hemagglutinin__InfluenzaA__ACZ92130
MEAILVVLLYTFATANADTLCIGYHANNSTDTVDTVLEKNVTVTHSVNLLEDKHNGKLCKLRGVAPLHLGKCNIAGWILGNPECESLSTASSWSYIVETSSSDNGTCYPGDFIDYEELREQLSSVSSFERFEIFPKTSSWPNHDSNKGVTAACPHAGAKSFYKNLIWLVKKGNSYPKLSKSYINDKGKEVLVLWGIHHPSTSADQQSLYQNADAYVFVGSSRYSKKFKPEIAIRPKVRDQEGRMNYYWTLVEPGDKITFEATGNLVVPRYAFAMERNAGSGIIISDTPVHDCNTTCQTPKGAINTSLPFHNIHPITIGKCPKYVKSTKLRLATGLRNVPSIQSRGLFGAIAGFIEGGWTGMVDGWYGYHHQNEQGSGYAADLKSTQNAIDEITNKVNSVIEKMNTQFTAVGKEFNHLEKRIENLNKKVDDGFLDIWTYNAELLVLLENERTLDYHDSNVKNLYEKVRSQLKNNAKEIGNGCFEFYHKCDNTCIESVKNGTYDYPKYSEEAKLNREEIDGVKLESTRIYQILAIYSTVASSLVLVVSLGAISFWMCSNGSLQCRICI

SEQ ID NO: 3802 - protein, 566 aa, Artificial Sequence; identical to SEQ ID NO: 2911
  derived and/or modified protein sequence (wt) from hemagglutinin__InfluenzaA__ACZ92131

SEQ ID NO: 3803 - protein, 566 aa, Artificial Sequence; identical to SEQ ID NO: 2911
  derived and/or modified protein sequence (wt) from hemagglutinin__InfluenzaA__ACZ92132

SEQ ID NO: 3804 - protein, 566 aa, Artificial Sequence; identical to SEQ ID NO: 2911
  derived and/or modified protein sequence (wt) from hemagglutinin__InfluenzaA__ACZ92133

SEQ ID NO: 3805 - protein, 566 aa, Artificial Sequence; identical to SEQ ID NO: 2669
  derived and/or modified protein sequence (wt) from hemagglutinin__InfluenzaA__ACZ92134

SEQ ID NO: 3806 - protein, 566 aa, Artificial Sequence; identical to SEQ ID NO: 2669
  derived and/or modified protein sequence (wt) from hemagglutinin__InfluenzaA__ACZ95465

SEQ ID NO: 3807 - protein, 566 aa, Artificial Sequence; identical to SEQ ID NO: 2656
  derived and/or modified protein sequence (wt) from hemagglutinin__InfluenzaA__ACZ95837

SEQ ID NO: 3808 - protein, 566 aa, Artificial Sequence; identical to SEQ ID NO: 2669
  derived and/or modified protein sequence (wt) from hemagglutinin__InfluenzaA__ACZ95847

SEQ ID NO: 3809 - protein, 566 aa, Artificial Sequence
  derived and/or modified protein sequence (wt) from hemagglutinin__InfluenzaA__ACZ95857
MKAILVVLLYTFATANADTLCIGYHANNSTDTVDTVLEKNVTVTHSVNLLEDKHNGKLCKLRGVAPLHLGKCNIAGWILGNPECESLSTASSWSYIVETSSSDNGTCYPGDFIDYEELREQLSSVSSFERFEIFPKTSSWPNHDSNKGVTAACPHAGAKSFYKNLIWLVKKGNSYPKLSKSYINDKGKEVLVLWGIHHPSTSADQQSLYQNADAYVFVGTSRYSKKFKPEIAIRPKVRDQEGRMNYYWTLVEPGDKITFEATGNLVVPRYAFAMERNAGSGIIISDTPVHDCNTTCQTSKGAINTSLPFQNIHPITIGKCPKYVKSTKLRLATGLRNVPSIQSRGLFGAIAGFIEGGWTGMVDGWYGYHHQNEQGSGYAADLKSTQNAIDEITNKVNSVIEKMNTQFTAVGKEFNHLEKRIENLNKKVDDGFLDIWTYNAELLVLLENERTLDYHDSNVKNLYEKVRSQLKNNAKEIGNGCFEFYHKCDNTCMESVKNGTYDYPKYSEEAKLNREEIDGVKLESTRIYQILAIYSTVASSLVLVVSLGAISFWMCSNGSLQCRICI

SEQ ID NO: 3810 - protein, 566 aa, Artificial Sequence; identical to SEQ ID NO: 2669
  derived and/or modified protein sequence (wt) from hemagglutinin__InfluenzaA__ACZ95867

SEQ ID NO: 3811 - protein, 566 aa, Artificial Sequence
  derived and/or modified protein sequence (wt) from hemagglutinin__InfluenzaA__ACZ95887
MEAILVVLLYTFATANADTLCIGYHANNSTDTVDTVLEKNVTVTHSVNLLEDKHNGKLCKLRGVAPLHLGKCNIAGWILGNPECESLSTASSWSYIVETSSSDNGTCYPGDFIDYEELREQLSSVSSFERFEIFPKTSSWPNHDSNKGVTAACPHAGAKSFYKNLIWLVKKGNSYPKLSKSYINDKGKEVLVLWGIHHPSTSADQQSLYQNADAYVFVGSSRYSKKFKPEIAIRPKVRNQEGRMNYYWTLVEPGDKITFEATGNLVVPRYAFAMERNAGSGIIISDTPVHDCNTTCQTPKGAINTSLPFHNIHPITIGKCPKYVKSTKLRLATGLRNVPSIQSRGLFGAIAGFIEGGWTGMVDGWYGYHHQNEQGSGYAADLKSTQNAIDEITNKVNSVIEKMNTQFTAVGKEFNHLEKRIENLNKKVDDGFLDIWTYNAELLVLLENERTLDYHDSNVKNLYEKVRSQLKNNAKEIGNGCFEFYHKCDNTCMESVKNGTYDYPKYSEEAKLNREEIDGVKLESTRIYQILAIYSTVASSLVLVVSLGAISFWMCSNGSLQCRICI

SEQ ID NO: 3812 - protein, 566 aa, Artificial Sequence; identical to SEQ ID NO: 2669
  derived and/or modified protein sequence (wt) from hemagglutinin__InfluenzaA__ACZ95897

SEQ ID NO: 3813 - protein, 566 aa, Artificial Sequence
  derived and/or modified protein sequence (wt) from hemagglutinin__InfluenzaA__ACZ95907
MKAILVVLLYTFATANADTLCIGYHANNSTDTVDTVLEKNVTVTHSVNLLEDKHNGKLCKLRGVAPLHLGKCNIAGWILGNPECESLSTASSWSYIVETSSSDNGTCYPGDFIDYEELREQLSSVSSFERFEIFPKTSSWPNHDSNKGVTAACPHAGAKSFYKNLIWLVKKGNSYPKLSKSYINDKGKEVLVLWGIHHPSTSADQQSLYQNADAYVFVGTSRYSKKFKPEIAIRPKVRDQEGRMNYYWTLVEPGDKITFEATGNLVVPRYAFAMERNAGSGIIISDTPVYDCNTTCQTPKGAINTSLPFQNIHPITIGKCPKYVKSTKLRLATGLRNVPSIQSRGLFGAIAGFIEGGWTGMVDGWYGYHHQNEQGSGYAADLKSTQNAIDEITNKVNSVIEKMNTQFTAVGKEFNHLEKRIENLNKKVDDGFLDIWTYNAELLVLLENERTLDYHDSNVKNLYEKVRSQLKNNAKEIGNGCFEFYHKCDNTCMESVKNGTYDYPKYSEEAKLNREEIDGVKLESTRIYQILAIYSTVASSLVLVVSLGAISFWMCSNGSLQCRICI

SEQ ID NO: 3814 - protein, 566 aa, Artificial Sequence; identical to SEQ ID NO: 2669
  derived and/or modified protein sequence (wt) from hemagglutinin__InfluenzaA__ACZ95927

SEQ ID NO: 3815 - protein, 566 aa, Artificial Sequence
  derived and/or modified protein sequence (wt) from hemagglutinin__InfluenzaA__ACZ95937
MEAILVVLLYTFATANADTLCIGYHANNSTDTVDTVLEKNVTVTHSVNLLEDKHNGKLCKLRGVAPLHLGKCNIAGWILGNPECESLSTASSWSYIVETSSSDNGTCYPGDFIDYEELREQLSSVSSFERFEIFPKTSSWPNHDSNKGVTAACPHAGAKSFYKNLIWLVKKGNSYPKLSKSYINDKGKEVLVLWGIHHPSTNADQQSLYQNADAYVFVGSSRYSKKFKPEIAIRPKVRDQEGRMNYYWTLVEPGDKITFEATGNLVVPRYAFAMERNAGSGIIISDTPVHDCNTTCQTPKGAINTSLPFHNIHPITIGKCPKYVKSTKLRLATGLRNVPSIQSRGLFGAIAGFIEGGWTGMVDGWYGYHHQNEQGSGYAADLKSTQNAIDEITNKVNSVIEKMNTQFTAVGKEFNHLEKRIENLNKKVDDGFLDIWTYNAELLVLLENERTLDYHDSNVKNLYEKVRSQLKNNAKEIGNGCFEFYHKCDNTCMESVKNGTYDYPKYSEEAKLNREEIDGVKLESTRIYQILAIYSTVASSLVLVVSLGAISFWMCSNGSLQCRICI

SEQ ID NO: 3816 - protein, 566 aa, Artificial Sequence; identical to SEQ ID NO: 2911
  derived and/or modified protein sequence (wt) from hemagglutinin__InfluenzaA__ACZ95947

SEQ ID NO: 3817 - protein, 566 aa, Artificial Sequence; identical to SEQ ID NO: 2669
  derived and/or modified protein sequence (wt) from hemagglutinin__InfluenzaA__ACZ95957

SEQ ID NO: 3818 - protein, 566 aa, Artificial Sequence; identical to SEQ ID NO: 2911
  derived and/or modified protein sequence (wt) from hemagglutinin__InfluenzaA__ACZ95967

SEQ ID NO: 3819 - protein, 566 aa, Artificial Sequence; identical to SEQ ID NO: 3815
  derived and/or modified protein sequence (wt) from hemagglutinin__InfluenzaA__ACZ95977

SEQ ID NO: 3820 - protein, 566 aa, Artificial Sequence
  derived and/or modified protein sequence (wt) from hemagglutinin__InfluenzaA__ACZ95987
MKAILVVLLYTFATANADTLCIGYHANNSTDTVDTVLEKNVTVTHSVNLLEDKHNGKLCKLRGVAPLHLGKCNIAGWILGNPECESLSTASSWSYIVETSSSDNGTCYPGDFIDYEELREQLSSVSSFERFEIFPKTSSWPNHDSNKGVTAACPHAGAKSFYKNLIWLVKKGNSYPKLSKSYINDKGKEVLVLWGIHHPSTSADQQSLYQNADAYVFVGTSRYSKKFKPEIAIRPKVRDQEGRMNYYWTLVEPGDKITFEATGNLVVPRYAFAMERNAGSGIIISDTPVHDCNTTCQTPKGAINTSLPFQNIHPITIGKCPKYVKSTKLRLATGLRNIPSIQSRGLFGAIAGFIEGGWTGMIDGWYGYHHQNEQGSGYAADLKSTQNAIDEITNKVNSVIEKMNTQFTAVGKEFNHLEKRIENLNKKVDDGFLDIWTYNAELLVLLENERTLDYHDSNVKNLYEKVRSQLKNNAKEIGNGCFEFYHKCDNTCMESVKNGTYDYPKYSEEAKLNREEIDGVKLESTRIYQILAIYSTVASSLVLVVSLGAISFWMCSNGSLQCRICI

SEQ ID NO: 3821 - protein, 566 aa, Artificial Sequence; identical to SEQ ID NO: 2669
  derived and/or modified protein sequence (wt) from hemagglutinin__InfluenzaA__ACZ95997

SEQ ID NO: 3822 - protein, 566 aa, Artificial Sequence; identical to SEQ ID NO: 2669
  derived and/or modified protein sequence (wt) from hemagglutinin__InfluenzaA__ACZ96007

SEQ ID NO: 3823 - protein, 566 aa, Artificial Sequence; identical to SEQ ID NO: 2656
  derived and/or modified protein sequence (wt) from hemagglutinin__InfluenzaA__ACZ96017

SEQ ID NO: 3824 - protein, 566 aa, Artificial Sequence; identical to SEQ ID NO: 2669
  derived and/or modified protein sequence (wt) from hemagglutinin__InfluenzaA__ACZ96027

SEQ ID NO: 3825 - protein, 566 aa, Artificial Sequence; identical to SEQ ID NO: 3815
  derived and/or modified protein sequence (wt) from hemagglutinin__InfluenzaA__ACZ96047

SEQ ID NO: 3826 - protein, 566 aa, Artificial Sequence
  derived and/or modified protein sequence (wt) from hemagglutinin__InfluenzaA__ACZ96057
MKAILVVLLYTFATANADTLCIGYHANNSTDTVDTVLEKNVTVTHSVNLLEDKHNGKLCKLRGVAPLHLGKCNIAGWILGNPECESLSTASSWSYIVETSSSDNGTCYPGDFIDYEELREQLSSVSSFERFEIFPKTSSWPNHDSNKGVTAACLHAGAKSFYKNLIWLVKKGNSYPKLSKSYINDKGKEVLVLWGIHHPSTSADQQSLYQNADAYVFVGTSRYSKKFKPEIAIRPKVRDQEGRMNYYWTLVEPGDKITFEATGNLVVPRYAFAMERNAGSGIIISDTPVHDCNTTCQTPKGAINTSLPFQNIHPITIGKCPKYVKSTKLRLATGLRNIPSIQSRGLFGAIAGFIEGGWTGMVDGWYGYHHQNEQGSGYAADLKSTQNAIDEITNKVNSVIEKMNTQFTAVGKEFNHLEKRIENLNKKVDDGFLDIWTYNAELLVLLENERTLDYHDSNVKNLYEKVRSQLKNNAKEIGNGCFEFYHKCDNTCMESVKNGTYDYPKYSEEAKLNREEIDGVKLESTRIYQILAIYSTVASSLVLVVSLGAISFWMCSNGSLQCRICI

SEQ ID NO: 3827 - protein, 566 aa, Artificial Sequence
  derived and/or modified protein sequence (wt) from hemagglutinin__InfluenzaA__ACZ96069
MKAILVVLLYTFATANADTLCIGYHANNSTDTVDTVLEKNVTVTHSVNLLEDKHNGKLCKLRGVAPLHLGKCNIAGWILGNPECESLSTASSWSYIVETSSSDNGTCYPGDFIDYEELREQLSSVSSFERFEIFPKTSSWPNHDSNKGVTAACPHAGAKSFYKNLIWLVKKGNSYPKLSKSYINDKGKEVLVLWGIHHPSTSADQQSLYQNADAYVFVGTSRYSKKFKPEIAIRPKVRDQEGRMNYYWTLVEPGNKITFEATGNLVVPRYAFAMERNAGSGIIISDTPVHDCNTTCQTPKGAINTSLPFQNIHPITIGKCPKYVKSTKLRLATGLRNVPSIQSRGLFGAIAGFIEGGWTGMVDGWYGYHHQNEQGSGYAADLKSTQNAIDEITNKVNSVIEKMNTQFTAVGKEFNHLEKRIENLNKKVDDGFLDIWTYNAELLVLLENERTLDYHDSNVKNLYEKVRSQLKNNAKEIGNGCFEFYHKCDNTCMESVKNGTYDYPKYSEEAKLNREEIDGVKLESTRIYQILAIYSTVASSLVLVVSLGAISFWMCSNGSLQCRICI

SEQ ID NO: 3828 - protein, 566 aa, Artificial Sequence; identical to SEQ ID NO: 3815
  derived and/or modified protein sequence (wt) from hemagglutinin__InfluenzaA__ACZ96089

SEQ ID NO: 3829 - protein, 566 aa, Artificial Sequence
  derived and/or modified protein sequence (wt) from hemagglutinin__InfluenzaA__ACZ96119
MKAILVVLLYTFATANADTLCIGYHANNSTDTVDTVLEKNVTVTHSVNLLEDKHNGKLCKLRGVAPLHLGKCNIAGWILGNPECESLSTASSWSYIVETSSSDNGTCYPGDFIDYEELREQLSSVSSFERFEMFPKTSSWPNHDSNKGVTAACPHAGAKSFYKNLIWLVKKGNSYPKLSKSYINDKGKEVLVLWGIHHPSTSADQQSLYQNADAYVFVGTSRYSKKFKPEIAIRPKVRDQEGRMNYYWTLVEPGDKITFEATGNLVVPRYAFAMERNAGSGIIISDTPVHDCNTTCQTPKGAINTSLPFQNIHPITIGKCPKYVKSTKLRLATGLRNVPSIQSRGLFGAIAGFIEGGWTGMVDGWYGYHHQNEQGSGYAADLKSTQNAIDEITNKVNSVIEKMNTQFTAVGKEFNHLEKRIENLNKKVDDGFLDIWTYNAELLVLLENERTLDYHDSNVKNLYEKVRSQLKNNAKEIGNGCFEFYHKCDNTCMESVKNGTYDYPKYSEEAKLNREEIDGVKLESTRIYQILAIYSTVASSLVLVVSLGAISFWMCSNGSLQCRICI

SEQ ID NO: 3830 - protein, 566 aa, Artificial Sequence
  derived and/or modified protein sequence (wt) from hemagglutinin__InfluenzaA__ACZ96129
MKAILVVLLYTFATANADTLCIGYHANNSTDTVDTVLEKNVTVTHSVNLLEDKHNGKLCKLRGVAPLHLGKCNIAGWILGNPECESLSTASSWSYIVETSSSDNGTCYPGEFIDYEELREQLSSVSSFERFEIFPKTSSWPNHDSNKGVTAACPHAGAKSFYKNLIWLVKKGNSYPKLSKSYINDKGKEVLVLWGIHHPSTSADQQSLYQNADAYVFVGTSRYSKKFKPEIAIRPKVRDQEGRMNYYWTLVEPGDKITFEATGNLVVPRYAFAMERNAGSGIIISDTPVHDCNTTCQTPKGAINTSLPFQNIHPITIGKCPKYVKSTKLRLATGLRNVPSIQSRGLFGAIAGFIEGGWTGMVDGWYGYHHQNEQGSGYAADLKSTQNAIDEITNKVNSVIEKMNTQFTAVGKEFNHLEKRIENLNKKVDDGFLDIWTYNAELLVLLENERTLDYHDSNVKNLYEKVRSQLKNNAKEIGNGCFEFYHKCDNTCMESVKNGTYDYPKYSEEAKLNREEIDGVKLESTRIYQILAIYSTVASSLVLVVSLGAISFWMCSNGSLQCRICI

SEQ ID NO: 3831 - protein, 566 aa, Artificial Sequence; identical to SEQ ID NO: 2669
  derived and/or modified protein sequence (wt) from hemagglutinin__InfluenzaA__ACZ96149

SEQ ID NO: 3832 - protein, 566 aa, Artificial Sequence; identical to SEQ ID NO: 2669
  derived and/or modified protein sequence (wt) from hemagglutinin__InfluenzaA__ACZ96159

SEQ ID NO: 3833 - protein, 566 aa, Artificial Sequence
  derived and/or modified protein sequence (wt) from hemagglutinin__InfluenzaA__ACZ96179
MKAILVVLLYTFATANADTLCIGYHANNSTDTVDTVLEKNVTVTHSVNLLEDKHNGKLCKLRGVAPLHLGKCNIAGWILGNPECESLSTASSWSYIVETSSSDNGTCYPGDFIDYEELREQLSSVSSFERFEIFPKTSSWPNHDSNKGVTAACPHAGAKSFYKNLIWLVKKGNSYPKLSKSYINDKGKEVLVLWGIHHPSTSADQQSLYQNADAYVFVGTSRYSKKFKPEIAIRPKVRDQEGRMNYYWTLVEPGDKITFEATGNLVVPRYAFAMERNAGSGIIISDTPVHDCNTTCQTPKGAINTSLPFQNIHPITIGKCPKYVKSTKLRLATGLRNVPSIQSRGLFGAIAGFIEGGWTGMVDGWYGYHHQNEQGSGYAADLKSTQNAIDKITNKVNSVIEKMNTQFTAVGKEFNHLEKRIENLNKKVDDGFLDIWTYNAELLVLLENERTLDYHDSNVKNLYEKVRSQLKNNAKEIGNGCFEFYHKCDNTCMESVKNGTYDYPKYSEEAKLNREEIDGVKLESTRIYQILAIYSTVASSLVLVVSLGAISFWMCSNGSLQCRICI

SEQ ID NO: 3834 - protein, 566 aa, Artificial Sequence; identical to SEQ ID NO: 3826
  derived and/or modified protein sequence (wt) from hemagglutinin__InfluenzaA__ACZ96189

SEQ ID NO: 3835 - protein, 566 aa, Artificial Sequence; identical to SEQ ID NO: 3833
  derived and/or modified protein sequence (wt) from hemagglutinin__InfluenzaA__ACZ96199

SEQ ID NO: 3836 - protein, 566 aa, Artificial Sequence; identical to SEQ ID NO: 2669
  derived and/or modified protein sequence (wt) from hemagglutinin__InfluenzaA__ACZ96209

SEQ ID NO: 3837 - protein, 566 aa, Artificial Sequence
  derived and/or modified protein sequence (wt) from hemagglutinin__InfluenzaA__ACZ96219
MKAILVVLLYTFATANADTLCIGYHANNSTDTVDTVLEKNVTVTHSVNLLEDKHNGKLCKLRGVAPLHLGKCNIAGWILGNPECESLSTASSWSYIVETSSSDNGTCYPGDFIDYEELREQLSSVSSFERFEIFPKTSSWPNHDSNKGVTAACPHAGAKSFYKNLIWLVKKGNSYPKLSKSYINDKGKEVLVLWGIHHPSTSADQQSLYQNADAYVFVGTSRYSKKFKPEIAIRPKVRDQEGRMNYYWTLVEPGDKIKFEATGNLVVPRYAFAMERNAGSGIIISDTPVHDCNTTCQTSKGAINTSLPFQNIHPITIGKCPKYVKSTKLRLATGLRNVPSIQSRGLFGAIAGFIEGGWTGMVDGWYGYHHQNEQGSGYAADLKSTQNAIDEITNKVNSVIEKMNTQFTAVGKEFNHLEKRIENLNKKVDDGFLDIWTYNAELLVLLENERTLDYHDSNVKNLYEKVRSQLKNNAKEIGNGCFEFYHKCDNTCMESVKNGTYDYPKYSEEAKLNREEIAGVKLESTRIYQILAIYSTVASSLVLVVSLGAISFWMCSNGSLQCRICI

SEQ ID NO: 3838 - protein, 566 aa, Artificial Sequence; identical to SEQ ID NO: 2669
  derived and/or modified protein sequence (wt) from hemagglutinin__InfluenzaA__ACZ96229

SEQ ID NO: 3839 - protein, 566 aa, Artificial Sequence; identical to SEQ ID NO: 3833
  derived and/or modified protein sequence (wt) from hemagglutinin__InfluenzaA__ACZ96239

SEQ ID NO: 3840 - protein, 566 aa, Artificial Sequence; identical to SEQ ID NO: 2669
  derived and/or modified protein sequence (wt) from hemagglutinin__InfluenzaA__ACZ96249

SEQ ID NO: 3841 - protein, 566 aa, Artificial Sequence
  derived and/or modified protein sequence (wt) from hemagglutinin__InfluenzaA__ACZ96269
MKAILVVLLYTFATANADTLCIGYHANNSTDTVDTVLERNVTVTHSVNLLEDKHNGKLCKLRGVAPLHLGKCNIAGWILGNPECESLSTASSWSYIVETSSSDNGTCYPGDFIDYEELREQLSSVSSFERFEIFPKTSSWPNHDSNKGVTAACPHAGAKSFYKNLIWLVKKGNSYPKLSKSYINDKGKEVLVLWGIHHPSTSADQQSLYQNADAYVFVGTSRYSKKFKPEIAIRPKVRDQEGRMNYYWTLVEPGDKITFEATGNLVVPRYAFAMERNAGSGIIISDTPVHDCNTTCQTPKGAINTSLPFQNIHPITIGKCPKYVKSTKLRLATGLRNVPSIQSRGLFGAIAGFIEGGWTGMVDGWYGYHHQNEQGSGYAADLKSTQNAIDEITNKVNSVIEKMNTQFTAVGKEFNHLEKRIENLNKKVDDGFLDIWTYNAELLVLLENERTLDYHDSNVKNLYEKVRSQLKNNAKEIGNGCFEFYHKCDNTCMESVKNGTYDYPKYSEEAKLNREEIDGVKLESTRIYQILAIYSTVASSLVLVVSLGAISFWMCSNGSLQCRICI

SEQ ID NO: 3842 - protein, 566 aa, Artificial Sequence; identical to SEQ ID NO: 2669
  derived and/or modified protein sequence (wt) from hemagglutinin__InfluenzaA__ACZ96299

SEQ ID NO: 3843 - protein, 566 aa, Artificial Sequence; identical to SEQ ID NO: 2669
  derived and/or modified protein sequence (wt) from hemagglutinin__InfluenzaA__ACZ96309

SEQ ID NO: 3844 - protein, 566 aa, Artificial Sequence
  derived and/or modified protein sequence (wt) from hemagglutinin__InfluenzaA__ACZ96319
MKAILVVLLYTFATANADTLCIGYHANNSTDTVDTVLEKNVTVTHSVNLLEDKHNGKLCKLRGVAPLHLGICNIAGWILGNPECESLSTASSWSYIVETSSSDNGTCYPGDFIDYEELREQLSSVSSFERFEIFPKTSSWPNHDSNKGVTAACPHAGAKSFYKNLIWLVKKGNSYPKLSKSYINDKGKEVLVLWGIHHPSTSADQQSLYQNADAYVFVGTSRYSKKFKPEIAIRPKVRDQEGRMNYYWTLVEPGDKITFEATGNLVVPRYAFAMERNAGSGIIISDTPVHDCNTTCQTPKGAINTSLPFQNIHPITIGKCPKYVKSTKLRLATGLRNVPSIQSRGLFGAIAGFIEGGWTGMVDGWYGYHHQNEQGSGYAADLKSTQNAIDEITNKVNSVIEKMNTQFTAVGKEFNHLEKRIENLNKKVDDGFLDIWTYNAELLVLLENERTLDYHDSNVKNLYEKVRSQLKNNAKEIGNGCFEFYHKCDNTCMESVKNGTYDYPKYSEEAKLNREEIDGVKLESTRIYQILAIYSTVASSLVLVVSLGAISFWMCSNGSLQCRICI

SEQ ID NO: 3845 - protein, 566 aa, Artificial Sequence; identical to SEQ ID NO: 3844
  derived and/or modified protein sequence (wt) from hemagglutinin__InfluenzaA__ACZ96329

SEQ ID NO: 3846 - protein, 566 aa, Artificial Sequence
  derived and/or modified protein sequence (wt) from hemagglutinin__InfluenzaA__ACZ96339
MKAILVVLLYTFATANADTLCIGYHANNSTDTVDTVLEKNVTVTHSVNLLEDKHNGKLCKLRGVAPLHLGKCNIAGWILGNPECESLSTASSWSYIVETSSSDNGTCYPGDFIDYEELREQLSSVSSFERFEIFPKTSSWPNHDSNKGVTAACPHAGAKSFYKNLIWLVKKGNSYPKLSKSYINDKGKEVLVLWGIHHPSTSADQQSLYQNADSYVFVGTSRYSKKFKPEIAIRPKVRDQEGRMNYYWTLVEPGDKITFEATGNLVVPRYAFAMERNAGSGIIISDTPVHDCNTTCQTPEGAINTSLPFQNIHPITIGKCPKYVKSTKLRLATGLRNVPSIQSRGLFGAIAGFIEGGWTGMVDGWYGYHHQNEQGSGYAADLKSTQNAIDEITNKVNSVIKKMNTQFTAVGKEFNHLEKRIENLNKKVDDGFLDIWTYNAELLVLLENERTLDYHDSNVKNLYEKVRSQLKNNAKEIGNGCFEFYHKCDNTCMESVKNGTYDYPKYSEEAKLNREEIDGVKLESTRIYQILAIYSTVASSLVLVVSLGAISFWMCSNGSLQCRICI

SEQ ID NO: 3847 - protein, 566 aa, Artificial Sequence; identical to SEQ ID NO: 2669
  derived and/or modified protein sequence (wt) from hemagglutinin__InfluenzaA__ACZ96349

SEQ ID NO: 3848 - protein, 566 aa, Artificial Sequence; identical to SEQ ID NO: 3844
  derived and/or modified protein sequence (wt) from hemagglutinin__InfluenzaA__ACZ96359

SEQ ID NO: 3849 - protein, 566 aa, Artificial Sequence; identical to SEQ ID NO: 2669
  derived and/or modified protein sequence (wt) from hemagglutinin__InfluenzaA__ACZ96372

SEQ ID NO: 3850 - protein, 566 aa, Artificial Sequence; identical to SEQ ID NO: 3844
  derived and/or modified protein sequence (wt) from hemagglutinin__InfluenzaA__ACZ96382

SEQ ID NO: 3851 - protein, 566 aa, Artificial Sequence; identical to SEQ ID NO: 2656
  derived and/or modified protein sequence (wt) from hemagglutinin__InfluenzaA__ACZ96392

SEQ ID NO: 3852 - protein, 566 aa, Artificial Sequence; identical to SEQ ID NO: 2911
  derived and/or modified protein sequence (wt) from hemagglutinin__InfluenzaA__ACZ96405

SEQ ID NO: 3853 - protein, 566 aa, Artificial Sequence; identical to SEQ ID NO: 2669
  derived and/or modified protein sequence (wt) from hemagglutinin__InfluenzaA__ACZ96415

SEQ ID NO: 3854 - protein, 566 aa, Artificial Sequence; identical to SEQ ID NO: 2669
  derived and/or modified protein sequence (wt) from hemagglutinin__InfluenzaA__ACZ96425

SEQ ID NO: 3855 - protein, 566 aa, Artificial Sequence
  derived and/or modified protein sequence (wt) from hemagglutinin__InfluenzaA__ACZ96435
MKAILVVLLYTFATANADTLCIGYHANNSTDTVDTVLEKNVTVTHSVNLLEDKHNGKLCKLRGVAQLHLGKCNIAGWILGNPECESLSTASSWSYIVETSSSDNGTCYPGDFIDYEELREQLSSVSSFERFEIFPKTSSWPNHDSNKGVTAACPHAGAKSFYKNLIWLVKKGNSYPKLSKSYINDKGKEVLVLWGIHHPSTSADQQSLYQNADAYVFVGTSRYSKKFKPEIAIRPKVRDQEGRMNYYWTLVEPGDKITFEATGNLMVPRYAFAMERNAGSGIIISDTPVHDCNTTCQTPKGAINTSLPFQNIHPITIGKCPKYVKSTKLRLATGLRNVPSIQSRGLFGAIAGFIEGGWTGMVDGWYGYHHQNEQGSGYAADLKSTQNAIDEITNKVNSVIEKMNTQFTAVGKEFNHLEKRIENLNKKVDDGFLDIWTYNAELLVLLENERTLDYHDSNVKNLYEKVRSQLKNNAKEIGNGCFEFYHKCDNTCMESVKNGTYDYPKYSEEAKLNREEIDGVKLESTRIYQILAIYSTVASSLVLVVSLGAISFWMCSNGSLQCRICI

SEQ ID NO: 3856 - protein, 566 aa, Artificial Sequence; identical to SEQ ID NO: 2669
  derived and/or modified protein sequence (wt) from hemagglutinin__InfluenzaA__ACZ96445

SEQ ID NO: 3857 - protein, 566 aa, Artificial Sequence
  derived and/or modified protein sequence (wt) from hemagglutinin__InfluenzaA__ACZ96476
MKAILVVLLYTFATAYADTLCIGYHANNSTDTVDTVLEKNVTVTHSVNLLEDKHNGKLCKLRGVAPLHLGKCNIAGWILGNPECESLSTASSWSYIVETSSSDNGTCYPGDFIDYEELREQLSSVSSFERFEIFPKTSSWPNHDSNKGVTAACPHAGAKSFYKNLIWLVKKGNSYPKLSKSYINDKGKEVLVLWGIHHPSTSADQQSLYQNADAYVFVGTSRYSKKFKPEIAIRPKVRDQEGRMNYYWTLVEPGDKITFEATGNLVVPRYAFAMERNAGSGIIISDTPVHDCNTTCQTPKGAINTSLPFQNIHPITIGKCPKYVKSTKLRLATGLRNVPSIQSRGLFGAIAGFIEGGWTGMVDGWYGYHHQNEQGSGYAADLKSTQNAIDEITNKVNSVIEKMNTQFTAVGKEFNHLEKRIENLNKKVDDGFLDIWTYNAELLVLLENERTLDYHDSNVKNLYEKVRSQLKNNAKEIGNGCFEFYHKCDNTCMESVKNGTYDYPKYSEEAKLNREEIDGVKLESTRIYQILAIYSTVASSLVLVVSLGAISFWMCSNGSLQCRICI

SEQ ID NO: 3858 - protein, 566 aa, Artificial Sequence; identical to SEQ ID NO: 2669
  derived and/or modified protein sequence (wt) from hemagglutinin__InfluenzaA__ACZ96496

SEQ ID NO: 3859 - protein, 566 aa, Artificial Sequence; identical to SEQ ID NO: 2669
  derived and/or modified protein sequence (wt) from hemagglutinin__InfluenzaA__ACZ96506

SEQ ID NO: 3860 - protein, 566 aa, Artificial Sequence; identical to SEQ ID NO: 2669
  derived and/or modified protein sequence (wt) from hemagglutinin__InfluenzaA__ACZ96526

SEQ ID NO: 3861 - protein, 566 aa, Artificial Sequence
  derived and/or modified protein sequence (wt) from hemagglutinin__InfluenzaA__ACZ96536
MKAILVVLLYTFATANADTLCIGYHANNSTDTVDTVLEKNVTVTHSVNILEDKHNGKLCKLKGVAPLHLGKCNIAGWILGNPECESLSTASSWSYIVETSSSDNGTCYPGDFIDYEELREQLSSVSSFERFEIFPKTSSWPNHDSNKGVTAACPHAGAKSFYKNLIWLVKKGNSYPKLSKSYINDKGKEVLVLWGIHHPSTSADQQSLYQNADTYVFVGSSKYSKKFKPEIAIRPKVRDQEGRMNYYWTLVEPGDKITFEATGNLVVPRYAFAMERNAGSGIIISDTPVHDCNTTCQTPKGAINTSLPFQNIHPITIGKCPKHVKSTKLRLATGLRNVPSIQSRGLFGAIAGFIEGGWTGMVDGWYGYHHQNEQGSGYAADLKSTQNAIDEITNKVNSVIEKMNTQFTAVGKEFNHLEKRIENLNKKVDDGFLDIWTYNAELLVLLENERTLDYHDSNVKNLYEKVRSQLKNNAKEIGNGCFEFYHKCDNTCMESVKNGTYDYPKYSEEAKLNREEIDGVKLESTRIYQILAIYSTVASSLVLVVSLGAISFWMCSNGSLQCRICI

SEQ ID NO: 3862 - protein, 566 aa, Artificial Sequence; identical to SEQ ID NO: 2669
  derived and/or modified protein sequence (wt) from hemagglutinin__InfluenzaA__ACZ96549

SEQ ID NO: 3863 - protein, 566 aa, Artificial Sequence
  derived and/or modified protein sequence (wt) from hemagglutinin__InfluenzaA__ACZ96559
MKAILVVLLYTFATANADTLCIGYHANNSTDTVDTVLEKNVTVTHSVNLLEDKHNGKLCKLRGVAPLHLGKCNIAGWILGNPECESLSTASSWSYIVETSSSDNGTCYPGDFINYEELREQLSSVSSFERFEIFPKTSSWPNHDSNKGVTAACPHAGAKSFYKNLIWLVKKGNSYPKLSKSYINDKGKEVLVLWGIHHPSTSADQQSLYQNADAYVFVGTSRYSKKFKPEIAIRPKVRDQEGRMNYYWTLVEPGDKITFEATGNLVVPRYAFAMERNAGSGIIISDTPVHDCNTTCQTPKGAINTSLPFQNIHPITIGKCPKYVKSTKLRLATGLRNVPSIQSRGLFGAIAGFIEGGWTGMVDGWYGYHHQNEQGSGYAADLKSTQNAIDEITNKVNSVIEKMNTQFTAVGKEFNHLEKRIENLNKKVDDGFLDIWTYNAELLVLLENERTLDYHDSNVKNLYEKVRSQLKNNAKEIGNGCFEFYHKCDNTCMESVKNGTYDYPKYSEEAKLNREEIDGVKLESTRIYQILAIYSTVASSLVLVVSLGAISFWMCSNGSLQCRICI

SEQ ID NO: 3864 - protein, 566 aa, Artificial Sequence
  derived and/or modified protein sequence (wt) from hemagglutinin__InfluenzaA__ACZ96569
MEAILVVLLYTFATANADTLCIGYHANNSTDTVDTVLEKNVTVTHSVNLLEDKHNGKLCKLRGVAPLHLGKCNIAGWILGNPECESLSTASSWSYIVETSSSDNGTCYPGDFINYEELREQLSSVSSFERFEIFPKTSSWPNHDSNKGVTAACPHAGAKSFYKNLIWLVKKGNSYPKLSKSYINDKGKEVLVLWGIHHPSTSADQQSLYQNADAYVFVGSSRYSKKFKPEIAIRPKVRDQEGRMNYYWTLVEPGDKITFEATGNLVVPRYAFAMERNAGSGIIISDTPVHDCNTTCQTPKGAINTSLPFHNIHPITIGKCPKYVKSTKLRLATGLRNVPSIQSRGLFGAIAGFIEGGWTGMVDGWYGYHHQNEQGSGYAADLKSTQNAIDEITNKVNSVIEKMNTQFTAVGKEFNHLEKRIENLNKKVDDGFLDIWTYNAELLVLLENERTLDYHDSNVKNLYEKVRSQLKNNAKEIGNGCFEFYHKCDNTCMESVKNGTYDYPKYSEEAKLNREEIDGVKLESTRIYQILAIYSTVASSLVLVVSLGAISFWMCSNGSLQCRICI

SEQ ID NO: 3865 - protein, 566 aa, Artificial Sequence
  derived and/or modified protein sequence (wt) from hemagglutinin__InfluenzaA__ACZ96579
MEAILVVLLYTFATANADTLCIGYHANNSTDTVDTVLEKNVTVTHSVNLLEDKHNGKLCKLRGVAPLHLGKCNIAGWILGNPECESLSTASSWSYIVETSSSDNGTCYPGDFIDYEELREQLSSVSSFERFEIFPKTSSWPNHDSNKGVTAACPHAGAKSFYKNLIWLVKKGNSYPKLSKSYINDKGKEVLVLWGIHHPSSSADQQSLYQNADAYVFVGSSRYSKKFKPEIAIRPKVRDQEGRMNYYWTLVEPGDKITFEATGNLVVPRYAFAMERNAGSGIIISDTPVHDCNTTCQTPKGAINTSLPFHNIHPITIGKCPKYVKSTKLRLATGLRNVPSIQSRGLFGAIAGFIEGGWTGMVDGWYGYHHQNEQGSGYAADLKSTQNAIDEITNKVNSVIEKMNTQFTAVGKEFNHLEKRIENLNKKVDDGFLDIWTYNAELLVLLENERTLDYHDSNVKNLYEKVRSQLKNNAKEIGNGCFEFYHKCDNTCMESVKNGTYDYPKYSEEAKLNREEIDGVKLESTRIYQILAIYSTVASSLVLVVSLGAISFWMCSNGSLQCRICI

SEQ ID NO: 3866 - protein, 566 aa, Artificial Sequence; identical to SEQ ID NO: 2669
  derived and/or modified protein sequence (wt) from hemagglutinin__InfluenzaA__ACZ96589

SEQ ID NO: 3867 - protein, 566 aa, Artificial Sequence
  derived and/or modified protein sequence (wt) from hemagglutinin__InfluenzaA__ACZ96599
MKAILVVLLYTFATANADTLCIGYHANNSTDTVDTVLEKNVTVTHSVNLLEDKHNGKLCKLRGVAPLHLGKCNIAGWILGNPECESLSTASSWSYIVETSSSDNGTCYPGDFIDYEELREQLSSVSSFERFEIFPKTSSWPNHDSNKGVTAACPHAGAKSFYKNLIWLVKKGNSYPKLSKSYINDKGKEVLVLWGIHHPSTSADQQSLYQNADAYVFVGTSRYSKKFKPEIAIRPKVREQEGRMNYYWTLVEPGDKITFEATGNLVVPRYAFAMERNTGSGIIISDTPVHDCNTTCQTPKGAINTSLPFQNIHSITIGKCPKYVKSTKLRLATGLRNVPSIQSRGLFGAIAGFIEGGWTGMVDGWYGYHHQNEQGSGYAADLKSTQNAIDEITNKVNSVIEKMNTQFTAVGKEFNHLEKRIENLNKKVDDGFLDIWTYNAELLVLLENERTLDYHDSNVKNLYEKVRSQLKNNAKEIGNGCFEFYHKCDNTCMESVKNGTYDYPKYSEEAKLNREEIDGVKLESTRIYQILAIYSTVASSLVLVVSLGAISFWMCSNGSLQCRICI

SEQ ID NO: 3868 - protein, 566 aa, Artificial Sequence
  derived and/or modified protein sequence (wt) from hemagglutinin__InfluenzaA__ACZ96609
MKAILVVLLYTFATANADTLCIGYHANNSTDTVDTVLEKNVTVTHSVNLLEDKHNGKLCKLRGVAPLHLGKCNIAGWILGNPECESLSTASSWSYIVETSSSDNGTCYPGDFINYEELREQLSSVSSFERFEIFPKTSSWPNHDSNKGVTAACPHAGAKSFYKNLIWLVKKGNSYPKLSKSYINDKGKEVLVLWGIHHPSTSADQQSLYQNADAYVFVGSSRYSKKFKPEIAIRPKVRDQEGRMNYYWTLVEPGDKITFEATGNLVVPRYAFAMERNAGSGIIISDTPVHDCNTTCQTPKGAINTSLPFQNIHPITIGTCPKYVKSTKLRLATGLRNVPSIQSRGLFGAIAGFIEGGWTGMVDGWYGYHHQNEQGSGYAADLKSTQNAIDEITNKVNSVIEKMNTQFTAVGKEFNHLEKRIENLNKKVDDGFLDIWTYNAELLVLLENERTLDYHDSNVKNLYEKVRSQLKNNAKEIGNGCFEFYHKCDNTCMESVKNGTYDYPKYSEEAKLNREEIDGVKLESTRIYQILAIYSTVASSLVLVVSLGAISFWMCSNGSLQCRICI

SEQ ID NO: 3869 - protein, 566 aa, Artificial Sequence; identical to SEQ ID NO: 2849
  derived and/or modified protein sequence (wt) from hemagglutinin__InfluenzaA__ACZ96619

SEQ ID NO: 3870 - protein, 566 aa, Artificial Sequence; identical to SEQ ID NO: 2849
  derived and/or modified protein sequence (wt) from hemagglutinin__InfluenzaA__ACZ96629

SEQ ID NO: 3871 - protein, 566 aa, Artificial Sequence; identical to SEQ ID NO: 2849
  derived and/or modified protein sequence (wt) from hemagglutinin__InfluenzaA__ACZ96639

SEQ ID NO: 3872 - protein, 566 aa, Artificial Sequence; identical to SEQ ID NO: 2849
  derived and/or modified protein sequence (wt) from hemagglutinin__InfluenzaA__ACZ96649

SEQ ID NO: 3873 - protein, 566 aa, Artificial Sequence; identical to SEQ ID NO: 2849
  derived and/or modified protein sequence (wt) from hemagglutinin__InfluenzaA__ACZ96659

SEQ ID NO: 3874 - protein, 566 aa, Artificial Sequence; identical to SEQ ID NO: 2849
  derived and/or modified protein sequence (wt) from hemagglutinin__InfluenzaA__ACZ96669

SEQ ID NO: 3875 - protein, 566 aa, Artificial Sequence; identical to SEQ ID NO: 2849
  derived and/or modified protein sequence (wt) from hemagglutinin__InfluenzaA__ACZ96679

SEQ ID NO: 3876 - protein, 566 aa, Artificial Sequence; identical to SEQ ID NO: 2849
  derived and/or modified protein sequence (wt) from hemagglutinin__InfluenzaA__ACZ96689

SEQ ID NO: 3877 - protein, 566 aa, Artificial Sequence; identical to SEQ ID NO: 2849
  derived and/or modified protein sequence (wt) from hemagglutinin__InfluenzaA__ACZ96699

SEQ ID NO: 3878 - protein, 566 aa, Artificial Sequence; identical to SEQ ID NO: 2849
  derived and/or modified protein sequence (wt) from hemagglutinin__InfluenzaA__ACZ96719

SEQ ID NO: 3879 - protein, 566 aa, Artificial Sequence; identical to SEQ ID NO: 2849
  derived and/or modified protein sequence (wt) from hemagglutinin__InfluenzaA__ACZ96729

SEQ ID NO: 3880 - protein, 566 aa, Artificial Sequence; identical to SEQ ID NO: 2849
  derived and/or modified protein sequence (wt) from hemagglutinin__InfluenzaA__ACZ96739

SEQ ID NO: 3881 - protein, 566 aa, Artificial Sequence
  derived and/or modified protein sequence (wt) from hemagglutinin__InfluenzaA__ACZ96749
MKTILVVLLYTFATANADTLCIGYHANNSTDTVDTVLEKNVTVTHSVNLLEDKHNGKLCKLRGVAPLHLGKCNIAGWILGNPECESLSTASSWSYIVETSSSDNGTCYPGDFIDYEELREQLSSVSSFERFEIFPKTSSWPNHDSNKGVTAACPHAGAKSFYKNLIWLVKKGNSYPKLSKSYINDKGKEVLVLWGIHHPSTSADQQSLYQNADAYVFVGSSRYSKKFKPEIAIRPKVRDQEGRMNYYWTLVEPGDKITFEATGNLVVPRYAFAMERNAGSGIIISDTPVHDCNTTCQTPKGAINTSLPFQNIHPITIGKCPKYVKSTKLRLATGLRNVPSIQSRGLFGAIAGFIEGGWTGMVDGWYGYHHQNEQGSGYAADLKSTQNAIDEITNKVNSVIEKMNTQFTAVGKEFNHLEKRIENLNKKVDDGFLDIWTYNAELLVLLENERTLDYHDSNVKNLYEKVRSQLKNNAKEIGNGCFEFYHKCDNTCMESVKNGTYDYPKYSEEAKLNREEIDGVKLESTRIYQILAIYSTVASSLVLVVSLGAISFWMCSNGSLQCRICI

SEQ ID NO: 3882 - protein, 566 aa, Artificial Sequence; identical to SEQ ID NO: 2656
  derived and/or modified protein sequence (wt) from hemagglutinin__InfluenzaA__ACZ96759

SEQ ID NO: 3883 - protein, 566 aa, Artificial Sequence; identical to SEQ ID NO: 2656
  derived and/or modified protein sequence (wt) from hemagglutinin__InfluenzaA__ACZ96769

SEQ ID NO: 3884 - protein, 566 aa, Artificial Sequence; identical to SEQ ID NO: 2656
  derived and/or modified protein sequence (wt) from hemagglutinin__InfluenzaA__ACZ96779

SEQ ID NO: 3885 - protein, 566 aa, Artificial Sequence; identical to SEQ ID NO: 2656
  derived and/or modified protein sequence (wt) from hemagglutinin__InfluenzaA__ACZ96789

SEQ ID NO: 3886 - protein, 566 aa, Artificial Sequence
  derived and/or modified protein sequence (wt) from hemagglutinin__InfluenzaA__ACZ96809
MKAILVVLLYTFATANADTLCIGYHANNSTDTVDTVLEKNVTVTHSVNLLEDKHNGKLCKLRGVAPLHLGKCNIAGWILGNPECESLSTASSWSYIVETSSSDNGTCYPGDFIDYEELREQLSSVSSFERFEIFPKTSSWPNHDSNKGVTAACPHAGAKSFYKNLIWLVKKGNSYPKLSKSYINDKGKEVLVLWGIHHPSTNADQQSLYQNADAYVFVGTSRYSKKFKPEIAIRPKVRDQEGRMNYYWTLVEPGDKITFEATGNLVVPRYAFAMERNAGSGIIISDTPVHDCNTTCQTPKGAINTSLPFQNIHPITIGKCPKYVKSTKLRLATGLRNVPSIQSRGLFGAIAGFIEGGWTGMVDGWYGYHHQNEQGSGYAADLKSTQNAIDEITNKVNSVIEKMNTQFAAVGKEFNHLEKRIENLNKKVDDGFLDIWTYNAELLVLLENERTLDYHDSNVKNLYEKVRSQLKNNAKEIGNGCFEFYHKCDNTCMESVKNGTYDYPKYSEEAKLNREEIDGVKLESTRIYQILAIYSTVASSLVLVVSLGAISFWMCSNGSLQCRICI

SEQ ID NO: 3887 - protein, 566 aa, Artificial Sequence; identical to SEQ ID NO: 2656
  derived and/or modified protein sequence (wt) from hemagglutinin__InfluenzaA__ACZ96819

SEQ ID NO: 3888 - protein, 566 aa, Artificial Sequence; identical to SEQ ID NO: 2656
  derived and/or modified protein sequence (wt) from hemagglutinin__InfluenzaA__ACZ96829

SEQ ID NO: 3889 - protein, 566 aa, Artificial Sequence; identical to SEQ ID NO: 2656
  derived and/or modified protein sequence (wt) from hemagglutinin__InfluenzaA__ACZ96839

SEQ ID NO: 3890 - protein, 566 aa, Artificial Sequence; identical to SEQ ID NO: 3809
  derived and/or modified protein sequence (wt) from hemagglutinin__InfluenzaA__ACZ96849

SEQ ID NO: 3891 - protein, 566 aa, Artificial Sequence; identical to SEQ ID NO: 2669
  derived and/or modified protein sequence (wt) from hemagglutinin__InfluenzaA__ACZ96859

SEQ ID NO: 3892 - protein, 566 aa, Artificial Sequence; identical to SEQ ID NO: 2656
  derived and/or modified protein sequence (wt) from hemagglutinin__InfluenzaA__ACZ96869

SEQ ID NO: 3893 - protein, 566 aa, Artificial Sequence; identical to SEQ ID NO: 2656
  derived and/or modified protein sequence (wt) from hemagglutinin__InfluenzaA__ACZ96879

SEQ ID NO: 3894 - protein, 566 aa, Artificial Sequence
  derived and/or modified protein sequence (wt) from hemagglutinin__InfluenzaA__ACZ96899
MKAILVVLLYTFATANADTLCIGYHANNSTDTVDTVLEKNVTVTHSVNLLEDKHNGKLCKLRGVAPLHLGKCNIAGWILGNPECESLSTASSWSYIVETSSSDNGTCYPGDFIDYEELREQLSSVSSFERFEIFPKTSSWPNHDSNKGVTAACPHAGAKSFYKNLIWLVKKGNSYPKLSKSYINDKGKEVLVLWGIHHSSTSADQQSLYQNADAYVFVGSSRYSKKFKPEIAIRPKVRDQEGRMNYYWTLVEPGDKITFEATGNLVVPRYAFAMERNAGSGIIISDTPVHDCNTTCQTPKGAINTSLPFQNIHPITIGKCPKYVKSTKLRLATGLRNVPSIQSRGLFGAIAGFIEGGWTGMVDGWYGYHHQNEQGSGYAADLKSTQNAIDEITNKVNSVIEKMNTQFTAVGKEFNHLEKRIENLNKKVDDGFLDIWTYNAELLVLLENERTLDYHDSNVKNLYEKVRSQLKNNAKEIGNGCFEFYHKCDNTCMESVKNGTYDYPKYSEEAKLNREEIDGVKLESTRIYQILAIYSTVASSLVLVVSLGAISFWMCSNGSLQCRICI

SEQ ID NO: 3895 - protein, 566 aa, Artificial Sequence; identical to SEQ ID NO: 2656
  derived and/or modified protein sequence (wt) from hemagglutinin__InfluenzaA__ACZ96909

SEQ ID NO: 3896 - protein, 566 aa, Artificial Sequence; identical to SEQ ID NO: 2656
  derived and/or modified protein sequence (wt) from hemagglutinin__InfluenzaA__ACZ96919

SEQ ID NO: 3897 - protein, 566 aa, Artificial Sequence; identical to SEQ ID NO: 2656
  derived and/or modified protein sequence (wt) from hemagglutinin__InfluenzaA__ACZ96929

SEQ ID NO: 3898 - protein, 566 aa, Artificial Sequence; identical to SEQ ID NO: 2656
  derived and/or modified protein sequence (wt) from hemagglutinin__InfluenzaA__ACZ96939

SEQ ID NO: 3899 - protein, 566 aa, Artificial Sequence
  derived and/or modified protein sequence (wt) from hemagglutinin__InfluenzaA__ACZ96949
MKAILVVLLYTFATANADTLCIGYHANNSTDTVDTVLEKNVTVTHSVNLLEDKHNGKLCKLRGVAPLHLGKCNIAGWILGNPECESLSTASSWSYIVETSSSDNGTCYPGDFIDYEELREQLSSVSSFERFEIFPKTSSWPNHDSNKGVTAACPHAGAKSFYKNLIWLVKKGNSYPKLSKSYINDKGKEVLVLWGIHHPSTSADQQSLYQNADAYVFVGSSRYSKKFKPEIAIRPKVRDQEGRMNYYWTLVEPGDKITFEATGNLVVPRYAFAMERNAGSGIIISDTPVHDCNTTCQTPKGAINTSLPFQNIHPITIGKCPKYVKSTKLRLATGLRNVPSIQSRGLFGAIAGFIEGGWTGMVDGWYGYHHQNEQGSGYAADLKSTQNAIDEITNKVNSVIEKMNTQFTAVGKEFNHLEKRIENLNKKVDDGFLDIWTYNAEMLVLLENERTLDYHDSNVKNLYEKVRSQLKNNAKEIGNGCFEFYHKCDNTCMESVKNGTYDYPKYSEEAKLNREEIDGVKLESTRIYQILAIYSTVASSLVLVVSLGAISFWMCSNGSLQCRICI

SEQ ID NO: 3900 - protein, 566 aa, Artificial Sequence; identical to SEQ ID NO: 2656
  derived and/or modified protein sequence (wt) from hemagglutinin__InfluenzaA__ACZ97021

SEQ ID NO: 3901 - protein, 566 aa, Artificial Sequence; identical to SEQ ID NO: 3023
  derived and/or modified protein sequence (wt) from hemagglutinin__InfluenzaA__ACZ97343

SEQ ID NO: 3902 - protein, 566 aa, Artificial Sequence; identical to SEQ ID NO: 3023
  derived and/or modified protein sequence (wt) from hemagglutinin__InfluenzaA__ACZ97353

SEQ ID NO: 3903 - protein, 566 aa, Artificial Sequence; identical to SEQ ID NO: 2656
  derived and/or modified protein sequence (wt) from hemagglutinin__InfluenzaA__ACZ97363

SEQ ID NO: 3904 - protein, 566 aa, Artificial Sequence
  derived and/or modified protein sequence (wt) from hemagglutinin__InfluenzaA__ACZ97383
MKAILVVLLYTFATANADTLCIGYHANNSTDTVDTVLEKNVTVTHSVNLLEDKHNGKLCKLRGVAPLHLGKCNIAGWILGNPECESLSTASSWSYIVETSTSDNGTCYPGDFIDYEELREQLSSVSSFERFEIFPKTSSWPNHDSNKGVTAACPHAGAKSFYKNLIWLVKKGNSYPKLSKSYINDKGKEVLVLWGIHHPSTSADQQSLYQNADAYVFVGSSRYSKKFKPEIAIRPKVRDQEGRMNYYWTLVEPGDKITFEATGNLVVPRYAFAMERNAGSGIIISDTPVHDCNTTCQTPKGAINTSLPFQNIHPITIGKCPKYVKSTKLRLATGLRNVPSIQSRGLFGAIAGFIEGGWTGMVDGWYGYHHQNEQGSGYAADLKSTQNAIDEITNKVNSVIEKMNTQFTAVGKEFNHLEKRIENLNKKVDDGFLDIWTYNAELLVLLENERTLDYHDSNVKNLYEKVRSQLKNNAKEIGNGCFEFYHKCDNTCMESVKNGTYDYPKYSEEAKLNREEIDGVKLESTRIYQILAIYSTVASSLVLVVSLGAISFWMCSNGSLQCRICI

SEQ ID NO: 3905 - protein, 566 aa, Artificial Sequence; identical to SEQ ID NO: 2656
  derived and/or modified protein sequence (wt) from hemagglutinin__InfluenzaA__ACZ97393

SEQ ID NO: 3906 - protein, 566 aa, Artificial Sequence
  derived and/or modified protein sequence (wt) from hemagglutinin__InfluenzaA__ACZ98178
MKAILVVLLYTFATANADTLCIGYHANNSTDTVDTVLEKNVTVTHSVNLLEDKHYGKLCKLRGVAPLHLGKCNIAGWILGNPECESLSTASSWSYIVETSSSDNGTCYPGDFIDYEELREQLSSVSSFERFEIFPKTSSWPNHDSNKGVTTACPHAGAKSFYKNLIWLVKKGNSYPKLSKSYINDKGKEVLVLWGIHHPSTSADQQSLYQNADAYVFVGTSRYSKKFKPEIAIRPKVRDQEGRMNYYWTLVEPGDKITFEATGNLVVPRYAFAMERNAGSGIIISDTPVHDCNTTCQTPKGAINTSLPFQNIHPITIGKCPKYVKSTKLRLATGLRNVPSIQSRGLFGAIAGFIEGGWTGMVDGWYGYHHQNEQGSGYAADLKSTQNAIDEITNKVNSVIEKMNTQFTAVGKEFNHLEKRIENLNKKVDDGFLDIWTYNAELLVLLENERTLDYHDSNVKNLYEKVRSQLKNNAKEIGNGCFEFYHKCDNTCMESVKNGTYDYPKYSEEAKLNREEIDGVKLESTRIYQILAIYSTVASSLVLVVSLGAISFWMCSNGSLQCRICI

SEQ ID NO: 3907 - protein, 566 aa, Artificial Sequence; identical to SEQ ID NO: 2656
  derived and/or modified protein sequence (wt) from hemagglutinin__InfluenzaA__ACZ98188

SEQ ID NO: 3908 - protein, 566 aa, Artificial Sequence; identical to SEQ ID NO: 2849
  derived and/or modified protein sequence (wt) from hemagglutinin__InfluenzaA__ACZ98198

SEQ ID NO: 3909 - protein, 566 aa, Artificial Sequence; identical to SEQ ID NO: 2669
  derived and/or modified protein sequence (wt) from hemagglutinin__InfluenzaA__ACZ98208

SEQ ID NO: 3910 - protein, 566 aa, Artificial Sequence; identical to SEQ ID NO: 2669
  derived and/or modified protein sequence (wt) from hemagglutinin__InfluenzaA__ACZ98218

SEQ ID NO: 3911 - protein, 566 aa, Artificial Sequence; identical to SEQ ID NO: 2669
  derived and/or modified protein sequence (wt) from hemagglutinin__InfluenzaA__ACZ98228

SEQ ID NO: 3912 - protein, 566 aa, Artificial Sequence; identical to SEQ ID NO: 2669
  derived and/or modified protein sequence (wt) from hemagglutinin__InfluenzaA__ACZ98238

SEQ ID NO: 3913 - protein, 566 aa, Artificial Sequence; identical to SEQ ID NO: 3298
  derived and/or modified protein sequence (wt) from hemagglutinin__InfluenzaA__ACZ98248

SEQ ID NO: 3914 - protein, 566 aa, Artificial Sequence; identical to SEQ ID NO: 2669
  derived and/or modified protein sequence (wt) from hemagglutinin__InfluenzaA__ACZ98258

SEQ ID NO: 3915 - protein, 566 aa, Artificial Sequence; identical to SEQ ID NO: 2669
  derived and/or modified protein sequence (wt) from hemagglutinin__InfluenzaA__ACZ98268

SEQ ID NO: 3916 - protein, 566 aa, Artificial Sequence; identical to SEQ ID NO: 3809
  derived and/or modified protein sequence (wt) from hemagglutinin__InfluenzaA__ACZ98278

SEQ ID NO: 3917 - protein, 566 aa, Artificial Sequence; identical to SEQ ID NO: 3809
  derived and/or modified protein sequence (wt) from hemagglutinin__InfluenzaA__ACZ98288

SEQ ID NO: 3918 - protein, 566 aa, Artificial Sequence
  derived and/or modified protein sequence (wt) from hemagglutinin__InfluenzaA__ACZ98298
MKAILVVLLYTFATANADTLCIGYHANNSTDTVDTVLEKNVTVTHSVNLLEDKHNGKLCKLRGVAPLHLGKCNIAGWILGNPECESLSTASSWSYIVETSSSDNGTCYPGDFIDYEELREQLSSVSSFEKFEIFPKTSSWPNHDSNKGVTAACPHAGAKSFYKNLIWLVKKGNSYPKLSKSYINDKGKEVLVLWGIHHPSTSADQQSLYQNADAYVFVGSSRYSKKFKPEIAIRPKVRDQEGRMNYYWTLVEPGDKITFEATGNLVVPRYAFAMERNAGSGIIISDTPVHDCNTTCQTPKGAINTSLPFQNIHPITIGKCPKYVKSTKLRLATGLRNVPSIQSRGLFGAIAGFIEGGWTGMVDGWYGYHHQNEQGSGYAADLKSTQNAIDGITNKVNSVIEKMNTQFTAVGKEFNHLEKRIENLNKKVDDGFLDIWTYNAELLVLLENERTLDYHDSNVKNLYEKVRSQLKNNAKEIGNGCFEFYHKCDNTCMESVKNGTYDYPKYSEEAKLNREEIDGVKLESTRIYQILAIYSTVASSLVLVVSLGAISFWMCSNGSLQCRICI

SEQ ID NO: 3919 - protein, 566 aa, Artificial Sequence
  derived and/or modified protein sequence (wt) from hemagglutinin__InfluenzaA__ACZ98318
MKAILVVLLYTFATANADTLCIGYHANNSTDTVDTVLEKNVTVTHSVNLLEDKHNGKLCKLRGVAPLHLGKCNIAGWILGNPECESLSTASSWSYIVETSSSDNGTCYPGDFIDYEELREQLSSVSSFERFEIFPKTSSWPNHDSNKGVTAACPHAGAKSFYKNLIWLVKKGNSYPKLSKSYINDKGKEVLVLWGIHHPSTSADQQSLYQNADAYVFVGTSRYSKKFKPEIAIRPKVRDQEGRMNYYWTLVEPGDKITFEATGNLVVPRYAFAMERNAGSGIIISDTPVHDCNTTCQTPKGAINTSLPFQNIHPITIGKCPKYVKSTKLRLATGLRNVPSIQSRGLFGAIAGFIEGGWTGMVDGWYGYHHQNEQGSGYAADLKSTQNAIDEITNKVNSVIEKMNTQFTAVGKEFNHLEKRIENLNKKVDDGFLDIWTYNAELLVLLENERTLDYHDSNVKNLYEKVRSQLKNNAKEIGNGCFEFYHKCDNTCMESVKNGTYDYPKYSEEAKLNREEIDGVKLESTRIYHILAIYSTVASSLVLVVSLGAISFWMCSNGSLQCRICI

SEQ ID NO: 3920 - protein, 566 aa, Artificial Sequence; identical to SEQ ID NO: 2911
  derived and/or modified protein sequence (wt) from hemagglutinin__InfluenzaA__ACZ98328

SEQ ID NO: 3921 - protein, 566 aa, Artificial Sequence; identical to SEQ ID NO: 2669
  derived and/or modified protein sequence (wt) from hemagglutinin__InfluenzaA__ACZ98338

SEQ ID NO: 3922 - protein, 566 aa, Artificial Sequence; identical to SEQ ID NO: 3809
  derived and/or modified protein sequence (wt) from hemagglutinin__InfluenzaA__ACZ98348

SEQ ID NO: 3923 - protein, 566 aa, Artificial Sequence; identical to SEQ ID NO: 2669
  derived and/or modified protein sequence (wt) from hemagglutinin__InfluenzaA__ACZ98358

SEQ ID NO: 3924 - protein, 566 aa, Artificial Sequence; identical to SEQ ID NO: 2669
  derived and/or modified protein sequence (wt) from hemagglutinin__InfluenzaA__ACZ98368

SEQ ID NO: 3925 - protein, 566 aa, Artificial Sequence; identical to SEQ ID NO: 2911
  derived and/or modified protein sequence (wt) from hemagglutinin__InfluenzaA__ACZ98388

SEQ ID NO: 3926 - protein, 566 aa, Artificial Sequence; identical to SEQ ID NO: 2669
  derived and/or modified protein sequence (wt) from hemagglutinin__InfluenzaA__ACZ98398

SEQ ID NO: 3927 - protein, 566 aa, Artificial Sequence; identical to SEQ ID NO: 2669
  derived and/or modified protein sequence (wt) from hemagglutinin__InfluenzaA__ACZ98408

SEQ ID NO: 3928 - protein, 566 aa, Artificial Sequence; identical to SEQ ID NO: 2849
  derived and/or modified protein sequence (wt) from hemagglutinin__InfluenzaA__ACZ98418

SEQ ID NO: 3929 - protein, 566 aa, Artificial Sequence; identical to SEQ ID NO: 2669
  derived and/or modified protein sequence (wt) from hemagglutinin__InfluenzaA__ACZ98428

SEQ ID NO: 3930 - protein, 566 aa, Artificial Sequence; identical to SEQ ID NO: 2669
  derived and/or modified protein sequence (wt) from hemagglutinin__InfluenzaA__ACZ98438

SEQ ID NO: 3931 - protein, 566 aa, Artificial Sequence; identical to SEQ ID NO: 2669
  derived and/or modified protein sequence (wt) from hemagglutinin__InfluenzaA__ACZ98448

SEQ ID NO: 3932 - protein, 566 aa, Artificial Sequence; identical to SEQ ID NO: 3809
  derived and/or modified protein sequence (wt) from hemagglutinin__InfluenzaA__ACZ98458

SEQ ID NO: 3933 - protein, 566 aa, Artificial Sequence
  derived and/or modified protein sequence (wt) from hemagglutinin__InfluenzaA__ACZ98546
MKAILVVLLYTFATANADTLCIGYHANNSTDTVDTVLEKNVTVTHSVNLLEDKHNGKLCKLRGVAPLHLGKCNIAGWILGNPECESLSTASSWSYIVETSSSDNGTCYPGDFIDYEELREQLSSVSSFERFEIFPKTSSWPNHDPNKGVTAACPHAGAKSFYKNLIWLVKKGNSYPKLSKSYINDKGKEVLVLWGIHHPSTSADQQSLYQNADAYVFVGTSRYSKKFKPEIAIRPKVRDQEGRMNYYWTLVEPGDKITFEATGNLVVPRYAFAMERNAGSGIIISDTPVHDCNTTCQTPKGAINTSLPFQNIHPITIGKCPKYVKSTKLRLTTGLRNVPSIQYRGLFGAITGFIEGGWTGMVDGWYGYHHQNEQGSGYAADLKSTQNAIDEITNKVNSVIEKMNTQFTAVGKEFNHLEKRIENLNKKVDDGFLDIWTYNAELLVLLENERTLDYHDSNVKNLYEKVRSQLKNNAKEIGNGCFEFYHKCDNTCMESVKNGTYDYPKYSEEAKLNREEIDGVKLESTRIYQILAIYSTVASSLVLVVSLGAISFWMCSNGSLQCRICI

SEQ ID NO: 3934 - protein, 566 aa, Artificial Sequence
  derived and/or modified protein sequence (wt) from hemagglutinin__InfluenzaA__ACZ98560
MKAIRVVLLYTFATANADTLCIGYHANNSTDTVDTVLEKNVTVTHSVNLLEDKHNGKLCKLRGVAPLHLGKCNIAGWILGNPECESLSTASSWSYIVETSSSDNGTCYPGDFIDYEELREQLSSVSSFERFEIFPKTSSWPNHDPNKGVTAACPHAGAKSFYKNLIWLVKKGNSYPKLSKSYINDKGKEVLVLWGIHHPSTSADQQSLYQNADAYVFVGTSRYSKKFKPEIAIRPKVRDQEGRMNYYWTLVEPGDKITFEATGNLVVPRYAFAMERNAGSGIIISDTPVHDCNTTCQTPKGAINTSLPFQNIHPITIGKCPKYVKSPKLRLATGMRNVPFIQYRGLFGAITGFIEGGWTGMVDGWYGYHHQNEQGSGYAADLKSTQNAIDEITNKVNSVIEKMNTQFTAVGKEFNHLEKRIENLNKKVDDGFLDIWTYNAELLVLLENERTLDYHDSNVKNLYEKVRSQLKNNAKEIGNGCFEFYHKCDNTCMESVKNGTYDYPKYSEEAKLNREEIDGVKLESTRIYQILAIYSTVASSLVLVVSLGAISFWMCSNGSLQCRICI

SEQ ID NO: 3935 - protein, 566 aa, Artificial Sequence
  derived and/or modified protein sequence (wt) from hemagglutinin__InfluenzaA__ACZ98567
MKAILVVLLYTFATANADTLCIGYHANNSTDTVDTVLEKNVTVTHSVNLLEDKHNGKLCKLRGVAPLHLGKCNIAGWILGNPECESLSTASSWSYIVETSSSDNGTCYPGDFIDYEELREQLSSVSSFERFEIFPKTSSWPNHDPNKGVTAACPHAGAKSFYKNLIWLVKKGNSYPKLSKSYINDKGKEVLVLWGIHHPSTSADQQSLYQNADAYVFVGTSRYSKKFKPEIAIRPKVRDQEGRMNYYWTLVEPGDKITFEATGNLVVPRYAFAMERNAGSGIIISDTPVHDCNTTCQTPKGAINTSLPFQNIHPITIGKCPKYVKSPKLRLASGMRNVPFIQSRGLFGAITGFIEEGWTGMVDGWYGFHHQNEQGSGYAADLKSTQNAIDEITNKVNSVIEKMNTQFTAVGKEFNHLEKRIENLNKKVDDGFLDIWTYNAELLVLLENERTLDYHDSNVKNLYEKVRSQLKNNAKEIGNGCFEFYHKCDNTCMESVKNGTYDYPKYSEEAKLNREEIDGVKLESTRIYQILAIYSTVASSLVLVVSLGAISFWMCSNGSLQCRICI

SEQ ID NO: 3936 - protein, 566 aa, Artificial Sequence; identical to SEQ ID NO: 2656
  derived and/or modified protein sequence (wt) from hemagglutinin__InfluenzaA__ACZ98671

SEQ ID NO: 3937 - protein, 566 aa, Artificial Sequence; identical to SEQ ID NO: 2656
  derived and/or modified protein sequence (wt) from hemagglutinin__InfluenzaA__ACZ98681

SEQ ID NO: 3938 - protein, 566 aa, Artificial Sequence; identical to SEQ ID NO: 2669
  derived and/or modified protein sequence (wt) from hemagglutinin__InfluenzaA__ACZ98691

SEQ ID NO: 3939 - protein, 566 aa, Artificial Sequence
  derived and/or modified protein sequence (wt) from hemagglutinin__InfluenzaA__ADA60799
MKAILVVLLYTFATANADTLCIGYHANNSTDTVDTVLERNVTVTHSVNLLEDKHNGKLCKLRGVAPLHLGKCNIAGWILGNPECESLSTASSWSYIVETSSSDNGTCYPGDFIDYEELREQLSSVSSFERFEIFPKTSSWPNHDSNKGVTAACPHAGAKSFYKNLIWLVKKGNSYPKLSKSYINDKGKEVLVLWGIHHPSTSADQQSLYQNADAYVFVGTSRYSKKFKPEIAIRPKVRDQEGRMNYYWTLVEPGDKITFEATGNLVVPRYAFAMERNAGSGIIISDTPVHDCNTTCQTPKGAINTSLPFQNIHPITIGKCPKYVKSTKLRLATGLRNIPSIQSRGLFGAIAGFIEGGWTGMVDGWYGYHHQNEQGSGYAADLKSTQNAIDEITNKVNSVIEKMNTQFTAVGKEFNHLEKRIENLNKKVDDGFLDIWTYNAELLVLLENERTLDYHDSNVKNLYEKVRSQLKNNAKEIGNGCFEFYHKCDNTCMESVKNGTYDYPKYSEEAKLNREEIDGVKLESTRIYQILAIYSTVASSLVLVVSLGAISFWMCSNGSLQCRICI

SEQ ID NO: 3940 - protein, 566 aa, Artificial Sequence; identical to SEQ ID NO: 3833
  derived and/or modified protein sequence (wt) from hemagglutinin__InfluenzaA__ADA69302

SEQ ID NO: 3941 - protein, 566 aa, Artificial Sequence; identical to SEQ ID NO: 3833
  derived and/or modified protein sequence (wt) from hemagglutinin__InfluenzaA__ADA69312

SEQ ID NO: 3942 - protein, 566 aa, Artificial Sequence; identical to SEQ ID NO: 3833
  derived and/or modified protein sequence (wt) from hemagglutinin__InfluenzaA__ADA69322

SEQ ID NO: 3943 - protein, 566 aa, Artificial Sequence; identical to SEQ ID NO: 3833
  derived and/or modified protein sequence (wt) from hemagglutinin__InfluenzaA__ADA69332

SEQ ID NO: 3944 - protein, 566 aa, Artificial Sequence; identical to SEQ ID NO: 3770
  derived and/or modified protein sequence (wt) from hemagglutinin__InfluenzaA__ADA70329

SEQ ID NO: 3945 - protein, 565 aa, Artificial Sequence
  derived and/or modified protein sequence (wt) from hemagglutinin__InfluenzaA__ADA71150
MKVKLLVLLCTFTATYADTICIGYHANNSTDTVDTVLEKNVTVTHSVNLVENSHNGKLCLLKGIAPLQLGNCSVAGWILGNPECELLISKESWSYIVEKPNPENGTCYPGHFADYEELREQLSSVSSFERFEIFPKESSWPNHTVTGVSASCSHNGESSFYRNLLWLTGKNGLYPNLSKSYANNKEKEVLVLWGVHHPPSISNQKTLYHTENAYVSVVSSHYSRKFTPEIAKRPKVRDQEGRINYYWTLLEPGDTIIFEANGNLIAPRYAFALSRGFGSGIINSNAPMDKCDAKCQTPQGAINSSLPFQNVHPVTIGECPKYVRSAKLRMVTGLRNIPSIQSRGLFGAIAGFIEGGWTGMVDGWYGYHHQNEQGSGYAADQKSTQNAINGITKKVNSVIEKMNTQFTAVGKEFNKLERRMENLNKKVDDGFIDIWTYNAELLVLLENERTLDFHDSNVKNLYEKVKSQLKNNAKEIGNGCFEFYHKCNDECMESVKNGTYDYPKYSEESKLNREKIDGVKLESMGVYQILAIYSTVASSLVLLVSLGAISFWMCSNGSLQCRICI

SEQ ID NO: 3946 - protein, 566 aa, Artificial Sequence
  derived and/or modified protein sequence (wt) from hemagglutinin__InfluenzaA__ADA71152
MKTIIALSYILCLVFAQKLPGNDNSTATLCLGHHAVPNGTIVKTITNDQIEVTNATELVQSSSTGEICDSPHQILDGGNCTLIDALLGDPQCDGFQNKKWDLFVERSKAYSNCYPYDVPDYASLRSLVASSGTLEFNNESFNWTGVTQNGTSSACIRRSNNSFFSRLNWLTHLKFKYPALNVTMPNNEQFDKLYIWGVHHPGTDNDQIFLYAQASGRITVSTKRSQQTVIPNIGSRPRVRNIPSRISIYWTIVKPGDILLINSTGNLIAPRGYFKIRSGKSSIMRSDAPIGKCNSECITPNGSIPNDKPFQNVNRITYGACPRYVKQNTLKLATGMRNVPEKQTRGIFGAIAGFIENGWEGMVDGWYGFRHQNSEGRGQAADLKSTQAAIDQINGKLNRLIGKTNEKFHQIEKEFSEVEGRIQDLEKYVEDTKIDLWSYNAELLVALENQHTIDLTDSEMNKLFEKTKKQLRENAEDMGNGCFKIYHKCDNACIGSIRNGTYDHDVYRDEALNNRFQIKGVELKSGYKDWILWISFAISCFLLCVALLGFIMWACQKGNIRCNICI

SEQ ID NO: 3947 - protein, 565 aa, Artificial Sequence
  derived and/or modified protein sequence (wt) from hemagglutinin__InfluenzaA__ADA71154
MKVKLLVLLCTFTATYADTICIGYHANNSTDTVDTVLEKNVTVTHSVNLLENSHNGKLCLLKGIAPLQLGNCSVAGWILGNSECELLISKESWSYIVEKPNPENGTCYFGHFADYEELREQFGSVSSFERFEIFPKESSWPNHTVTGVSASCSHNGESSFYRNLLWLTGKNGLYPNLSKSYANNKEKEVLVLWGVHHPPSINDQKTLYHTENAYVSVVSSHYSRKFTPEIAKRPKVRDQEGRINYYWTLLEPRDTIIFEANGNLIAPRYAFALSRGFGSGIINSNAPMDKCDAKCQTPQGAINSSLPFQNVHPVTIGECPKYVRSAKLRMVTGLRNIPSIQSRGLFGAIAGFIEGGWTGMVDGWYGYHHQNEQGSGYAADQKSTQNAINGITNKVNSVIEKMNTQFTAVGKEFNKLERRMENLNKKVDDGFIDIWTYNAELLVLLENERTLDFHDSNVKNLYEKVKSQLKNNAKEIGNGCFEFYHKCNDECMESVKNGTYDYPKYSEESKLNREKIDGVKLESMGVYQILAIYSTVASSLVLLVSLGAISFWMCSNGSLQCRICI

SEQ ID NO: 3948 - protein, 565 aa, Artificial Sequence
  derived and/or modified protein sequence (wt) from hemagglutinin__InfluenzaA__ADA71158
MKVKLLVLLCTFTATYADTICIGYHANNSTDTVDTVLEKNVTVTHSVNLLENSHNGKLCLLKGIAPLQLGNCSVAGWILGNPECELLISKETWSYIVEKPNPENGTCYPGHFADYEELREQLSSVSSFERFEIFPKESSWPNHTVTGVSASCSHNGESSFYRNLLWLTGKNGLYPNLSKSYANNKEKEVLVLWGVHHPPSINDQRTLYHTENAYVSVVSSHYSRKFTPEIAKRPKVRDQEGRINYYWTLLEPRDTIIFEANGNLIAPRYAFALSRGFGSGIINSNAPMDKCDAKCQTPQGAINSSLPFQNVHPVTIGECPKYVRSAKLRMVTGLRNTPSIQSRGLFGAIAGFIEGGWTGMVDGWYGYHHQNEQGSGYAADQKSTQNAINGITNKVNSVIEKMNTQFTAVGKEFNKLESLMDILNKKVDDGFIDIWTYNAELLVLLENERTLDFHDSNVKNLYEKVKSQLKNNAKEIGNGCFEFYHKCNDECMESVKNGTYDYPKYSEESKLNREKIDGVKLESMGVYQILAIYSTVASSLVLLVSLGAISFWMCSNGSLQCRICI

SEQ ID NO: 3949 - protein, 566 aa, Artificial Sequence; identical to SEQ ID NO: 2434
  derived and/or modified protein sequence (wt) from hemagglutinin__InfluenzaA__ADA71162

SEQ ID NO: 3950 - protein, 565 aa, Artificial Sequence
  derived and/or modified protein sequence (wt) from hemagglutinin__InfluenzaA__ADA71164
MKVKLLVLLCTFTATYADTICIGYHANNSTDTVDTVLEKNVTVTHSVNLLENSHNGKLCLLKGIAPLQLGNCSVAGWILGNPECELLVSKESWSYIVEKPNPENGTCYPGHFADYEELREQLSSVSSFERFEIFPKESSWPNHTVTGASASCSHNGENSFYRNLLWLTGKNGLYPNLSKSYANNKEKEVLVLWGVHHPPSIADQKTLYHTENAYVSVVSSHYSRKFTPEIAKRPKVRDQEGRIHYYWTLLEPGDTIIFEANGNLIAPRYAFALSRGFGSGIINSNAPMDKCDATCQTPQGAINSSLPFQNVHPVTIGECPKYVRSAKLRMVTGLRNIPSIQSRGLFGAIAGFIEGGWTGMVDGWYGYHHQNEQGSGYAADQKSTQNAINGITNKVNSVIEKMNTQFTAVGKEFNKLERRMENLNKKVDDGFIDIWTYNAELLVLLENERTLDFHDSNVKNLYEKVISQLKINAKDLGYGCFEFYHKCNDECMESVKNGTYDYPKYSEESKLNREKIDGVKLESMGVYQILAIYSTVASSLVLLVSLGAISFWMCSNGSLQCRICI

SEQ ID NO: 3951 - protein, 565 aa, Artificial Sequence
  derived and/or modified protein sequence (wt) from hemagglutinin__InfluenzaA__ADA71168
MKVKLLVLLCTFTATYADTICIGYHANNSTDTVDTVLEKNVTVTHSVNLLEDNHNGKLCLLKGKAPLQLGNCSVAGWILGNPECGLLISKESWSYIVERPNPENGTCYPGHFADYEELREQLSSVSSFERFEIFPKESSWPNHTVTGVSASCSHNGESSFYKNLLWLTGKNGLYPNLSKSYANNKEKEVLVLWGVHHPPNIGVQMTLYHKENAYVSVVSSHYSRKFTPEIVKRPKVRDQEGRINYYWTLLEPGDTIIFEANGNLIAPRYAFALSRGFGSGIINSNAPMDECDAKCQTPQGAINSSLPFQNVHPVTIGECPKYVRSAKLRMVTGLRNIPSIQSRGLFGAIAGFIEGGWTGMVDGWYGYHHQNEQGSGYAADQKSTQNAINGITNKVNSVIEKMNTQFTAVGKEFNKLERRMENLNKKVDDGFIDIWTYNAELLVLLENERTLDFHDSNVKNLYEKVKSQLKNNAKEIGNGCFEFYHKCNDECMESVKNGTYDYPKYSEESKLNREKIDGVKLESMGVYQILAIYSTVASSLVLLVSLGAISFWMCSNGSLQCRICI

SEQ ID NO: 3952 - protein, 565 aa, Artificial Sequence
  derived and/or modified protein sequence (wt) from hemagglutinin__InfluenzaA__ADA71170
MKVKLLVLLCTFTATYADTICIGYHANNSTDTVDTVLEKNGTVTPSGNLVENSPNGKLCLLKGITPLQLGKCSVAGWILGNPKWELLVSKESWSYIGKKPNPENGTCYPGHFPYYEELREQLSSVSSFERFEIFPKESSWPNHTVTGASASCSHNGENSFYRNLLWLTGKNGLYPNLSKSYANNKEKEVLVLWGVHHPPNIADQKTLYHTENAYVSVVSSHYSRKFTPEIAKRPKVRDQEGRINYYWTLLEPGDTIIFEANGNLIAPRYAFALSRGFGSGIINSNAPMDKCDAKCQTPQGAINSSLPFQNVHPVTIGECPKYVRSAKLRMVTGLRNIPSIQSRGLFGAIAGFIEGGWTGMVDGWYGYHHQNEQGSGYAADQKSTQNAINGITNKVNSVIEKMNTQFTAVGKEFNKLERRMENLNKKVDDGFIDIWTYNAELLVLLENERTLDFHDSNVKNLYEKVKSQLKNNAKEIGNGCFEFYHKCNDECMESVKNGTYDYPKYSEESKLNREKIDGVKLESMGVYQILAIYSTVASSLVLLVSLGAISFWMCSNGSLQCRICI

SEQ ID NO: 3953 - protein, 566 aa, Artificial Sequence
  derived and/or modified protein sequence (wt) from hemagglutinin__InfluenzaA__ADA71172
MKTIIALSYILCLVFTQKLPGNDNSTATLCLGHHAVPNGTIVKTITNDQIEVTNATELVQSSSTGEICDSPHQILDGENCTLIDALLGDPQCDGFQNKKWDLFVERSKAYSNCYPYDVPDYASLRSLVASSGTLEFNNESFNWTGVTQNGTSSACIRRSNNSFFSRLNWLTHLKFKYPALNVTMPNNEQFDKLYIWGVHHPGTDNDQIFLYAQASGRITVSTKRSQQTVIPNIGSRPRVRNIPSRISIYWTIVKPGDILLINSTGNLIAPRGYFKIRSGKSSIMRSDAPIGKCNSECITPNGSIPNDKPFQNVNRITYGACPRYVKQNTLKLATGMRNVPEKQTRGIFGAIAGFIENGWEGMVDGWYGFRHQNSEGRGQAADLKSTQAAIDQINGKLNRLIGKTNEKFHQIEKEFSEVEGRIQDLEKYVEDTKIDLWSYNAELLVALENQHTIDLTDSEMNKLFEKTKKQLRENAEDMGNGCFKIYHKCDNACIGSIRNGTYDHDVYRDEALNNRFQIKGVELKSGYKDWILWISFAISCFLLCVALLGFIMWACQKGNIRCNICI

SEQ ID NO: 3954 - protein, 565 aa, Artificial Sequence
  derived and/or modified protein sequence (wt) from hemagglutinin__InfluenzaA__ADA71176
MKVKLLVLLCTFTATYADTICIGYHANNSTDTVDTVLEKNVTVTHSVNLLENSHNGKLCLLKGIAPLQLGNCSVAGWILGNPECELLISKESWSYIVEKPNPENGTCYPGHFADYEELREQLSSVSSFERFEIFPKESSWPNHTVTGASASCSHNGENSFYRNLLWLTGKNGLYPNLSKSYANNKEKEVLVLWGVHHPPNIANQKTLYHTENAYVSVVSSHYSRKFTPEIAKRPKVRDQEGRINYYWTLLEPGDTIIFEANGNLIAPRYAFALSRGFGSGIINSNAPMDKCDATCQTPQGAINSSLPFQNVHPVTIGECPKYVRSAKLRMVTGLRNIPSIQSRGLFGAIAGFIEGGWTGMVDGWYGYHHQNEQGSGYAADQKSTQNAINGITNKVNSVIEKMNTQFTAVGKEFNKLERRMENLNKKVDDGFIDIWTYNAELLVLLENERTLDFHDSNVKNLYEKVKSQLKNNAKEIGNGCFEFYHKCNDECMESVKNGTYDYPKYSEESKLNREKIDGVKLESMGVYQILAIYSTVASSLVLLVSLGAISFWMCSNGSLQCRICI

SEQ ID NO: 3955 - protein, 566 aa, Artificial Sequence; identical to SEQ ID NO: 3770
  derived and/or modified protein sequence (wt) from hemagglutinin__InfluenzaA__ADA71181

SEQ ID NO: 3956 - protein, 566 aa, Artificial Sequence; identical to SEQ ID NO: 3770
  derived and/or modified protein sequence (wt) from hemagglutinin__InfluenzaA__ADA71191

SEQ ID NO: 3957 - protein, 566 aa, Artificial Sequence
  derived and/or modified protein sequence (wt) from hemagglutinin__InfluenzaA__ADA79587
MKAILVVLLYTFATANADTLCIGYHANNSTDTVDTVLEKNVTVTHSVNLLEDKHNGKLCKLRGVAPLHLGKCNIAGWILGNPECESLSTANSWSYIVETSSSDNGTCYPGDFIDYEELREQLSSVSSFERFEIFPKTSSWPNHDSNKGVTAACPHAGAKSFYKNLIWLVKKGNSYPKLSKSYINDKGKEVLVLWGIHHPSTSADQQSLYQNADAYVFVGTSRYSKKFKPEIAIRPKVRDQEGRMNYYWTLVEPGDKITFEATGNLVVPRYAFAMERNAGSGIIISDTPVHDCNTTCQTPKGAINTSLPFQNIHPITIGKCPKYVKSTKLRLATGLRNIPSIQSRGLFGAIAGFIEGGWTGMVDGWYGYHHQNEQGSGYAADLKSTQNAIDEITNKVNSVIEKMNTQFTAVGKEFNHLEKRIENLNKKVDDGFLDIWTYNAELLVLLENERTLDYHDSNVKNLYEKVRSQLKNNAKEIGNGCFEFYHKCDNTCMESVKNGTYDYPKYSEEAKLNREEIDGVKLESTRIYQILAIYSTVASSLVLVVSLGAISFWMCSNGSLQCRICI

SEQ ID NO: 3958 - protein, 566 aa, Artificial Sequence
  derived and/or modified protein sequence (wt) from hemagglutinin__InfluenzaA__ADA79607
MKAILVVLLYTFATANADTLCIGYHANNSTDTVDTVLEKNVTVTHSVNLLEDKHNGKLCKLRGVAPLHLGKCNIAGWILGNPECESLSTASSWSYIVETSSSDNGTCYPGDFIDYEELREQLSSVSSFERFEIFPKTSSWPNHDSNKGVTAACPHAGAKGFYKNLIWLVKKGNSYPKLSKSYINDKGKEVLVLWGIHHPSTSADQQSLYQNADAYVFVGTSRYSKKFKPEIAIRPKVRDQEGRMNYYWTLVEPGDKITFEATGNLVVPRYAFAMERNAGSGIIISDTPVHDCNTTCQTPKGAINTSLPFQNIHPITIGKCPKYVKSTKLRLATGLRNVPSIQSRGLFGAIAGFIEGGWTGMVDGWYGYHHQNEQGSGYAADLKSTQNAIDEITNKVNSVIEKMNTQFTAVGKEFNHLEKRIENLNKKVDDGFLDIWTYNAELLVLLENERTLDYHDSNVKNLYEKVRSQLKNNAKEIGNGCFEFYHKCDNTCMESVKNGTYDYPKYSEEAKLNREEIDGVKLESTRIYQILAIYSTVASSLVLVVSLGAISFWMCSNGSLQCRICI

SEQ ID NO: 3959 - protein, 566 aa, Artificial Sequence
  derived and/or modified protein sequence (wt) from hemagglutinin__InfluenzaA__ADA83043
MKAILVVLLYTFATANADTLCIGYHANNSTDTVDTVLEKNVTVTHSVNLLEDKHNGKLCKLRGVAPLHLGKCNIAGWILGNPECESLSTASSWSYIVETSSSDNGTCYPGDFIDYEELREQLSSVSSFERFEIFPKTSSWPNHDSNKGVTAACPHAGAKSFYKNLIWLVKKGNSYPKLSKSYINDKGKEVLVLWGIHHPSTSADQQSLYQNADAYVFVGTSRYSKKFKPEIAIRPKVREREGRMNYYWTLVEPGDKITFEATGNLVVPRYAFAMERNAGSGIIISDTPVHDCNTTCQTPKGAINTSLPFQNIHPITIGKCPKYVKSTKLRLATGLRNVPSIQSRGLFGAIAGFIEGGWTGMVDGWYGYHHQNEQGSGYAADLKSTQNAIDEITNKVNSVIEKMNTQFTAVGKEFNHLEKRIENLNKKVDDGFLDIWTYNAELLVLLENERTLDYHDSNVKNLYEKVRSQLKNNAKEIGNGCFEFYHKCDNTCMESVKNGTYDYPKYSEEAKLNREEIDGVKLESTRIYQILAIYSTVASSLVLVVSLGAISFWMCSNGSLQCRICI

SEQ ID NO: 3960 - protein, 566 aa, Artificial Sequence
  derived and/or modified protein sequence (wt) from hemagglutinin__InfluenzaA__ADA83044
MKAILVVLLYTFATANADTLCIGYHANNSTDTVDTVLEKNVTVTHSVNLLEDKHNGKLCKLRGVAPLHLGKCNIAGWILGNPECESLSTASSWSYIVETSSSNNGTCYPGDFIDYEELREQLSSVSSFERFEIFPKTSSWPNHDSNKGVTAACPHAGAKSFYKNLIWLVKKENSYPKLNKSYINDKGKEVLVLWGIHHPSTSADQQSLYQNADAYVFVGTSRYSKKFKPEIAIRPKVRGQEGRMNYYWTLVEPGDKITFEATGNLVVPRYAFAMERNAGSGIIISDTPVHDCNTTCQTPKGAINTSLPFQNIHPITIGKCPKYVKSTKLRLATGLRNVPSIQSRGLFGAIAGFIEGGWTGMVDGWYGYHHQNEQGSGYAADLKSTQNAIDEITNKVNSVIEKMNTQFTAVGKEFNHLEKRIENLNKKVDDGFLDIWTYNAELLVLLENERTLDYHDSDVKNLYEKVRSQLKNNAKEIGNGCFEFYHKCDNTCMESVKNGTYDYPKYSEEAKLNREEIDGVKLESTRIYQILAIYSTVASSLVLVVSLGAISFWMCSNGSLQCRICI

SEQ ID NO: 3961 - protein, 566 aa, Artificial Sequence; identical to SEQ ID NO: 2669
  derived and/or modified protein sequence (wt) from hemagglutinin__InfluenzaA__ADA83580

SEQ ID NO: 3962 - protein, 566 aa, Artificial Sequence; identical to SEQ ID NO: 2669
  derived and/or modified protein sequence (wt) from hemagglutinin__InfluenzaA__ADA83587

SEQ ID NO: 3963 - protein, 566 aa, Artificial Sequence
  derived and/or modified protein sequence (wt) from hemagglutinin__InfluenzaA__ADA83591
MKAILVVLLYTFATANADTLCIGYHANNSTDTVDTVLEKNVTVTHSVNLLEDKHNGKLCKLRGVAPLHLGKCNIAGWILGNPECESLSTASSWSYIVETSSSDNGTCYPGDFIDYEELREQLSSVSSFERFEIFPKTSSWPNHDSNKGVTAACPHAGAKSFYKNLIWLVKKGNSYPKLSKSYINDKGKEVLVLWGIHHPSTSADQQSLYQNADAYVFVGTSRYSKKFKPEISIRPKVRDQEGRMNYYWTLVEPGDKITFEATGNLVVPRYAFAMERNAGSGIIISDTPVHDCNTTCQTPKGAINTSLPFQNIHPITIGKCPKYVKSTKLRLATGLRNVPSIQSRGLFGAIAGFIEGGWTGMVDGWYGYHHQNEQGSGYAADLKSTQNAIDEITNKVNSVIEKMNTQFTAVGKEFNHLEKRIENLNKKVDDGFLDIWTYNAELLVLLENERTLDYHDSNVKNLYEKVRSQLKNNAKEIGNGCFEFYHKCDNTCMESVKNGTYDYPKYSEEAKLNREEIDGVKLESTRIYQILAIYSTVASSLVLVVSLGAISFWMCSNGSLQCRICI

SEQ ID NO: 3964 - protein, 566 aa, Artificial Sequence; identical to SEQ ID NO: 3414
  derived and/or modified protein sequence (wt) from hemagglutinin__InfluenzaA__ADA83595

SEQ ID NO: 3965 - protein, 566 aa, Artificial Sequence; identical to SEQ ID NO: 2669
  derived and/or modified protein sequence (wt) from hemagglutinin__InfluenzaA__ADA83599

SEQ ID NO: 3966 - protein, 566 aa, Artificial Sequence; identical to SEQ ID NO: 2669
  derived and/or modified protein sequence (wt) from hemagglutinin__InfluenzaA__ADA83603

SEQ ID NO: 3967 - protein, 566 aa, Artificial Sequence; identical to SEQ ID NO: 2669
  derived and/or modified protein sequence (wt) from hemagglutinin__InfluenzaA__ADA83611

SEQ ID NO: 3968 - protein, 566 aa, Artificial Sequence
  derived and/or modified protein sequence (wt) from hemagglutinin__InfluenzaA__ADA83615
MKAILVVLLYTFATANADTLCIGYHANNSTDTVDTVLEKNVTVTHSVNLLEDKHNGKLCKLRGVAPLHLGKCNIAGWILGNPECESLSTASSWSYIVETSSSDNGTCYPGDFIDYEELREQLSSVSSFERFEIFPKTSSWPNHDSNKGVTAACPHAGAKSFYKNLIWLVKKGNSYPKLSKSYINDKGKEVLVLWGIHHPSTSADQQSLYQNADAYVFVGTSRYSKKFKPEIAIRPKVRDQEGRMNYYWTLVEPGDKITFEATGNLVVPRYAFAMERNAGSGIIISDTPVHDCNTTCQTPKGAINTSLPFQNIHPITIGKCPKYVKSTKLRLATGLRNVPSIQSRGLFGAIAGFIEGGWTGMVDGWYGYHHQNEQGSGYAADLKSTQNAIDEITNKVNSVIEKMNTQFTAVGKEFNHLEKRIENLNKKVDDGFLDIWTYNAELLVLLENERTLDYHDLNVKNLYEKVRSQLKNNAKEIGNGCFEFYHKCDNTCMESVKNGTYDYPKYSEEAKLNREEIDGVKLESTRIYQILAIYSTVASSLVLVVSLGAISFWMCSNGSLQCRICI

SEQ ID NO: 3969 - protein, 566 aa, Artificial Sequence
  derived and/or modified protein sequence (wt) from hemagglutinin__InfluenzaA__ADA83622
MKAILVVLLYTFATANADTLCIGYHANNSTDTVDTVLEKNVTVTHSVNLLEDKHNGKLCKLRGVAPLHLGKCNIAGWILGNPECESLSTASSWSYIVETSSSDNGTCYPGDFIDYEELREQLSSVSSFERFEIFPKTSSWPNHDSNKGVTAACPHAGAKSFYKNLIWLVKKGNSYPKLSKSYINDKGKEVLVLWGIHHPSTSADQQRLYQNADAYVFVGTSRYSKKLKPEIAIRPKVRDQEGRMNYYWTLVEPGDKITFEATGNLVVPRYAFAMERNAGSGIIISDTPVHDCNTTCQTPKGAINTSLPFQNIHPITIGKCPKYVKSTKLRLATGLRNVPSIQSRGLFGAIAGFIEGGWTGMVDGWYGYHHQNEQGSGYAADLKSTQNAIDEITNKVNSVIEKMNTQFTAVGKEFNHLEKRIENLNKKVDDGFLDIWTYNAELLVLLENERTLDYHDSNVKNLYEKVRSQLKNNAKEIGNGCFEFYHKCDNTCMESVKNGTYDYPKYSEEAKLNREEIDGVKLESTRIYQILAIYSTVASSLVLVVSLGAISFWMCSNGSLQCRICI

SEQ ID NO: 3970 - protein, 566 aa, Artificial Sequence; identical to SEQ ID NO: 2669
  derived and/or modified protein sequence (wt) from hemagglutinin__InfluenzaA__ADA83633

SEQ ID NO: 3971 - protein, 566 aa, Artificial Sequence; identical to SEQ ID NO: 2669
  derived and/or modified protein sequence (wt) from hemagglutinin__InfluenzaA__ADA83637

SEQ ID NO: 3972 - protein, 566 aa, Artificial Sequence; identical to SEQ ID NO: 2669
  derived and/or modified protein sequence (wt) from hemagglutinin__InfluenzaA__ADA83641

SEQ ID NO: 3973 - protein, 566 aa, Artificial Sequence; identical to SEQ ID NO: 2669
  derived and/or modified protein sequence (wt) from hemagglutinin__InfluenzaA__ADA83645

SEQ ID NO: 3974 - protein, 566 aa, Artificial Sequence; identical to SEQ ID NO: 2669
  derived and/or modified protein sequence (wt) from hemagglutinin__InfluenzaA__ADA83648

SEQ ID NO: 3975 - protein, 566 aa, Artificial Sequence; identical to SEQ ID NO: 2669
  derived and/or modified protein sequence (wt) from hemagglutinin__InfluenzaA__ADA83656

SEQ ID NO: 3976 - protein, 566 aa, Artificial Sequence; identical to SEQ ID NO: 2669
  derived and/or modified protein sequence (wt) from hemagglutinin__InfluenzaA__ADA83660

SEQ ID NO: 3977 - protein, 566 aa, Artificial Sequence
  derived and/or modified protein sequence (wt) from hemagglutinin__InfluenzaA__ADA83664
MKAILVVLLYTFATANADTLCIGYHANNSTDTVDTVLEKNVTVTHSVNLLEDKHNGKLCKLRGVAPLHLGKCNIAGWILGNPECESLSTASSWSYIVETSSSDNGTCYPGDFIDYEELREQLSSVSSFERFEIFPKTSSWPNHDSNKGVTAACPHAGAKSFYKNLIWLVKKGNSYPKLSKSYINDKGKEVLVLWGIHHPSTSADQQSLYQNADAYVFVGTSRYSKKFKPETAIRPKVRDQEGRMNYYWTLVEPGDKITFEATGNLVVPRYAFAMERNAGSGIIISDTPVHDCNTTCQTPKGAINTSLPFQNIHPITIGKCPKYVKSTKLRLATGLRNVPSIQSRGLFGAIAGFIEGGWTGMVDGWYGYHHQNEQGSGYAADLKSTQNAIDEITNKVNSVIEKMNTQFTAVGKEFNHLEKRIENLNKKVDDGFLDIWTYNAELLVLLENERTLDYHDSNVKNLYEKVRSQLKNNAKEIGNGCFEFYHKCDNTCMESVKNGTYDYPKYSEEAKLNREEIDGVKLESTRIYQILAIYSTVASSLVLVVSLGAISFWMCSNGSLQCRICI

SEQ ID NO: 3978 - protein, 566 aa, Artificial Sequence
  derived and/or modified protein sequence (wt) from hemagglutinin__InfluenzaA__ADA83668
MKAILVVLLYTFATANADTLCIGYHANNSTDTVDTVLEKNVTVTHSVNLLEDKHNGKLCKLRGVAPLHLGKCNIAGWILGNPECGSLSTASSWSYIVETSSSDNGTCYPGDFIDYEELREQLSSVSSFERFEIFPKTSSWPNHDSNKGVTAACPHAGAKSFYKNLIWLVKKGNSYPKLSKSYINDKGKEVLVLWGIHHPSTSADQQSLYQNADAYVFVGTSRYSKKFKPEIAIRPKVRDQEGRMNYYWTLVEPGDKITFEATGNLVVPRYAFAMERNAGSGIIISDTPVHDCNTTCQTPKGAINTSLPFQNIHPITIGKCPKYVKSTKLRLATGLRNVPSIQSRGLFGAIAGFIEGGWTGMVDGWYGYHHQNEQGSGYAADLKSTQNAIDEITNKVNSVIEKMNTQFTAVGKEFNHLEKRIENLNKKVDDGFLDIWTYNAELLVLLENERTLDYHDSNVKNLYEKVRSQLKNNAKEIGNGCFEFYHKCDNTCMESVKNGTYDYPKYSEEAKLNREEIDGVKLESTRIYQILAIYSTVASSLVLVVSLGAISFWMCSNGSLQCRICI

SEQ ID NO: 3979 - protein, 566 aa, Artificial Sequence; identical to SEQ ID NO: 2669
  derived and/or modified protein sequence (wt) from hemagglutinin__InfluenzaA__ADA83672

SEQ ID NO: 3980 - protein, 566 aa, Artificial Sequence; identical to SEQ ID NO: 2669
  derived and/or modified protein sequence (wt) from hemagglutinin__InfluenzaA__ADA83676

SEQ ID NO: 3981 - protein, 566 aa, Artificial Sequence; identical to SEQ ID NO: 2669
  derived and/or modified protein sequence (wt) from hemagglutinin__InfluenzaA__ADA83680

SEQ ID NO: 3982 - protein, 566 aa, Artificial Sequence
  derived and/or modified protein sequence (wt) from hemagglutinin__InfluenzaA__ADA86068
MKAILVVLLYTFATANADTLCIGYHANNSTDTVDTVLEKNVTVTHSVDLLEDKHNGKLCKLRGVAPLHLGKCNIAGWILGNPECESLSTASSWSYIVETSSSDNGTCYPGDFIDYEELREQLSSVSSFERFEIFPKTSSWPNHDSNKGVTAACPHAGAKSFYKNLIWLVKKGNSYPKLSKSYINDKGKEVLVLWGIHHPSTSADQQSLYQNADAYVFVGTSRYSKKFKPEIAIRPKVRNQEGRMNYYWTLVEPGDKITFEATGNLVVPRYAFAMERNAGSGIIISDTPVHDCNTTCQTPKGAINTSLPFQNIHPITIGKCPKYVKSIKLRLATGLRNVPSIQSRGLFGAIAGFIEGGWTGMVDGWYGYHHQNEQGSGYAADLKSTQNAIDEITNKVNSVIEKMNTQFTAVGKEFNHLEKRIENLNKKVDDGFLDIWTYNAELLVLLENERTLDYHDSNVKNLYEKVRSQLKNNAKEIGNGCFEFYHKCDNTCMESVKNGTYDYPKYSEEAKLNREEIDGVKLESTRIYQILAIYSTVASSLVLVVSLGAISFWMCSNGSLQCRICI

SEQ ID NO: 3983 - protein, 566 aa, Artificial Sequence
  derived and/or modified protein sequence (wt) from hemagglutinin__InfluenzaA__ADA86086
MKAILVVLLYTFATANADTLCIGYHANNSTDTVDTVLEKNVTVTHSVNLLEDKHNGKLCKLRGVAPLHLGKCNIAGWILGNPECESLSTASSWSYIVETSSSDNGTCYPGDFIDYEELREQLSSVSSFERFEIFPKTSSWPNHDSNKGVTAACPHAGAKSFYKNLIWLVKKGNSYPKLSKSYINDKGKEVLVLWGIHHPSTNADQQSLYQNADAYVFVGTSRYSKKFKPEIAIRPKVRDQEGRMNYYWTLVEPGDKITFEATGNLVVPRYAFAMERNAGSGIIISDTPVHDCNTTCQTPKGAINTSLPFQNIHPITIGKCPKYVKSTKLRLATGLRNVPSIQSRGLFGAIAGFIEGGWTGMVDGWYGYHHQNEQGSGYAADLKSTQNAIDEITNKVNSVIEKMNTQFTAVGKEFNHLEKRIENLNKKVDDGFLDIWTYNAELLVLLENERTLDYHDSNVKNLYEKVRSQLKNNAKEIGNGCFEFYHKCDNTCMESVKNGTYDYPKYSEEAKLNREEIDGVKLESTRIYQILAIYSTVASSLVLVVSLGAISFWMCSNGSLQCRICI

SEQ ID NO: 3984 - protein, 566 aa, Artificial Sequence
  derived and/or modified protein sequence (wt) from hemagglutinin__InfluenzaA__ADA86087
MKAILVVLLYTFATANADTLCIGYHANNSTDTVDTVLEKNVTVTHSVNLLEDKHNGKLCKLRGVAPLHLGKCNIAGWILGNPECESLSTASSWSYIVETFSSDNGTCYPGDFIDYEELREQLSSVSSFERFEIFPKTSSWPNHDSNKGVTAACPHAGAKSFYKNLIWLVKKGNSYPKLSKSYINDKGKEVLVLWGIHHPSTSADQQSLYQNADAYVFVGTSRYSKKFKPEIAIRPKVRDQEGRMNYYWTLVEPGDKITFEATGNLVVPRYAFAMERNAGSGIIISDTPVHDCNTTCQTPKGALNTSLPFQNIHPITIGKCPKYVKSTKLRLATGLRNVPSIQSRGLFGAIAGFIEGGWTGMVDGWYGYHHQNEQGSGYAADLKSTQNAIDEITNKVNSVIEKMNTQFTAVGKEFNHLEKRIENLNKKVDDGFLDIWTYNAELLVLLENERTLDYHDSNVKNLYEKVRNQLKNNAKEIGNGCFEFYHKCDNTCMESVKNGTYDYPKYSEEAKLNREEIDGVKLESTRIYQILAIYSTVASSLVLVVSLGAISFWMCSNGSLQCRICI

SEQ ID NO: 3985 - protein, 566 aa, Artificial Sequence; identical to SEQ ID NO: 3467
  derived and/or modified protein sequence (wt) from hemagglutinin__InfluenzaA__ADA86088

SEQ ID NO: 3986 - protein, 566 aa, Artificial Sequence
  derived and/or modified protein sequence (wt) from hemagglutinin__InfluenzaA__ADB03603
MKAILIVLLYTFATAHADTLCIGYHANNSTDTVDTVLEKNVTVTHSVNLLEDKHNGKLCKLRGVAPLHLGKCNIAGWILGNPECESLSTASSWSYIVETSSSDNGTCYPGDFIDYEELREQLSSVSSFERFEIFPKTSSWPNHDSNKGVTAACPHAGAKSFYKNLIWLVKKGNSYPKLSKSYINDKGKEVLVLWGIHHPSTSADQQSLYQNADAYVFVGTSRYSKKFKPEIAIRPKVRDQEGRMDYYWTLVEPGDKITFEATGNLVVPRYAFAMERNAGSGIIISDTPVHDCNTTCQTPKGAINTSLPFQNIHPITIGKCPKYVKSTKLRLATGLRNVPSIQSRGLFGAIAGFIEGGWTGMVDGWYGYHHQNEQGSGYAADLKSTQNAIDEITNKVNSVIEKMNTQFTAVGKEFNHLEKRIENLNKKVDDGFLDIWTYNAELLVLLENERTLDYHDSNVKNLYEKVRSQLKNNAKEIGNGCFEFYHKCDNTCMESVKNGTYDYPKYSEEAKLNREEIDGVKLESTRIYQILAIYSTVASSLVLVVSLGAISFWMCSNGSLQCRICI

SEQ ID NO: 3987 - protein, 566 aa, Artificial Sequence; identical to SEQ ID NO: 2656
  derived and/or modified protein sequence (wt) from hemagglutinin__InfluenzaA__ADB03604

SEQ ID NO: 3988 - protein, 566 aa, Artificial Sequence
  derived and/or modified protein sequence (wt) from hemagglutinin__InfluenzaA__ADB03605
MKAILVVLLYTFATANADTLCIGYHANNSTDTVDTVLEKNVTVTHSVNLLEDKHNGKLCKLRGVAPLHLGKCNIAGWILGNPECESLSTASSWSYIVETSSSDNGTCYPGDFIDYEELREQLSSVSSFERFEIFPKTSSWPNHDSNKGVTAACPHAGAKSFYKNLIWLVKKGNSYPKLSKSYINDKGKEVLVLWGIHHPSTSADQQSLYQNADAYVFVGTSRYSKKFKPEIAIRPKVREQEGRMDYYWTLVEPGDKITFEATGNLVVPRYAFAMERNAGSGIIISDTPVHDCNTTCQTPKGAINTSLPFQNIHPITIGKCPKYVKSTKLRLATGLRNVPSIQSRGLFGAIAGFIEGGWTGMVDGWYGYHHQNEQGSGYAADLKSTQNAIDEITNKVNSVIEKMNTQFTAVGKEFNHLEKRIENLNKKVDDGFLDIWTYNAELLVLLENERTLDYHDSNVKNLYEKVRSQLKNNAKEIGNGCFEFYHKCDNTCMESVKNGTYDYPKYSEEAKLNREEIDGVKLESTRIYQILAIYSTVASSLVLVVSLGAISFWMCSNGSLQCRICI

SEQ ID NO: 3989 - protein, 566 aa, Artificial Sequence; identical to SEQ ID NO: 2669
  derived and/or modified protein sequence (wt) from hemagglutinin__InfluenzaA__ADB03607

SEQ ID NO: 3990 - protein, 566 aa, Artificial Sequence; identical to SEQ ID NO: 3022
  derived and/or modified protein sequence (wt) from hemagglutinin__InfluenzaA__ADB03609

SEQ ID NO: 3991 - protein, 566 aa, Artificial Sequence; identical to SEQ ID NO: 2669
  derived and/or modified protein sequence (wt) from hemagglutinin__InfluenzaA__ADB03611

SEQ ID NO: 3992 - protein, 566 aa, Artificial Sequence
  derived and/or modified protein sequence (wt) from hemagglutinin__InfluenzaA__ADB03612
MKAILVVLLYTFATANADTLCIGYHANNSTDTVDTVLEKNVTVTHSVNLLEDKHNGKLCKLRGVAPLHLGKCNIAGWILGNPECESLSTASSWSYIVETSSSDNGTCYPGDFIDYEELREQLSSVSSFERFEIFPKTSSWPNHDSNKGVTAACPHAGAKSFYKNLIWLVKKGNSYPKLSKSYINDKGKEVLVLWGIHHPSTSADQQSLYQNADAYVFVGTSRYSKKFKPEIAIRPKVRDQEGRMNYYWTLVEPGDKITFEATGNLVVPRYAFAMERNAGSGIIISDTPVHDCNTTCQTPKGAINTSLPFQNIHPITIGKCPKYVKSTKLRLATGLRNVPFIQSRGLFGAIAGFIEGGWTGMVDGWYGYHHQNEQGSGYAADLKSTQNAIDEITNKVNSVIEKMNTQFTAVGKEFNHLEKRIENLNKKVDDGFLDIWTYNAELLVLLENERTLDYHDSNVKNLYEKVRSQLKNNAKEIGNGCFEFYHKCDNTCMESVKNGTYDYPKYSEEAKLNREEIDGVKLESTRIYQILAIYSTVASSLVLVVSLGAISFWMCSNGSLQCRICI

SEQ ID NO: 3993 - protein, 566 aa, Artificial Sequence; identical to SEQ ID NO: 2669
  derived and/or modified protein sequence (wt) from hemagglutinin__InfluenzaA__ADB03614

SEQ ID NO: 3994 - protein, 566 aa, Artificial Sequence
  derived and/or modified protein sequence (wt) from hemagglutinin__InfluenzaA__ADB03617
MKAILVVLLYTFATANADTLCIGYHANNSTDTVDTVLEKNVTVTHSVNLLEDKHNGKLCKLRGVAPLHLGKCNIAGWILGNPECESLSTASSWSYIVETSSSDNGTCYPGDFIDYEELREQLSSVSSFERFEIFPKTSSWPNHDSNKGVTAACPHAGAKSFYKNLIWLVKKGNSYPKLSKSYINDKGKEVLVLWGIHHPSTSADQQSLYQNADAYVFVGTSRYSKKFKPEIAIRPKVREQEGRMNYYWTLVEPGDKITFEATGNLVVPRYAFAMERNAGSGIIISDTPVHDCNTTCQTPKGAINTSLPFQNIHPITIGKCPKYVKSTKLRLATGLRNVPSIQSRGLFGAIAGFIEGGWTGMVDGWYGYHHQNEQGSGYAADLKSTQNAIDEITNKVNSVIEKMNTQFTAVGKEFNHLEKRIENLNKKVDDGFLDIWTYNAELLVLLENERTLDYHDSNVKNLYEKVRSQLKNNAKEIGNGCFEFYHKCDNTCMESVKNGTYDYPKYSKEAKLNREEIDGVKLESTRIYQILAIYSTVASSLVLVVSLGAISFWMCSNGSLQCRICI

SEQ ID NO: 3995 - protein, 566 aa, Artificial Sequence; identical to SEQ ID NO: 3022
  derived and/or modified protein sequence (wt) from hemagglutinin__InfluenzaA__ADB03619

SEQ ID NO: 3996 - protein, 566 aa, Artificial Sequence
  derived and/or modified protein sequence (wt) from hemagglutinin__InfluenzaA__ADB03620
MKAILVVLLYTFATANADTLCIGYHANNSTDTVDTVLEKNVTVTHSVNLLEGKHNGKLCKLRGVAPLHLGKCNIAGWILGNPECESLSTASSWSYIVETSSSDNGTCYPGDFIDYEELREQLSSVSSFERFEIVPKTSSWPNHDSNKGVTAACPHAGAKSFYKNLIWLVKKGNSYPKLSKSYINDKGKEVLVLWGIHHPSTSADQQSLYQNADAYVFVGTSRYSKKFKPEIAIRPKVRDQEGRMNYYWTLVEPGDKITFEATGNLVVPRYAFAMERNAGSGIIISDTPVHDCNTTCQTPKGAINTSLPFQNIHPITIGKCPKYVKSTKLRLATGLRNVPSIQSRGLFGAIAGFIEGGWTGMVDGWYGYHHQNEQGSGYAADLKSTQNAIDEITNKVNSVIEKMNTQFTAVGKEFNHLEKRIENLNKKVDDGFLDIWTYNAELLVLLENERTLDYHDSNVKNLYEKVRSQLKNNAKEIGNGCFEFYHKCDNTCMESVKNGTYDYPKYSEEAKLNREEIDGVKLESTRIYQILAIYSTVASSLVLVVSLGAISFWMCSNGSLQCRICI

SEQ ID NO: 3997 - protein, 566 aa, Artificial Sequence
  derived and/or modified protein sequence (wt) from hemagglutinin__InfluenzaA__ADB03622
MKAILVVLLYTFATANADTLCIGYHANNSTDTVDTVLEKNVTVTHSVNLLEDKHNGKLCKLRGVAPLHLGKCNIAGWILGNPECESLSTASSWSYIVETSSSDNGTCYPGDFINYEELREQLSSVSSFERFEIFPKTSSWPNHDSNKGVTAACPHAGAKSFYKNLIWLVKKGNSYPKLSKSYINDKGKEVLVLWGIHHPSTSADQQSLYQNADAYVFVGTSRYSKKFKPEIAIRPKVRDQEGRMNYYWTLVEPGDKITFEATGNLVVPRYAFAMERNAGSGIIISDTPVHDCNTTCQTPNGAINTSLPFQNIHPITIGKCPKYVKSTKLRLATGLRNVPSIQSRGLFGAIAGFIEGGWTGMVDGWYGYHHQNEQGSGYAADLKSTQNAIDKITNKVNSVIEKMNTQFTAVGKEFNHLEKRIENLNKKVDDGFLDIWTYNAELLVLLENERTLDYHDSNVKNLYEKVRSQLKNNAKEIGNGCFEFYHKCDNTCMESVKNGTYDYPKYSEEAKLNREEIDGVKLESTRIYQILAIYSTVASSLVLVVSLGAISFWMCSNGSLQCRICI

SEQ ID NO: 3998 - protein, 566 aa, Artificial Sequence; identical to SEQ ID NO: 3997
  derived and/or modified protein sequence (wt) from hemagglutinin__InfluenzaA__ADB03623

SEQ ID NO: 3999 - protein, 566 aa, Artificial Sequence
  derived and/or modified protein sequence (wt) from hemagglutinin__InfluenzaA__ADB03628
MEAILVVLLYTFATANADTLCIGYHANNSTDTVDTVLEKNVTVTHSVNLLEDKHNGKLCKLRGVAPLHLGKCNIAGWILGNPECESLSTASSWSYIVETSSSDNGTCYPGDFIDYEELREQLSSVSSFERFEIFPKTSSWPNHDSNKGVTAACPHAGAKSFYKNLIWLVKKGNSYPKLSKSYINDKGKEVLVLWGIHHPSTSADQQSLYQNADAYVFVGTSRYSKKFKPEIAIRPKVRDQEGRMNYYWTLVEPGDKITFEATGNLVVPRYAFAMERNAGSGIIISDTPVHDCNTTCQTPKGAINTSLPFHNIHPITIGKCPKYVKSTKLRLATGLRNVPSIQSRGLFGAIAGFIEGGWTGMVDGWYGYHHQNEQGSGYAADLKSTQNAIDEITNKVNSVIEKMNTQFTAVGKEFNHLEKRIENLNKKVDDGFLDIWTYNAELLVLLENERTLDYHDSNVKNLYEKVRSQLKNNAKEIGNGCFEFYHKCDNTCMESVKNGTYDYPKYSEEAKLNREEIDGVKLESTRIYQILAIYSTVASSLVLVVSLGAISFWMCSNGSLQCRICI

SEQ ID NO: 4000 - protein, 566 aa, Artificial Sequence
  derived and/or modified protein sequence (wt) from hemagglutinin__InfluenzaA__ADB03629
MKAILVVLLYTFTTANADTLCIGYHANNSTDTVDTVLEKNVTVTHSVNLLEDKHNGKLCKLRGVAPLHLGKCNIAGWILGNPECESLSTASSWSYIVETSSSDNGTCYPGDFIDYEELREQLSSVSSFERFEIFPKTSSWPNHDSNKGVTAACPHAGAKSFYKNLIWLVKKGNSYPKLSKSYINDKGKEVLVLWGIHHPSTSADQQSLYQNADAYVFVGTSRYSKKFKPEIAIRPKVREQEGRMNYYWTLVEPGDKITFEATGNLVVPRYAFAMERNAGSGIIISDTPVHDCNTTCQTPKGAINTSLPFQNIHSITIGKCPKYVKSTKLRLATGLRNVPSIQSRGLFGAIAGFIEGGWTGMVDGWYGFHHQNEQGSGYAADLKSTQNAIDEITNKVNSVIEKMNTQFTAVGKEFNHLEKRIENLNKKVDDGFLDIWTYNAELLVLLENERTLDYHDSNVKNLYEKVRSQLKNNAKEIGNGCFEFYHKCDNTCMESVKNGTYDYPKYSEEAKLNREEIDGVKLESTRIYQILAIYSTVASSLVLVVSLGAISFWMCSNGSLQCRICI

SEQ ID NO: 4001 - protein, 566 aa, Artificial Sequence
  derived and/or modified protein sequence (wt) from hemagglutinin__InfluenzaA__ADB03630
MKAILVVLLYTFATANADTLCIGYHANNSTDTVDTVLEKNVTVTHSVNLLEDKHNGKLCKLRGVAPLHLGKCNIAGWILGNPECESLSTASSWSYIVETSSSDNGTCYPGDFIDYEELREQLSSVSSFERFEIFPKTSSWPNHDSNKGVTAACPHAGAKSFYKNLIWLVKKGNSYPKLSKSYINDKGKEVLVLWGIHHPSTSADQQSLYQNADAYVFVGTSRYSKKFKPEIAIRPKVRDQEGRMNYHWTLVEPGDKITFEATGNLVVPRYAFAMERNAGSGIIISDTPVHDCNTTCQTPKGAINTSLPFQNIHPITIGKCPKYVKSTKLRLATGLRNVPSIQSRGLFGAIAGFIEGGWTGMVDGWYGYHHQNEQGSGYAADLKSTQNAIDEITNKVNSVIEKMNTQFTAVGKEFNHLEKRIENLNKKVDDGFLDIWTYNAELLVLLENERTLDYHDSNVKNLYEKVRSQLKNNAKEIGNGCFEFYHKCDNTCMESVKNGTYDYPKYSKEAKLNREEIDGVKLESTRIYQILAIYSTVASSLVLVVSLGAISFWMCSNGSLQCRICI

SEQ ID NO: 4002 - protein, 566 aa, Artificial Sequence; identical to SEQ ID NO: 3414
  derived and/or modified protein sequence (wt) from hemagglutinin__InfluenzaA__ADB25319

SEQ ID NO: 4003 - protein, 566 aa, Artificial Sequence; identical to SEQ ID NO: 2669
  derived and/or modified protein sequence (wt) from hemagglutinin__InfluenzaA__ADB25321

SEQ ID NO: 4004 - protein, 566 aa, Artificial Sequence
  derived and/or modified protein sequence (wt) from hemagglutinin__InfluenzaA__ADB27970
MKAILVVLLYTFATANADTLCIGYHANNSTDTVDTVLEKNVTVTHSVNLLEDKHNGKLCKLRGVAPLHLGKCNIAGWILGNPECESLSTASSWSYIVETSSSDNGTCYPGDFIDYEELREQLSSVSSFERFEIFPKTSSWPNHDSNKGVTAACPHAGAKSFYKNLIWLVKKGNSYPKLSKSYINDKGKEVLVLWGIHHPSTSADQQSLYQNADAYVFVGTSRYSKKFKPEIAIRPKVRDQEGRMNYYWTLVEPGDKITFEATGNLVVPRYAFAMERDAGSGIIISDTPVHDCNTTCQTPKGAINTSLPFQNIHPITIGKCPKYVKSTKLRLATGLRNVPSIQSRGLFGAIAGFIEGGWTGMVDGWYGYHHQNEQGSGYAADLKSTQNAIDEITNKVNSVIEKMNTQFTAVGKEFNHLEKRIENLNKKVDDGFLDIWTYNAELLVLLENERTLDYHDSNVKNLYEKVRSQLKNNAKEIGNGCFEFYHKCDNTCMESVKNGTYDYPKYSEEAKLNREEIDGVKLESTRIYQILAIYSTVASSLVLVVSLGAISFWMCSNGSLQCRICI

SEQ ID NO: 4005 - protein, 566 aa, Artificial Sequence; identical to SEQ ID NO: 2669
  derived and/or modified protein sequence (wt) from hemagglutinin__InfluenzaA__ADB27980

SEQ ID NO: 4006 - protein, 566 aa, Artificial Sequence; identical to SEQ ID NO: 2669
  derived and/or modified protein sequence (wt) from hemagglutinin__InfluenzaA__ADB54352

SEQ ID NO: 4007 - protein, 566 aa, Artificial Sequence; identical to SEQ ID NO: 2669
  derived and/or modified protein sequence (wt) from hemagglutinin__InfluenzaA__ADB54355

SEQ ID NO: 4008 - protein, 565 aa, Artificial Sequence
  derived and/or modified protein sequence (wt) from hemagglutinin__InfluenzaA__ADB65926
MKVKLLVLLCTFTATYADTICIGYHANNSTDTVDTVLEKNVTVTHSVNLLEDKHNGKLCLLKGKAPLQLGNCSVAGWILGNPECGLLISKESWSYIVERPNPENGTCYPGHFADYEELREQLSSVSSFERFEIFPKGSSWPNHTVTGVSASCSHNGESSFYKNLLWLTGKNGLYPNLSKSYANNKEKEVLVLWGVHHPPNIGDQMTLYHKENAYVSVVSSHYSRKFTPEIAKRPKVRDQEGRINYYWTLLEPGDTIIFEANGNLIAPRYAFALSRGFGSGIINSNAPMDECDAKCQTPQGAINSSLPFQNVHPVTIGECPKYVRSAKLRMVTGLRNIPSIQSRGLFGAIAGFIEGGWTGMVDGWYGYHHQNEQGSGYAADQKSTQNAINGITNKVNSVIEKMNTQFTAVGKEFNKLERRMENLNKKVDDGFIDVWTYNAELLVLLENERTLDFHDSNVKNLYEKVKNQLKNNAKEMGNGCFEFYHKCNDECMESVKNGTYDYPKYSEESKLSREKIDGVKLESMGVYQILAIYSTVASSLVLLVSLGAIGFWMCSNGSLQCRICI

SEQ ID NO: 4009 - protein, 565 aa, Artificial Sequence
  derived and/or modified protein sequence (wt) from hemagglutinin__InfluenzaA__ADB80153
MKVKLLALLCTFTATYADTICIGYHANNSTDTVDTVLEKNVTVTHSVNLLEDNHNGKLCLLKGIAPLQLGNCSVAGWILGNPECELLISKESWSYIVEKPNPENGTCYPGHFADYEELREQLSSVSSFERFEIFPKESSWPNHTVTGVSASCSHNGESSFYKNLLWLTGKNGLYPNLSKSFANNKEKEVLVLWGVHHPPNIGDQMTLYHKENAYVSVVSSHYSRKFTPEIAKRPKVRDQEGRINYYWTLLEPGDTIIFEANGNLIAPRYAFALSRGFGSGIINSNAPMDECDAKCQTPQGAINSSLPFQNVHPVTIGECPKYVRSTKLRMVTGLRNIPSIQSRGLFGAIAGFIEGGWTGMVDGWYGYHHQNEQGSGYAADQKSTQNAINGITNKVNSVIEKMNTQFTAVGKEFNKLERRMENLNKKVDDGFIDVWTYNAELLVLLENERTLDFHDSNVKNLYEKVKNQLKNNAKEIGNGCFEFYHKCNDECMESVKNGTYDYPKYSEESKLSREKIDGVKLESMGVYQILAIYSTVASSLVLLVSLGAISFWMCSNGSLQCRICI

SEQ ID NO: 4010 - protein, 566 aa, Artificial Sequence; identical to SEQ ID NO: 3770
  derived and/or modified protein sequence (wt) from hemagglutinin__InfluenzaA__ADB81399

SEQ ID NO: 4011 - protein, 566 aa, Artificial Sequence; identical to SEQ ID NO: 3770
  derived and/or modified protein sequence (wt) from hemagglutinin__InfluenzaA__ADB81409

SEQ ID NO: 4012 - protein, 566 aa, Artificial Sequence
  derived and/or modified protein sequence (wt) from hemagglutinin__InfluenzaA__ADB81419
MKAILVVLLYTFATANADTLCIGYHANNSTDTVDTVLEKNVTVTHSVNLLEDKHNGKLCKLRGVAPLHLGKCNIAGWILGNPECESLSTASSWSYIVETSSSDNGTCYPGDFIDYEELREQLSSVSSFERFEIFPKTSSWPNHDSNKGVTAACPHAGAKSFYKNLIWLVKKGNSYPKLSKSYINDKGKEVLVLWGIHHPSTSADQQSLYQNADAYVFVGTSRYSKKFKPEIAIRPKVRDQEGRMNYYWTLVEPGDKITFEATGNLVVPRYAFAMERNAGSGIIISDTPVHDCNTTCQTPKGAINTSLPFQNIHPITIGKCPKYVKSTKLRLATGLRNIPSIQSRGLFGAIAGFIEGGWTGMVDGWYGYHHQNEQGSGYAADLKSTQNAIDEITNKVNSVIEKMNTQFTAVGKEFNHLEKRIENLNKKVDDGFLDIWTYNAELLVLLENERTLDYHDSNVKNLYEKVRSQLKNNAKEIGNGCFEFYHKCDNTCMESVKNGTYDYPEYSEEAKLNREEIDGVKLESTRIYQILAIYSTVASSLVLVVSLGAISFWMCSNGSLQCRICI

SEQ ID NO: 4013 - protein, 566 aa, Artificial Sequence; identical to SEQ ID NO: 3829
  derived and/or modified protein sequence (wt) from hemagglutinin__InfluenzaA__ADB81429

SEQ ID NO: 4014 - protein, 566 aa, Artificial Sequence
  derived and/or modified protein sequence (wt) from hemagglutinin__InfluenzaA__ADB81439
MKAILVVLLYTFATANADTLCIGYHANNSTDTVDTVLEKNVTVTHSVNLLEDKHNGKLCKLRGVAPLHLGKCNIAGWILGNPECESLSTASSWSYIVETSSSDNGTCYPGDFIDYEELREQLSSVSSFERFEIFPKTSSWPNHDPNKGVTAACPHAGAKSFYKNLIWLVKKGNSYPKLSKSYINDKGKEVLVLWGIHHPSTSADQQSLYQNADAYVFVGTSRYSKKFKPEIAIRPKVRNQEGRMNYYWTLVEPGDKITFEATGNLVVPRYAFAMERNAGSGIIISDTPVHDCNTTCQTPKGAINTSLPFQNIHPITIGKCPKYVKSTKLRLATGLRNVPSIQSRGLFGAIAGFIEGGWTGMVDGWYGYHHQNEQGSGYAADLKSTQNAIDEITNKVNSVIEKMNTQFTAVGKEFNHLEKRIENLNKKVDDGFLDIWTYNAELLVLLENERTLDYHDSNVKNLYEKVRSQLKNNAKEIGNGCFEFYHKCDNTCMESVKNGTYDYPKYSEEAKLNREEIDGVKLESTRIYQILAIYSTVASSLVLVVSLGAISFWMCSNGSLQCRICI

SEQ ID NO: 4015 - protein, 566 aa, Artificial Sequence
  derived and/or modified protein sequence (wt) from hemagglutinin__InfluenzaA__ADB81449
MKAILVVLLYTFATANADTLCIGYHANNSTDTVDTVLEKNVTVTHSVNLLEDKHNGKLCKLRGVAPLHLGKCNIAGWILGNPECESLSTASSWSYIVETSSSDNGTCYPGDFIDYEELREQLSSVSSFERFEIFPKTSSWPNHDSNKGVTAACPHAGAKSFYKNLIWLVKKGNSYPKLNKSYINDKGKEVLVLWGIHHPSTSADQQSLYQNADAYVFVGTSRYSKKFKPEIAIRPKVRDQEGRMNYYWTLVEPGDKITFEATGNLVVPRYAFAMERNAGSGIIISDTPVHDCNTTCQTPKGAINTSLPFQNIHPITIGKCPKYVKSTKLRLATGLRNVPSIQSRGLFGAIAGFIEGGWTGMVDGWYGYHHQNEQGSGYAADLKSTQNAIDEITNKVNSVIEKMNTQFTAVGKEFNHLEKRIENLNKKVDDGFLDIWTYNAELLVLLENERTLDYHDSNVKNLYEKVRSQLKNNAKEIGNGCFEFYHKCDNTCMESVKNGTYDYPKYSEEAKLNREEIDGVKLESTRIYQILAIYSTVASSLVLVVSLGAISFWMCSNGSLQCRICI

SEQ ID NO: 4016 - protein, 566 aa, Artificial Sequence
  derived and/or modified protein sequence (wt) from hemagglutinin__InfluenzaA__ADB81459
MKAILVVLLYTFATANADTLCIGYHANNSTDTVDTVLEKNVTVTHSVNLLEDKHNGKLCKLRGVAPLHLGKCNIAGWILGNPECESLSTASSWSYIVETSSSDNGTCYPGDFIDYEELREQLSSVSSFERFEIFPKTSSWPNHDSNKGVTAACPHAGAKSFYKNLIWLVKKGNSYPKLNKSYINDKGKEVLVLWGIHHPSTSADQQSLYQNADAYVFVGTSRYSKKFKPEIAIRPKVRDQEGRMNYYWTLVEPGDKITFEATGNLVVPRYAFAMERNGGSGIIISDTPVHDCNTTCQTPKGAINTSLPFQNIHPITIGKCPKYVKSTKLRLATGLRNVPSIQSRGLFGAIAGFIEGGWTGMVDGWYGYHHQNEQGSGYAADLKSTQNAIDEITNKVNSVIEKMNTQFTAVGKEFNHLEKRIENLNKKVDDGFLDIWTYNAELLVLLENERTLDYHDSNVKNLYEKVRSQLKNNAKEIGNGCFEFYHKCDNTCMESVKNGTYDYPKYSEEAKLNREEIDGVKLESTRIYQILAIYSTVASSLVLVVSLGAISFWMCSNGSLQCRICI

SEQ ID NO: 4017 - protein, 566 aa, Artificial Sequence
  derived and/or modified protein sequence (wt) from hemagglutinin__InfluenzaA__ADB82655
MKAILLVLLCTLAAANADTLCIGYHANNSTDTVDTVLEKNVTVTHSVNLLEDRHNGKLCNLRGKAPLHLGKCNIAGWLLGNPECELLFAVNSWSYIVETSNSDNGTCYPGDFTSYEELREQLSSVSSFERFEIFPKASSWPNHETNRGVTAACPYAGTNGFYRNLIWLVKKENSYPKLRKSYVNNKKKEVLVLWGIHHPPTNTDQQSLYQNADAYVFVGSSKYSRKFKPEIAERPKVRGQAGRMNYYWTLIEPGDTITFEATGNLVAPRYAFAMNRGPVSGIITSDAPVHDCNATCQTPKGAINTSLPFQNIHPITIGECPKYVKSTRLRMATGLRNIPSIQSRGLFGAIAGFIEGGWTGMIDGWYGYHHQNGQGSGYAADQKSTQNAIDRITNKVNSVIEKMNIQFTAVGKEFNHLERRIENLNKKVDDGFLDVWTYNAELLVLLENERTLDFHDSNVKTLYEKVKTQLRNNAKEIGNGCFEFYHKCDDTCMESIKNGTYNYPKYSEESKLNREEIDGVKLESTRIYQILAIYSTAASSLVLLVSLGAIGFWMCSNGSLQCRICI

SEQ ID NO: 4018 - protein, 566 aa, Artificial Sequence
  derived and/or modified protein sequence (wt) from hemagglutinin__InfluenzaA__ADB82656
MKAILLVLQCILTAANADTLCIGYHANNSTDTVDTVLEKNVTVTHSVNLLEDRHNGKLCKLKGIAPLHLGKCNIAGWLLGNPECELLFKANSWSYIVETSYSDNGTCYPGDFTNYEELREQLSSVSSFERFEMFPKANSWPNHETNKGVTAACPYAGANSFYRNLIWLVKKGNSYPRLSKSYVNNKKKEVLVLWGIHHPSTSTDQQSLYQNADAYVFVSSSTYNKRFKPEIGTRPKVRDQSGRMNYYWTIVEPGDTITFEATGNLVAPRYAFAMKRDSGSGIIMSDTPVHDCNTTCQTPKGAINTSLPFQNVHPVTIGECPKYVKSTKLRMATGLRNIPSIQSRGLFGAIAGFIEGGWTGMIDGWYGYHHQNEQGSGYAADRKSTQNAIDGITNKVNSIIEKMNIQFTAVGKEFSHLEKRVENLNKKVDDGFLDVWTYNAELLVLLENERTLDYHDSNVKNLYEKVRSQLKNNAKEIGNGCFEFYHKCDDSCMESIKNETYDYSKYSEESRLNREKIDGVKLESTQIYQILAIYSTVASSLVLLVSLGAISFWMCSNGSLQCRICI

SEQ ID NO: 4019 - protein, 566 aa, Artificial Sequence
  derived and/or modified protein sequence (wt) from hemagglutinin__InfluenzaA__ADB82944
MKAILVVLLYTFATANADTLCIGYHANNSTDTVDTVLEKNVTVTHSVNLLEDKHNGKLCKLRGVAPLHLGKCNIAGWILGNPECESLSTASSWSYIVETSSSDNGTCYPGDFIDYEELREQLSSVSSFERFEIFPKTSSWPNHDPNKGVTAACPHAGAKSFYKNLIWLVKKGNSYPKLSKSYINDKGKEVLVLWGIHHPSTSADQQSLYQNADAYVFVGTSRYSKKFKPEIAIRPKVRDQEGRMNYYWTLVEPGDKITFEATGNLVVPRYAFAMERNAGSGIIISDTPVHDCNTTCQTPKGAINTSLPFQNIHPITIGKCPKYVKSTKLRLATGLRNIPSIQSRGLFGAIAGFIEGGWTGMVDGWYGYHHQNEQGSGYAADLKSTQNAIDEITNKVNSVIEKMNTQFTAVGKEFNHLEKRIENLNKKVDDGFLDIWTYNAELLVLLENERTLDYHDSNVKNLYEKVRSQLKNNAKEIGNGCFEFYHKCDNTCMESVKNGTYDYPKYSEEAKLNREEIDGVKLESTRIYQILAIYSTVASSLVLVVSLGAISFWMCSNGSLQCRICI

SEQ ID NO: 4020 - protein, 566 aa, Artificial Sequence
  derived and/or modified protein sequence (wt) from hemagglutinin__InfluenzaA__ADB82950
MKAILVVLLYTFATANADTLCIGYHANNSTDTVDTVLEKNVTVTHSVNLLEDKHNGKLCKLRGVAPLHLGKCNIAGWILGNPECESLSTASSWSYIVETSSSDNGTCYPGDFIDYEELREQLSSVSSFERFEIFPKTSSWPNHDSNKGVTAACPHAGAKSFYKNLIWLVKKGNSYPKLSKSYINDKGKEVLVLWGIHHPSTSADQQSLYQNADAYVFVGTSRYSKKFEPEIAIRPKVRDQEGRMNYYWTLVEPGDKITFEATGNLVVPRYAFAMERNAGSGIIISDTPVHDCNTTCQTPKGAINTSLPFQNIHPITIGKCPKYVKSTKLRLATGLRNVPSIQSRGLFGAIAGFIEGGWTGMVDGWYGYHHQNEQGSGYAADLKSTQNAIDEITNKVNSVIEKMNTQFTAVGKEFNHLEKRIENLNKKVDDGFLDIWTYNAELLVLLENERTLDYHDSNVKNLYEKVRSQLKNNAKEIGNGCFEFYHKCDNTCMESVKNGTYDYPKYSEEAKLNREEIDGVKLESTRIYQILAIYSTVASSLVLVVSLGAISFWMCSNGSLQCRICI

SEQ ID NO: 4021 - protein, 566 aa, Artificial Sequence; identical to SEQ ID NO: 3467
  derived and/or modified protein sequence (wt) from hemagglutinin__InfluenzaA__ADB89129

SEQ ID NO: 4022 - protein, 566 aa, Artificial Sequence; identical to SEQ ID NO: 2669
  derived and/or modified protein sequence (wt) from hemagglutinin__InfluenzaA__ADB89139

SEQ ID NO: 4023 - protein, 566 aa, Artificial Sequence
  derived and/or modified protein sequence (wt) from hemagglutinin__InfluenzaA__ADB89149
MKAILVVLLYTFATANAYTLCIGYHANNSTDTVDTVLEKNVTVTHSVNLLEDKHNGKLCKLRGVAPLHLGKCNIAGWILGNPECESLSTASSWSYIVETSSSDNGTCYPGDFIDYEELREQLSSVSSFERFEIFPKTSSWPNHDSNKGVTAACPHVGAKSFYKNLIWLVKKGNSYPKLSKSYINDKGKEVLVLWGIHHPSTSADQQSLYQNADAYVFVGTSRYSKKFKPEIAIRPKVRGQEGRMNYYWTLVEPGDKITFEATGNLVVPRYAFAMERNAGSGIIISDTPVHDCNTTCQTPKGAINTSLPFQNIHPITIGKCPKYVKSTKLRLATGLRNIPSIQSRGLFGAIAGFIEGGWTGMVDGWYGYHHQNEQGSGYAADLKSTQNAIDEITNKVNSVIEKMNTQFTAVGKEFNHLEKRIENLNKKVDDGFLDIWTYNAELLVLLENERTLDYHDSNVKNLYEKVRSQLKNNAKEIGNGCFEFYHKCDNTCMESVKNGTYDYPKYSEEAKLNREEIDGVKLESTRIYQILAIYSTVASSLVLVVSLGAISFWMCSNGSLQCRICI

SEQ ID NO: 4024 - protein, 566 aa, Artificial Sequence; identical to SEQ ID NO: 3022
  derived and/or modified protein sequence (wt) from hemagglutinin__InfluenzaA__ADB89150

SEQ ID NO: 4025 - protein, 566 aa, Artificial Sequence
  derived and/or modified protein sequence (wt) from hemagglutinin__InfluenzaA__ADB89221
MKAILVVLLYTFATANADTLCIGYHANNSTDTVDTVLEKNVTVTHSVNLLEDKHNGKLCKLRGVAPLHLGKCNIAGWILGNPECESLSTASSWSYIVETSSSDNGTCYPGDFIDYEELREQLSSVSSFERFEIFPKTSSWPNHDSNKGVTAACPHAGAKSFYKNLIWLVKKGNSYPKLSKSYINDKGKEVLVLWGIHHPSTSADQQNLYQNADAYVFVGSSRYSKKFKPEIAIRPKVRDQEGRMNYYWTLVEPGDKITFEATGNLVVPRYAFAMERNAGSGIIISDTPVHDCNTTCQTPKGAINTSLPFQNIHPITIGKCPKYVKSTKLRLATGLRNVPSIQSRGLFGAIAGFIEGGWTGMVDGWYGYHHQNEQGSGYAADLKSTQNAIDEITNKVNSVIEKMNTQFTAVGKEFNHLEKRIENLNKKVDDGFLDIWTYNAELLVLLENERTLDYHDSNVKNLYEKVRSQLKNNAKEIGNGCFEFYHKCDNTCMESVKNGTYDYPKYSEEAKLNREEIDGVKLESTRIYQILAIYSTVASSLVLVVSLGAISFWMCSNGSLQCRICI

SEQ ID NO: 4026 - protein, 566 aa, Artificial Sequence; identical to SEQ ID NO: 2722
  derived and/or modified protein sequence (wt) from hemagglutinin__InfluenzaA__ADB89241

SEQ ID NO: 4027 - protein, 566 aa, Artificial Sequence; identical to SEQ ID NO: 2669
  derived and/or modified protein sequence (wt) from hemagglutinin__InfluenzaA__ADB89251

SEQ ID NO: 4028 - protein, 566 aa, Artificial Sequence; identical to SEQ ID NO: 3116
  derived and/or modified protein sequence (wt) from hemagglutinin__InfluenzaA__ADB89261

SEQ ID NO: 4029 - protein, 566 aa, Artificial Sequence
  derived and/or modified protein sequence (wt) from hemagglutinin__InfluenzaA__ADB89271
MKAILVVLLYTFATANADTLCIGYHANNSTDTVDTVLEKNVTVTHSVNLLEDKHNGKLCKLRGVAPLHLGKCNIAGWILGNPECESLSTASSWSYIVETSSSDNGTCYPGDFIDYEELREQLSSVSSFERFEIFPKTSSWPNHDSNKGVTAACPHAGAKSFYKNLIWLVKKGNSYPKLSKSYINDKGKEVLVLWGIHHPSTSADQQSLYQNADAYVFVGSSRYSKKFKPEIAIRPKVRDQEGRMNYYWTLVEPGDKITFEATGNLVVPRYAFAMERNAGSGIIISDTPVHDCNTTCQTPKGAINTSLPFQNIHPITIGKCPKYVKSTKLRLATGLRNVPSIQSRGLFGAIAGFIEGGWTGMVDGWYGYHHQNEQGSGYAADLKSTQNAIDEITNKVNSVIEKMNTQFTAVGKEFNHLEKRIENLNKKVDDGFLDIWTYNAELLVLLENERTLDYHDSNVKNLYEKVRSQLKNNAKEIGNGCFEFYHKCDNTCMGSVKNGTYDYPKYSEEAKLNREEIDGVKLESTRIYQILAIYSTVASSLVLVVSLGAISFWMCSNGSLQCRICI

SEQ ID NO: 4030 - protein, 566 aa, Artificial Sequence
  derived and/or modified protein sequence (wt) from hemagglutinin__InfluenzaA__ADB89281
MKAILVVLLYTFATANADTLCIGYHANNSTDTVDTVLEKNVTVTHSVNLLEDKHNGKLCKLRGVAPLHLGKCNIAGWILGNPECESLSTASSWSYIVETSSSDNGTCYPGDFIDYEELREQLSSVSSFERFEIFPKTSSWPNHDSNKGVTAACPHAGAKSFYKNLIWLVKKGNSYPKLSKSYINDKGKEVLVLWGIHHPPTSADQQSLYQNADAYVFVGTSRYSKKFKPEIAIRPKVRGQEGRMNYYWTLVEPGDKITFEATGNLVVPRYAFAMERNAGSGIIISDTPVHDCNTTCQTPKGAINTSLPFQNIHPITIGKCPKYVKSTKLRLATGLRNVPSIQSRGLFGAIAGFIEGGWTGMVDGWYGYHHQNEQGSGYAADLKSTQNAIDEITNKVNSVIEKMNTQFTAVGKEFNHLEKRIENLNKKVDDGFLDIWTYNAELLVLLENERTLDYHDSNVKNLYEKVRSQLKNNAKEIGNGCFEFYHKCDNTCMESVKNGTYDYPKYSEEAKLNREEIDGVKLESTRIYQILAIYSTVASSLVLVVSLGAISFWMCSNGSLQCRICI

SEQ ID NO: 4031 - protein, 566 aa, Artificial Sequence; identical to SEQ ID NO: 2669
  derived and/or modified protein sequence (wt) from hemagglutinin__InfluenzaA__ADB89291

SEQ ID NO: 4032 - protein, 566 aa, Artificial Sequence; identical to SEQ ID NO: 2669
  derived and/or modified protein sequence (wt) from hemagglutinin__InfluenzaA__ADB89301

SEQ ID NO: 4033 - protein, 566 aa, Artificial Sequence; identical to SEQ ID NO: 2669
  derived and/or modified protein sequence (wt) from hemagglutinin__InfluenzaA__ADB89311

SEQ ID NO: 4034 - protein, 566 aa, Artificial Sequence
  derived and/or modified protein sequence (wt) from hemagglutinin__InfluenzaA__ADB89321
MKAILVVLLYTFATANADTLCIGYHANNSTDTVDTVLEKNVTVTHSVNLLEDKHNGKLCKLRGVAPLHLGKCNIAGWILGNPECESLSTASSWSYIVETSSSDNGTCYPGDFIDYEELREQLSSVSSFERFEIFPKTSSWPNHDSNKGVTAACPHAGAKSFYKNLIWLVKKGNSYPKLSESYINDKGKEVLVLWGIHHPSTSADQQSLYQNADAYVFVGTSKYSKKFKPEIAIRPKVRDQEGRMNYYWTLVEPGDKITFEATGNLVVPRYAFAMERNAGSGIIISDTPVHDCNTTCQTPKGAINTSLPFQNIHPITIGKCPKYVKSTKLRLATGLRNVPSIQSRGLFGAIAGFIEGGWTGMVDGWYGYHHQNEQGSGYAADLKSTQNAIDEITNKVNSVIEKMNTQFTAVGKEFNHLEKRIENLNKKVDDGFLDIWTYNAELLVLLENERTLDYHDSNVKNLYEKVRSQLKNNAKEIGNGCFEFYHKCDNTCMESVKNGTYDYPKYSEEAKLNREEIDGVKLESTRIYQILAIYSTVASSLVLVVSLGAISFWMCSNGSLQCRICI

SEQ ID NO: 4035 - protein, 566 aa, Artificial Sequence
  derived and/or modified protein sequence (wt) from hemagglutinin__InfluenzaA__ADB89331
MKAILVVLLYTFATANADTLCIGYHANNSTDTVDTVLEKNVTVTHSVNLLEDKHNGKLCKLRGVAPLHLGKCNIAGWILGNPECESLSTASSWSYIVETSSSDNGTCYPGDFIDYEELREQLSSVSSFERFEIFPKTSSWPNHDSNKGVTAACPHAGAKSFYKNLIWLVKKGNSYPKLSKSYINDKGKEVLVLWGIHHPSTSADQQSLYQNADAYVFVGSSKYSKKFKPEIAIRPKVRDQEGRMNYYWTLVEPGDKITFEATGNLVVPRYAFAMERNAGSGIIISDTPVHDCNTTCQTPKGAINTSLPFQNIHPITIGKCPKYVKSTKLRLATGLRNVPSIQSRGLFGAIAGFIEGGWTGMVDGWYGYHHQNEQGSGYAADLKSTQNAIDEITNKVNSVIEKMNTQFTAVGKEFNHLEKRIENLNKKVDDGFLDIWTYNAELLVLLENERTLDYHDSNVKNLYEKVRSQLKNNAKEIGNGCFEFYHKCDNTCMESVKNGTYDYPKYSEEAKLNREEIDGVKLESTRVYQILAIYSTVASSLVLVVSLGAISFWMCSNGSLQCRICI

SEQ ID NO: 4036 - protein, 566 aa, Artificial Sequence; identical to SEQ ID NO: 2669
  derived and/or modified protein sequence (wt) from hemagglutinin__InfluenzaA__ADB89341

SEQ ID NO: 4037 - protein, 566 aa, Artificial Sequence; identical to SEQ ID NO: 2669
  derived and/or modified protein sequence (wt) from hemagglutinin__InfluenzaA__ADB89351

SEQ ID NO: 4038 - protein, 566 aa, Artificial Sequence; identical to SEQ ID NO: 2669
  derived and/or modified protein sequence (wt) from hemagglutinin__InfluenzaA__ADB89361

SEQ ID NO: 4039 - protein, 566 aa, Artificial Sequence; identical to SEQ ID NO: 2669
  derived and/or modified protein sequence (wt) from hemagglutinin__InfluenzaA__ADB89371

SEQ ID NO: 4040 - protein, 566 aa, Artificial Sequence; identical to SEQ ID NO: 3414
  derived and/or modified protein sequence (wt) from hemagglutinin__InfluenzaA__ADB89381

SEQ ID NO: 4041 - protein, 566 aa, Artificial Sequence
  derived and/or modified protein sequence (wt) from hemagglutinin__InfluenzaA__ADB89391
MKAILVVLLYTFATANADTLCIGYHANNSTDTVDTVLEKNVTVTHSVNLLEDKHNGKLCKLRGVAPLHLGKCNIAGWILGNPECESLSTASSWSYIVETSSSDNGTCYPGDFIDYEELREQLSSVSSFERFEIFPKTSSWPNHDSNKGVTAACLHAGAKSFYKNLIWLVKKGNSYPKLSKSYINDKGKEVLVLWGIHHPSTSADQQSLYQNADAYVFVGTSRYSKKFKPEIAIRPKVRDQEGRMNYYWTLVEPGDKITFEATGNLVVPRYAFAMERNAGSGIIISDTPVHDCNTTCQTPKGAINTSLPFQNIHPITIGKCPKYVKSTKLRLATGLRNVPSIQSRGLFGAIAGFIEGGWTGMIDGWYGYHHQNEQGSGYAADLKSTQNAIDEITNKVNSVIEKMNTQFTAVGKEFNHLEKRIENLNKKVDDGFLDIWTYNAELLVLLENERTLDYHDSNVKNLYEKVRSQLKNNAKEIGNGCFEFYHKCDNTCMESVKNGTYDYPKYSEEAKLNREEIDGVKLESTRIYQILAIYSTVASSLVLVVSLGAISFWMCSNGSLQCRICI

SEQ ID NO: 4042 - protein, 566 aa, Artificial Sequence; identical to SEQ ID NO: 2656
  derived and/or modified protein sequence (wt) from hemagglutinin__InfluenzaA__ADB89401

SEQ ID NO: 4043 - protein, 566 aa, Artificial Sequence; identical to SEQ ID NO: 2669
  derived and/or modified protein sequence (wt) from hemagglutinin__InfluenzaA__ADB89411

SEQ ID NO: 4044 - protein, 566 aa, Artificial Sequence; identical to SEQ ID NO: 3116
  derived and/or modified protein sequence (wt) from hemagglutinin__InfluenzaA__ADB89431

SEQ ID NO: 4045 - protein, 566 aa, Artificial Sequence; identical to SEQ ID NO: 3022
  derived and/or modified protein sequence (wt) from hemagglutinin__InfluenzaA__ADB89441

SEQ ID NO: 4046 - protein, 566 aa, Artificial Sequence; identical to SEQ ID NO: 2669
  derived and/or modified protein sequence (wt) from hemagglutinin__InfluenzaA__ADB89461

SEQ ID NO: 4047 - protein, 566 aa, Artificial Sequence; identical to SEQ ID NO: 3116
  derived and/or modified protein sequence (wt) from hemagglutinin__InfluenzaA__ADB89481

SEQ ID NO: 4048 - protein, 566 aa, Artificial Sequence; identical to SEQ ID NO: 3116
  derived and/or modified protein sequence (wt) from hemagglutinin__InfluenzaA__ADB89491

SEQ ID NO: 4049 - protein, 566 aa, Artificial Sequence
  derived and/or modified protein sequence (wt) from hemagglutinin__InfluenzaA__ADB89501
MKAILVVLLYTFATANADTLCIGYHANNSTDTVDTVLEKNVTVTHSVNLLEDKHNGKLCKLRGVAPLHLGKCNIAGWILGNPECESLSTASSWSYIVETSSSDNGTCYPGDFIDYEELREQLSSVSSFERFEIFPKTSSWPNHDSNKGVTAACPHAGAKSFYKNLIWLVKKGNSYPKLSKSYINDKGKEVLVLWGIHHPSTSADQQSLYQNADAYVFVGSSRYSKKFKPEIAIRPKVRDQEGRMNYYWTLVEPGDKITFEATGNLVVPRYAFAMERNAGSGIIISDTPVHDCNTTCQTPKGAINTSLPFQNIHPITIGKCPKYVKSTKLRLATGLRNVPSIQSRGLFGAIAGFIEGGWTGLVDGWYGYHHQNEQGSGYAADLKSTQNAIDEITNKVNSVIEKMNTQFTAVGKEFNHLEKRIENLNKKVDDGFLDIWTYNAELLVLLENERTLDYHDSNVKNLYEKVRSQLKNNAKEIGNGCFEFYHKCDNTCMESVKNGTYDYPKYSEEAKLNREEIDGVKLESTRIYQILAIYSTVASSLVLVVSLGAISFWMCSNGSLQCRICI

SEQ ID NO: 4050 - protein, 566 aa, Artificial Sequence; identical to SEQ ID NO: 2669
  derived and/or modified protein sequence (wt) from hemagglutinin__InfluenzaA__ADB89511

SEQ ID NO: 4051 - protein, 566 aa, Artificial Sequence; identical to SEQ ID NO: 3116
  derived and/or modified protein sequence (wt) from hemagglutinin__InfluenzaA__ADB89531

SEQ ID NO: 4052 - protein, 566 aa, Artificial Sequence; identical to SEQ ID NO: 3116
  derived and/or modified protein sequence (wt) from hemagglutinin__InfluenzaA__ADB89541

SEQ ID NO: 4053 - protein, 566 aa, Artificial Sequence; identical to SEQ ID NO: 3829
  derived and/or modified protein sequence (wt) from hemagglutinin__InfluenzaA__ADB89551

SEQ ID NO: 4054 - protein, 566 aa, Artificial Sequence; identical to SEQ ID NO: 2669
  derived and/or modified protein sequence (wt) from hemagglutinin__InfluenzaA__ADB89561

SEQ ID NO: 4055 - protein, 566 aa, Artificial Sequence; identical to SEQ ID NO: 2669
  derived and/or modified protein sequence (wt) from hemagglutinin__InfluenzaA__ADB89571

SEQ ID NO: 4056 - protein, 566 aa, Artificial Sequence; identical to SEQ ID NO: 2669
  derived and/or modified protein sequence (wt) from hemagglutinin__InfluenzaA__ADB89581

SEQ ID NO: 4057 - protein, 566 aa, Artificial Sequence
  derived and/or modified protein sequence (wt) from hemagglutinin__InfluenzaA__ADB89591
MKAILVVLLYTFATANADTLCIGYHANNSTDTVDTVLEKNVTVTHSVNLLEDKHNGKLCKLRGVAPLHLGKCNIAGWILGNPECESLSTASSWSYIVETSSSDNGTCYPGDFIDYEELREQLSSVSSFERFEIFPKTSSWPNHDSNKGVTAACPHAGAKSFYKNLIWLVKKGNSYPKLSKSYINDKGKEVLVLWGIHHPSTSADQQSLYQNADAYVFVGTSRYSKKFKPEIAIRPKVREQEGRMNYYWALVEPGDKITFEATGNLVVPRYAFAMERNAGSGIIISDTPVHDCNTTCQTPKGAINTSLPFQNIHSITIGKCPKYVKSTKLRLATGLRNVPSIQSRGLFGAIAGFIEGGWTGMVDGWYGYHHQNEQGSGYAADLKSTQNAIDEITNKVNSVIEKMNTQFTAVGKEFNHLEKRIENLNKKVDDGFLDIWTYNAELLVLLENERTLDYHDSNVKNLYEKVRSQLKNNAKEIGNGCFEFYHKCDNTCMESVKNGTYDYPKYSEEAKLNREEIDGVKLESTRIYQILAIYSTVASSLVLVVSLGAISFWMCSNGSLQCRICI

SEQ ID NO: 4058 - protein, 566 aa, Artificial Sequence
  derived and/or modified protein sequence (wt) from hemagglutinin__InfluenzaA__ADB89601
MKAIIVVLLYTFATANADTLCIGYHANNSTDTVDTVLEKNVTVTHSVNLLEDKHNGKLCKLRGVAPLHLGKCNIAGWILGNPECESLSTASSWSYIVETSSSDNGTCYPGDFIDYEELREQLSSVSSFERFEIFPKTSSWPNHDSNKGVTAACPHAGAKSFYKNLIWLVKKGNSYPKLSKSYINDKGKEVLVLWGIHHPSTSADQQSLYQNADAYVFVGTSRYSKKFKPEIAIRPKVRDQEGRMNYYWTLVEPGDKITFEATGNLVVPRYAFAMERNAGSGIIISDTPVHDCNTTCQTPKGAINTSLPFQNIHPITIGKCPKYVKSTKLRLATGLRNVPSIQSRGLFGAIAGFIEGGWTGMVDGWYGYHHQNEQGSGYAADLKSTQNAIDKITNKVNSVIEKMNTQFTAVGKEFNHLEKRIENLNKKVDDGFLDIWTYNAELLVLLENERTLDYHDSNVKNLYEKVRSQLKNNAKEIGNGCFEFYHKCDNTCMESVKNGTYDYPKYSEEAKLNREEIDGVKLESTRIYQILTIYSTVASSLVLVVSLGAISFWMCSNGSLQCRICI

SEQ ID NO: 4059 - protein, 566 aa, Artificial Sequence; identical to SEQ ID NO: 3833
  derived and/or modified protein sequence (wt) from hemagglutinin__InfluenzaA__ADB89611

SEQ ID NO: 4060 - protein, 566 aa, Artificial Sequence; identical to SEQ ID NO: 3833
  derived and/or modified protein sequence (wt) from hemagglutinin__InfluenzaA__ADB89621

SEQ ID NO: 4061 - protein, 566 aa, Artificial Sequence
  derived and/or modified protein sequence (wt) from hemagglutinin__InfluenzaA__ADB89631
MKAILIVLLYTFATANADTLCIGYHANNSTDTVDTVLEKNVTVTHSVNLLEDKHNGKLCKLRGVAPLHLGKCNIAGWILGNPECESLSTASSWSYIVETSSSDNGTCYPGDFIDYEELREQLSSVSSFERFEIFPKTSSWPNHDSNKGVTAACPHAGAKSFYKNLIWLVKKGNSYPKLSKSYINDKGKEVLVLWGIHHPSTSADQQSLYQNADAYVFVGTSRYSKKFKPEIAIRPKVRDQEGRMNYYWTLVEPGDKITFEATGNLVVPRYAFAMERNAGSGIIISDTPVHDCNTTCQTPKGAINTSLPFQNIHPITIGKCPKYVKSTKLRLATGLRNIPSIQSRGLFGAIAGFIEGGWTGMVDGWYGYHHQNEQGSGYAADLKSTQNAIDEITNKVNSVIEKMNTQFTAVGKEFNHLEKRIENLNKKVDDGFLDIWTYNAELLVLLENERTLDYHDSNVKNLYEKVRSQLKNNAKEIGNGCFEFYHKCDNTCMESVKNGTYDYPKYSEEAKLNREEIDGVKLESTRIYQILAIYSTVASSLVLVVSLGAISFWMCSNGSLQCRICI

SEQ ID NO: 4062 - protein, 566 aa, Artificial Sequence; identical to SEQ ID NO: 3833
  derived and/or modified protein sequence (wt) from hemagglutinin__InfluenzaA__ADB89641

SEQ ID NO: 4063 - protein, 566 aa, Artificial Sequence; identical to SEQ ID NO: 2669
  derived and/or modified protein sequence (wt) from hemagglutinin__InfluenzaA__ADB89651

SEQ ID NO: 4064 - protein, 566 aa, Artificial Sequence; identical to SEQ ID NO: 2669
  derived and/or modified protein sequence (wt) from hemagglutinin__InfluenzaA__ADB89661

SEQ ID NO: 4065 - protein, 566 aa, Artificial Sequence; identical to SEQ ID NO: 3833
  derived and/or modified protein sequence (wt) from hemagglutinin__InfluenzaA__ADB89671

SEQ ID NO: 4066 - protein, 566 aa, Artificial Sequence; identical to SEQ ID NO: 2669
  derived and/or modified protein sequence (wt) from hemagglutinin__InfluenzaA__ADB89681

SEQ ID NO: 4067 - protein, 566 aa, Artificial Sequence; identical to SEQ ID NO: 2669
  derived and/or modified protein sequence (wt) from hemagglutinin__InfluenzaA__ADB89691

SEQ ID NO: 4068 - protein, 566 aa, Artificial Sequence; identical to SEQ ID NO: 3771
  derived and/or modified protein sequence (wt) from hemagglutinin__InfluenzaA__ADB89701

SEQ ID NO: 4069 - protein, 566 aa, Artificial Sequence
  derived and/or modified protein sequence (wt) from hemagglutinin__InfluenzaA__ADB89711
MKAILVVLLYTFATANADTLCIGYHANNSTDTVDTVLEKNVTVTHSVNLLEDKHNGKLCKLRGVAPLHLGKCNIAGWILGNPECESLSTASSWSYIVETSSSGNGTCYPGDFIDYEELREQLSSVSSFERFEIFPKTSSWPNHDSNKGVTAACPHAGAKSFYKNLIWLVKKGNSYPKLSKSYINDKGKEVLVLWGIHHPSTSADQQSLYQNADAYVFVGTSRYSKKFKPEIAIRPKVRDQEGRMNYHWTLVEPGDKITFEATGNLVVPRYAFAMERNAGSGIIISDTPVHDCNTTCQTPKGAINTSLPFQNIHPITIGKCPKYVKSTKLRLATGLRNVPSIQSRGLFGAIAGFIEGGWTGMVDGWYGYHHQNEQGSGYAADLKSTQNAIDEITNKVNSVIEKMNTQFTAVGKEFNHLEKRIENLNKKVDDGFLDIWTYNAELLVLLENERTLDYHDSNVKNLYEKVRSQLKNNAKEIGNGCFEFYHKCDNTCMESVKNGTYDYPKYSEEAKLNREEIDGVKLESTRIYQILAIYSTVASSLVLVVSLGAISFWMCSNGSLQCRICI

SEQ ID NO: 4070 - protein, 566 aa, Artificial Sequence
  derived and/or modified protein sequence (wt) from hemagglutinin__InfluenzaA__ADB89721
MKTIIALSYILCLVFAQKLPGNDNSTATLCLGHHAVPNGTIVKTITNDQIEVTNATELVQSSSTGEICDSPHQILDGKNCTLIDALLGDPQCDGFQNKKWDLFVERSKAYSNCYPYDVPDYASLRSLVASSGTLEFDNESFNWTGVTQNGTSSACIRRSKNSFFSRLNWLTHLNFKYPALNVTMPNNEQFDKLYLWGVHHPGTDKDQIFLYAQASGRITVSTKRSQQTVIPNIGSRPRVRNIPSRISIYWTIVKPGDILLINSTGNLIAPRGYFKIQSGKSSIMRSDAPIGKCNSECITPNGSIPNDKPFQNVNRITYGACPRYVKQNTLKLATGMRNVPEKQTRGIFGAIAGFIENGWEGMVDGWYGFRHQNSEGRGQAADLKSTQAAIDQINGKLNRLIGKTNEKFHQIEKEFSEVEGRIQDLEKYVEDTKIDLWSYNAELLVALENQHTIDLTDSEMNKLFEKTKKQLRENAEDMGNGCFKIYHKCDNACIGSIRNGTYDHDVYRDEALNNRFQIKGVELKSGYKDWILWISFAISCFLLCVALLGFIMWACQKGNIRCNICI

SEQ ID NO: 4071 - protein, 566 aa, Artificial Sequence
  derived and/or modified protein sequence (wt) from hemagglutinin__InfluenzaA__ADB90360
MKAILVVLLYTFATANADTLCIGYHANNSTDTVDTVLEKNVTVTHSVNLLEDKHNGKLCKLRGVAPLHLGKCNIAGWILGNPECESLSTASSWSYIVETSSSNNGTCYPGDFIDYEELREQLSSVSSFERFEIFPKTSSWPNHDPNKGVTAACPHAGAKSFYKNLIWLVKKGNSYPKLSKSYINDKGKEVLVLWGIHHPSTSADQQSLYQNADAYVFVGTSRYSKKFKPEIAIRPKVRGQEGRMNYYWTLVEPGDKITFEATGNLVVPRYAFAMERNAGSGIIISDTPVHDCNTTCQTPKGAINTSLPFQNIHPITIGKCPKYVKSTKLRLATGLRNIPSIQSRGLFGAIAGFIEGGWTGMVDGWYGYHHQNEQGSGYAADLKSTQNAIDEITNKVNSVIEKMNTQFTAVGKEFNHLEKRIENLNKKVDDGFLDIWTYNAELLVLLENERTLDYHDSNVKNLYEKVRSQLKNNAKEIGNGCFEFYHKCDNTCMESVKNGTYDYPKYSEEAKLNREEIDGVKLESTRIYQILAIYSTVASSLVLVVSLGAISFWMCSNGSLQCRICI

SEQ ID NO: 4072 - protein, 566 aa, Artificial Sequence
  derived and/or modified protein sequence (wt) from hemagglutinin__InfluenzaA__ADB90370
MKAILVVLLYTFATANADTLCIGYHANNSTDTVDTVLEKNVTVTHSVNLLEDKHNGKLCKLRGVAPLHLGKCNIAGWILGNPECESLSTASSWSYIVETSSSDNGTCYPGDFIDYEELREQLSSVSSFERFEIFPKTSSWPNHDPNKGVTAACPHAGAKSFYKNLIWLVKKGNSYPKLSKSYINDKGKEVLVLWGIHHPSTSADQQSLYQNADAYVFVGTSRYSKKFKPEIAIRPKVRGQEGRMNYYWTLVEPGDKITFEATGNLVVPRYAFAMERNAGSGIIISDTPVHDCNTTCQTPKGAINTSLPFQNIHPITIGKCPKYVKSTKLRLATGLRNVPSIQSRGLFGAIAGFIEGGWTGMVDGWYGYHHQNEQGSGYAADLKSTQNAIDEITNKVNSVIEKMNTQFTAVGKEFNHLEKRIENLNKKVDDGFLDIWTYNAELLVLLENERTLDYHDSNVKNLYEKVRSQLKNNAKEIGNGCFEFYHKCDNTCMESVKNGTYDYPKYSEEAKLNREEIDGVKLESTRIYQILAIYSTVASSLVLVVSLGAISFWMCSNGSLQCRICI

SEQ ID NO: 4073 - protein, 566 aa, Artificial Sequence; identical to SEQ ID NO: 3588
  derived and/or modified protein sequence (wt) from hemagglutinin__InfluenzaA__ADB90414

SEQ ID NO: 4074 - protein, 566 aa, Artificial Sequence; identical to SEQ ID NO: 3116
  derived and/or modified protein sequence (wt) from hemagglutinin__InfluenzaA__ADC32409

SEQ ID NO: 4075 - protein, 566 aa, Artificial Sequence
  derived and/or modified protein sequence (wt) from hemagglutinin__InfluenzaA__ADC32410
MKAILVVLLYTFATANADTLCIGYHANNSTDTVDTVLEKNVTVTHSVNLLEDKHNGKLCKLRGVAPLHLGKCNIAGWILGNPECESLSTASSWSYIVETSSSDNGTCYPGDFIDYEELREQLSSVSSFERFEIFPKTSSWPNHDSNKGVTAACPHAGAKSFYKNLIWLVKKGNSYPKLSKSYINDKGKEVLVLWGIHHPSTSADQQSLYQNADAYVFVGTSRYSKKFKPEIAIRPKVRDQEGRMNYYWTLVEPGDKITFEATGNLVVPRYAFAMERNAGSGIIISDTPVHDCNTTCQTPKGAINTSLPFQNIHPITIGKCPKYVKSTKLRLATGLRNVPSIQSRGLFGAIAGFIEGGWTGMVDGWYGYHHQNEQGSGYAADLKSTQNAIDEITNKVNSVIEKMNTQFTAVGKEFNHLEKRIENLNKKVDDGFLDIWTYNAELLVLLENEKTLDYHDSNVKNLYEKVRSQLKNNAKEIGNGCFEFYHKCDNTCMESVKNGTYDYPKYSEEAKLNREEIDGVKLESTRIYQILAIYSTVASSLVLVVSLGAISFWMCSNGSLQCRICI

SEQ ID NO: 4076 - protein, 566 aa, Artificial Sequence
  derived and/or modified protein sequence (wt) from hemagglutinin__InfluenzaA__ADC32411
MKAILVVLLYTFATANADTLCIGYHANNSTDTVDTVLEKNVTVTHSVNLLEDKHNGKLCKLRGVAPLHLGKCNIAGWILGNPECESLSTASSWSYIVETSSSDNGTCYPGDFIDYEELREQLSSVSSFERFEIFPKTSSWPNHDSNKGVTAACPHAGAKSFYKNLIWLVKKGNSYPKLSKSYINDKGKEVLVLWGIHHPSTSADQQSLYQNADAYVFVGTSRYSKKFKPEIAIRPKVREQEGRMNYYWTLVEPGDKITFEATGNLVVPRYAFAMERNAGSGIIISDTPVHDCNTTCQTPKGAINTSLPFQNIHSITIGKCPKYVKSTKLRLATGLRNVPSIQSRGLFGAIAGFIEGGWTGMVDGWYGYHHQNEQGSGYAADLKSTQNAIDEITNKVNSVIEKMNTQFTAVGKEFNHLAKRIENLNKKVDDGFLDIWTYNAELLVLLENERTLDYHDSNVKNLYEKVRSQLKNNAKEIGNGCFEFYHKCDNTCMESVKNGTYDYPKYSEEAKLNREEIDGVKLESTRIYQILAIYSTVASSLVLVVSLGAISFWMCSNGSLQCRICI

SEQ ID NO: 4077 - protein, 566 aa, Artificial Sequence; identical to SEQ ID NO: 3022
  derived and/or modified protein sequence (wt) from hemagglutinin__InfluenzaA__ADC32412

SEQ ID NO: 4078 - protein, 566 aa, Artificial Sequence; identical to SEQ ID NO: 2669
  derived and/or modified protein sequence (wt) from hemagglutinin__InfluenzaA__ADC32413

SEQ ID NO: 4079 - protein, 566 aa, Artificial Sequence; identical to SEQ ID NO: 3116
  derived and/or modified protein sequence (wt) from hemagglutinin__InfluenzaA__ADC32414

SEQ ID NO: 4080 - protein, 566 aa, Artificial Sequence; identical to SEQ ID NO: 3116
  derived and/or modified protein sequence (wt) from hemagglutinin__InfluenzaA__ADC32415

SEQ ID NO: 4081 - protein, 566 aa, Artificial Sequence; identical to SEQ ID NO: 3116
  derived and/or modified protein sequence (wt) from hemagglutinin__InfluenzaA__ADC32416

SEQ ID NO: 4082 - protein, 566 aa, Artificial Sequence
  derived and/or modified protein sequence (wt) from hemagglutinin__InfluenzaA__ADC32417
MKAILVVLLYTFATANADTLCIGYHANNSTDTVDTVLEKNVTVTHSVNLLEYKHNGKLCKLRGVAPLHLGKCNIAGWILGNPECESLSTASSWSYIVETSSSDNGTCYPGDFIDYEELREQLSSVSSFERFEIFPKTSSWPNHDSNKGVTAACPHAGAKSFYKNLIWLVKKGNSYPKLSKSYINDKGKEVLVLWGIHHPSTSADQQSLYQNADAYVFVGTSRYSKKFKPEIAIRPKVREQEGRMNYYWTLVEPGDKITFEATGNLVVPRYAFAMERNAGSGIIISDTPVHDCNTTCQTPKGAINTSLPFQNIHPITIGKCPKYVKSTKLRLATGLRNVPSIQSRGLFGAIAGFIEGGWTGMVDGWYGYHHQNEQGSGYAADLKSTQNAIDEITNKVNSVIEKMNTQFTAVGKEFNHLEKRIENLNKKVDDGFLDIWTYNAELLVLLENERTLDYHDSNVKNLYEKVRSQLKNNAKEIGNGCFEFYHKCNNTCMESVKNGTYDYPKYSEEAKLNREEIDGVKLESTRIYQILAIYSTVASSLVLVVSLGAISFWMCSNGSLQCRICI

SEQ ID NO: 4083 - protein, 566 aa, Artificial Sequence; identical to SEQ ID NO: 3116
  derived and/or modified protein sequence (wt) from hemagglutinin__InfluenzaA__ADC32418

SEQ ID NO: 4084 - protein, 566 aa, Artificial Sequence
  derived and/or modified protein sequence (wt) from hemagglutinin__InfluenzaA__ADC32419
MKAILVVLLYTFATANADTLCIGYHANNSTDTVDTVLEKNVTVTHSVNLLEDKHNGKLCKLRGVAPLHLGKCNIAGWILGNPECESLSTASSWSYIVETSSSDNGTCYPGDFIDYEELREQLSSVSSFERFEIFPKTSSWPNHDSNKGVTAACPHAGAKSFYKNLIWLVKKGNSYPKLSKSYINDKGKEVLVLWGIHHPSTSADQQSLYQNADAYVFVGTSRYSKKFKPEIAIRPKVREQEGRMNYYWTLVEPGDKITFEATGNLVVPRYAFAMERNAGSGIIISDTPVHDCNTTCQTPKGAINTSLPFQNIHSITIGKCPKYVKSTKLRLATGLRNVPSIQSRGLFGAIAGFIEGGWTGMVDGWFGYHHQNDQGSAYAADLKSTQNAIDEITNKVNSVIEKMNTQFTAVGKEFNHLEKRIENLNKKVDDGFLDIWTYNAELLVLLENERTLDYHDSNVKNLYEKVRSQLKNNAKEIGNGCFEFYHKCDNTCMESVKNGTYDYPKYSEEAKLNREEIDGVKLESTRIYQILAIYSTVASSLVLVVSLGAISFWMCSNGSLQCRICI

SEQ ID NO: 4085 - protein, 566 aa, Artificial Sequence; identical to SEQ ID NO: 3116
  derived and/or modified protein sequence (wt) from hemagglutinin__InfluenzaA__ADC32420

SEQ ID NO: 4086 - protein, 566 aa, Artificial Sequence; identical to SEQ ID NO: 3116
  derived and/or modified protein sequence (wt) from hemagglutinin__InfluenzaA__ADC32421

SEQ ID NO: 4087 - protein, 566 aa, Artificial Sequence
  derived and/or modified protein sequence (wt) from hemagglutinin__InfluenzaA__ADC32422
MKAILVVLLYTFATANADTLCIGYHANNSTDTVDTVLEKNVTVTHSVNLLEDKHNGKLCKLRGVAPLHLGKCNIAGWILGNPECESLSTASSWSYIVETSSSDNGTCYPGDFIDYEELREQLSSVSSFERFEIFPKTSSWPNHDSNKGVTAACPHAGAKSFYKNLIWLVKKGNSYPKLSKSYINDKGKEVLVLWGIHHPSTSADQQSLYQNADAYVFVGTSRYSKKFKPEIAIRPKVREQEGRMNYYWTLVEPGDKITFEATGNLMVPRYAFAMERNAGSGIIISDTPVHDCNTTCQTPKGAINTSLPFQNIHSITIGKCPKYVKSTKLRLATGLRNVPSIQSRGLFGAIAGFIEGGWTGMVDGWYGYHHQNEQGSGYAADLKSTQNAIDEITNKVNSVIEKMNTQFTAVGKEFNHLEKRIENLNKKVDDGFLDIWTYNAELLVLLENERTLDYHDSNVKNLYEKVRSQLKNNAKEIGNGCFEFYHKCDNTCMESVKNGTYDYPKYSEEAKLNREEIDGVKLESTRIYQILAIYSTVASSLVLVVSLGAISFWMCSNGSLQCRICI

SEQ ID NO: 4088 - protein, 566 aa, Artificial Sequence
  derived and/or modified protein sequence (wt) from hemagglutinin__InfluenzaA__ADC32423
MKAILVVLLYTFATANADTLCIGYHANNSTDTVDTVLEKNVTVTHSVNLLEDKHNGKLCKLRGVAPLHLGKCNIAGWILGNPECESLSTASSWSYIVETSSSDNGTCYPGDFIDYEELREQLSSVSSFERFEIFPKTSSWPNHDSNKGVTAACPHAGAKSFYKNLIWLVKKGNSYPKLSKSYINDKGKEVLVLWGIHHPSTSADQQSLYQNADAYVFVGTSRYSKKFKPEIAIRPKVREQEGRMNYYWTLVEPGDKITFEATGNLVVPRYAFAMERNAGSGIIISDTPVHDCNTTCQTPKGAINTSLPFQNIHSITIGKCPKYVKSTKLRLATGLRNVPSIQSRGLFGAIAGFIEGGWTGMVDGWYGYHHQNEQGSGYAADLKSTQNAIDEITNKVNSVIEKMNTQFTAVGKEFNHLEKRIENLNKKVNDGFLDIWTYNAELLVLLENERTLDYHDSNVKNLYEKVRSQLKNNAKEIGNGCFEFYHKCDNTCMESVKNGTYDYPKYSEEAKLNREEIDGVKLESTRIYQILAIYSTVASSLVLVVSLGAISFWMCSNGSLQCRICI

SEQ ID NO: 4089 - protein, 566 aa, Artificial Sequence
  derived and/or modified protein sequence (wt) from hemagglutinin__InfluenzaA__ADC32434
MKAILVVLLYTFATANADTLCIGYHANNSTDTVDTVLEKNVTVTHSVNLLEDKHNGKLCKLRGVAPLHLGKCNIAGWILGNPECESLSTASSWSYIVETSSSDNGTCYPGDFIDYEELREQLSSVSSFERFEIFPKTSSWPNHDSNKGVTAACPHAGAKSFYKNLIWLVKKGNSYPKLSKSYINDKGKEVLVLWGIHHPSTSADQQSLYQNADAYVFVGTSRYSKKFKPEIAIRPKVRDQEGRMNYYWTLVEPGDKITFEATGNLVVPRYAFAMERNAGSGIIISDTPVHDCNTTCQTPKGAINTSLPFQNIHPITIGKCPKYVKSTKLRLATGLRNVPSIQSRGLFGAIAGFIEGGWTGMVDGWYGYHHQNEQGSGYAADLKSTQHAIDEITNKVNSVIEKMNTQFTAVGKEFNHLEKRIENLNKKVDDGFLDIWTYNAELLVLLENERTLDYHDSNVKNLYEKVRSQLKNNAKEIGNGCFEFYHKCDNTCMESVKNGTYDYPKYSEEAKLNREEIDGVKLESTRIYQILAIYSTVASSLVLVVSLGAISFWMCSNGSLQCRICI

SEQ ID NO: 4090 - protein, 566 aa, Artificial Sequence; identical to SEQ ID NO: 4089
  derived and/or modified protein sequence (wt) from hemagglutinin__InfluenzaA__ADC32435

SEQ ID NO: 4091 - protein, 566 aa, Artificial Sequence
  derived and/or modified protein sequence (wt) from hemagglutinin__InfluenzaA__ADC34940
MKTIIALSYILCLVFAQKLPGNDNSTATLCLGHHAVPNGTIVKTITNDQIEVTNATELVQSSSTGGICDSPHQILDGENCTLIDALLGDPQCDGFQNKKWDLFVERSKAYSNCYPYDVPDYASLRSLVASSGTLEFNNERFNWTGVTQNGTSSACKRGSDNSFFSRLNWLTHLKFKYPALNVTMPNNEKFDKLYIWGVHHPGTDNDQIFLHAQASGRITVSTKRSQQTVIPNIGSRPRVRNIPSRISIYWTIVKPGDILLINSTGNLIAPRGYFKIRSGKSSIMKSDAPIGKCNSECITPNGSIPNDKPFQNVNRITYGACPRYVKQNTLKLATGMRNVPEKQTRGIFGAIAGFIENGWEGMVDGWYGFRHQNSEGIGQAADLKSTQAAINQINGKLNRLIGKTNEKFHQIEKEFSEVEGRIQDLEKYVEDTKIDLWSYNAELLVALENQHTIDLTDSEMNKLFERTKKQLRENAEDMGNGCFKIYHKCDNACIGSIRNGTYDHDVYRDEALNNRFQIKGVELKSGYKDWILWISFAISCFLLCVALLGFIMWACQKGNIRCNICI

SEQ ID NO: 4092 - protein, 566 aa, Artificial Sequence; identical to SEQ ID NO: 4004
  derived and/or modified protein sequence (wt) from hemagglutinin__InfluenzaA__ADC38987

SEQ ID NO: 4093 - protein, 566 aa, Artificial Sequence
  derived and/or modified protein sequence (wt) from hemagglutinin__InfluenzaA__ADC38997
MKAILVVLLYTFATANADTLCIGYHANNSTDTVDTVLEKNVTVTHSVNLLEDKHNGKLCKLRGVAPLHLGKCNIAGWILGNPECESLSTASSWSYIVETSSSDNGTCYPGDFIDYEELREQLSSVSSFERFEIFPKTSSWPNHDSNKGVTAACPHAGAKSFYKNLIWLVKKGNSYPKLSKSYINDKGKDVLVLWGIHHPSTSADQQSLYQNADAYVFVGTSRYSKKFKPEIAIRPKVRDQEGRMNYYWTLVEPGDKITFEATGNLVVPRYAFAMERNAGSGIIISDTPVHDCNTTCQTPKGAINTSLPFQNIHPITIGKCPKYVKSTKLRLATGLRNVPSIQSRGLFGAIAGFIEGGWTGMVDGWYGYHHQNEQGSGYAADLKSTQNAIDEITNKVNSVIEKMNTQFTAVGKEFNHLEKRIENLNKKVDDGFLDIWTYNAELLVLLENERTLDYHDSNVKNLYEKVRSQLKNNAKEIGNGCFEFYHKCDNTCMESVKNGTYDYPKYSEEAKLNREEIDGVKLESTRIYQILAIYSTVASSLVLVVSLGAISFWMCSNGSLQCRICI

SEQ ID NO: 4094 - protein, 566 aa, Artificial Sequence; identical to SEQ ID NO: 3770
  derived and/or modified protein sequence (wt) from hemagglutinin__InfluenzaA__ADC39007

SEQ ID NO: 4095 - protein, 565 aa, Artificial Sequence
  derived and/or modified protein sequence (wt) from hemagglutinin__InfluenzaA__ADC45604
MKAKLLVLLCTFTATYADTICIGYHANNSTDTVDTVLEKNVTVTHSVNLLENSHNGKLCLLKGIAPLQLGNCSVAGWILGNPECELLISKESWSYIVEKPNPENGTCYPGHFADYEELREQLSSVSSFERFEIFPKESSWPNHTVTGVSASCSHNGESSFYRNLLWLTGKNGLYPNLSKSYANNKEKEVLVLWGVHHPPNIGDQKALYHTENAYVSVVSSHYSRKFTPEIAKRPKVRDQEGRINYYWTLLEPGDTIIFEANGNLIAPRYAFALSRGLGSGIINSNAPMDKCDAKCQTPQGAINSSLPFQNVHPVTIGECPKYVRSAKLRMVTGLRNIPSIQSRGLFGAIAGFIEGGWTGMVDGWYGYHHQNEQGSGYAADQKSTQNAINGITNKVNSVIEKMNTQFTAVGKEFNKLERRMENLNKKVDDGFIDIWTYNAELLVLLENERTLDFHDSNVKNLYEKVKSQLKNNAKEIGNGCFEFYHKCNDECMESVKNGTYDYPKYSEESKLNREKIDGVKLESMGVYQILAIYSTVASSLVLLVSLGAISFWMCSNGSLQCRICI

SEQ ID NO: 4096 - protein, 565 aa, Artificial Sequence
  derived and/or modified protein sequence (wt) from hemagglutinin__InfluenzaA__ADC45626
MKVKLLVLLCTFTATYADTICIGYHANNSTDTVDTVLEKNVTVTHSVNLLEDNHNGKLCLLKGIAPLQLGNCSVAGWILGNPECELLISKESWSYIVEKPNPENGTCYPGHFADYEELREQLSSVSSFERFEIFPKESSWPNHTVTGVSASCSHNGESSFYKNLLWLTGKNGLYPNLSKSYANNKEKEVLVLWGVHHPPNIGNQMTLYHKENAYVSVVSSHYSRKFTPEIAKRPKVRDQEGRINYYWTLLEPGDTIIFEASGNLIAPRYAFALSRGFGSGIINSNAPMDECDAKCQTPQGAINSSLPFQNVHPVTIGECPKYVRSAKLRMVTGLRNIPSIQSRGLFGAIAGFIEGGWTGMVDGWYGYHHQNEQGSGYAADQKSTQNAINGITNKVNSVIEKMNTQFTAVGKEFNKLERRMENLNKKVDDGFIDVWTYNAELLVLLENERTLDFHDSNVKNLYEKVKNQLKNNAKEIGNGCFEFYHKCNDECMESVKNGTYDYPKYSEESKLSREKIDGVKLESMGVYQILAIYSTVASSLVLLVSLGAISFWMCSNGSLQCRICI

SEQ ID NO: 4097 - protein, 565 aa, Artificial Sequence
  derived and/or modified protein sequence (wt) from hemagglutinin__InfluenzaA__ADC45637
MKVKLLVLLCTFTATYADTICIGYHANNSTDTVDTVLEKNVTVTHSVNLLEDNHNGKLCLLKGIAPLQLGNCSVAGWILGNPECELLISKESWSYIVEKPNPENGTCYPGHFADYEELREQLSSVSSFERFEIFPKESSWPNHTVTGVSASCSHNGESSFYKNLLWLTGKNGLYPNLSKSYANNKEKEVLVLWGVHHPPNIGDQMTLYHKENAYVSVVSSHYSRKFTPEIAKRPKVRDQEGRINYYWTLLEPGDTIIFEASGNLIAPRYAFALSRGFGSGIINSNAPMDECDAKCQTPQGAINSSLPFQNVHPVTIGECPKYVRSAKLRMVTGLRNIPSIQSRGLFGAIAGFIEGGWTGMVDGWYGYHHQNEQGSGYAADQKSTQNAINGITNKVNSVIEKMNTQFTAVGKEFNKLERRMENLNKKVDDGFIDVWTYNAELLVLLENERTLDFHDSNVKNLYEKVKNQLKNNAKEIGNGCFEFYHKCNDECMESVKNGTYDYPKYSEESKLSREKIDGVKLESMGVYQILAIYSTVASSLVLLVSLGAISFWMCSNGSLQCRICI

SEQ ID NO: 4098 - protein, 565 aa, Artificial Sequence
  derived and/or modified protein sequence (wt) from hemagglutinin__InfluenzaA__ADC45648
MKVKLLVLLCTFAATYADTICIGYHANNSTDTVDTVLEKNVTVTHSVNLLENSHNGKLCLLKGIAPLQLGNCSIAGWVLGNPECELLISKESWSYIVEKPNPENGTCYPGHFADYEELREQLSSVSSFERFEIFPKESSWPNHTVTGVSASCSHNGESSFYRNLLWLTGKNGLYPNLSKSYANNKEKEVLVLWGVHHPPNIGDQKALYHTENAYVSVVSSHYSRKFTPEIAKRPKVRDQEGRINYYWTLLEPGDTIIFEANGNLIAPRYAFALSRGFGSGIINSNAPMDKCDAKCQTPQGAINSSLPFQNVHPVTIGECPKYVRSAKLRMVTGLRNIPSIQSRGLFGAIAGFIEGGWTGMVDGWYGYHHQNEQGSGYAADQKSTQNAINGITNKVNSVIEKMNTQFTAVGKEFNKLERRMENLNKKVDDGFIDIWTYNAELLVLLENERTLDFHDSNVKNLYEKVKSQLKNNAKEIGNGCFEFYHKCNDECMESVKNGTYDYPKYSEESKLNREKIDGVKLESMGVYQILAIYSTVASSLVLLVSLGAISFWMCSNGSLQCRICI

SEQ ID NO: 4099 - protein, 565 aa, Artificial Sequence
  derived and/or modified protein sequence (wt) from hemagglutinin__InfluenzaA__ADC45659
MKVKLLVLLCTFTATYADTICIGYHANNSTDTVDTVLEKNVTVTHSVNLLENSHNGKLCLLKGIAPLQLGNCSVAGWILGNPECELLISKESWSYIVEKPNPENGTCYPGHFADYEELREQLSSVSSFERFEIFPKKSSWPNHTVTGVSASCSHNGESSFYRNLLWLTEKNGLYPNLSKSYANNKEKEVLVLWGVHHPPNIGDQKALYHTENAYVSVVSSHYSRKFTPEIAKRPKVRDQEGRINYYWTLLEPGDTIIFEANGNLIAPRYAFALSRGFGSGIINSNAPMDKCDAKCQTPQGAINSSLPFQNVHPVTIGECPKYVRSAKLRMVTGLRNIPSIQSRGLFGAIAGFIEGGWTGMVDGWYGYHHQNEQGSGYAADQKSTQNAINGITNKVNSVIEKMNTQFTAVGKEFNKLERRMENLNKKVDDGFIDIWTYNAELLVLLENERTLDFHDSNVKNLYEKVKSQLKNNAKEIGNGCFEFYHKCNDECMESVKNGTYDYPKYSEESKLNREKIDGVKLESMGVYQILAIYSTVASSLVLLVSLGAISFWMCSNGSLQCRICI

SEQ ID NO: 4100 - protein, 565 aa, Artificial Sequence
  derived and/or modified protein sequence (wt) from hemagglutinin__InfluenzaA__ADC45670
MKVKLLVLLCTFTATYADTICIGYHANNSTDTVDTVLEKNVTVTHSVNLLENSHNGKLCLLKGIAPLQLGNCSVAGWILGNPECELLISKESWSYIVEKPNPENGTCYPGHFADYEELREQLSSVSSFERFEIFPKESSWPNHTVTGGSASCSHNGESSFYRNLLWLTGKNGLYPNLSKSYANNKEKEVLVLWGVHHPPNIGDQKALYHTENAYVSVVSSHYSRKFTPEIAKRPKVRDQEGRINYYWTLLEPGDTIIFEANGNLIAPRYAFALSRGFGSGIINSNAPMDKCDAKCQTPQGAINSSLPFQNVHPVTIGECPKYVRSAKLRMVTGLRNIPSIQSRGLFGAIAGFIEGGWTGMVDGWYGYHHQNEQGSGYAADQKSTQNAINGITNKVNSVIEKMNTQFTAVGKEFNKLERRMENLNKKVDDGFIDIWTYNAELLVLLENERTLDFHDSNVKNLYEKVKSQLKNNAKEIGNGCFEFYHKCNDECMESVKNGTYDYPKYSEESKLNREKIDGVKLESMGVYQILAIYSTVASSLVLLVSLGAISFWMCSNGSLQCRICI

SEQ ID NO: 4101 - protein, 565 aa, Artificial Sequence
  derived and/or modified protein sequence (wt) from hemagglutinin__InfluenzaA__ADC45681
MKVKLLVLLCTFTATYADTICIGYHANNSTDTVDTVLEKNVTVTHSVNLLEDNHNGKLCLLKGIAPLQLGNCSVAGWILGNPECELLISKESWSYIVEKPNPENGTCYPGHFADYEELREQLSSASSFERFEIFPKESSWPNHTVTGVSASCSHNGESSFYKNLLWLTGKNGLYPNLRKSYANNKEKEVLVLWGVHHPPNIGDQMTLYHKENAYVSVVSSHYSRKFTPEIAKRPKVRDQEGRINYYWTLLEPGDTIIFEASGNLIAPRYAFALSRGFGSGIINSNAPMDECDAKCQTPQGAINSSLPFQNVHPVTIGECPKYVRSAKLRMVTGLRNIPSIQSRGLFGAIAGFIEGGWTGMVDGWYGYHHQNEQGSGYAADQKSTQNAINGITNKVNSVIEKMNTQFTAVGKEFNKLERRMENLNKKVDDGFIDVWTYNAELLVLLENERTLDFHDSNVKNLYEKVKNQLKNNAKEIGNGCFEFYHKCNDECMESVKNGTYDYPKYSEESKLSREKIDGVKLESMGVYQILAIYSTVASSLVLLVSLGAISFWMCSNGSLQCRICI

SEQ ID NO: 4102 - protein, 565 aa, Artificial Sequence
  derived and/or modified protein sequence (wt) from hemagglutinin__InfluenzaA__ADC45692
MKVKLLVLLCTFTATYADTICIGYHANNSTDTVDTVLEKNVTVTHSVNLLENSHNGKLCLLKGIAPLQLGNCSVAGWILGNPECELLISKKSWSYIVEKPNPENGTCYPGHFADYEELREQLSSVSSFERFEIFPKESSWPNHTVTGVSASCSHNGESSFYRNLLWLTGKNGLYPNLSKSYANNKEKEVLVLWGVHHPPNIGDQKALYHTENAYVSVVSSHYSRKFTPEIAKRPKVRDQEGRINYYWTLLEPGDTIIFEANGNLIAPRYAFALSRGFGSGIINSNAPMDKCDAKCQTPQGAINSSLPFQNVHPVTIGECPKYVRSAKLRMVTGLRNIPSIQSRGLFGAIAGFIEGGWTGMVDGWYGYHHQNEQGSGYAADQKSTQNAINGITNKVNSVIEKMNTQFTAVGKEFNKLERRMENLNKKVDDGFIDIWTYNAELLVLLENERTLDFHDSNVKNLYEKVKSQLKNNAKEIGNGCFEFYHKCNDECMESVKNGTYDYPKYSEESKLNREKIDGVKLESMGVYQILAIYSTVASSLVLLVSLGAISFWMCSNGSLQCRICI

SEQ ID NO: 4103 - protein, 565 aa, Artificial Sequence; identical to SEQ ID NO: 3170
  derived and/or modified protein sequence (wt) from hemagglutinin__InfluenzaA__ADC45703

SEQ ID NO: 4104 - protein, 565 aa, Artificial Sequence
  derived and/or modified protein sequence (wt) from hemagglutinin__InfluenzaA__ADC45714
MKVKLLVLLCTFTATYADTICIGYHANNSTDTVDTVLEKNVTVTHSVNLLEDNHNGKLCLLKGIAPLQLGNCSVAGWILGNPECELLISKESWSYIVEKPNPENGTCYPGHFADYEELREQLSSVSSFERFEIFPKESSWPNHTVTGVSASCSHNGESSFYKNLLWLTGKNGLYPNLSKSYANNKEKEVLVLWGVHHPPNIGDQTTLYHKENAYVSVVSSHYSRKFTPEIAKRPKVRDQEGRINYYWTLLEPGDTIIFEASGNLIAPRYAFALSRGFGSGIINSNAPMDECDAKCQTPQGAINSSLPFQNVHPVTIGECPKYVRSAKLRMVTGLRNIPSIQSRGLFGAIAGFIEGGWTGMVDGWYGYHHQNEQGSGYAADQKSTQNAINGITNKVNSVIEKMNTQFTAVGKEFNKLERRMENLNKKVDDGFIDVWTYNAELLVLLENERTLDFHDSNVKNLYEKVKNQLKNNAKEIGNGCFEFYHKCNDECMESVKNGTYDYPKYSEESKLSREKIDGVKLESMGVYQILAIYSTVASSLVLLVSLGAISFWMCSNGSLQCRICI

SEQ ID NO: 4105 - protein, 565 aa, Artificial Sequence; identical to SEQ ID NO: 3170
  derived and/or modified protein sequence (wt) from hemagglutinin__InfluenzaA__ADC45725

SEQ ID NO: 4106 - protein, 565 aa, Artificial Sequence
  derived and/or modified protein sequence (wt) from hemagglutinin__InfluenzaA__ADC45736
MKVKLLVLLCTFTATYADTICIGYHANNSTDTVDTVLEKNVTVTHSVNLLENSHNGKLCLLKGIAPLQLGNCSVAGWILGNPECELLISKESWSYIVEKPNPENGTCYPGHFADYEELREQLSSVSSFERFEIFPKESSWPNHTVTGVSASCSHNGESSFYRNLLWLTGKNGLYPNLSKSYANNKEKEVLVLWGVHHPPNIGDQKALYHTENTYVSVVSSHYSRKFTPEIAKRPKVRDQEGRINYYWTLLEPGDTIIFEANGNLIAPRYAFALSRGFGSGIINSNAPMDKCDAKCQTPQGAINSSLPFQNVHPVTIGECPKYVRSAKLRMVTGLRNIPSIQSRGLFGAIAGFIEGGWTGMVDGWYGYHHQNEQGSGYAADQKSTQNAINGITNKVNSVIEKMNTQFTAVGKEFNKLERRMENLNKKVDDGFIDIWTYNAELLVLLENERTLDFHDSNVKNLYEKVKSQLKNNAKEIGNGCFEFYHKCNDECMESVKNGTYDYPKYSEESKLNREKIDGVKLESMGVYQILAIYSTVASSLVLLVSLGAISFWMCSNGSLQCRICI

SEQ ID NO: 4107 - protein, 565 aa, Artificial Sequence; identical to SEQ ID NO: 2488
  derived and/or modified protein sequence (wt) from hemagglutinin__InfluenzaA__ADC45747

SEQ ID NO: 4108 - protein, 565 aa, Artificial Sequence
  derived and/or modified protein sequence (wt) from hemagglutinin__InfluenzaA__ADC45758
MKVKLLVLLCTFTATYADTICIGYHANNSTDTVDTVLEKNVTVTHSVNLLENSHNGKLCLLKGIAPLQLGNCSVAGWILGNPECELLISKESWSYIVEKPNPENGTCYPGHFADYEELREQLSSVSSFERFEIFPKESSWPNHTVTGVSASCSHNGENSFYRNLLWLTGKNGLYPNLSKSYANNKEKEVLVLWGVHHPPNIADQKTLYHTENAYVSVVSSHYSRKFTPEIAKRPKVRDQEGRINYYWTLLEPGDTIIFEANGNLIAPRYAFALSRGFGSGIINSNAPMDKCDAKCQTPQGAINSSLPFQNVHPVTIGECPKYVRSAKLRMVTGLRNIPSIQSRGLFGAIAGFIEGGWTGMVDGWYGYHHQNEQGSGYAADQKSTQNAINGITNKVNSVIEKMNTQFTAVGKEFNKLERRMENLNKKVDDGFIDIWTYNAELLVLLENERTLNFHDSNVKNLYEKVKSQLKNNAKEIGNGCFEFYHKCNDECMESVKNGTYDYPKYSEESKLNREKIDGVKLESMGVYQILAIYSTVASSLVLLVSLGAISFWMCSNGSLQCRICI

SEQ ID NO: 4109 - protein, 565 aa, Artificial Sequence; identical to SEQ ID NO: 3626
  derived and/or modified protein sequence (wt) from hemagglutinin__InfluenzaA__ADC45780

SEQ ID NO: 4110 - protein, 565 aa, Artificial Sequence; identical to SEQ ID NO: 3131
  derived and/or modified protein sequence (wt) from hemagglutinin__InfluenzaA__ADC45791

SEQ ID NO: 4111 - protein, 565 aa, Artificial Sequence
  derived and/or modified protein sequence (wt) from hemagglutinin__InfluenzaA__ADC45813
MKVKLLILLCTFTATYADTICIGYHANNSTDTVDTVLEKNVTVTHSVNLLENSHNGKLCLLKGIAPLQLGNCSVAGWILGNPECELLISKESWSYIVEKPNPENGTCYPGHFADYEELREQLSSVSSFERFEIFPKESSWPNHTVTGVSASCSHNGESSFYRNLLWLTMKNGLYPNLSKSYANNKEKEVLVLWGVHHPPNIGDQKTLYNTENAYVSVVSSHYSRKFTPEIAKRPKVRDQEGRINYYWTLLEPGDTIIFEANGNLIAPRYAFALSRGFGSGIINSNAPMDKCDAKCQTPQGAINSSLPFQNVHPVTIGECPKYVRSAKLRMVTGLRNIPSIQSRGLFGAIAGFIEGGWTGMVDGWYGYHHQNEQGSGYAADQKSTQNAINGITNKVNSVIEKMNTQFTAVGKEFNKLERRMENLNKKVDDGFIDIWTYNAELLVLLENERTLDFHDSNVKNLYEKVKSQLKNNAKEIGNGCFEFYHKCNDECMESVKNGTYDYPKYSEESKLNREKIDGVKLESMGVYQILAIYSTVASSLVLLVSLGAISFWMCSNGSLQCRICI

SEQ ID NO: 4112 - protein, 565 aa, Artificial Sequence; identical to SEQ ID NO: 3131
  derived and/or modified protein sequence (wt) from hemagglutinin__InfluenzaA__ADC45824

SEQ ID NO: 4113 - protein, 565 aa, Artificial Sequence
  derived and/or modified protein sequence (wt) from hemagglutinin__InfluenzaA__ADC45835
MKVKLLVLLCTFTATYADTICIGYHANNSTDTVDTVLEKNVTVTHSVNLLENSHNGKLCLLKGIAPLQLGNCSVAGWILGNPECELLISKESWSYIVEKPNPENGTCYPGHFADYEELREQLSSVSSFERFEIFPKESSWPNHTVTGVSASCSHNGENSFYRNLLWLTGKNGLYPNLSKSYANNKEKEVLVLWGVHHPPNIADQKTLYHTENAYVSVVSSHYSRKFTPEIAKRPKVRDQEGRINYYWTLLEPGDTIIFEANGNLIAPRYAFALSRGFGSGIINSNAPMDKCDAKCQTPQGAINSSLPFQNVHPVTIGECPKYVRSAKLRMVTGLRNIPSIQSRGLFGAIAGFIEGGWTGMVDGWYGYHHQNEQGSGYAADQKSTQNAINGITNKVNSVIEKMNTQFTAVGKEFNKLERRMENLNKKVDDGFIDIWTYNAELLVLLENERTLDFHDSNVKNLYEKVKSQLKNNAKEIGNGCFEFYHKCNDECMESVKNGTYDYPKYSEESKLNREKIDGVTLESMGVYQILAIYSTVASSLVLLVSLGAISFWMCSNGSLQCRICI

SEQ ID NO: 4114 - protein, 565 aa, Artificial Sequence; identical to SEQ ID NO: 2488
  derived and/or modified protein sequence (wt) from hemagglutinin__InfluenzaA__ADC45846

SEQ ID NO: 4115 - protein, 566 aa, Artificial Sequence; identical to SEQ ID NO: 2669
  derived and/or modified protein sequence (wt) from hemagglutinin__InfluenzaA__ADC53558

SEQ ID NO: 4116 - protein, 566 aa, Artificial Sequence; identical to SEQ ID NO: 2760
  derived and/or modified protein sequence (wt) from hemagglutinin__InfluenzaA__ADD14087

SEQ ID NO: 4117 - protein, 566 aa, Artificial Sequence; identical to SEQ ID NO: 2669
  derived and/or modified protein sequence (wt) from hemagglutinin__InfluenzaA__ADD14089

SEQ ID NO: 4118 - protein, 566 aa, Artificial Sequence; identical to SEQ ID NO: 2669
  derived and/or modified protein sequence (wt) from hemagglutinin__InfluenzaA__ADD14093

SEQ ID NO: 4119 - protein, 566 aa, Artificial Sequence
  derived and/or modified protein sequence (wt) from hemagglutinin__InfluenzaA__ADD14095
MKAILVVLLYTFATANADTLCIGYHANNSTDTVDTVLEKNVTVTHSVNLLEDKHNGKLCKLRGVAPLHLGKCNIAGWILGNPECESLSTASSWSYIVETSSSDNGTCYPGDFIDYEELREQLSSVSSFERFEIFPKTSSWPNHDSNKGVTAACPHAGAKSFYKNLIWLVKKGNSYPKLSKSYINDKGKEVLVLWGIHHPSTSADQQSLYQNADAYVFVGTSRYSKKFKPEIAIRPKVRDQEGRMNYYWTLVEPGDKITFEATGNLVLPRYAFAMERNAGSGIIISDTPVHDCNTTCQTPKGAINTSLPFQNIHPITIGKCPKYVKSTKLRLATGLRNVPSIQSRGLFGAIAGFIEGGWTGMVDGWYGYHHQNEQGSGYAADLKSTQNAIDEITNKVNSVIEKMNTQFTAVGKEFNHLEKRIENLNKKVDDGFLDIWTYNAELLVLLENERTLDYHDSNVKNLYEKVRSQLKNNAKEIGNGCFEFYHKCDNTCMESVKNGTYDYPKYSEEAKLNREEIDGVKLESTRIYQILAIYSTVASSLVLVVSLGAISFWMCSNGSLQCRICI

SEQ ID NO: 4120 - protein, 566 aa, Artificial Sequence; identical to SEQ ID NO: 2669
  derived and/or modified protein sequence (wt) from hemagglutinin__InfluenzaA__ADD14097

SEQ ID NO: 4121 - protein, 566 aa, Artificial Sequence; identical to SEQ ID NO: 2669
  derived and/or modified protein sequence (wt) from hemagglutinin__InfluenzaA__ADD14099

SEQ ID NO: 4122 - protein, 566 aa, Artificial Sequence; identical to SEQ ID NO: 2669
  derived and/or modified protein sequence (wt) from hemagglutinin__InfluenzaA__ADD14101

SEQ ID NO: 4123 - protein, 566 aa, Artificial Sequence
  derived and/or modified protein sequence (wt) from hemagglutinin__InfluenzaA__ADD14103
MKAILVVLLCTFATANADTLCIGYHANNSTDTVDTVLEKNVTVTHSVNLLEDKHNGKLCKLRGVAPLHLGKCNIAGWILGNPECESLSTASSWSYIVETSSSDNGTCYPGDFIDYEELREQLSSVSSFERFEIFPKTSSWPNHDSNKGVTAACPHAGAKSFYKNLIWLVKKGNSYPKLSKSYINDKGKEVLVLWGIHHPSTSADQQSLYQNADAYVFVGTSRYSKKFKPEIAIRPKVRDQEGRMNYYWTLVEPGDKITFEATGNLVVPRYAFAMERNAGSGIIISDTPVHDCNTTCQTPKGAINTSLPFQNIHPITIGKCPKYVKSTKLRLATGLRNVPSIQSRGLFGAIAGFIEGGWTGMVDGWYGYHHQNEQGSGYAADLKSTQNAIDEITNKVNSVIEKMNTQFTAVGKEFNHLDKRIENLNKKIDDGFLDIWTYNAELLVLLENERTLDYHDSNVKNLYEKVRSQLKNNAKEIGNGCFEFYHKCDNTCMESVKNGTYDYPKYSEEAKLNREEIDGVKLESTRIYQILAIYSTVASSLVLVVSLGAISFWMCSNGSLQCRICI

SEQ ID NO: 4124 - protein, 566 aa, Artificial Sequence
  derived and/or modified protein sequence (wt) from hemagglutinin__InfluenzaA__ADD14111
MKAILVVLLYTFATANADTLCIGYHANNSTDTVDTVLEKNVTVTHSVNLLEDKHNGKLCKLRGVAPLHLGKCNIAGWILGNPECESLSTASSWSYIVEISSSDNGTCYPGDFIDYEELREQLSSVSSFERFEIFPKTSSWPNHDSNKGVTAACPHAGAKSFYKNLIWLVKKGNSYPKLSKSYINDKGKEVLVLWGIHHPSTSADQQSLYQNADAYVFVGTSRYSKKFKPEIAIRPKVRDQEGRMNYYWTLVEPGDKITFEATGNLVVPRYAFAMERNAGSGIIISDTPVHDCNTTCQTPKGAINTSLPFQNIHPITIGKCPKYVKSTKLRLATGLRNVPSIQSRGLFGAIAGFIEGGWTGMVDGWYGYHHQNEQGSGYAADLKSTQNAIDEITNKVNSVIEKMNTQFTAVGKEFNHLEKRIENLNKKVDDGFLDIWTYNAELLVLLENERTLDYHDSNVKNLYEKVRSQLKNNAKEIGNGCFEFYHKCDNTCMESVKNGTYDYPKYSEEAKLNREEIDGVKLESTRIYQILAIYSTVASSLVLVVSLGAISFWMCSNGSLQCRICI

SEQ ID NO: 4125 - protein, 566 aa, Artificial Sequence; identical to SEQ ID NO: 2669
  derived and/or modified protein sequence (wt) from hemagglutinin__InfluenzaA__ADD14115

SEQ ID NO: 4126 - protein, 566 aa, Artificial Sequence; identical to SEQ ID NO: 2669
  derived and/or modified protein sequence (wt) from hemagglutinin__InfluenzaA__ADD14117

SEQ ID NO: 4127 - protein, 566 aa, Artificial Sequence; identical to SEQ ID NO: 2669
  derived and/or modified protein sequence (wt) from hemagglutinin__InfluenzaA__ADD14119

SEQ ID NO: 4128 - protein, 566 aa, Artificial Sequence; identical to SEQ ID NO: 2669
  derived and/or modified protein sequence (wt) from hemagglutinin__InfluenzaA__ADD14121

SEQ ID NO: 4129 - protein, 566 aa, Artificial Sequence; identical to SEQ ID NO: 2669
  derived and/or modified protein sequence (wt) from hemagglutinin__InfluenzaA__ADD14123

SEQ ID NO: 4130 - protein, 566 aa, Artificial Sequence; identical to SEQ ID NO: 2669
  derived and/or modified protein sequence (wt) from hemagglutinin__InfluenzaA__ADD14127

SEQ ID NO: 4131 - protein, 566 aa, Artificial Sequence
  derived and/or modified protein sequence (wt) from hemagglutinin__InfluenzaA__ADD14129
MKAILVVLLYTFATANADTLCIGYHANNSTDTVDTVLEKNVTVTHSVNLLEDKHNGKLCKLRGVASLHLGKCNIAGWILGNPECESLSTASSWSYIVETSSSDNGTCYPGDFIDYEELREQLSSVSSFERFEIFPKTSSWPNHDSNKGVTAACPHAGAKSFYKNLIWLVKKGNSYPKLSKSYINDKGKEVLVLWGIHHPSTSADQQSLYQNADAYVFVGTSRYSKKFKPEIAIRPKVRDQEGRMNYYWTLVEPGDKITFEATGNLVVPRYAFAMERNAGSGIIISDTPVHDCNTTCQTPKGAINTSLPFQNIHPITIGKCPKYVKSTKLRLATGLRNVPSIQSRGLFGAIAGFIEGGWTGMVDGWYGYHHQNEQGSGYAADLKSTQNAIDEITNKVNSVIEKMNTQFTAVGKEFNHLEKRIENLNKKVDDGFLDIWTYNAELLVLLENERTLDYHDSNVKNLYEKVRSQLKNNAKEIGNGCFEFYHKCDNTCMESVKNGTYDYPKYSEEAKLNREEIDGVKLESTRIYQILAIYSTVASSLVLVVSLGAISFWMCSNGSLQCRICI

SEQ ID NO: 4132 - protein, 566 aa, Artificial Sequence
  derived and/or modified protein sequence (wt) from hemagglutinin__InfluenzaA__ADD14133
MKAILVVLLYTFATANADTLCIGYHANNSTDTVDTVLEKNVTVTHSVNLLEDKHNGKLCKLRGVAPLHLGKCNIAGWILGNPECESLSTASSWSYIVETSSSDNGTCYPGDFIDYEELREQLSSVSSFERFEIFPKTSSWPNHDSNKGVTAACPHAGAKSFYKNLIWLVKKGNSYPKLSKSYINDKGKEVLVLWGIHHPSTSADQQSLYQNVDAYVFVGTSRYSKKFKPEIAIRPKVRDQEGRMNYYWTLVEPGDKITFEATGNLVVPRYAFAMERNAGFGIIISDTPVHDCNTTCQTPKGAINTSLPFQNIHPITIGKCPKYVKSTKLRLATGLRNVPSIQSRGLFGAIAGFIEGGWTGMVDGWYGYHHQNEQGSGYAADLKSTQNAIDEITNKVNSVIEKMNTQFTAVGKEFNHLEKRIENLNKKVDDGFLDIWTYNAELLVLLENERTLDYHDSNVKNLYEKVRSQLKNNAKEIGNGCFEFYHKCDNTCMESVKNGTYDYPKYSEEAKLNREEIDGVKLESTRIYQILAIYSTVASSLVLVVSLGAISFWMCSNGSLQCRICI

SEQ ID NO: 4133 - protein, 566 aa, Artificial Sequence; identical to SEQ ID NO: 2760
  derived and/or modified protein sequence (wt) from hemagglutinin__InfluenzaA__ADD14135

SEQ ID NO: 4134 - protein, 566 aa, Artificial Sequence; identical to SEQ ID NO: 2669
  derived and/or modified protein sequence (wt) from hemagglutinin__InfluenzaA__ADD14137

SEQ ID NO: 4135 - protein, 566 aa, Artificial Sequence; identical to SEQ ID NO: 3417
  derived and/or modified protein sequence (wt) from hemagglutinin__InfluenzaA__ADD14139

SEQ ID NO: 4136 - protein, 566 aa, Artificial Sequence; identical to SEQ ID NO: 2669
  derived and/or modified protein sequence (wt) from hemagglutinin__InfluenzaA__ADD14143

SEQ ID NO: 4137 - protein, 566 aa, Artificial Sequence; identical to SEQ ID NO: 2669
  derived and/or modified protein sequence (wt) from hemagglutinin__InfluenzaA__ADD14145

SEQ ID NO: 4138 - protein, 566 aa, Artificial Sequence; identical to SEQ ID NO: 2669
  derived and/or modified protein sequence (wt) from hemagglutinin__InfluenzaA__ADD14147

SEQ ID NO: 4139 - protein, 566 aa, Artificial Sequence
  derived and/or modified protein sequence (wt) from hemagglutinin__InfluenzaA__ADD14151
MKAILVVLLYTFATANADTLCIGYHANNSTDTVDTVLEKNVTVTHSVNLLEDKHNGKLCKLRGVAPLHLGKCNIAGWILGNPECESLSTASSWSYIVETSSSDNGTCYPGDFIDYEELREQLSSVSSFERFEIFPKTSSWPNHDSNKGVTAACPRAGAKSFYKNLIWLVKKGNSYPKLSKSYINDKGKEVLVLWGIHHPSTSADQQSLYQNADAYVFVGTSRYSKKFKPEIAIRPKVRDQEGRMNYYWTLVEPGDKITFEATGNLVVPRYAFAMERNAGSGIIISDTPVHDCNTTCQTPKGAINTSLPFQNIHPITIGKCPKYVKSTKLRLATGLRNVPSIQSRGLFGAIAGFIEGGWTGMVDGWYGYHHQNEQGSGYAADLKSTQNAIDKITNKVNSVIEKMNTQFTAVGKEFNHLEKRIENLNKKVDDGFLDIWTYNAELLVLLENERTLDYHDSNVKNLYEKVRSQLKNNAKEIGNGCFEFYHKCDNTCMESVKNGTYDYPKYSEEAKLNREEIDGVKLESTRIYQILAIYSTVASSLVLVVSLGAISFWMCSNGSLQCRICI

SEQ ID NO: 4140 - protein, 566 aa, Artificial Sequence; identical to SEQ ID NO: 2669
  derived and/or modified protein sequence (wt) from hemagglutinin__InfluenzaA__ADD14153

SEQ ID NO: 4141 - protein, 566 aa, Artificial Sequence; identical to SEQ ID NO: 2669
  derived and/or modified protein sequence (wt) from hemagglutinin__InfluenzaA__ADD14155

SEQ ID NO: 4142 - protein, 566 aa, Artificial Sequence; identical to SEQ ID NO: 2669
  derived and/or modified protein sequence (wt) from hemagglutinin__InfluenzaA__ADD14157

SEQ ID NO: 4143 - protein, 566 aa, Artificial Sequence; identical to SEQ ID NO: 2669
  derived and/or modified protein sequence (wt) from hemagglutinin__InfluenzaA__ADD14162

SEQ ID NO: 4144 - protein, 566 aa, Artificial Sequence; identical to SEQ ID NO: 2669
  derived and/or modified protein sequence (wt) from hemagglutinin__InfluenzaA__ADD14172

SEQ ID NO: 4145 - protein, 566 aa, Artificial Sequence; identical to SEQ ID NO: 2669
  derived and/or modified protein sequence (wt) from hemagglutinin__InfluenzaA__ADD14182

SEQ ID NO: 4146 - protein, 566 aa, Artificial Sequence; identical to SEQ ID NO: 2669
  derived and/or modified protein sequence (wt) from hemagglutinin__InfluenzaA__ADD14192

SEQ ID NO: 4147 - protein, 566 aa, Artificial Sequence; identical to SEQ ID NO: 2669
  derived and/or modified protein sequence (wt) from hemagglutinin__InfluenzaA__ADD14202

SEQ ID NO: 4148 - protein, 566 aa, Artificial Sequence
  derived and/or modified protein sequence (wt) from hemagglutinin__InfluenzaA__ADD21447
MKAILVFLLYTFATANADTLCIGYHANNSTDTVDTVLEKNVTVTHSVNLLEDRHNGKLCKLRGVAPLHLGKCNIAGWLLGNPECELLFTASSWSYIVETSNSDNGTCYPGDFINYEELREQLSSVSSFERFEMFPKSSSWPNHETNRGVTAACPYAGANSFYRNLIWLVKKENSYPKLSKSYINNKEKEVLVLWGIHHPPTSADQQSLYQNADAYVFVGSSKYNKKFRPEIAARPKVRGQTGRMNYYWTLVEPGDTITFEATENLVVPRYAFAMKRGSGSGIIISDTPVHDCNTTCQTPKGAINTSLPFQNIHPVTIGECPKYVKSTNLRMATGLRNIPSIQSRGLFGAIAGFIEGGWTGMIDGWYGYHHQNEQGSGYAADRKSTQNAIDGITNKVNSVIEKMNTQFTAVGKEFNHLEKRIENLNKKVDDGLLDVWTYNAELLVLLENERTLDYHDSNVKNLYEKVRSQLKNNAKEIGNGCFEFYHKCDDTCMESVRNGAYDYPKYSEEAKLNREEIDGVKLESTRIYQILAIYSTVASSLVLLVSLGAISFWMCSNGSLQCRICI

SEQ ID NO: 4149 - protein, 566 aa, Artificial Sequence
  derived and/or modified protein sequence (wt) from hemagglutinin__InfluenzaA__ADD21457
MKAILVFLLYTFATANADTLCIGYHANNSTDTVDTVLEKNVTVTHSVNLLEDRHNGKLCKLRGVAPLHLGKCNIAGWLLGNPECELLFTASSWSYIVETSNSDNGTCYPGDFINYEELREQLSSVSSFERFEMFPKSSSWPNHETNRGVTAACPYAGANSFYRNLIWLVKKENSYPKLSKSYINNKEKEVLVLWGIHHPPTSADQQSLYQNADAYVFVGSSKYNKKFRPEIAARPKVRGQTGRMNYYWTLVEPGDTITFEATGNLVVPRYAFAMKRGSGSGIIISDTPVHDCNTTCQTPKGAVNTSLPFQNIHPVTIGECPKYVKSTNLRMATGLRNIPSIQSRGLFGAIAGFIEGGWTGMIDGWYGYHHQNEQGSGYAADRKSTQNAIDGITNKVNSVIEKMNTQFTAVGKEFNHLEKRIENLNKKVDDGLLDVWTYNAELLVLLENERTLDYHDSNVKNLYEKVRSQLKNNAKEIGNGCFEFYHKCDDTCMESVRNGTYDYPKYSEEAKLNREEIDGVKLESTRIYQILAIYSTVASSLVLLVSLGAISFWMCSNGSLQCRICI

SEQ ID NO: 4150 - protein, 565 aa, Artificial Sequence
  derived and/or modified protein sequence (wt) from hemagglutinin__InfluenzaA__ADD21467
MKAKLLVLLCTFTATYADTICIGYHANNSTDTVDTVLEKNVTVTHSVNLLEDSHNGKLCLLKGIAPLQLGNCSVAGWILGNPECELLISKESWSYIVETPNPENGTCYPGYFADYEELREQLSSVSSFERFEIFPKESSWPNHTVTGVSASCSHNGKSSFYRNLLWLTGKNGLYPNLSKSYANNKEKEVLVLWGVHHPPNIRDQRALYHTENAYVSVVSSHYSRRFTPEIAKRPKVRGQEGRINYYWTLLEPGDTIIFEANGNLIAPWYAFALSRGFGSGIITSNAPMDECDAKCQTPQGAINSSLPFQNVHPVTIGECPKYARSAKLRMVTGLRNIPSIQSRGLFGAIAGFIEGGWTGMVDGWYGYHHQNEQGSGYAADQKSTQNAINGITNKVNSVIEKMNTQFTAVGKEFNKLERRMENLNKKVDDGFLDIWTYNAELLVLLENERTLDFHDSNVKNLYEKVKSQLKNNAKEIGNGCFEFYHKCNNECMESVKNGTYDYPKYSEESKLNREKIDGVKLESMGVYQILAIYSTVASSLVLLVSLGAISFWMCSNGSLQCRICI

SEQ ID NO: 4151 - protein, 566 aa, Artificial Sequence
  derived and/or modified protein sequence (wt) from hemagglutinin__InfluenzaA__ADD21560
MKTIIAFSHILCLIYAQKLPGSDNSMATLCLGHHAVPNGTLVKTITDDQIEVTNATELVQSSSTGRICNSPHHILDGKNCTLIDALLGDPHCDDFQNKEWDLFVERSTAYSNCYPYYVPDYASLRSLVASSGTLEFTQESFNWTGVTQDGSSYTCRRKSVNSFFSRLNWLHNLDYKYPALNVTMPNNDKFDKLYIWGVHHPGTDRDQTNLYVQASGRVTVSTKRSQQTVIPNIGSRPWVRGVSSIISIYWTIVKPGDILLINSTGNLIAPRGYFKIQSGKSSIMRSDAPIGNCNSECITPNGSIPNDKPFQNVNRITYGACPRYVKQNTLKLATGMRNVPEKQTRGIFGAIAGFIENGWEGMVDGWYGFRHQNSEGTGQAADLKSTQAAINQITGKLNRVIKKTNEKFHQIEKEFSEVEGRIQDLEKYVEDTKIDLWSYNAELLVALENQHTIDLTDSEMNKLFERTRKQLRENAEDMGNGCFKIYHKCDNACIGSIRNGTYDHDVYRDEALNNRFQIKSVQLKSGYKDWILWISFAMSCFLLCVVLLGFIMWTCQKGNIKCNICI

SEQ ID NO: 4152 - protein, 566 aa, Artificial Sequence; identical to SEQ ID NO: 2656
  derived and/or modified protein sequence (wt) from hemagglutinin__InfluenzaA__ADD21734

SEQ ID NO: 4153 - protein, 566 aa, Artificial Sequence; identical to SEQ ID NO: 2669
  derived and/or modified protein sequence (wt) from hemagglutinin__InfluenzaA__ADD21744

SEQ ID NO: 4154 - protein, 566 aa, Artificial Sequence
  derived and/or modified protein sequence (wt) from hemagglutinin__InfluenzaA__ADD21764
MKAILVVLLYTFATANADTLCIGYHANNSTDTVDTVLEKNVTVTHSVNLLEDKHNGKLCKLRGVAPLHLGKCNIAGWILGNPECESLSTASSWSYIVETSSSDNGTCYPGDFIDYEELREQLSSVSSFERFEIFPKTSSWPNHDSNKGVTAACPHAGAKSFYKNLIWLVKKGNSYPKLSKSYINDKGKEVLVLWGIHHPSTSADQQSLYQNADAYVFVGTSRYSKKFKPEIAIRPKVRDQEGRMNYYWTLVEPGDKITFEATGNLVVPRYAFAMERNAESGIIISDTPVHDCNTTCQTPKGAINTSLPFQNIHPITIGKCPKYVKSTKLRLATGLRNVPSIQSRGLFGAIAGFIEGGWTGMVDGWYGYHHQNEQGSGYAADLKSTQNAIDEITNKVNSVIEKMNTQFTAVGKEFNHLEKRIENLNKKVDDGFLDIWTYNAELLVLLENERTLDYHDSNVKNLYEKVRSQLKNNAKEIGNGCFEFYHKCDNTCMESVKNGTYDYPKYSEEAKLNREEIDGVKLESTRIYQILAIYSTVASSLVLVVSLGAISFWMCSNGSLQCRICI

SEQ ID NO: 4155 - protein, 566 aa, Artificial Sequence
  derived and/or modified protein sequence (wt) from hemagglutinin__InfluenzaA__ADD21774
MKAILVVLLYTFATANADTLCIGYHANNSTDTVDTVLEKNVTVTHSVNLLEDKHNGKLCKLRGVAPLHLGKCNIAGWILGNPECESLSTASSWSYIVETSSSDNGTCYPGDFIDYEELREQLSSVSSFERFEIFPKTSSWPNHDSNKGVTAACPHAGAKSFYKNLIWLVKKGNSYPKLSKSYINDKGKEVLVLWGIHHPSTSADQQSLYQNADAYVFVGSSRYSKKFKPEIAIRPKVRDQEGRMNYYWTLVEPGDKITFEATGNLVVPRYAFAMERNAGSGIIISDTPVHDCNTTCQTPKGAINTSLPFQNIHPITIGKCPKYVKSTKLRLATGLRNVPSVQSRGLFGAIAGFIEGGWTGMVDGWYGYHHQNEQGSGYAADLKSTQNAIDEITNKVNSVIEKMNTQFTAVGKEFNHLEKRIENLNKKVDDGFLDIWTYNAELLVLLENERTLDYHDSNVKNLYEKVRSQLKNNAKEIGNGCFEFYHKCDNTCMESVKNGTYDYPKYSEEAKLNREEIDGVKLESTRIYQILAIYSTVASSLVLVVSLGAISFWMCSNGSLQCRICI

SEQ ID NO: 4156 - protein, 566 aa, Artificial Sequence; identical to SEQ ID NO: 2669
  derived and/or modified protein sequence (wt) from hemagglutinin__InfluenzaA__ADD21784

SEQ ID NO: 4157 - protein, 566 aa, Artificial Sequence; identical to SEQ ID NO: 3829
  derived and/or modified protein sequence (wt) from hemagglutinin__InfluenzaA__ADD21794

SEQ ID NO: 4158 - protein, 566 aa, Artificial Sequence; identical to SEQ ID NO: 2669
  derived and/or modified protein sequence (wt) from hemagglutinin__InfluenzaA__ADD21804

SEQ ID NO: 4159 - protein, 566 aa, Artificial Sequence
  derived and/or modified protein sequence (wt) from hemagglutinin__InfluenzaA__ADD21814
MKAILVVLLYTFATANADTLCIGYHANNSTDTVDTVLEKNVTVTHSVNLLEDKHNGKLCKLRGVAPLHLGKCNIASWILGNPECESLSTASSWSYIVETSSSDNGTCYPGDFIDYEELREQLSSVSSFERFEIFPKTSSWPNHDSNKGVTAACPHAGAKSFYKNLIWLVKKGNSYPKLSKSYINDKGKEVLVLWGIHHPSTSADQQSLYQNADAYVFVGTSRYSKKFKPEIAIRPKVRDQEGRMNYYWTLVEPGDKITFEATGNLVVPRYAFAMERNAGSGIIISDTPVHDCNTTCQTPKGAINTSLPFQNIHPITIGKCPKYVKSTKLRLATGLRNVPSIQSRGLFGAIAGFIEGGWTGMVDGWYGYHHQNEQGSGYAADLKSTQNAIDEITNKVNSVIEKMNTQFTAVGKEFNHLEKRIENLNKKVDDGFLDIWTYNAELLVLLENERTLDYHDSNVKNLYEKVRSQLKNNAKEIGNGCFEFYHKCDNTCMESVKNGTYDYPKYSEEAKLNREEIDGVKLESTRIYQILAIYSTVASSLVLVVSLGAISFWMCSNGSLQCRICI

SEQ ID NO: 4160 - protein, 566 aa, Artificial Sequence; identical to SEQ ID NO: 3829
  derived and/or modified protein sequence (wt) from hemagglutinin__InfluenzaA__ADD21824

SEQ ID NO: 4161 - protein, 566 aa, Artificial Sequence; identical to SEQ ID NO: 3829
  derived and/or modified protein sequence (wt) from hemagglutinin__InfluenzaA__ADD21834

SEQ ID NO: 4162 - protein, 566 aa, Artificial Sequence; identical to SEQ ID NO: 3833
  derived and/or modified protein sequence (wt) from hemagglutinin__InfluenzaA__ADD21844

SEQ ID NO: 4163 - protein, 566 aa, Artificial Sequence; identical to SEQ ID NO: 3833
  derived and/or modified protein sequence (wt) from hemagglutinin__InfluenzaA__ADD21854

SEQ ID NO: 4164 - protein, 566 aa, Artificial Sequence; identical to SEQ ID NO: 3771
  derived and/or modified protein sequence (wt) from hemagglutinin__InfluenzaA__ADD21864

SEQ ID NO: 4165 - protein, 566 aa, Artificial Sequence
  derived and/or modified protein sequence (wt) from hemagglutinin__InfluenzaA__ADD21884
MKAILVVLLYTFATANADTLCIGYHANNSTDTVDTVLEKNVTVTHSVNLLEDKHNGKLCKLRGVAPLHLGKCNIAGWILGNPECESLSTASSWSYIVETSSSGNGTCYPGDFIDYEELREQLSSVSSFERFEIFPKTSSWPNHDSNKGVTAACPHAGAKSFYKNLIWLVKKGNSYPKLSKSYINDKGKEVLVLWGIHHPSTSADQQSLYQNADAYVFVGTSRYSKKFKPEIAIRPKVRDQEGRMNYYWTLVEPGDKITFEATGNLVVPRYAFAMERNAGSGIIISDTPVHDCNTTCQTPKGAINTSLPFQNIHPITIGKCPKYVKSTKLRLATGLRNVPSIQSRGLFGAIAGFIEGGWTGMVDGWYGYHHQNEQGSGYAADLKSTQNAIDEITNKVNSVIEKMNTQFTAVGKEFNHLEKRIENLNKKVDDGFLDIWTYNAELLVLLENERTLDYHDSNVKNLYEKVRSQLKNNAKEIGNGCFEFYHKCDNTCMGSVKNGTYDYPKYSEEAKLNREEIDGVKLESTRIYQILAIYSTVASSLVLVVSLGAISFWMCSNGSLQCRICI

SEQ ID NO: 4166 - protein, 566 aa, Artificial Sequence; identical to SEQ ID NO: 3771
  derived and/or modified protein sequence (wt) from hemagglutinin__InfluenzaA__ADD21894

SEQ ID NO: 4167 - protein, 566 aa, Artificial Sequence
  derived and/or modified protein sequence (wt) from hemagglutinin__InfluenzaA__ADD22501
MKAILVVLLYTFATANADTLCIGYHANNSTDTVDTVLEKNVTVTHSVNLLEDKHNGKLCKLRGVAPLHLGKCNIAGWILGNPECESLSTASSWSYIVETSSSDNGTCYPGDFIDYEELREQLSSVSSFERFEIFPKTSSWPNHDSNKGVTAACPHAGAKSFYKNLIWLVKKGNSYPKLSKSYINDKGKEVLVLWGIHHPSTSADQQSLYQNADAYVFVGTSKYSKKFKPEIAIRPKVRDQEGRMNYYWTLVEPGDKITFEATGNLVVPRYAFAMERNAGSGIIISDTPVHDCNTTCQTPKGAINTSLPFQNIHPITIGKCPKYVKSTKLRLATGLRNVPSIQSRGLFGAIAGFIEGGWTGMVDGWYGYHHQNEQGSGYAADLKSTQNAIDEITNKVNSVIEKMNTQFTAVGKEFNHLEKRIENLNKKIDDGFLDIWTYNAELLVLLENERTLDYHDSNVKNLYEKVRIQLKNNAKEIGNGCFEFYHKCDNTCMESVKNGTYDYPKYSEEAKLNREEIDGVKLESTRIYQILAIYSTVASSLVLVVSLGAISFWMCSNGSLQCRICI

SEQ ID NO: 4168 - protein, 566 aa, Artificial Sequence; identical to SEQ ID NO: 3771
  derived and/or modified protein sequence (wt) from hemagglutinin__InfluenzaA__ADD22511

SEQ ID NO: 4169 - protein, 566 aa, Artificial Sequence
  derived and/or modified protein sequence (wt) from hemagglutinin__InfluenzaA__ADD22521
MKAILVVLLYTFATANADTLCIGYHANNSTDTVDTVLEKNVTVTHSVNLLEDKHNGKLCKLRGVAPLHLGKCNIAGWILGNPECESLSTASSWSYIVETSSSDNGTCYPGDFIDYEELREQLSSVSSFERFEIFPKTSSWPNHDSNKGVTAACPHAGAKSFYKNLIWLVKKGNSYPKLSKSYINDKGKEVLVLWGIHHPSTSADQQSLYQNADTYVFVGTSRYSKKFKPEIAIRPKVRDQEGRMNYYWTLVEPGDKITFEATGNLVVPRYAFAMERNAGSGIIISDTPVHDCNTTCQTPKGAINTSLPFQNIHPITIGKCPKYVKSTKLRLATGLRNVPSIQSRGLFGAIAGFIEGGWTGMVDGWYGYHHQNEQGSGYAADLKSTQNAIDEITNKVNSVIEKMNTQFTAVGKEFNHLEKRIENLNKKIDDGFLDIWTYNAELLVLLENERTLDYHDSNVKNLYEKVRSQLKNNAKEIGNGCFEFYHKCDNTCMESVKNGTYDYPKYSEEAKLNREEIDGVKLESTRIYQILAIYSTVASSLVLVVSLGAISFWMCSNGSLQCRICI

SEQ ID NO: 4170 - protein, 566 aa, Artificial Sequence; identical to SEQ ID NO: 2669
  derived and/or modified protein sequence (wt) from hemagglutinin__InfluenzaA__ADD22531

SEQ ID NO: 4171 - protein, 566 aa, Artificial Sequence
  derived and/or modified protein sequence (wt) from hemagglutinin__InfluenzaA__ADD22541
MKAILVVLLYTFATANADTLCIGYHANNSTDTVDTVLEKNVTVTHSVNLLEDKHNGKLCKLRGVAPLHLGKCNIAGWILGNPECESLSTASSWSYIVETSSSGNGTCYPGDFIDYEELREQLSSVSSFERFEIFPKTSSWPNHDSNKGVTAACPHAGAKSFYKNLIWLVKKGNSYPKLSKSYINDKGKEVLVLWGIHHPSTSADQQSLYQNADAYVFVGTSKYSKKFKPEIAIRPKVRDQEGRMNYYWTLVEPGDKITFEATGNLVVPRYAFAMERNAGSGIIISDTPVHDCNTTCQTPKGAINTSLPFQNIHPITIGKCPKYVKSTKLRLATGLRNVPSIQSRGLFGAIAGFIEGGWTGMVDGWYGYHHQNEQGSGYAADLKSTQNAIDEITNKVNSVIEKMNTQFTAVGKEFNHLEKRIENLNKKVDDGFLDIWTYNAELLVLLENERTLDYHDSNVKNLYEKVRSQLKNNAKEIGNGCFEFYHKCDNTCMESVKNGTYDYPKYSEEAKLNREEIDGVKLESTRIYQILAIYSTVASSLVLVVSLGAISFWMCSNGSLQCRICI

SEQ ID NO: 4172 - protein, 566 aa, Artificial Sequence; identical to SEQ ID NO: 3771
  derived and/or modified protein sequence (wt) from hemagglutinin__InfluenzaA__ADD22554

SEQ ID NO: 4173 - protein, 566 aa, Artificial Sequence; identical to SEQ ID NO: 3771
  derived and/or modified protein sequence (wt) from hemagglutinin__InfluenzaA__ADD22564

SEQ ID NO: 4174 - protein, 566 aa, Artificial Sequence
  derived and/or modified protein sequence (wt) from hemagglutinin__InfluenzaA__ADD22574
MKAILVVLLYTFATANADTLCIGYHANNSTDTVDTVLEKNVTVTHSVNLLEDKHNGKLCKLRGVAPLHLGKCNIAGWILGNPECESLSTASSWSYIVETSSSDNGTCYPGDFIDYEELREQLSSVSSFERFEIFPKTSSWPNHDSNKGVTAACPHAGAKSFYKNLIWLVKKGNSYPKLSKSYINDKGKEVLVLWGIHHPSTSADQQSLYQNADTYVFVGTSRYSKKFKPEIAIRPKVRDQEGRMNYYWTLVEPGDKITFEATGNLVVPRYAFAMERNAGSGIIISDTPVHDCNTTCQTLKGAINTSLPFQNIHPITIGKCPKYVKSTKLRLATGLRNVPSIQSRGLFGAIAGFIEGGWTGMVDGWYGYHHQNEQGSGYAADLKSTQNAIDEITNKVNSVIEKMNTQFTAVGKEFNHLEKRIENLNKKIDDGFLDIWTYNAELLVLLENERTLDYHDSNVKNLYEKVRSQLKNNAKEIGNGCFEFYHKCDNTCMESVKNGTYDYPKYSEEAKLNREEIDGVKLESTRIYQILAIYSTVASSLVLVVSLGAISFWMCSNGSLQCRICI

SEQ ID NO: 4175 - protein, 566 aa, Artificial Sequence; identical to SEQ ID NO: 3771
  derived and/or modified protein sequence (wt) from hemagglutinin__InfluenzaA__ADD22584

SEQ ID NO: 4176 - protein, 566 aa, Artificial Sequence; identical to SEQ ID NO: 2669
  derived and/or modified protein sequence (wt) from hemagglutinin__InfluenzaA__ADD22594

SEQ ID NO: 4177 - protein, 566 aa, Artificial Sequence; identical to SEQ ID NO: 3771
  derived and/or modified protein sequence (wt) from hemagglutinin__InfluenzaA__ADD22604

SEQ ID NO: 4178 - protein, 566 aa, Artificial Sequence; identical to SEQ ID NO: 3771
  derived and/or modified protein sequence (wt) from hemagglutinin__InfluenzaA__ADD22614

SEQ ID NO: 4179 - protein, 566 aa, Artificial Sequence; identical to SEQ ID NO: 3771
  derived and/or modified protein sequence (wt) from hemagglutinin__InfluenzaA__ADD22624

SEQ ID NO: 4180 - protein, 566 aa, Artificial Sequence
  derived and/or modified protein sequence (wt) from hemagglutinin__InfluenzaA__ADD22634
MKAILVVLLCTFATANADTLCIGYHANNSTDTVDTVLEKNVTVTHSVNLLEDKHNGKLCKLRGVAPLHLGKCNIAGWILGNPECESLSTASSWSYIVETSSSDNGTCYPGDFIDYEELREQLSSVSSFERFEIFPKTSSWPNHDSNKGVTAACPHAGAKSFYKNLIWLVKKGNSYPKLSKSYINDKGKEVLVLWGIHHPSTSADQQSLYQNADAYVFVGTSRYSKKFKPEIAIRPKVRDQEGRMNYYWTLVEPGDKITFEATGNLVVPRYAFAMERNAGSGIIISDTPVHDCNTTCQTPKGAINTSLPFQNIHPITIGKCPKYVKSTKLRLATGLRNVPSIQSRGLFGAIAGFIEGGWTGMVDGWYGYHHQNEQGSGYAADLKSTQNAIDEITNKVNSVIEKMNTQFTAVGKEFNHLEKRIENLNKKIDDGFLDIWTYNAELLVLLENERTLDYHDSNVKNLYEKVRSQLKNNAKEIGNGCFEFYHKCDNTCMESVKNGTYDYPKYSEEAKLNREEIDGVKLESTRIYQILAIYSTVASSLVLVVSLGAISFWMCSNGSLQCRICI

SEQ ID NO: 4181 - protein, 566 aa, Artificial Sequence
  derived and/or modified protein sequence (wt) from hemagglutinin__InfluenzaA__ADD22645
MKAILVVLLYTFATANADTLCIGYHANNSTDTVDTVLEKNVTVTHSVNLLEDKHNGKLCKLRGVAPLHLGKCNIAGWILGNPECESLSTASSWSYIVETSSSGNGTCYPGDFIDYEELREQLSSVSSFERFEIFPKTSSWPNHDSNKGVTAACPHAGAKSFYKNLIWLVKKGNSYPKLSKSYINDKGKEVLVLWGIHHPSTSADQQSLYQNADAYVFVGTSRYSKKFKPEIAIRPKVRDQEGRMNYYWTLVEPGDKITFEATGNLVVPRYAFAMERNAGSGIIISDTPVHDCNTTCQTPKGAINTSLPFQNIHPITIGKCPKYVKSTKLRLATGLRNVPSIQSRGLFGAIAGFIEGGWTGMVDGWYGYHHQNEQGSGYAADLKSTQNAIDEITNKVNSVIEKMNTQFTAVGKEFNHLEKRIENLNKKVDDGFLDIWTYNAELLVLLENERTLDYHDSNVKNLYEKVRSQLKNNAKEIGNGCFEFYHKCDNTCMESVKNGTYDYPKYSEEAKLNREEIEGVKLESTRIYQILAIYSTVASSLVLVVSLGAISFWMCSNGSLQCRICI

SEQ ID NO: 4182 - protein, 566 aa, Artificial Sequence
  derived and/or modified protein sequence (wt) from hemagglutinin__InfluenzaA__ADD22665
MKAILVVLLYTFATANADTLCIGYHANNSTDTVDTVLEKNVTVTHSVNLLEDKHNGKLCKLRGVAPLHLGKCNIAGWILGNPECESLSTASSWSYIVETSSSGNGTCYPGDFIDYEELREQLSSVSSFERFEIFPKTSSWPNHDSNKGVTAACPHAGAKSFYKNLIWLVKKGNSYPKLSKSYINDKRKEVLVLWGIHHPSTSADQQSLYQNADAYVFVGTSKYSKKFKPEIAIRPKVRDQEGRMNYYWTLVEPGDKITFEATGNLVVPRYAFAMERNAGSGIIISDTPVHDCNTTCQTPKGAINTSLPFQNIHPITIGKCPKYVKSTKLRLATGLRNVPSIQSRGLFGAIAGFIEGGWTGMVDGWYGYHHQNEQGSGYAADLKSTQNAIDEITNKVNSVIEKMNTQFTAVGKEFNHLEKRIENLNKKVDDGFLDIWTYNAELLVLLENERTLDYHDSNVKNLYEKVRSQLKNNAKEIGNGCFEFYHKCDNTCMESVKNGTYDYPKYSEEAKLNREEIDGVKLESTRIYQILAIYSTVASSLVLVVSLGAISFWMCSNGSLQCRICI

SEQ ID NO: 4183 - protein, 566 aa, Artificial Sequence; identical to SEQ ID NO: 3771
  derived and/or modified protein sequence (wt) from hemagglutinin__InfluenzaA__ADD22675

SEQ ID NO: 4184 - protein, 566 aa, Artificial Sequence; identical to SEQ ID NO: 3771
  derived and/or modified protein sequence (wt) from hemagglutinin__InfluenzaA__ADD22685

SEQ ID NO: 4185 - protein, 566 aa, Artificial Sequence; identical to SEQ ID NO: 3771
  derived and/or modified protein sequence (wt) from hemagglutinin__InfluenzaA__ADD22695

SEQ ID NO: 4186 - protein, 566 aa, Artificial Sequence
  derived and/or modified protein sequence (wt) from hemagglutinin__InfluenzaA__ADD22722
MKAILVVLLYTFATANADTLCIGYHANNSTDTVDTVLEKNVTVTHSVNLLEDRHNGKLCKLRGVAPLHLGKCNIAGWILGNPECESLSTASSWSYIVETSSSGNGTCYPGDFIDYEELREQLSSVSSFERFEIFPKTSSWPNHDSNKGVTAACPHAGAKSFYKNLIWLVKKGNSYPKLSKSYINDKGKEVLVLWGIHHPSTSADQQSLYQNADAYVFVGTSSYSKKFKPEIAIRPKVRDQEGRMNYYWTLVEPGDKITFEATGNLVVPRYAFAMERNAGSGIIISDTPVHDCNTTCQTPKGAINTSLPFQNIHPITIGKCPKYVKSTKLRLATGLRNVPSIQSRGLFGAIAGFIEGGWTGMVDGWYGYHHQNEQGSGYAADLKSTQNAIDEITNKVNSVIEKMNTQFTAVGKEFNHLEKRIENLNKKVDDGFLDIWTYNAELLVLLENERTLDYHDSNVKNLYEKVRSQLKNNAKEIGNGCFEFYHKCDNTCMESVKNGTYDYPKYSEEAKLNREEIDGVKLESTRIYQILAIYSTVASSLVLVVSLGAISFWMCSNGSLQCRICI

SEQ ID NO: 4187 - protein, 566 aa, Artificial Sequence; identical to SEQ ID NO: 4169
  derived and/or modified protein sequence (wt) from hemagglutinin__InfluenzaA__ADD22732

SEQ ID NO: 4188 - protein, 566 aa, Artificial Sequence
  derived and/or modified protein sequence (wt) from hemagglutinin__InfluenzaA__ADD22742
MKAILVVLLYTFATANADTLCIGYHANNSTDTVDTVLEKNVTVTHSVNLLEDKHNGKLCKLRGVAPLHLGKCNIAGWILGNPECESLSTASSWSYIVETSSSGNGTCYPGDFIDYEELREQLSSVSSFERFEIFPKTSSWPNHDSNKGVTAACPHAGAKSFYKNLIWLVKKGNSYPKLSKSYINDKGKEVLVLWGIHHPSTSADQQSLYQNADAYVFVGTSSYSKKFKPEIAIRPKVRDQEGRMNYYWTLVEPGDKITFEATGNLVVPRYAFAMERNAGSGIIISDTPVHDCNTTCQTPKGAINTSLPFQNIHPITIGKCPKYVKSTKLRLATGLRNVPSIQSRGLFGAIAGFIEGGWTGMVDGWYGYHHQNEQGSGYAADLKSTQNAIDEITNKVNSVIEKMNTQFTAVGKEFNHLEKRIENLNKKVDDGFLDIWTYNAELLVLLENERTLDYHDSNVKNLYEKVRSQLKNNAKEIGNGCFEFYHKCDNTCMESVKNGTYDYPKYSEEAKLNREEIDGVKLESTRIYQILAIYSTVASSLVLVVSLGAISFWMCSNGSLQCRICI

SEQ ID NO: 4189 - protein, 566 aa, Artificial Sequence; identical to SEQ ID NO: 2669
  derived and/or modified protein sequence (wt) from hemagglutinin__InfluenzaA__ADD22752

SEQ ID NO: 4190 - protein, 566 aa, Artificial Sequence; identical to SEQ ID NO: 2760
  derived and/or modified protein sequence (wt) from hemagglutinin__InfluenzaA__ADD22762

SEQ ID NO: 4191 - protein, 566 aa, Artificial Sequence; identical to SEQ ID NO: 3771
  derived and/or modified protein sequence (wt) from hemagglutinin__InfluenzaA__ADD22772

SEQ ID NO: 4192 - protein, 566 aa, Artificial Sequence; identical to SEQ ID NO: 3771
  derived and/or modified protein sequence (wt) from hemagglutinin__InfluenzaA__ADD22782

SEQ ID NO: 4193 - protein, 566 aa, Artificial Sequence
  derived and/or modified protein sequence (wt) from hemagglutinin__InfluenzaA__ADD22792
MKAILVVLLYTFATANADTLCIGYHANNSTDTVDTVLEKNVTVTHSVNLLEDKHNGKLCKLRGVAPLHLGKCNIAGWILGNPECESLSTASSWSYIVETSSSGNGTCYPGDFINYEELREQLSSVSSFERFEIFPKTSSWPNHDSNKGVTAACPHAGAKSFYKNLIWLVKKGNSYPKLSKSYINDKGKEVLVLWGIHHPSTSADQQSLYQNADAYVFVGTSRYSKKFKPEIAIRPKVRDQEGRMNYYWTLVEPGDKITFEATGNLVVPRYAFAMERNAGSGIIISDTPVHDCNTTCQTPKGAINTSLPFQNIHPITIGKCPKYVKSTKLRLATGLRNVPSIQSRGLFGAIAGFIEGGWTGMVDGWYGYHHQNEQGSGYAADLKSTQNAIDEITNKVNSVIEKMNTQFTAVGKEFNHLEKRIENLNKKVDDGFLDIWTYNAELLVLLENERTLDYHDSNVKNLYEKVRSQLKNNAKEIGNGCFEFYHKCDNTCMESVKNGTYDYPKYSEEAKLNREEIDGVKLESTRIYQILAIYSTVASSLVLVVSLGAISFWMCSNGSLQCRICI

SEQ ID NO: 4194 - protein, 566 aa, Artificial Sequence; identical to SEQ ID NO: 4169
  derived and/or modified protein sequence (wt) from hemagglutinin__InfluenzaA__ADD22802

SEQ ID NO: 4195 - protein, 566 aa, Artificial Sequence; identical to SEQ ID NO: 3771
  derived and/or modified protein sequence (wt) from hemagglutinin__InfluenzaA__ADD22812

SEQ ID NO: 4196 - protein, 566 aa, Artificial Sequence
  derived and/or modified protein sequence (wt) from hemagglutinin__InfluenzaA__ADD22822
MKAILVVLLYTFATANADTLCIGYHANNSTDTVDTVLEKNVTVTHSVNLLEDKHNGKLCKLRGVAPLHLGKCNIAGWILGNPECESLSTASSWSYIVETSSADNGTCYPGDFIDYEELREQLSSVSSFERFEIFPKTSSWPNHDSNKGVTAACPHAGAKSFYKNLIWLVKKGNSYPKLSKSYINDKGKEVLVLWGIHHPSTSADQQSLYQNADAYVFVGTSKYSKKFKPEIAIRPKVRDQEGRMNYYWTLVEPGDKITFEATGNLVVPRYAFAMERNAGSGIIISDTPVHDCNTTCQTPKGAINTSLPFQNIHPITIGKCPKYVKSTKLRLATGLRNVPSIQSRGLFGAIAGFIEGGWTGMVDGWYGYHHQNEQGSGYAADLKSTQNAIDEITNKVNSVIEKMNTQFTAVGKEFNHLEKRIENLNKKIDDGFLDIWTYNAELLVLLENERTLDYHDSNVKNLYEKVRSQLKNNAKEIGNGCFEFYHKCDNMCMESVKNGTYDYPKYSEEAKLNREEIDGVKLESTRIYQILAIYSTVASSLVLVVSLGAISFWMCSNGSLQCRICI

SEQ ID NO: 4197 - protein, 566 aa, Artificial Sequence; identical to SEQ ID NO: 3771
  derived and/or modified protein sequence (wt) from hemagglutinin__InfluenzaA__ADD22832

SEQ ID NO: 4198 - protein, 566 aa, Artificial Sequence; identical to SEQ ID NO: 3771
  derived and/or modified protein sequence (wt) from hemagglutinin__InfluenzaA__ADD22842

SEQ ID NO: 4199 - protein, 566 aa, Artificial Sequence
  derived and/or modified protein sequence (wt) from hemagglutinin__InfluenzaA__ADD22852
MKAILVVLLYTFATANADTLCIGYHANNSTDTVDTVLEKNVTVTHSVNLLEDKHNGKLCKLRGVAPLHLGKCNIAGWILGNPECESLSTASSWSYIVETSSSDNGTCYPGDFIDYEELREQLSSVSSFERFEIFPKTSSWPNHDSNKGVTAACPHAGAKSFYKNLIWLVKKGNSYPKLSKSYINDKGKEVLVLWGIHHPSTSADQQSLYQNADAYVFVGTSRYSKKFKPEIAIRPKVRDQEGRMNYYWTLVEPGDKITFEATGNLVVPRYAFAMERNAGSGIVISDTPVHDCNTTCQTPKGAINTSLPFQNIHPITIGKCPKYVKSTKLRLATGLRNVPSIQSRGLFGAIAGFIEGGWTGMVDGWYGYHHQNEQGSGYAADLKSTQNAIDEITNKVNSVIEKMNTQFTAVGKEFNHLEKRIENLNKKVDDGFLDIWTYNAELLVLLENERTLDYHDSNVKNLYEKVRSQLKNNAKEIGNGCFEFYHKCDNTCMESVKNGTYDYPKYSEEAKLNREEIDGVKLESTRIYQILAIYSTVASSLVLVVSLGAISFWMCSNGSLQCRICI

SEQ ID NO: 4200 - protein, 566 aa, Artificial Sequence
  derived and/or modified protein sequence (wt) from hemagglutinin__InfluenzaA__ADD22941
MKAILVVLLYTFATANADTLCIGYHANNSTDTVDTVLEKNVTVTHSVNLLEDKHNGKLCKLRGVAPLHLGKCNIAGWILGNPECESLSTAISWSYIVETSSSGNGTCYPGDFIDYEELREQLSSVSSFERFEIFPKTSSWPNHDSNKGVTAACPHAGAKSFYKNLIWLVKKGNSYPKLSKSYINDKGKEVLVLWGIHHPSTSADQQSLYQNADAYVFVGTSRYSKKFKPEIAIRPKVRDQEGRMNYYWTLVEPGDKITFEATGNLVVPRYAFAMERNAGSGIIISDTPVHDCNTTCQTPKGAINTSLPFQNIHPITIGKCPKYVKSTKLRLATGLRNVPSIQSRGLFGAIAGFIEGGWTGMVDGWYGYHHQNEQGSGYAADLKSTQNAIDEITNKVNSVIEKMNTQFTAVGKEFNHLEKRIENLNKKVDDGFLDIWTYNAELLVLLENERTLDYHDSNVKNLYEKVRSQLKNNAKEIGNGCFEFYHKCDNTCMESVKNGTYDYPKYSEEAKLNREEIDGVKLESTRIYQILAIYSTVASSLVLVVSLGAISFWMCSNGSLQCRICI

SEQ ID NO: 4201 - protein, 566 aa, Artificial Sequence; identical to SEQ ID NO: 3771
  derived and/or modified protein sequence (wt) from hemagglutinin__InfluenzaA__ADD22951

SEQ ID NO: 4202 - protein, 566 aa, Artificial Sequence; identical to SEQ ID NO: 3771
  derived and/or modified protein sequence (wt) from hemagglutinin__InfluenzaA__ADD22961

SEQ ID NO: 4203 - protein, 566 aa, Artificial Sequence; identical to SEQ ID NO: 3771
  derived and/or modified protein sequence (wt) from hemagglutinin__InfluenzaA__ADD22971

SEQ ID NO: 4204 - protein, 566 aa, Artificial Sequence; identical to SEQ ID NO: 3771
  derived and/or modified protein sequence (wt) from hemagglutinin__InfluenzaA__ADD23072

SEQ ID NO: 4205 - protein, 566 aa, Artificial Sequence
  derived and/or modified protein sequence (wt) from hemagglutinin__InfluenzaA__ADD23082
MKAILVVLLYTFATANADTLCIGYHANNSTDTVDTVLEKNVTVTHSVNLLEDKHNGKLCKLRGVAPLHLGKCNIAGWILGNPECESLSTASSWSYIVETSSSGNGTCYPGDFIDYEELREQLSSVSSFERFEIFPKTSSWPNHDSNKGVTAACPHAGAKSFYKNLIWLVKKGNSYPKLSKSYINDKGKEVLVLWGIHHPSTSADQQSLYQNADTYVFVGTSRYSKKFKPEIAIRPKVRDQEGRMNYYWTLVEPGDKITFEATGNLVVPRYAFAMERNAGSGIIISDTPVHDCNTTCQTPKGAINTSLPFQNIHPITIGKCPKYVKSTKLRLATGLRNVPSIQSRGLFGAIAGFIEGGWTGMVDGWYGYHHQNEQGSGYAADLKSTQNAIDEITNKVNSVIEKMNTQFTAVGKEFNHLEKRIENLNKKVDDGFLDIWTYNAELLVLLENERTLDYHDSNVKNLYEKVRSQLKNNAKEIGNGCFEFYHKCDNTCMESVKNGTYDYPKYSEEAKLNREEIDGVKLESTRIYQILAIYSTVASSLVLVVSLGAISFWMCSNGSLQCRICI

SEQ ID NO: 4206 - protein, 566 aa, Artificial Sequence
  derived and/or modified protein sequence (wt) from hemagglutinin__InfluenzaA__ADD23102
MKAILVVLLYTFATANADTLCIGYHANNSTDTVDTVLEKNVTVTHSVNLLEDKHNGKLCKLRGVAPLHLGKCNIAGWILGNPECESLSTASSWSYIVETSSSGNGTCYPGDFIDYEELREQLSSVSSFEKFEIFPKTSSWPNHDSNKGVTAACPHAGAKSFYKNLIWLVKKGNSYPKLSKSYINDKGKEVLVLWGIHHPSTSADQQSLYQNADAYVFVGTSRYSKKFKPEIAIRPKVRDQEGRMNYYWTLVEPGDKITFEATGNLVVPRYAFAMERNAGSGIIISDTPVHDCNTTCQTPKGAINTSLPFQNIHPITIGKCPKYVKSTKLRLATGLRNVPSIQSRGLFGAIAGFIEGGWTGMVDGWYGYHHQNEQGSGYAADLKSTQNAIDEITNKVNSVIEKMNTQFTAVGKEFNHLEKRIENLNKKVDDGFLDIWTYNAELLVLLENERTLDYHDSNVKNLYEKVRSQLKNNAKEIGNGCFEFYHKCDNTCMESVKNGTYDYPKYSEEAKLNREEIDGVKLESTRIYQILAIYSTVASSLVLVVSLGAISFWMCSNGSLQCRICI

SEQ ID NO: 4207 - protein, 566 aa, Artificial Sequence; identical to SEQ ID NO: 3771
  derived and/or modified protein sequence (wt) from hemagglutinin__InfluenzaA__ADD23112

SEQ ID NO: 4208 - protein, 566 aa, Artificial Sequence; identical to SEQ ID NO: 3771
  derived and/or modified protein sequence (wt) from hemagglutinin__InfluenzaA__ADD23122

SEQ ID NO: 4209 - protein, 566 aa, Artificial Sequence; identical to SEQ ID NO: 2669
  derived and/or modified protein sequence (wt) from hemagglutinin__InfluenzaA__ADD23132

SEQ ID NO: 4210 - protein, 566 aa, Artificial Sequence; identical to SEQ ID NO: 3833
  derived and/or modified protein sequence (wt) from hemagglutinin__InfluenzaA__ADD23142

SEQ ID NO: 4211 - protein, 566 aa, Artificial Sequence
  derived and/or modified protein sequence (wt) from hemagglutinin__InfluenzaA__ADD23162
MKAILVVLLYTFATANADTLCIGYHANNSTDTVDTVLEKNVTVTHSVNLLEDKHNGKLCKLRGVAPLHLGKCNIAGWILGNPECESLSTASSWSYIVETSSSDNGTCYPGDFIDYEELREQLSSVSSFERFEIFPKTSSWPNHDSNKGVTAACPHAGAKSFYKNLIWLVKKGNSYPKLSKSYINDKGKEVLVLWGIHHPSTSADQQGLYQNADAYVFVGTSRYSKKFKPEIAIRPKVRDQEGRMNYYWTLVEPGDKITFEATGNLVVPRYAFAMERNAGSGIIISDTPVHDCNTTCQTPKGAINTSLPFQNIHPITIGKCPKYVKSTKLRLATGLRNVPSIQSRGLFGAIAGFIEGGWTGMVDGWYGYHHQNEQGSGYAADLKSTQNAIDKITNKVNSVIEKMNTQFTAVGKEFNHLEKRIENLNKKVDDGFLDIWTYNAELLVLLENERTLDYHDSNVKNLYEKVRSQLKNNAKEIGNGCFEFYHKCDNTCMESVKNGTYDYPKYSEEAKLNREEIDGVKLESTRIYQILAIYSTVASSLVLVVSLGAISFWMCSNGSLQCRICI

SEQ ID NO: 4212 - protein, 566 aa, Artificial Sequence; identical to SEQ ID NO: 3833
  derived and/or modified protein sequence (wt) from hemagglutinin__InfluenzaA__ADD23172

SEQ ID NO: 4213 - protein, 566 aa, Artificial Sequence; identical to SEQ ID NO: 3833
  derived and/or modified protein sequence (wt) from hemagglutinin__InfluenzaA__ADD23182

SEQ ID NO: 4214 - protein, 566 aa, Artificial Sequence; identical to SEQ ID NO: 3833
  derived and/or modified protein sequence (wt) from hemagglutinin__InfluenzaA__ADD23192

SEQ ID NO: 4215 - protein, 566 aa, Artificial Sequence; identical to SEQ ID NO: 3833
  derived and/or modified protein sequence (wt) from hemagglutinin__InfluenzaA__ADD23202

SEQ ID NO: 4216 - protein, 566 aa, Artificial Sequence; identical to SEQ ID NO: 3833
  derived and/or modified protein sequence (wt) from hemagglutinin__InfluenzaA__ADD23220

SEQ ID NO: 4217 - protein, 566 aa, Artificial Sequence; identical to SEQ ID NO: 3829
  derived and/or modified protein sequence (wt) from hemagglutinin__InfluenzaA__ADD23230

SEQ ID NO: 4218 - protein, 566 aa, Artificial Sequence; identical to SEQ ID NO: 3833
  derived and/or modified protein sequence (wt) from hemagglutinin__InfluenzaA__ADD23240

SEQ ID NO: 4219 - protein, 566 aa, Artificial Sequence
  derived and/or modified protein sequence (wt) from hemagglutinin__InfluenzaA__ADD23260
MKAILVVLLYTFATANADTLCIGYHANNSTDTVDTVLEKNVTVTHSVNLLEDKHNGKLCKLRGVAPLHLGKCNIAGWILGNPECESLSTASSWSYIVETSSSDNGTCYPGDFIDYEELREQLSSVSSFERFEIFPKTSSWPNHDSNKGVTAACPHAGAKSFYKNLIWLVKKGNSYPKLSKSYINDKGKEVLVLWGIHHPSTSADQQSLYQNADAYVFVGTSRYSKKFKPEIAIRPKVRDQEGRMNYYWTLVEPGDKITFEATGNLVVPRYAFAMERNAGSGIIISDTPVHDCNTTCQTPEGAINTSLPFQNIHPITIGKCPKYVKSTKLRLATGLRNVPSIQSRGLFGAIAGFIEGGWTGMVDGWYGYHHQNEQGSGYAADLKSTQNAIDKITNKVNSVIEKMNTQFTAVGKEFNHLEKRIENLNKKVDDGFLDIWTYNAELLVLLENERTLDYHDSNVKNLYEKVRSQLKNNAKEIGNGCFEFYHKCDNTCMESVKNGTYDYPKYSEEAKLNREEIDGVKLESTRIYQILAIYSTVASSLVLVVSLGAISFWMCSNGSLQCRICI

SEQ ID NO: 4220 - protein, 566 aa, Artificial Sequence; identical to SEQ ID NO: 3022
  derived and/or modified protein sequence (wt) from hemagglutinin__InfluenzaA__ADD23280

SEQ ID NO: 4221 - protein, 566 aa, Artificial Sequence
  derived and/or modified protein sequence (wt) from hemagglutinin__InfluenzaA__ADD23290
MKAILVVLLYTFATANADTLCIGYHANNSTDTVDTVLEKNVTVTHSVNLLEDKHNGKLCKLRGVAPLHLGKCNIAGWILGNPECESLSTASSWSYIVETSSSDNGTCYPGDFINYEELREQLSSVSSFERFEIFPKTSSWPNHDSNKGVTAACPHAGAKSFYKNLIWLVKKGNSYPKLSKSYINDKGKEVLVLWGIHHPSTSADQQSLYQNADAYVFVGTSRYSKKFKPEIAIRPKVRDQEGRMNYYWTLVEPGDKITFEATGNLVVPRYAFAMERNAGSGIIISDTPVHDCNTTCQTPKGAINTSLPFQNIHPITIGKCPKYVKSTKLRLATGLRNVPSIQSRGLFGAIAGFIEGGWTGMVDGWYGYHHQNEQGSGYAADLKSTQNAIDKITNKVNSVIEKMNTQFTAVGKEFNHLEKRIENLNKKVDDGFLDIWTYNAELLVLLENERTLDYHDSNVKNLYEKVRSQLKNNAKEIGNGCFEFYHKCDNTCMESVKNGTYDYPKYSEEAKLNREEIDGVKLESTRIYQILAIYSTVASSLVLVVSLGAISFWMCSNGSLQCRICI

SEQ ID NO: 4222 - protein, 566 aa, Artificial Sequence; identical to SEQ ID NO: 3833
  derived and/or modified protein sequence (wt) from hemagglutinin__InfluenzaA__ADD23300

SEQ ID NO: 4223 - protein, 566 aa, Artificial Sequence; identical to SEQ ID NO: 4221
  derived and/or modified protein sequence (wt) from hemagglutinin__InfluenzaA__ADD23310

SEQ ID NO: 4224 - protein, 566 aa, Artificial Sequence; identical to SEQ ID NO: 3833
  derived and/or modified protein sequence (wt) from hemagglutinin__InfluenzaA__ADD23320

SEQ ID NO: 4225 - protein, 566 aa, Artificial Sequence
  derived and/or modified protein sequence (wt) from hemagglutinin__InfluenzaA__ADD23330
MKAILVVLLYTFATANADTLCIGYHANNSTDTVDTVLEKNVTVTHSVNLLEDKHNGKLCKLRGVAPLHLGKCNIAGWILGNPECESLSTASSWSYIVETSSSDNGTCYPGDFINYEELREQLSSVSSFERFEIFPKTSSWPNHDSNKGVTAACPHAGAKSFYKNLIWLVKKGNSYPKLSKSYINDKGKEVLVLWGIHHPSTSADQQSLYQNADAYVFVGTSRYSKKFKPEIAIRPKVRDQEGRMNYYWTLVEPGDKITFEATGNLVVPRYAFAMERNAGSGIIISDTPVHDCNTTCQTPKGAINTSLPFQNIHPITIGKCPKYVKSTKLRLATGLRNVPSIQSRGLFGAIAGFIEGGWTGMVDGWYGYHHQNEQGSGYAADLKSTQNAIDKITNKVNSVIEKMNTQFTAVGKEFNHLEKRIENLNKKVDDGFLDIWTYNAELLVLLENERTLDYHDSNVKNLYEKVRSQLKTNAKEIGNGCFEFYHKCDNTCMESVKNGTYDYPKYSEEAKLNREEIDGVKLESTRIYQILAIYSTVASSLVLVVSLGAISFWMCSNGSLQCRICI

SEQ ID NO: 4226 - protein, 566 aa, Artificial Sequence
  derived and/or modified protein sequence (wt) from hemagglutinin__InfluenzaA__ADD23355
MKAILVVLLYTFATANADTLCIGYHANNSTDTVDTVLEKNVTVTHSVNLLEDKHNGKLCKLRGVAPLHLGKCNIAGWILGNPECESLSTASSWSYIVETSSSDNGTCYPGDFINYEELREQLSSVSSFEMFEIFPKTSSWPNHDSNKGVTAACPHAGAKSFYKNLIWLVKKGNSYPKLSKSYINDKGKEVLVLWGIHHPSTSADQQSLYQNADAYVFVGTSRYSKKFKPEIAIRPKVRDQEGRMNYYWTLVEPGDKITFEATGNLVVPRYAFAMERNAGSGIIISDTPVHDCNTTCQTPKGAINTSLPFQNIHPITIGKCPKYVKSTKLRLATGLRNVPSIQSRGLFGAIAGFIEGGWTGMVDGWYGYHHQNEQGSGYAADLKSTQNAIDKITNKVNSVIEKMNTQFTAVGKEFNHLEKRIENLNKKVDDGFLDIWTYNAELLVLLENERTLDYHDSNVKNLYEKVRSQLKNNAKEIGNGCFEFYHKCDNTCMESVKNGTYDYPKYSEEAKLNREEIDGVKLESTRIYQILAIYSTVASSLVLVVSLGAISFWMCSNGSLQCRICI

SEQ ID NO: 4227 - protein, 566 aa, Artificial Sequence; identical to SEQ ID NO: 4221
  derived and/or modified protein sequence (wt) from hemagglutinin__InfluenzaA__ADD23375

SEQ ID NO: 4228 - protein, 566 aa, Artificial Sequence; identical to SEQ ID NO: 3833
  derived and/or modified protein sequence (wt) from hemagglutinin__InfluenzaA__ADD23385

SEQ ID NO: 4229 - protein, 566 aa, Artificial Sequence
  derived and/or modified protein sequence (wt) from hemagglutinin__InfluenzaA__ADD23405
MKAILVVLLYTFATANADTLCIGYHANNSTDTVDTVLEKNVTVTHSVNLLEDKHNGKLCKLRGVAPLHLGKCNIAGWILGNPECESLSTASSWSYIVETSSSDNGTCYPGDFINYEELREQLSSVSSFERFEIFPKTSSWPNHDSNKGVTAACPHAGAKSFYKNLIWLVKKGNSYPKLSKSYINDKGKEVLVLWGIHHPSTSADQQSLYQNADAYVFVGTSRYSKKFKPEIAIRPKVRDQEGRMNYYWTLVEPGDKITFEATGNLVVPRYAFAMERNAGSGIIISDTPVHDCNTTCQTPKGAINTSLPFQNIHPITVGKCPKYVKSTKLRLATGLRNVPSIQSRGLFGAIAGFIEGGWTGMVDGWYGYHHQNEQGSGYAADLKSTQNAIDKITNKVNSVIEKMNTQFTAVGKEFNHLEKRIENLNKKVDDGFLDIWTYNAELLVLLENERTLDYHDSNVKNLYEKVRSQLKNNAKEIGNGCFEFYHKCDNTCMESVKNGTYDYPKYSEEAKLNREEIDGVKLESTRIYQILAIYSTVASSLVLVVSLGAISFWMCSNGSLQCRICI

SEQ ID NO: 4230 - protein, 566 aa, Artificial Sequence
  derived and/or modified protein sequence (wt) from hemagglutinin__InfluenzaA__ADD23415
MKAILVVLLYTFATANADTLCIGYHANNSTDTVDTVLEKNVTVTHSVNLLEDKHNGKLCKLRGVAPLHLGKCNIAGWILGNPECESLSTASSWSYIVETSSSDNGTCYPGDFINYEELREQLSSVSSFERFEIFPKTSSWPNHDSNKGVTAACPHAGAKSFYKNLIWLVKKGNSYPKLSKSYINDKGKEVLVLWGIHHPSTSADQQSLYQNADAYVFVGTSRYSKKFKPEIAIRPKVRDQEGRMNYYWTLVEPGDKITFEATGNLVVPRYAFAMERNAESGIIISDTPVHDCNTTCQTPKGAINTSLPFQNIHPITIGKCPKYVKSTKLRLATGLRNVPSIQSRGLFGAIAGFIEGGWTGMVDGWYGYHHQNEQGSGYAADLKSTQNAIDKITNKVNSVIEKMNTQFTAVGKEFNHLEKRIENLNKKVDDGFLDIWTYNAELLVLLENERTLDYHDSNVKNLYEKVRSQLKNNAKEIGNGCFEFYHKCDNTCMESVKNGTYDYPKYSEEAKLNREEIDGVKLESTRIYQILAIYSTVASSLVLVVSLGAISFWMCSNGSLQCRICI

SEQ ID NO: 4231 - protein, 566 aa, Artificial Sequence; identical to SEQ ID NO: 3833
  derived and/or modified protein sequence (wt) from hemagglutinin__InfluenzaA__ADD23435

SEQ ID NO: 4232 - protein, 566 aa, Artificial Sequence
  derived and/or modified protein sequence (wt) from hemagglutinin__InfluenzaA__ADD23465
MKAILAVLLYTFATANADTLCIGYHANNSTDTVDTVLEKNVTVTHSVNLLEDKHNGKLCKLRGVAPLHLGKCNIAGWILGNPECESLSTASSWSYIVETSSSDNGTCYPGDFIDYEELREQLSSVSSFERFEIFPKTSSWPNHDSNKGVTAACPHAGAKSFYKNLIWLVKKGNSYPKLSKSYINDKGKEVLVLWGIHHPSTSADQQSLYQNADAYVFVGTSRYSKKFKPEIAIRPKVRDQEGRMNYYWTLVEPGDKITFEATGNLVVPRYAFAMERNAGSGIIISDTPVHDCNTTCQTPKGAINTSLPFQNIHPITIGKCPKYVKSTKLRLATGLRNVPSIQSRGLFGAIAGFIEGGWTGMVDGWYGYHHQNEQGSGYAADLKSTQNAIDKITNKVNSVIEKMNTQFTAVGKEFNHLEKRIENLNKKVDDGFLDIWTYNAELLVLLENERTLDYHDSNVKNLYEKVRSQLKNNAKEIGNGCFEFYHKCDNTCMESVKNGTYDYPKYSEEAKLNREEIDGVKLESTRIYQILAIYSTVASSLVLVVSLGAISFWMCSNGSLQCRICI

SEQ ID NO: 4233 - protein, 566 aa, Artificial Sequence; identical to SEQ ID NO: 3833
  derived and/or modified protein sequence (wt) from hemagglutinin__InfluenzaA__ADD23475

SEQ ID NO: 4234 - protein, 566 aa, Artificial Sequence; identical to SEQ ID NO: 3833
  derived and/or modified protein sequence (wt) from hemagglutinin__InfluenzaA__ADD23485

SEQ ID NO: 4235 - protein, 566 aa, Artificial Sequence
  derived and/or modified protein sequence (wt) from hemagglutinin__InfluenzaA__ADD23495
MKAILVVLLYTFATANADTLCIGYHANNSTDTVDTVLEKNVTVTHSVNLLEDKHNGKLCKLRGVAPLHLGKCNIAGWILGNPECESLSTASSWSYIVETSSSDNGTCYPGDFIDYEELREQLSSVSSFERFEIFPKTSSWPNHDSNKGVTAACPHAGARSFYKNLIWLVKKGNSYPKLSKSYINDKGKEVLVLWGIHHPSTSADQQSLYQNADAYVFVGTSRYSKKFKPEIAIRPKVRDQEGRMNYYWTLVEPGDKITFEATGNLVVPRYAFAMERNAGSGIIISDTPVHDCNTTCQTPKGAINTSLPFQNIHPITIGKCPKYVKSTKLRLATGLRNVPSIQSRGLFGAIAGFIEGGWTGMVDGWYGYHHQNEQGSGYAADLKSTQNAIDEITNKVNSVIEKMNTQFTAVGKEFNHLEKRIENLNKKVDDGFLDIWTYNAELLVLLENERTLDYHDSNVKNLYEKVRSQLKNNAKEIGNGCFEFYHKCDNTCMESVKNGTYDYPKYSEEAKLNREEIDGVKLESTRIYQILAIYSTVASSLVLVVSLGAISFWMCSNGSLQCRICI

SEQ ID NO: 4236 - protein, 566 aa, Artificial Sequence
  derived and/or modified protein sequence (wt) from hemagglutinin__InfluenzaA__ADD23505
MKAILVVLLYTFATANADTLCIGYHANNSTDTVDTVLEKNVTVTHSVNLLEDKHNGKLCKLRGVAPLHLGKCNIAGWILGNPECESLSTASSWSYIVETSSSDNGTCYPGDFIDYEELREQLSSVSSFERFEIFPKTSSWPNHDSNKGVTAACPHAGAKSFYKNLIWLVKKGNSYPKLSKSYINDKGKEVLVLWGIHHPSTSADQQSLYQNADAYVFVGTSRYSKKFKPEIAIRPKVRDQEGRMNYYWTLIEPGDKITFEATGNLVVPRYAFAMERNAGSGIIISDTPAHDCNTTCQTPKGAINTSLPFQNIHPITIGKCPKYVKSTKLRLATGLRNVPSIQSRGLFGAIAGFIEGGWTGMVDGWYGYHHQNEQGSGYAADLKSTQNAIDKITNKVNSVIEKMNTQFTAVGKEFNHLEKRIENLNKKVDDGFLDIWTYNAELLVLLENERTLDYHDSNVKNLYEKVRSQLKNNAKEIGNGCFEFYHKCDNTCMESVKNGTYDYPKYSEEAKLNREEIDGVKLESTRIYQILAIYSTVASSLVLVVSLGAISFWMCSNGSLQCRICI

SEQ ID NO: 4237 - protein, 566 aa, Artificial Sequence; identical to SEQ ID NO: 3833
  derived and/or modified protein sequence (wt) from hemagglutinin__InfluenzaA__ADD23515

SEQ ID NO: 4238 - protein, 566 aa, Artificial Sequence; identical to SEQ ID NO: 3833
  derived and/or modified protein sequence (wt) from hemagglutinin__InfluenzaA__ADD23994

SEQ ID NO: 4239 - protein, 566 aa, Artificial Sequence
  derived and/or modified protein sequence (wt) from hemagglutinin__InfluenzaA__ADD24004
MKAILVVLLYTFATANADTLCIGYHANNSTDTVDTVLEKNVTVTHSVNLLEDKHNGKLCKLRGVAPLHLGKCNIAGWILGNPECESLSTASSWSYIVETSSSDNGTCYPGDFIDYEELREQLSSVSSFERFEIFPKTSSWPNHDSNKGVTAACPHAGAKSFYKNLIWLVKKGNSYPKLSKSYINDKGKEVLVLWGIHHPSTSADQQSLYQNADAYVFVGTSRYSKKFKPEIAIRPKVRDQEGRMNYYWTLVEPGDKITFEATGNLVVPRYAFAMERNAGSGIIISDTPVHDCNTTCQTPNGAINTSLPFQNIHPITIGKCPKYVKSTKLRLATGLRNVPSIQSRGLFGAIAGFIEGGWTGMVDGWYGYHHQNEQGSGYAADLKSTQNAIDEITNKVNSVIEKMNTQFTAVGKEFNHLEKRIENLNKKIDDGFLDIWTYNAELLVLLENERTLDYHDSNVKNLYEKVRSQLKNNAKEIGNGCFEFYHKCDNTCMESVKNGTYDYPKYSEEAKLNREEIDGVKLESTRIYQILAIYSTVASSLVLVVSLGAISFWMCSNGSLQCRICI

SEQ ID NO: 4240 - protein, 566 aa, Artificial Sequence; identical to SEQ ID NO: 3771
  derived and/or modified protein sequence (wt) from hemagglutinin__InfluenzaA__ADD24014

SEQ ID NO: 4241 - protein, 566 aa, Artificial Sequence
  derived and/or modified protein sequence (wt) from hemagglutinin__InfluenzaA__ADD52537
MKAILVVLLYTFATANADTLCIGYHANNSTDTVDTVLEKNVTVTHSVNLLEDKHNGKLCKLRGVAPLHLGKCNIAGWILGNPECESLSTASSWSYIVETSSSDNGTCYPGDFIDYEELREQLSSVSSFERFEIFPKTSSWPNHDSNKGVTAACPHAGAKSFYKNLIWLVKKGNSYPKLSKSYINDKGKEVLVLWGIHHPSTSADQQSLYQNADAYVFVGSSRYSKKFKPEIAIRPKVRDQEGRMNYYWTLVEPGDKITFEATGNLVVPRYAFAMERNAGSGIIISDTPVHDCNTTCQTPKGAINTSLPFQNIHPITIGKCPKYVKSTKLRLATGLRNVPSIQSRGLFGAIAGFIEGGWTGMVDGWYGYHHQNEQGSGYAADLKSTQNAIDGITNKVNSVIEKMNTQFTAVGKEFNHLEKRIENLNKKVDDGFLDIWTYNAELLVLLENERTLDYHDSNVKNLYEKVRSQLKNNAKEIGNGCFEFYHKCDNTCMESVKNGTYDYPKYSEEAKLNREEIDGVKLESTRIYQILAIYSTVASSLVLVVSLGAISFWMCSNGSLQCRICI

SEQ ID NO: 4242 - protein, 566 aa, Artificial Sequence; identical to SEQ ID NO: 3833
  derived and/or modified protein sequence (wt) from hemagglutinin__InfluenzaA__ADD64203

SEQ ID NO: 4243 - protein, 566 aa, Artificial Sequence
  derived and/or modified protein sequence (wt) from hemagglutinin__InfluenzaA__ADD64204
MKAILVVLLYTFATANADTLCIGYHANNSTDTVDTVLEKNVTVTHSVNLLEDKHNGKLCKLRGVAPLHLGKCNIAGWILGNPECESLSTASSWSYIVETSSSDNGTCYPGDFIDYEELREQLSSVSSFERFEIFPKTSSWPNHDPNKGVTAACPHAGAKSFYKNLIWLVKKGNSYPKLSKSYINDKGKEVLVLWGIHHPSTSADQQSLYQNADAYVFVGTSRYSKKFKPEIAIRPKVRDQEGRMNYYWTLIEPGEKITFEATGNLVVPRYAFAMERNAGSGIIISDTPVHDCNTTCQTPKGAINTSLPFQNIHPITIGKCPKYVKSTKLRLATGLRNVPSIQSRGLFGAIAGFIEGGWTGMVDGWYGYHHQNEQGSGYAADLKSTQNAIDEITNKVNSVIEKMNTQFTAVGKEFNHLEKRIENLNKKVDDGFLDIWTYNAELLVLLENERTLDYHDSNVKNLYEKVRSQLKNNAREIGNGCFEFYHKCDNTCMESVKNGTYDYPKYSEEAKLNREEIDGVKLESTRIYQILAIYSTVASSLVLVVSLGAISFWMCSNGSLQCRICI

SEQ ID NO: 4244 - protein, 566 aa, Artificial Sequence; identical to SEQ ID NO: 2669
  derived and/or modified protein sequence (wt) from hemagglutinin__InfluenzaA__ADD64205

SEQ ID NO: 4245 - protein, 566 aa, Artificial Sequence; identical to SEQ ID NO: 2669
  derived and/or modified protein sequence (wt) from hemagglutinin__InfluenzaA__ADD64206

SEQ ID NO: 4246 - protein, 566 aa, Artificial Sequence; identical to SEQ ID NO: 3467
  derived and/or modified protein sequence (wt) from hemagglutinin__InfluenzaA__ADD64207

SEQ ID NO: 4247 - protein, 566 aa, Artificial Sequence
  derived and/or modified protein sequence (wt) from hemagglutinin__InfluenzaA__ADD64208
MKAILVVLLYTFATANADTLCIGYHANNSTDTVDTVLEKNVTVTHSVNLLEDKHNGKLCKLRGVAPLHLGKCNIAGWILGNPECESLSTASSWSYIVETSSSDNGTCYPGDFIDYEELREQLSSVSSFERFEIFPKTSSWPNHDPNKGVTAACPHAGAKSFYKNLIWLVKKGNSYPKLSKSYINDKGKEVLVLWGIHHPSTSADQQSLYQNADAYVFVGTSRYSKKFKPEIAIRPKVRDQEGRMNYYWTLVEPGDKITFEATGNLVVPRYAFAMERNAGSGIIISDTPVHDCNTTCQTPKGAINTSLPFQNIHPITIGKCPKYVKSTKLRLATGLRNVPSIQSRGLFGAIAGFIEGGWTGMVDGWYGYHHQNEQGSGYAADLKSTQNAIDEITNKVNSVIEKMNTQFTAVGKEFNHLEKRIENLNKKVDDGFLDIWTYNAELLVLLENERTLDYHDPNVKNLYEKVRSQLKNNAKEIGNGCFEFYHKCDNTCMESVKNGTYDYPKYSEEAKLNREEIDGVKLESTRIYQILAIYSTVASSLVLVVSLGAISFWMCSNGSLQCRICI

SEQ ID NO: 4248 - protein, 566 aa, Artificial Sequence; identical to SEQ ID NO: 3467
  derived and/or modified protein sequence (wt) from hemagglutinin__InfluenzaA__ADD64209

SEQ ID NO: 4249 - protein, 566 aa, Artificial Sequence; identical to SEQ ID NO: 2669
  derived and/or modified protein sequence (wt) from hemagglutinin__InfluenzaA__ADD64210

SEQ ID NO: 4250 - protein, 566 aa, Artificial Sequence; identical to SEQ ID NO: 3467
  derived and/or modified protein sequence (wt) from hemagglutinin__InfluenzaA__ADD64211

SEQ ID NO: 4251 - protein, 566 aa, Artificial Sequence; identical to SEQ ID NO: 2669
  derived and/or modified protein sequence (wt) from hemagglutinin__InfluenzaA__ADD64212

SEQ ID NO: 4252 - protein, 566 aa, Artificial Sequence; identical to SEQ ID NO: 3467
  derived and/or modified protein sequence (wt) from hemagglutinin__InfluenzaA__ADD64213

SEQ ID NO: 4253 - protein, 566 aa, Artificial Sequence
  derived and/or modified protein sequence (wt) from hemagglutinin__InfluenzaA__ADD64214
MKAILVVLLYTFATANADTLCIGYHANNSTDTVDTVLEKNVTVTHSVNLLENKHNGKLCKLRGVAPLHLGKCNIAGWILGNPECESFSTSSSWSYIVETSSSDNGTCYPGDFIDYEELREQLSSVSSFERFEIFPKTSSWPNHDSNKGVTAACPHAGAKSFYKNLIWLVKKGNSYPKLNKSYINDKGKEVLVLWGIHHPSTSADQQSLYQNADAYVFVGTSRYSKKFKPEIAIRPKVRDQEGRMNYYWTLVEPGDKITFEATGNLVVPRYAFAMERNAGSGIIISDTPVHDCNTTCQTPKGAINTSLPFQNIHPITIGKCPKYVKSTKLRLATGLRNVPSIQSRGLFGAIAGFIEGGWTGMVDGWYGYHHQNEQGSGYAADLKSTQNAIDGITNKVNSVIEKMNTQFTAVGKEFNHLEKRIENLNKKVDDGFLDIWTYNAELLVLLENERTLDYHDSNVKNLYEKVRSQLKNNAKEIGNGCFEFYHKCDNTCMESVKNGTYDYPKYSEEAKLNREEIDGVKLESTRIYQILAIYSTVASSLVLVVSLGAISFWMCSNGSLQCRICI

SEQ ID NO: 4254 - protein, 566 aa, Artificial Sequence; identical to SEQ ID NO: 2669
  derived and/or modified protein sequence (wt) from hemagglutinin__InfluenzaA__ADD64215

SEQ ID NO: 4255 - protein, 566 aa, Artificial Sequence; identical to SEQ ID NO: 3467
  derived and/or modified protein sequence (wt) from hemagglutinin__InfluenzaA__ADD64216

SEQ ID NO: 4256 - protein, 566 aa, Artificial Sequence; identical to SEQ ID NO: 3467
  derived and/or modified protein sequence (wt) from hemagglutinin__InfluenzaA__ADD64217

SEQ ID NO: 4257 - protein, 566 aa, Artificial Sequence
  derived and/or modified protein sequence (wt) from hemagglutinin__InfluenzaA__ADD74350
MKAILVVLLYTFATANADTLCIGYHANNSTDTVDTVLEKNVTVTHSVNILEDKHNGKLCKLRGVAPLHLGKCNIAGWILGNPECESLSTASSWSYIVETSSSDNGTCYPGDFIDYEELREQLSSVSSFERFEIFPKTSSWPNHDSNKGVTAACSHAGAKSFYKNLIWLVKKGNSYPKLSKSYINDKGKEVLVLWGIHHPSTSADQQSLYQNADAYVFVGSSRYSKKFKPEIAIRPKVRDQEGRMNYYWTLVEPGDKITFEATGNLVVPRYAFAMERNAGSGIIISDTPVHDCNTTCQTPKGAINTSLPFQNIHPITIGKCPKYVKSTKLRLATGLRNVPSIQSRGLFGAIAGFIEGGWTGMVDGWYGYHHQNEQGSGYAADLKSTQNAIDEITNKVNSVIEKMNTQFTAVGKEFNHLEKRIENLNKKVDDGFLDIWTYNAELLVLLENERTLDYHDSNVKNLYEKVRSQLKNNAKEIGNGCFEFYHKCDNTCMESVKNGTYDYPKYSEEAKLNREEIDGVKLESTRIYQILAIYSTVASSLVLVVSLGAISFWMCSNGSLQCRICI

SEQ ID NO: 4258 - protein, 566 aa, Artificial Sequence
  derived and/or modified protein sequence (wt) from hemagglutinin__InfluenzaA__ADD74360
MKAILVVLLYTFATANADTLCIGYHANNSTDTVDTVLEKNVTVTHSVNLLEDKHNGKLCKLRGVAPLHLGKCNIAGWILGNPECESLSTASSWSYIVETSSSDNGTCYPGDFIDYEELREQLSSVSSFERFEIFPKTSSWPNHDSNKGVTAACPHAGAKSFYKNLIWLVKKGNSYPKLSKSYINDKRKEVLVLWGIHHPSTSADQQSLYQNADAYVFVGTSRYSKKFKPEIAIRPKVRDQEGRMNYYWTLVEPGDKITFEATGNLVVPRYAFAMERNAGSGIIISDTPVHDCNTTCQTPKGAINTSLPFQNIHPITIGKCPKYVKSTKLRLATGLRNVPSIQSRGLFGAIAGFIEGGWTGMVDGWYGYHHQNEQGSGYAADLKSTQNAIDEITNKVNSVIEKMNTQFTAVGKEFNHLEKRIENLNKKVDDGFLDIWTYNAELLVLLENERTLDYHDSNVKNLYEKVRSQLKNNAKEIGNGCFEFYHKCDNTCMESVKNGTYDYPKYSEEAKLNREEIDGVKLESTRIYQILAIYSTVASSLVLVVSLGAISFWMCSNGSLQCRICI

SEQ ID NO: 4259 - protein, 566 aa, Artificial Sequence; identical to SEQ ID NO: 2669
  derived and/or modified protein sequence (wt) from hemagglutinin__InfluenzaA__ADD74370

SEQ ID NO: 4260 - protein, 566 aa, Artificial Sequence; identical to SEQ ID NO: 2669
  derived and/or modified protein sequence (wt) from hemagglutinin__InfluenzaA__ADD74398

SEQ ID NO: 4261 - protein, 566 aa, Artificial Sequence
  derived and/or modified protein sequence (wt) from hemagglutinin__InfluenzaA__ADD74428
MKAILVVLLYTFATANADTLCIGYHANNSTDTVDTVLEKNVTVTHSVNLLEDKHNGKLCKLRGVAPLHLGKCNIAGWILGNPECESLSTASSWSYIVETSSSDNGTCYPGDFINYEELREQLSSVSSFERFEIFPKTSSWPNHDSNKGVTAACPHAGAKSFYKNLIWLVKKGNSYPKLSKSYINDKGKEVLVLWGIHHPSTSADQQSLYQNADAYVFVGTSRYSKKFKPEIAIRPKVRDQEGRMNYYWTLVKPGDKITFEATGNLVVPRYAFAMERNAGSGIIISDTPVHDCNTTCQTPKGAINTSLPFQNIHPITIGKCPKYVKSTKLRLATGLRNVPSIQSRGLFGAIAGFIEGGWTGMVDGWYGYHHQNEQGSGYAADLKSTQNAIDKITNKVNSVIEKMNTQFTAVGKEFNHLEKRIENLNKKVDDGFLDIWTYNAELLVLLENERTLDYHDSNVKNLYEKVRSQLKNNAKEIGNGCFEFYHKCDNTCMESVKNGTYDYPKYSEEAKLNREEIDGVKLESTRIYQILAIYSTVASSLVLVVSLGAISFWMCSNGSLQCRICI

SEQ ID NO: 4262 - protein, 566 aa, Artificial Sequence
  derived and/or modified protein sequence (wt) from hemagglutinin__InfluenzaA__ADD74438
MKAILVVLLYTFATANADTLCIGYHANNSTDTVDTVLEKNVTVTHSVNLLEDKHNGKLCKLRGVAPLHLGKCNIAGWILGNPECESLSTASSWSYIVETSSSDNGTCYPGDFIDYEELREQLSSVSSFERFEIFPKTSSWPNHDSNKGVTAACPHAGAKSFYKNLIWLVKKGNSYPKLSKSYINDKGKEVLVLWGIHHPSTSADQQSLYQNADAYVFVGTSRYSKKFKPEIAIRPKVRDQEGRMNYYWTLVEPGDKITFEATGNLVVPRYAFAMERNAGSGIIISDTPVHDCNTTCQTPKGAINTSLPFQNIHPITIGKCPKYVKSTKLRLATGLRNVPSIQSRGLFGAIAGFIEGGWTGMVDGWYGYHHQNEQGSGYAADLKSTQNAIDEITNKVNSVIEKMNTQFTAVGKEFNHLEKRIENLNKKVDDGFLDIWTYNAELLVLLENERTLDYHDSNVKNLYEKVRSQLKNNAKEIGNGCFEFYHKCDNTCMESVKNGTYDYPKYSEEAKLNREEIDGVKLEPTRIYQILAIYSTVASSLVLVVSLGAISFWMCSNGSLQCRICI

SEQ ID NO: 4263 - protein, 566 aa, Artificial Sequence; identical to SEQ ID NO: 2669
  derived and/or modified protein sequence (wt) from hemagglutinin__InfluenzaA__ADD74448

SEQ ID NO: 4264 - protein, 566 aa, Artificial Sequence; identical to SEQ ID NO: 2669
  derived and/or modified protein sequence (wt) from hemagglutinin__InfluenzaA__ADD74458

SEQ ID NO: 4265 - protein, 566 aa, Artificial Sequence
  derived and/or modified protein sequence (wt) from hemagglutinin__InfluenzaA__ADD74468
MKAILVVLLYTFATANADTLCIGYHANNSTDTVDTVLEKNVTVTHSVDLLEDKHNGKLCKLRGVAPLHLGKCNIAGWILGNPECESLSTASSWSYIVETSSSDNGTCYPGDFIDYEELREQLSSVSSFERFEIFPKTSSWPNHDSNKGVTAACPHAGAKSFYKNLIWLVKKGNSYPKLSKSYINDKGKEVLVLWGIHHPSTSADQQSLYQNADAYVFVGTSRYSKKFKPEITIRPKVRDQEGRMNYYWTLVEPGDKITFEATGNLVVPRYAFAMERNAGSGIIISDTPVHDCNTTCQTPKGAINTSLPFQNIHPITIGKCPKYVKSTKLRLATGLRNVPSIQSRGLFGAIAGFIEGGWTGMVDGWYGYHHQNEQGSGYAADLKSTQNAIDEITNKVNSVIEKMNTQFTAVGKEFNHLEKRIENLNKKVDDGFLDIWTYNAELLVLLENERTLDYHDSNVKNLYEKVRSQLKNNAKEIGNGCFEFYHKCDNTCMESVKNGTYDYPKYSEEAKLNREEIDGVKLESTRIYQILAIYSTVASSLVLVVSLGAISFWMCSNGSLQCRICI

SEQ ID NO: 4266 - protein, 566 aa, Artificial Sequence
  derived and/or modified protein sequence (wt) from hemagglutinin__InfluenzaA__ADD74488
MKAILVVLLYTFATANADTLCIGYHANNSTDTVDTVLEKNVTVTHSVNILEDKHNGKLCKLRGVAPLHLGKCNIAGWILGNPECESLSTASSWSYIVETSSSDNGTCYPGDFIDYEELREQLSSVSSFERFEIFPKTSSWPNHDSNKGVTAACPHAGAKSFYKNLIWLVKKGNSYPKLSKSYINDKGKEVLVLWGIHHPSTSADQQSLYQNADAYVFVGTSRYSKKFKPEIAIRPKVRDQEGRMNYYWTLVEPGDKITFEATGNLVVPRYAFAMERNAGSGIIISDTPVHDCNTTCQTPKGAINTSLPFQNIHPITIGKCPKYVKSTKLRLATGLRNVPSIQSRGLFGAIAGFIEGGWTGMVDGWYGYHHQNEQGSGYAADLKSTQNAIDEITNKVNSVIEKMNTQFTAVGKEFNHLEKRIENLNKKVDDGFLDIWTYNAELLVLLENERTLDYHDSNVKNLYEKVRSQLKNNAKEIGNGCFEFYHKCDNTCMESVKNGTYDYPKYSEEAKLNREEIDGVKLESTRIYQILAIYSTVASSLVLVVSLGAISFWMCSNGSLQCRICI

SEQ ID NO: 4267 - protein, 566 aa, Artificial Sequence; identical to SEQ ID NO: 2669
  derived and/or modified protein sequence (wt) from hemagglutinin__InfluenzaA__ADD74498

SEQ ID NO: 4268 - protein, 566 aa, Artificial Sequence
  derived and/or modified protein sequence (wt) from hemagglutinin__InfluenzaA__ADD74508
MKAILVVLLYTFATANADTLCIGYHANNSTDTVDTVLEKNVTVTHSVDLLEDKHNGKLCKLRGVAPLHLGKCNIAGWILGNPECESLSTASSWSYIVETSSSDNGTCYPGDFIDYEELREQLSSVSSFERFEIFPKTSSWPNHDSNKGVTAACPHAEAKSFYKNLIWLVKKGNSYPKLSKSYINDKGKEVLVLWGIHHPSTSADQQSLYQNADAYVFVGTSRYSKKFKPEIAIRPKVRDQEGRMNYYWTLVEPGDKITFEATGNLVVPRYAFAMERNAGSGIIISDTPVHDCNTTCQTPKGAINTSLPFQNIHPITIGKCPKYVKSTKLRLATGLRNVPSIQSRGLFGAIAGFIEGGWTGMVDGWYGYHHQNEQGSGYAADLKSTQNAIDEITNKVNSVIEKMNTQFTAVGKEFNHLEKRIENLNKKVDDGFLDIWTYNAELLVLLENERTLDYHDSNVKNLYEKVRSQLKNNAKEIGNGCFEFYHKCDNTCMESVKNGTYDYPKYSEEAKLNREEIDGVKLESTRIYQILAIYSTVASSLVLVVSLGAISFWMCSNGSLQCRICI

SEQ ID NO: 4269 - protein, 566 aa, Artificial Sequence
  derived and/or modified protein sequence (wt) from hemagglutinin__InfluenzaA__ADD74518
MKAILVVLLYTFATANADTLCIGYHANNSTDTVDTILEKNVTVTHSVNLLEDKHNGKLCKLRGVAPLHLGKCNIAGWILGNPECESLSTASSWSYIVETSSSDNGTCYPGDFIDYEELREQLSSVSSFERFEIFPKTSSWPNHDSNKGVTAACPHAGAKSFYKNLIWLVKKGNSYPKLSKSYINDKGKEILVLWGIHHPSTSADQQSLYQNADAYVFVGTSRYSKKFKPEIAIRPKVRDQEGRMNYYWTLVEPGDKITFEATGNLVVPRYAFAMERNTGSGIIISDTPVHDCNTTCQTPKGAINTSLPFQNIHPITIGKCPKYVKSTKLRLATGLRNVPSIQSRGLFGAIAGFIEGGWTGMVDGWYGYHHQNEQGSGYAADLKSTQNAIDEITNKVNSVIEKMNTQFTAVGKEFNHLEKRIENLNKKVDDGFLDIWTYNAELLVLLENERTLDYHDSNVKNLYEKVRSQLKNNAKEIGNGCFEFYHKCDNTCMESVKNGTYDYPKYSEEAKLNREEIDGVKLESTRIYQILAIYSTVASSLVLVVSLGAISFWMCSNGSLQCRICI

SEQ ID NO: 4270 - protein, 566 aa, Artificial Sequence
  derived and/or modified protein sequence (wt) from hemagglutinin__InfluenzaA__ADD74528
MKAILVVLLYTFATANADTLCIGYHANNSTDTVDTVLEKNVTVTHSVNLLEDKHNGKLCKLRGVAPLHLGKCNIAGWILGNPECESLSTASSWSYIVETSSSDNGTCYPGDFINYEELREQLSSVSSFERFEIFPKTSSWPNHDSNKGVTAACPHAGAKSFYKNLIWLVKKGNSYPKLSKSYINDKGKEVLVLWGIHHPSTSADQQSLYQNADAYVFVGTSRYSKKFQPEIAIRPKVRDQEGRMNYYWTLVEPGDKITFEATGNLVVPRYAFAMERNAGSGIIISDTPVHDCNTTCQTPKGAINTSLPFQNIHPITIGKCPKYVKSTKLRLATGLRNVPSIQSRGLFGAIAGFIEGGWTGMVDGWYGYHHQNEQGSGYAADLKSTQNAIDKITNKVNSVIEKMNTQFTAVGKEFNHLEKRIENLNKKVDDGFLDIWTYNAELLVLLENERTLDYHDSNVKNLYEKVRSQLKNNAKEIGNGCFEFYHKCDNTCMESVKNGTYDYPKYSEEAKLNREEIDGVKLESTRIYQILAIYSTVASSLVLVVSLGAISFWMCSNGSLQCRICI

SEQ ID NO: 4271 - protein, 566 aa, Artificial Sequence
  derived and/or modified protein sequence (wt) from hemagglutinin__InfluenzaA__ADD74538
MKAILVVLLYTFATANADTLCIGYHANNSTDTVDTVLEKNVTVTHSVNLLEDKHNGKLCRLRGVAPLHLGKCNIAGWILGNPECESLSTASSWSYIVETSSSDNGTCYPGDFIDYEELREQLSSVSSFERFEIFPKTSSWPNHDSNKGVTAACPHAGAKSFYKNLIWLVKKGNSYPKLSKSYINDKGKEVLVLWGIHHPSTSADQQSLYQNADAYVFVGTSRYSKKFKPEIAIRPKVRDQEGRMNYYWTLVEPGDKITFEATGNLVVPRYAFAMERNAGSGIIISDTPVYDCNTTCQTPKGAINTSLPFQNIHPITIGKCPKYVKSTKLRLATGLRNVPSIQSRGLFGAIAGFIEGGWTGMVDGWYGYHHQNEQGSGYAADLKSTQNAIDEITNKVNSVIEKMNTQFTAVGKEFNHLEKRIENLNKKVDDGFLDIWTYNAELLVLLENERTLDYHDSNVKNLYEKVRSQLKNNAKEIGNGCFEFYHKCDNTCMESVKNGTYDYPKYSEEAKLNREEIDGVKLESTRIYQILAIYSTVASSLVLVVSLGAISFWMCSNGSLQCRICI

SEQ ID NO: 4272 - protein, 566 aa, Artificial Sequence; identical to SEQ ID NO: 4266
  derived and/or modified protein sequence (wt) from hemagglutinin__InfluenzaA__ADD74548

SEQ ID NO: 4273 - protein, 566 aa, Artificial Sequence; identical to SEQ ID NO: 3833
  derived and/or modified protein sequence (wt) from hemagglutinin__InfluenzaA__ADD74558

SEQ ID NO: 4274 - protein, 566 aa, Artificial Sequence; identical to SEQ ID NO: 4221
  derived and/or modified protein sequence (wt) from hemagglutinin__InfluenzaA__ADD74568

SEQ ID NO: 4275 - protein, 566 aa, Artificial Sequence
  derived and/or modified protein sequence (wt) from hemagglutinin__InfluenzaA__ADD74578
MKAILVVLLYTFATANADTLCIGYHANNSTDTVDTVLEKNVTVTHSVNLLEDKHNGKLCKLRGVAPLHLGKCNIAGWILGNPECESLSTSSSWSYIVETSSSDNGTCYPGDFIDYEELREQLSSVSSFERFEIFPKTSSWPNHDSNKGVTAACPHAGAKSFYKNLIWLVKKGNSYPKLSKSYINDKGKEVLVLWGIHHPSTSTDQQSLYQNADAYVFVGTSRYSKKFKPEIAIRPKVRDQEGRMNYYWTLVEPGDKITFEATGNLVVPRYAFAMERNAGSGIIISDTPVHDCNTTCQTPKGAINTSLPFQNIHPITIGKCPKYVKSTKLRLATGLRNVPSIQSRGLFGAIAGFIEGGWTGMVDGWYGYHHQNEQGSGYAADLKSTQNAIDEITNKVNSVIEKMNTQFTAVGKEFNHLEKRIENLNKKVDDGFLDIWTYNAELLVLLENERTLDYHDSNVKNLYEKVRSQLKNNAKEIGNGCFEFYHKCDNTCMESVKNGTYDYPKYSEEAKLNREEIDGVKLESTRIYQILAIYSTVASSLVLVVSLGAISFWMCSNGSLQCRICI

SEQ ID NO: 4276 - protein, 566 aa, Artificial Sequence
  derived and/or modified protein sequence (wt) from hemagglutinin__InfluenzaA__ADD74588
MKAILVVLLYTFATANADTLCIGYHANNSTDTVDTVLEKNVTVTHSVNLLEDKHNGKLCKLRGVAPLHLGKCNIAGWILGNPECESLSTASSWSYIVETSSSDNGTCYPGDFIDYEELREQLSSVSSFERFEIFPKTSSWPNHDSNKGVTAACPHAGAKSFYKNLIWLVKKGNSYPKLSKSYINDKGKEVLVLWGIHHPSTSDGQQSLYQNADAYVFVGTSRYSKKFKPEIAIRPKVRDQEGRMNYYWTLVEPGDKITFEATGNLVVPRYAFAMERNAGSGIIISDTPVHDCNTTCQTPKGAINTSLPFQNIHPITIGKCPKYVKSTKLRLATGLRNVPSIQSRGLFGAIAGFIEGGWTGMVDGWYGYHHQNEQGSGYAADLKSTQNAIDEITNKVNSVIEKMNTQFTAVGKEFNHLEKRIENLNKKVDDGFLDIWTYNAELLVLLENERTLDYHDSNVKNLYEKVRSQLKNNAKEIGNGCFEFYHKCDNTCMESVKNGTYDYPKYSKEAKLNREEIDGVKLESTRIYQILAIYSTVASSLVLVVSLGAISFWMCSNGSLQCRICI

SEQ ID NO: 4277 - protein, 566 aa, Artificial Sequence; identical to SEQ ID NO: 4221
  derived and/or modified protein sequence (wt) from hemagglutinin__InfluenzaA__ADD74598

SEQ ID NO: 4278 - protein, 566 aa, Artificial Sequence; identical to SEQ ID NO: 4221
  derived and/or modified protein sequence (wt) from hemagglutinin__InfluenzaA__ADD74608

SEQ ID NO: 4279 - protein, 566 aa, Artificial Sequence; identical to SEQ ID NO: 3833
  derived and/or modified protein sequence (wt) from hemagglutinin__InfluenzaA__ADD74618

SEQ ID NO: 4280 - protein, 566 aa, Artificial Sequence
  derived and/or modified protein sequence (wt) from hemagglutinin__InfluenzaA__ADD74628
MKAILVVLLYTFATANADTLCIGYHANNSTDTVDTILEKNVTVTHSVNLLEDKHNGKLCKLRGVAPLHLGKCNIAGWILGNPECESLSTASSWSYIVETSSSDNGTCYPGDFIDYEELREQLSSVSSFERFEIFPKTSSWPNHDSNKGVTAACPHAGAKSFYKNLIWLVKKGNSYPKLSKSYINDKGKEILVLWGIHHPSTSADQQSLYQNADAYVFVGTSRYSKKFKPEIAIRPKVRDQEGRMNYYWTLVEPGDKITFEATGNLVVPRYAFAMEKNAGSGIIISDTPVHDCNTTCQTPKGAINTSLPFQNIHPITIGKCPKYVKSTKLRLATGLRNVPSIQSRGLFGAIAGFIEGGWTGMVDGWYGYHHQNEQGSGYAADLKSTQNAIDEITNKVNSVIEKMNTQFTAVGKEFNHLEKRIENLNKKVDDGFLDIWTYNAELLVLLENERTLDYHDSNVKNLYEKVRSQLKNNAKEIGNGCFEFYHKCDNTCMESVKNGTYDYPKYSEEAKLNREEIDGVKLESTRIYQILAIYSTVASSLVLVVSLGAISFWMCSNGSLQCRICI

SEQ ID NO: 4281 - protein, 566 aa, Artificial Sequence; identical to SEQ ID NO: 3770
  derived and/or modified protein sequence (wt) from hemagglutinin__InfluenzaA__ADD74648

SEQ ID NO: 4282 - protein, 566 aa, Artificial Sequence
  derived and/or modified protein sequence (wt) from hemagglutinin__InfluenzaA__ADD74658
MKAILVVLLYTFATANADTLCIGYHANNSTDTVDTVLEKNVTVTHSVNLLEDKHNGKLCKLRGVAPLHLGKCNIAGWILGNPECESLSTASSWSYIVETSSSDNGTCYPGDFIDYEELREQLSSVSSFERFEIFPKTSSWPNHDSNKGVTAACPHAGAKSFYKNLIWLVKKGNSYPKLSKSYINDKGKEVLVLWGIHHPSTSADQQSLYQNADSYVFVGTSRYSKKFKPEIAIRPKVRDQEGRMNYYWTLVEPGDKITFEATGNLVVPRYAFAMERNAGSGIIISDTPVHDCNTTCQTPEGAINTSLPFQNIHPITIGKCPKYVKSTKLRLATGLRNVPSIQSRGLFGAIAGFIEGGWTGMVDGWYGYHHQNEQGSGYAADLKSTQNAIDEITNKVNSVIEKMNTQFTAVGKEFNHLEKRIENLNKKVDDGFLDIWTYNAELLVLLENERTLDYHDSNVKNLYEKVRSQLKNNAKEIGNGCFEFYHKCDNTCMESVKNGTYDYPKYSEEAKLNREEIDGVKLESTRIYQILAIYSTVASSLVLVVSLGAISFWMCSNGSLQCRICI

SEQ ID NO: 4283 - protein, 566 aa, Artificial Sequence; identical to SEQ ID NO: 4221
  derived and/or modified protein sequence (wt) from hemagglutinin__InfluenzaA__ADD74668

SEQ ID NO: 4284 - protein, 566 aa, Artificial Sequence; identical to SEQ ID NO: 4261
  derived and/or modified protein sequence (wt) from hemagglutinin__InfluenzaA__ADD74678

SEQ ID NO: 4285 - protein, 566 aa, Artificial Sequence; identical to SEQ ID NO: 4221
  derived and/or modified protein sequence (wt) from hemagglutinin__InfluenzaA__ADD74688

SEQ ID NO: 4286 - protein, 566 aa, Artificial Sequence
  derived and/or modified protein sequence (wt) from hemagglutinin__InfluenzaA__ADD74698
MKAILVVLLYTFATANADTLCIGYHANNSTDTVDTVLEKNVTVTHSVNLLEDKHNGKLCKLRGVAPLHLGKCNIAGWILGNPECESLSTASSWSYIVETSSSDNGTCYPGDFINYEELREQLSSVSSFERFEIFPKTSSWPNHDSNKGVTAACPHAGAKSFYKNLIWLVKKGNSYPKLSKSYINDKGKEVLVLWGIHHPSTSADQQSLYQNADAYVFVGTSRYSKKFKPEIAIRPKVRDQEGRMNYYWTLVEPGDKITFEATGNLVVPRYAFAMERNAGSGIIISDTPVHDCNTTCQTPKGAINTSLPFQNIHPITIGKCPKYVKSTKLRLATGLRNVPSIQSRGLFGAIAGFIEGGWTGMVDGWYGYHHQNEQGSGYAADLKSTQNAIDKITNKVNSVIEKMNTQFTAVGKEFNHLEKRIENLNKKVDDGFLDIWTYNAELLVLLENERTLDYHDSNVKNLYEKVRNQLKNNAKEIGNGCFEFYHKCDNTCMESVKNGTYDYPKYSEEAKLNREEIDGVKLESTRIYQILAIYSTVASSLVLVVSLGAISFWMCSNGSLQCRICI

SEQ ID NO: 4287 - protein, 566 aa, Artificial Sequence; identical to SEQ ID NO: 4221
  derived and/or modified protein sequence (wt) from hemagglutinin__InfluenzaA__ADD74708

SEQ ID NO: 4288 - protein, 566 aa, Artificial Sequence
  derived and/or modified protein sequence (wt) from hemagglutinin__InfluenzaA__ADD74728
MKAILVVLLYTFATANADTLCIGYHANNSTDTVDTVLEKNVTVTHSVNLLEDKHNGKLCKLRGVAPLHLGKCNIAGWILGNPECESLSTASSWSYIVETSSSDNGTCYPGDFIDYEELREQLSSVSSFERFEIFPKTSSWPDHDSNKGVTAACPHAGAKSFYKNLIWLVKKGNSYPKLSKSYINDKGKEVLVLWGIHHPSTSADQQSLYQNADAYVFVGTSRYSKKFKPEIAIRPKVRDQEGRMNYYWTLVEPGDKITFEATGNLVVPRYAFAMERNAGSGIIISDTPVHDCNTTCQTPKGAINTSLPFQNIHPITIGKCPKYVKSTKLRLATGLRNVPSIQSRGLFGAIAGFIEGGWTGMVDGWYGYHHQNEQGSGYAADLKSTQNAIDKITNKVNSVIEKMNTQFTAVGKEFNHLEKRIENLNKKVDDGFLDIWTYNAELLVLLENERTLDYHDSNVKNLYEKVRSQLKNNAKEIGNGCFEFYHKCDNTCMESVKNGTYDYPKYSEEAKLNREEIDGVKLESTRIYQILAIYSTVASSVVLVVSLGAISFWMCSNGSLQCRICI

SEQ ID NO: 4289 - protein, 566 aa, Artificial Sequence
  derived and/or modified protein sequence (wt) from hemagglutinin__InfluenzaA__ADD74738
MKAILVVLLYTFATANADTLCIGYHANNSTDTVDTVLEKNVTVTHSVNLLEDKHNGKLCKLRGVAPLHLGKCNIAGWILGNPECESLSTARSWSYIVETSSSDNGTCYPGDFIDYEELREQLSSVSSFERFEIFPKTSSWPNHDSNKGVTAACPHAGAKSFYKNLIWLVKKGNSYPKLSKSYINDKGKEVLVLWGIHHPSTSADQQSLYQNADAYVFVGTSGYSKKFKPEIAIRPKVRDQEGRMNYYWTLVEPGDKITFEATGNLVVPRYAFAMERNAGSGIIISDTPVHDCNTTCQTPKGAINTSLPFQNIHPITIGKCPKYVKSTKLRLATGLRNVPSIQSRGLFGAIAGFIEGGWTGMVDGWYGYHHQNEQGSGYAADLKSTQNAIDKITNKVNSVIEKMNTQFTAVGKEFNHLEKRIENLNKKVDDGFLDIWTYNAELLVLLENERTLDYHDSNVKNLYEKVRSQLKNNAKEIGNGCFEFYHKCDNTCMESVKNGTYDYPKYSEEAKLNREEIDGVKLESTRIYQILAIYSTVASSLVLVVSLGAISFWMCSNGSLQCRICI

SEQ ID NO: 4290 - protein, 566 aa, Artificial Sequence; identical to SEQ ID NO: 3833
  derived and/or modified protein sequence (wt) from hemagglutinin__InfluenzaA__ADD74748

SEQ ID NO: 4291 - protein, 566 aa, Artificial Sequence; identical to SEQ ID NO: 3833
  derived and/or modified protein sequence (wt) from hemagglutinin__InfluenzaA__ADD74758

SEQ ID NO: 4292 - protein, 566 aa, Artificial Sequence
  derived and/or modified protein sequence (wt) from hemagglutinin__InfluenzaA__ADD74768
MKAILVVLLYTFATANADTLCIGYHANNSTDTVDTVLEKNVTVTHSVNLLEDKHNGKLCKLRGVAPLHLGKCNIAGWILGNPECESLSTASSWSYIVETSSSDNGTCYPGDFIDYEELREQLSSVSSFERFEIFPKTSSWPNHDSNKGVTAACPHAGAKSFYKNLIWLVKKGNSYPKLSKSYINDKGKEVLVLWGIHHPSTSADQQSLYQNADAYVFVGTSRYSKKFKPEIAIRPKVRDQEGRMSYYWTLVEPGDKITFEATGNLVVPRYAFAMERNAGSGIIISDTPVHDCNTTCQTPKGAINTSLPFQNIHPITIGKCPKYVKSTKLRLATGLRNVPSIQSRGLFGAIAGFIEGGWTGMVDGWYGYHHQNEQGSGYAADLKSTQNAIDKITNKVNSVIEKMNTQFTAVGKEFNHLEKRIENLNKKVDDGFLDIWTYNAELLVLLENERTLDYHDSNVKNLYEKVRSQLKNNAKEIGNGCFEFYHKCDNTCMESVKNGTYDYPKYSEEAKLNREEIDGVKLESTRIYQILAIYSTVASSLVLVVSLGAISFWMCSNGSLQCRICI

SEQ ID NO: 4293 - protein, 566 aa, Artificial Sequence; identical to SEQ ID NO: 3833
  derived and/or modified protein sequence (wt) from hemagglutinin__InfluenzaA__ADD74778

SEQ ID NO: 4294 - protein, 566 aa, Artificial Sequence; identical to SEQ ID NO: 4221
  derived and/or modified protein sequence (wt) from hemagglutinin__InfluenzaA__ADD74788

SEQ ID NO: 4295 - protein, 566 aa, Artificial Sequence; identical to SEQ ID NO: 4221
  derived and/or modified protein sequence (wt) from hemagglutinin__InfluenzaA__ADD74798

SEQ ID NO: 4296 - protein, 566 aa, Artificial Sequence
  derived and/or modified protein sequence (wt) from hemagglutinin__InfluenzaA__ADD74808
MKAILVVLLYTFATANADTLCIGYHANNSTDTVDTVLEKNVTVTHSVNILEDKHNGKLCKLRGVAPLHLGKCNIAGWILGNPECESLSTASSWSYIVETSSSDNGTCYPGDFIDYEELREQLSSVSSFERFEIFPKTSSWPNHDSNKGVTAACPHAGAKSFYKNLIWLVKKGNSYPKLSKSYINDKGKEVLVLWGIHHPSTSADQQSLYQNADAYVFVGSSRYSKKFKPEIAIRPKVRDQEGRMNYYWTLVEPGDKITFEATGNLVVPRYAFAMERNAGSGIIISDTPVHDCNTTCQTPKGAINTSLPFQNIHPITIGKCPKYVKSTKLRLATGLRNVPSIQSRGLFGAIAGFIEGGWTGMVDGWYGYHHQNEQGSGYAADLKSTQNAIDEITNKVNSVIEKMNTQFTAVGKEFNHLEKRIENLNKKVDDGFLDIWTYNAELLVLLENERTLDYHDSNVKNLYEKVRSQLKNNAKEVGNGCFEFYHKCDNTCMESVKNGTYDYPKYSEEAKLNREEIDGVKLESTRIYQILAIYSTAASSLVLVVSLGAISFWMCSNGSLQCRICI

SEQ ID NO: 4297 - protein, 566 aa, Artificial Sequence
  derived and/or modified protein sequence (wt) from hemagglutinin__InfluenzaA__ADD74818
MKAILVVLLYTFATANADTLCIGYHANNSTDTVDTVLEKNVTVTHSVNILEDKHNGKLCKLRGVAPLHLGKCNIAGWILGNPECESLSTASSWSYIVETSSSDNGTCYPGDFIDYEELREQLSSVSSFERFEIFPKTSSWPNHDSNKGVTAACPHAGAKSFYKNLIWLVKKGNSYPKLSKSYINDKGKEVLVLWGIHHPSTSADQQSLYQNADAYVFVGTSRYSKKFKPEIAIRPKVRDQEGRMNYHWTLVEPGDKITFEATGNLVVPRYAFAMERNAGSGIIISDTPVHDCNTTCQTPKGAINTSLPFQNIHPITIGKCPKYVKSTKLRLATGLRNVPSIQSRGLFGAIAGFIEGGWTGMVDGWYGYHHQNEQGSGYAADLKSTQNAIDEITNKVNSVIEKMNTQFTAVGKEFNHLEKRIENLNKKVDDGFLDIWTYNAELLVLLENERTLDYHDSNVKNLYEKVRSQLKNNAKEIGNGCFEFYHKCDNTCMESVKNGTYDYPKYSEEAKLNREEIDGVKLESTRIYQILAIYSTVASSLVLVVSLGAISFWMCSNGSLQCRICI

SEQ ID NO: 4298 - protein, 566 aa, Artificial Sequence
  derived and/or modified protein sequence (wt) from hemagglutinin__InfluenzaA__ADD74838
MKAILVVLLYTFATANADTLCIGYHANNSTDTVDTVLEKNVTVTHSVNLLEDKHNGKLCKLRGVAPLHLGKCNIAGWILGNPECESLSTASSWSYIVETSSSDNGTCYPGDFINYEELREQLSSVSSFERFEIFPKTSSWPNHDSNKGVTAACPHAGAKSFYKNLIWLVKKGNSYPKLSKSYINDKGKEVLVLWGIHHPSTSADQQSLYQNADAYVFVGTSRYSKKFKPEIAIRPKVRDQEGRMNYYWTLVEPGDKITFEATGNLVVPRYAFAMERNAGSGIIISDTPVHDCNTTCQTPKGAINTSLPFQNVHPITIGKCPKYVKSTKLRLATGLRNVPSIQSRGLFGAIAGFIEGGWTGMVDGWYGYHHQNEQGSGYAADLKSTQNAIDKITNKVNSVIEKMNTQFTAVGKEFNHLEKRIENLNKKVDDGFLDIWTYNAELLVLLENERTLDYHDSNVKNLYEKVRSQLKNNAKEIGNGCFEFYHKCDNTCMESVKNGTYDYPKYSEEAKLNREEIDGVKLESTRIYQILAIYSTVASSLVLVVSLGAISFWMCSNGSLQCRICI

SEQ ID NO: 4299 - protein, 566 aa, Artificial Sequence
  derived and/or modified protein sequence (wt) from hemagglutinin__InfluenzaA__ADD74848
MKAILVVLLYTFATANADTLCIGYHANNSTDTVDTVLEKNVTVTHSVNLLEDKHNGKLCKLRGVAPLHLGKCNIAGWILGNPECESLSTASSWSYIVETSSSDNGTCYPGDFIDYEELREQLSSVSSFERFEIFPKTSSWPNHDSNKGVTAACPHAGAKSFYKNLIWLVKKGNSYPKLSKSYINDKGKEVLVLWGIHHPSTSADQQSLYQNADAYVFVGTSRYSKKFKPEIAIRPKVRDQEGRMNYYWTLVEPGDKITFEATGNLVVPRYAFAMERNAGSGIIISDTPVHDCNTTCQTPKGAINTSLPFQNIHPITIGKCPKYVKSTKLRLATGLRNVPSIQSRGLFGAIAGFIEGGWTGMVDGWYGYHHQNEQGSGYAADLKSTQNAIDKITNKVNSVIEKMNTQFTAVGKEFNHLEKRIENLNKKVDDGFLDIWTYNAELLVLLENERTLDYHDSNVKNLYEKVRSQLKNNAKEIGNGCFEFYHKCDNTCMESVKNGTYDYPKYSEEAKLNREEIDGVKLESTRIYQILAIYSTVASSLVLIVSLGAISFWMCSNGSLQCRICI

SEQ ID NO: 4300 - protein, 566 aa, Artificial Sequence
  derived and/or modified protein sequence (wt) from hemagglutinin__InfluenzaA__ADD74858
MKAILVVLLYTFATANADTLCIGYHANNSTDTVDTVLEKNVTVTHSVNLLEDKHNGKLCKLRGVAPLHLGKCNIAGWILGNPECESLSTASSWSYIVETSSSDNGTCYPGDFINYEELREQLSSVSSFERFEIFPKTSSWPNHDSNKGVTAACPHAGTKSFYKNLIWLVKKGNSYPKLSKSYINDKGKEVLVLWGIHHPSTSADQQSLYQNADAYVFVGTSRYSKKFKPEIAIRPKVRDQEGRMNYYWTLVEPGDKITFEATGNLVVPRYAFAMERNAGSGIIISDTPVHDCNTTCQTPKGAINTSLPFQNIHPITIGKCPKYVKSTKLRLATGLRNVPSIQSRGLFGAIAGFIEGGWTGMVDGWYGYHHQNEQGSGYAADLKSTQNAIDKITNKVNSVIEKMNTQFTAVGKEFNHLEKRIENLNKKVDDGFLDIWTYNAELLVLLENERTLDYHDSNVKNLYEKVRSQLKNNAKEIGNGCFEFYHKCDNTCMESVKNGTYDYPKYSEEAKLNREEIDGVKLESTRIYQILAIYSTVASSLVLVVSLGAISFWMCSNGSLQCRICI

SEQ ID NO: 4301 - protein, 566 aa, Artificial Sequence; identical to SEQ ID NO: 4221
  derived and/or modified protein sequence (wt) from hemagglutinin__InfluenzaA__ADD74868

SEQ ID NO: 4302 - protein, 566 aa, Artificial Sequence; identical to SEQ ID NO: 4221
  derived and/or modified protein sequence (wt) from hemagglutinin__InfluenzaA__ADD74878

SEQ ID NO: 4303 - protein, 566 aa, Artificial Sequence
  derived and/or modified protein sequence (wt) from hemagglutinin__InfluenzaA__ADD74888
MKAILVVLLYTFATANADTLCIGYHANNSTDTVDTVLEKNVTVTHSVDLLEDKHNGKLCKLRGVAPLHLGKCNIAGWILGNPECESLSTASSWSYIVETSSSDNGTCYPGDFIDYEELREQLSSVSSFERFEIFPKTNSWPNHDSNKGVTAACPHAGAKSFYKNLIWLVKKGNSYPKLSKSYINDKGKEVLVLWGIHHPSTSADQQSLYQNADAYVFVGTSRYSKKFKPEIAIRPKVRDQEGRMNYYWTLVEPGDKITFEATGNLVVPRYAFAMERNAGSGIIISDTPVHDCNTTCQTPKGAINTSLPFQNIHPITIGKCPKYVKSTKLRLATGLRNVPSIQSRGLFGAIAGFIEGGWTGMVDGWYGYHHQNEQGSGYAADLKSTQNAIDEITNKVNSVIEKMNTQFTAVGKEFNHLEKRIENLNKKVDDGFLDIWTYNAELLVLLENERTLDYHDSNVKNLYEKVRSQLKNNAKEIGNGCFEFYHKCDNTCMESVKNGTYDYPKYSEEAKLNREEIDGVKLESTRIYQILAIYSTVASSLVLVVSLGAISFWMCSNGSLQCRICI

SEQ ID NO: 4304 - protein, 566 aa, Artificial Sequence
  derived and/or modified protein sequence (wt) from hemagglutinin__InfluenzaA__ADD74898
MKAILVVLLYTFTTANADTLCIGYHANNSTDTVDTVLEKNVTVTHSVNLLEDKHNGKLCKLRGVAPLHLGKCNIAGWILGNPECESLSTASSWSYIVETSSSDNGTCYPGDFINYEELREQLSSVSSFERFEIFPKTSSWPNHDSNKGVTAACPHAGAKSFYKNLIWLVKKGNSYPKLSKSYINDKGKEVLVLWGIHHPSTSADQQSLYQNADAYVFVGTSRYSKKFKPEIAIRPKVRDQEGRMNYYWTLVEPGDKITFEATGNLVVPRYAFAMERNAGSGIIISDTPVHDCNTTCQTPKGAINTSLPFQNIHPITIGKCPKYVKSTKLRLATGLRNVPSIQSRGLFGAIAGFIEGGWTGMVDGWYGYHHQNEQGSGYAADLKSTQNAIDKITNKVNSVIEKMNTQFTAVGKEFNHLEKRIENLNKKVDDGFLDIWTYNAELLVLLENERTLDYHDSNVKNLYEKVRSQLKNNAKEIGNGCFEFYHKCDNTCMESVKNGTYDYPKYSEEAKLNREEIDGVKLESTRIYQILAIYSTVASSLVLVVSLGAISFWMCSNGSLQCRICI

SEQ ID NO: 4305 - protein, 566 aa, Artificial Sequence
  derived and/or modified protein sequence (wt) from hemagglutinin__InfluenzaA__ADD74908
MKAILVVLLYTFATANADTLCIGYHANNSTDTVDTVLEKNVTVTHSVNLLEDKHNGKLCKLRGVAPLHLGKCNIAGWILGNPECESLSTASSWSYIVETSSSDNGTCYPGDFIDYEELREQLSSVSSFERFEIFPKTSSWPNHDSNKGVTAACPHAGAKSFYKNLIWLVKKGNSYPKLSKSYINDKGKEVLVLWGIHHPSTSADQQSLYQNADAYVFVGTSRYSKKFKPEIAIRPKVRDQEGRMNYYWTLVEPGDKITFEATGNLVVPRYAFTMERNAGSGIIISDTPVHDCNTTCQTPKGAINTSLPFQNIHPITIGKCPKYVKSTKLRLATGLRNVPSIQSRGLFGAIAGFIEGGWTGMVDGWYGYHHQNEQGSGYAADLKSTQNAIDEITNKVNSVIEKMNTQFTAVGKEFNHLEKRIENLNKKVDDGFLDIWTYNAELLVLLENERTLDYHDSNVKNLYEKVRSQLKNNAKEIGNGCFEFYHKCDNTCMESVKNGTYDYPKYSEEAKLNREEIDGVKLESTRIYQILAIYSTVASSLVLVVSLGAISFWMCSNGSLQCRICI

SEQ ID NO: 4306 - protein, 566 aa, Artificial Sequence; identical to SEQ ID NO: 4299
  derived and/or modified protein sequence (wt) from hemagglutinin__InfluenzaA__ADD74918

SEQ ID NO: 4307 - protein, 566 aa, Artificial Sequence; identical to SEQ ID NO: 4221
  derived and/or modified protein sequence (wt) from hemagglutinin__InfluenzaA__ADD74928

SEQ ID NO: 4308 - protein, 566 aa, Artificial Sequence; identical to SEQ ID NO: 4299
  derived and/or modified protein sequence (wt) from hemagglutinin__InfluenzaA__ADD74938

SEQ ID NO: 4309 - protein, 566 aa, Artificial Sequence
  derived and/or modified protein sequence (wt) from hemagglutinin__InfluenzaA__ADD74958
MKAILVVLLYTFATANADTLCIGYHANNSTDTVDTVLEKNVTVTHSVNLLENKHNGKLCKLRGVAPLHLGKCNIAGWILGNPECESLSTASSWSYIVETSSSDNGTCYPGDFINYEELREQLSSVSSFERFEIFPKTSSWPNHDSNKGVTAACPHAGAKSFYKNLIWLVKKGNSYPKLSKSYINDKGKEVLVLWGIHHPSTSADQQSLYQNADAYVFVGTSRYSKKFKPEIAIRPKVRDQEGRMNYYWTLVEPGDKITFEATGNLVVPRYAFAMERNAGSGIIISDTPVHDCNTTCQTPKGAINTSLPFQNIHPITIGKCPKYVKSTKLRLATGLRNVPSIQSRGLFGAIAGFIEGGWTGMVDGWYGYHHQNEQGSGYAADLKSTQNAIDKITNKVNSVIEKMNTQFTAVGKEFNHLEKRIENLNKKVDDGFLDIWTYNAELLVLLENERTLDYHDSNVKNLYEKVRSQLKNNAKEIGNGCFEFYHKCDNTCMESVKNGTYDYPKYSEEAKLNREEIDGVKLESTRIYQILAIYSTVASSLVLVVSLGAISFWMCSNGSLQCRICI

SEQ ID NO: 4310 - protein, 566 aa, Artificial Sequence; identical to SEQ ID NO: 3833
  derived and/or modified protein sequence (wt) from hemagglutinin__InfluenzaA__ADD74968

SEQ ID NO: 4311 - protein, 566 aa, Artificial Sequence
  derived and/or modified protein sequence (wt) from hemagglutinin__InfluenzaA__ADD74998
MKAILVVLLYTFATANADTLCIGYHANNSTDTVDTVLEKNVTVTHSVNLLEDKHNGKLCKLRGVAPLHLGKCNIAGWILGNPECESLSTASSWSYIVETSSSDNGTCYPGDFIDYEELREQLSSVSSFERFEIFPKTSSWPNHDSNKGVTAACPHAGAKSFYKNLIWLVKKGNSYPKLSKSYINDKGKEVLVLWGIHHPSTSADQQSLYQNADAYVFVGTSRYSKKFKPEIAIRPKVRDQEGRMNYYWTLVEPGDKITFEATGNLVVPRYAFAMERNAGSGIIISDTPVHDCNTTCQTPKGAINTSLPFQNIHPITIGKCPKYVKSTKLRLATGLRNVPSIQSRGLFGAIAGFIEGGWTGMVDGWYGYHHQNERGSGYAADLKSTQNAIDKITNKVNSVIEKMNTQFTAVGKEFNHLEKRIENLNKKVDDGFLDIWTYNAELLVLLENERTLDYHDSNVKNLYEKVRSQLKNNAKEIGNGCFEFYHKCDNTCMESVKNGTYDYPKYSEEAKLNREEIDGVKLESTRIYQILAIYSTVASSLVLVVSLGAISFWMCSNGSLQCRICI

SEQ ID NO: 4312 - protein, 566 aa, Artificial Sequence; identical to SEQ ID NO: 3833
  derived and/or modified protein sequence (wt) from hemagglutinin__InfluenzaA__ADD75008

SEQ ID NO: 4313 - protein, 566 aa, Artificial Sequence; identical to SEQ ID NO: 3833
  derived and/or modified protein sequence (wt) from hemagglutinin__InfluenzaA__ADD75018

SEQ ID NO: 4314 - protein, 566 aa, Artificial Sequence; identical to SEQ ID NO: 3833
  derived and/or modified protein sequence (wt) from hemagglutinin__InfluenzaA__ADD75028

SEQ ID NO: 4315 - protein, 566 aa, Artificial Sequence; identical to SEQ ID NO: 3770
  derived and/or modified protein sequence (wt) from hemagglutinin__InfluenzaA__ADD75058

SEQ ID NO: 4316 - protein, 566 aa, Artificial Sequence; identical to SEQ ID NO: 4089
  derived and/or modified protein sequence (wt) from hemagglutinin__InfluenzaA__ADD75088

SEQ ID NO: 4317 - protein, 566 aa, Artificial Sequence; identical to SEQ ID NO: 2669
  derived and/or modified protein sequence (wt) from hemagglutinin__InfluenzaA__ADD75098

SEQ ID NO: 4318 - protein, 566 aa, Artificial Sequence
  derived and/or modified protein sequence (wt) from hemagglutinin__InfluenzaA__ADD75108
MKAILVVLLYTFATANADTLCIGYHANNSTDTVDTVLEKNVTVTHSVNLLEDKHNGKLCKLRGVAPLHLGKCNIAGWILGNPECESLSTASSWSYIVETSSSDNGTCYPGDFIDYEELREQLSSVSSFERFEIFPKTSSWPNHDSNKGVTAACPHAGAKSFYKNLIWLVKKGNSYPKLSKSYINDKGKEVLVLWGIHHPSTSADQQSLYQNADAYVFVGTSRYSKKFKPEIAIRPKVRDQEGRMNYYWTLVEPGDKITFEATGNLVVPRYAFAMERNAGSGIIISDTPVHDCNTTCQTPKGAINTSLPFQNIHPITIGKCPKYVKSTKLRLATGLRNIPSIQSRGLFGAIAGFIEGGWTGMVDGWYGYHHQNEQGSGYAADLKSTQNAIDKITNKVNSVIEKMNTQFTAVGKEFNHLEKRIENLNKKVDDGFLDIWTYNAELLVLLENERTLDYHDSNVKNLYEKVRSQLKNNAKEIGNGCFEFYHKCDNTCMESVKNGTYDYPKYSEEAKLNREEIDGVKLESTRIYQILAIYSTVASSLVLVVSLGAISFWMCSNGSLQCRICI

SEQ ID NO: 4319 - protein, 566 aa, Artificial Sequence; identical to SEQ ID NO: 2669
  derived and/or modified protein sequence (wt) from hemagglutinin__InfluenzaA__ADD75118

SEQ ID NO: 4320 - protein, 566 aa, Artificial Sequence; identical to SEQ ID NO: 3116
  derived and/or modified protein sequence (wt) from hemagglutinin__InfluenzaA__ADD75128

SEQ ID NO: 4321 - protein, 566 aa, Artificial Sequence; identical to SEQ ID NO: 2669
  derived and/or modified protein sequence (wt) from hemagglutinin__InfluenzaA__ADD75138

SEQ ID NO: 4322 - protein, 566 aa, Artificial Sequence; identical to SEQ ID NO: 3833
  derived and/or modified protein sequence (wt) from hemagglutinin__InfluenzaA__ADD75148

SEQ ID NO: 4323 - protein, 566 aa, Artificial Sequence; identical to SEQ ID NO: 2669
  derived and/or modified protein sequence (wt) from hemagglutinin__InfluenzaA__ADD75158

SEQ ID NO: 4324 - protein, 566 aa, Artificial Sequence
  derived and/or modified protein sequence (wt) from hemagglutinin__InfluenzaA__ADD84494
MKAILVVLLYTFATANADTLCIGYHANNSTDTVDTVLEKNVTVTHSVNLLEDKHNGKLCKLRGVAPLHLGKCNIAGWILGNPECESLSTASSWSYIVETSSSDNGTCYPGDFIDYEELREQLSSVSSFERFEIFPKISSWPNHDPNKGVTAACPHAGAKSFYKNLIWLVKKGNSYPKLSKSYINDKGKEVLVLWGIHHPSTSADQQSLYQNADAYVFVGTSRYSKKFKPEIAIRPKVRDQEGRMNYYWTLVEPGDKITFEATGNLVVPRYAFAMERNAGSGIIISDTPVHGCNTTCQTPKGAINTSLPFQNIHPITIGKCPKYVKSTKLRLATGLRNVPSIQSRGLFGAIAGFIEGGWTGMVDGWYGYHHQNEQGSGYAADLKSTQNAIDEITNKVNSVIEKMNTQFTAVGKEFNHLEKRIENLNKKVDDGFLDIWTYNAELLVLLENERTLDYHDSNVKNLYEKVRSQLKNNAKEIGNGCFEFYHKCDNTCMESVKNGTYDYPKYSEEAKLNREEIDGVKLESTRIYQILAIYSTVASSLVLVVSLGAISFWMCSNGSLQCRICI

SEQ ID NO: 4325 - protein, 566 aa, Artificial Sequence
  derived and/or modified protein sequence (wt) from hemagglutinin__InfluenzaA__ADD84495
MKAILVVLLYTFATANADTLCIGYHANNSTDTVDTVLEKNVTVTHSVNLLEDKHNGKLCKLRGVAPLHLGKCNIAGWILGNPECESLSTASSWSYIVETSSSDNGTCYPGDFIDYEELREQLSSVSSFERFEIFPKISSWPNHDPNKGVTAACPHAGAKSFYKNLIWLVKKGNSYPKLSKSYINDKGKEVLVLWGIHHPSTSADQQSLYQNADAYVFVGTSRYSKKFKPEIAIRPKVRDQEGRMNYYWTLVEPGDKITFEATGNLVVPRYAFAMERNAGSGIIISDTPVHDCNTTCQTPKGAINTSLPFQNIHPITIGKCPKYVKSTKLRLATGLRNVPSIQSRGLFGAIAGFIEGGWTGMVDGWYGYHHQNEQGSGYAADLKSTQNAIDEITNKVNSVIEKMNTQFTAVGKEFNHLEKRIENLNKKVDDGFLDIWTYNAELLVLLENERTLDYHDSNVKNLYEKVRSQLKNNAKEIGNGCFEFYHKCDNTCMESVKNGTYDYPKYSEEAKLNREEIDGVKLESTRIYQILAIYSTVASSLVLVVSLGAISFWMCSNGSLQCRICI

SEQ ID NO: 4326 - protein, 566 aa, Artificial Sequence
  derived and/or modified protein sequence (wt) from hemagglutinin__InfluenzaA__ADD84496
MKAILVVLLYTFATANADTLCIGYHANNSTDTVDTVLEKNVTVTHSVNLLEDKHNGKLCKLRGVAPLHLGKCNIAGWILGNPECESLSTASSWSYIVETSSSDNGTCYPGDFIDYEELREQLSSVSSFERFEIFPKISSWPNHDPNKGVTAACPHAGAKSFYKNLIWLVKKGNSYPKLSKSYINDKGKEVLVLWGIHHPSTSADQQSLYQNADAYVFVGSSRYSKKFKPEIAIRPKVRDQEGRMNYYWTLVEPGDKITFEATGNLVVPRYAFAMERNAGSGIIISDTPVHDCNTTCQTPKGAINTSLPFQNIHPITIGKCPKYVKSTKLRLATGLRNVPSIQSRGLFGAIAGFIEGGWTGMVDGWYGYHHQNEQGSGYAADLKSTQNAIDEITNKVNSVIEKMNTQFTAVGKEFNHLEKRIENLNKKVDDGFLDIWTYNAELLVLLENERTLDYHDSNVKNLYEKVRSQLKNNAKEIGNGCFEFYHKCDNTCMESVKNGTYDYPKYSEEAKLNREEIDGVKLESTRIYQILAIYSTVASSLVLVVSLGAISFWMCSNGSLQCRICI

SEQ ID NO: 4327 - protein, 566 aa, Artificial Sequence; identical to SEQ ID NO: 4325
  derived and/or modified protein sequence (wt) from hemagglutinin__InfluenzaA__ADD84497

SEQ ID NO: 4328 - protein, 566 aa, Artificial Sequence
  derived and/or modified protein sequence (wt) from hemagglutinin__InfluenzaA__ADD84498
MKAILVVLLYTFATANADTLCIGYHANNSTDTVVTVLEKNVTVTHSVNLLEDKHNGKLCKLRGVAPLHLGKCNIAGWILGNPECESLSTASSWSYIVETSSSDNGTCYPGDFIDYEELREQLSSVSSFERFEIFPKISSWPNHDPNKGVTAACPHAGAKSFYKNLIWLVKKGNSYPKLSKSYINDKGKEVLVLWGIHHPSTSADQQSLYQNADAYVFVGSSRYSKKFKPEIAIRPKVRDQEGRMNYYWTLVEPGDKITFEATGNLVVPRYAFAMERNAGSGIIISDTPVHDCNTTCQTPKGAINTSLPFQNIHPITIGKCPKYVKSTKLRLATGLRNVPSIQSRGLFGAIAGFIEGGWTGMVDGWYGYHHQNEQGSGYAADLKSTQNAIDEITNKVNSVIEKMNTQFTAVGKEFNHLEKRIENLNKKVDDGFLDIWTYNAELLVLLENERTLDYHDSNVKNLYEKVRSQLKNNAKEIGNGCFEFYHKCDNTCMESVKNGTYDYPKYSEEAKLNREEIDGVKLESTRIYQILAIYSTVASSLVLVVSLGAISFWMCSNGSLQCRICI

SEQ ID NO: 4329 - protein, 566 aa, Artificial Sequence; identical to SEQ ID NO: 4325
  derived and/or modified protein sequence (wt) from hemagglutinin__InfluenzaA__ADD84499

SEQ ID NO: 4330 - protein, 566 aa, Artificial Sequence
  derived and/or modified protein sequence (wt) from hemagglutinin__InfluenzaA__ADD92535
MKAILVVLLYTFATANADTLCIGYHANNSTDTVDTVLEKNVTVTHSVNLLEDKHNGKLCKLRGVAPLHLGKCNIAGWILGNPECESLSTASSWSYIVETSSSDNGTCYPGDFIDYEELREQLSSVSSFERFEIFPKTSSWPNHDSNKGVTAACPHAGAKSFYKNLIWLVKKGNSYPKLSKSYINDKGKEVLVLWGIHHPSTSADQQSLYQNADAYVFVGTSRYSKKFKPEIAIRPKVRDREGRMNYYWTLVEPGDKITFEATGNLVVPRYAFAMERNAGSGIIISDTPVHDCNTTCQTPKGAINTSLPFQNIHPITIGKCPKYVKSTKLRLATGLRNVPSIQSRGLFGAIAGFIEGGWTGMVDGWYGYHHQNEQGSGYAADLKSTQNAIDEITNRVNSVIEKMNTQFTAVGKEFNHLEKRIENLNKKVDGGFLDIWTYNAELLVLLENERTLDYHDSNVKNLYEKVRSQLKNNAKEIGNGCFEFYHKCDNTCMESVKNGTYDYPKYSEEAKLNREEIDGVKLESTRIYQILAIYSTVASSLVLVVSLGAISFWMCSNGSLQCRICI

SEQ ID NO: 4331 - protein, 566 aa, Artificial Sequence; identical to SEQ ID NO: 4257
  derived and/or modified protein sequence (wt) from hemagglutinin__InfluenzaA__ADD96766

SEQ ID NO: 4332 - protein, 566 aa, Artificial Sequence; identical to SEQ ID NO: 2849
  derived and/or modified protein sequence (wt) from hemagglutinin__InfluenzaA__ADD96776

SEQ ID NO: 4333 - protein, 566 aa, Artificial Sequence; identical to SEQ ID NO: 2849
  derived and/or modified protein sequence (wt) from hemagglutinin__InfluenzaA__ADD96786

SEQ ID NO: 4334 - protein, 566 aa, Artificial Sequence; identical to SEQ ID NO: 4154
  derived and/or modified protein sequence (wt) from hemagglutinin__InfluenzaA__ADD96796

SEQ ID NO: 4335 - protein, 566 aa, Artificial Sequence
  derived and/or modified protein sequence (wt) from hemagglutinin__InfluenzaA__ADD96806
MKAILVVLLYTLATANADTLCIGYHANNSTDTVDTVLEKNVTVTHSVNLLEDKHNGKLCKLRGVAPLHLGKCNIAGWILGNPECESLSTASSWSYIVETSSSDNGTCYPGDFIDYEELREQLSSVSSFERFEIFPKTSSWPNHDSNKGVTAACPHAGAKSFYKNLIWLVKKGNSYPKLSKSYINDKGKEVLVLWGIHHPSTSADQQSLYQNADAYVFVGTSRYSKKFKPEIAIRPKVRDQEGRMNYYWTLVEPGDKITFEATGNLVVPRYAFAMERNAGSGIIISDTPVHDCNTTCQTPKGAINTSLPFQNIHPITIGKCPKYVKSTKLRLATGLRNVPSIQSRGLFGAIAGFIEGGWTGMVDGWYGYHHQNEQGSGYAADLKSTQNAIDEITNKVNSVIEKMNTQFTAVGKEFNHLEKRIENLNKKVDDGFLDIWTYNAELLVLLENERTLDYHDSNVKNLYEKVRSQLKNNAKEIGNGCFEFYHKCDNTCMESVKNGTYDYPKYSEEAKLNREEIDGVKLESTRIYQILAIYSTVASSLVLVVSLGAISFWMCSNGSLQCRICI

SEQ ID NO: 4336 - protein, 566 aa, Artificial Sequence; identical to SEQ ID NO: 3833
  derived and/or modified protein sequence (wt) from hemagglutinin__InfluenzaA__ADD96816

SEQ ID NO: 4337 - protein, 566 aa, Artificial Sequence
  derived and/or modified protein sequence (wt) from hemagglutinin__InfluenzaA__ADD96826
MKAILVVLLYTFATANADTLCIGYHANNSTDTVDTVLEKNVTVTHSVNLLEDKHNGKLCKLRGVAPLHLGKCNIAGWILGNPECESLSTASSWSYIVETSSSDNGTCYPGDFIDYEELREQLSSVSSFERFEIFPKTSSWPNHDSNKGVTAACPHAGAKSFYKNLIWLVKKGNSYPKLSKSYINDKGKEVLVLWGIHHPSTSADQQSLYQNADAYVFVGTSRYSKKFKPEIAIRPKVMDQEGRMNYYWTLVEPGDKITFEATGNLVVPRYAFAMERNAGSGIIISDTPVHDCNTTCQTPKGAINTSLPFQNIHPITIGKCPKYVKSTKLRLATGLRNVPSIQSRGLFGAIAGFIEGGWTGMVDGWYGYHHQNEQGSGYAADLKSTQNAIDEITNKVNSVIEKMNTQFAAVGKEFNHLEKRIENLNKKVDDGFLDIWTYNAELLVLLENERTLDYHDSNVKNLYEKVRSQLKNNAKEIGNGCFEFYHKCDNTCMESVKNGTYDYPKYSEEAKLNREEIDGVKLESTRIYQILAIYSTVASSLVLVVSLGAISFWMCSNGSLQCRICI

SEQ ID NO: 4338 - protein, 566 aa, Artificial Sequence; identical to SEQ ID NO: 2669
  derived and/or modified protein sequence (wt) from hemagglutinin__InfluenzaA__ADD96836

SEQ ID NO: 4339 - protein, 566 aa, Artificial Sequence; identical to SEQ ID NO: 2669
  derived and/or modified protein sequence (wt) from hemagglutinin__InfluenzaA__ADD96846

SEQ ID NO: 4340 - protein, 566 aa, Artificial Sequence; identical to SEQ ID NO: 4221
  derived and/or modified protein sequence (wt) from hemagglutinin__InfluenzaA__ADD96856

SEQ ID NO: 4341 - protein, 566 aa, Artificial Sequence; identical to SEQ ID NO: 3022
  derived and/or modified protein sequence (wt) from hemagglutinin__InfluenzaA__ADD96886

SEQ ID NO: 4342 - protein, 566 aa, Artificial Sequence; identical to SEQ ID NO: 4296
  derived and/or modified protein sequence (wt) from hemagglutinin__InfluenzaA__ADD96896

SEQ ID NO: 4343 - protein, 566 aa, Artificial Sequence; identical to SEQ ID NO: 3833
  derived and/or modified protein sequence (wt) from hemagglutinin__InfluenzaA__ADD96906

SEQ ID NO: 4344 - protein, 566 aa, Artificial Sequence; identical to SEQ ID NO: 3833
  derived and/or modified protein sequence (wt) from hemagglutinin__InfluenzaA__ADD96916

SEQ ID NO: 4345 - protein, 566 aa, Artificial Sequence; identical to SEQ ID NO: 3833
  derived and/or modified protein sequence (wt) from hemagglutinin__InfluenzaA__ADD96926

SEQ ID NO: 4346 - protein, 566 aa, Artificial Sequence
  derived and/or modified protein sequence (wt) from hemagglutinin__InfluenzaA__ADD96936
MKAILVVLLYTFATANADTLCIGYHANNSTDTVDTVLEKNVTVTHSVNILEDKHNGKLCKLRGVAPLHLGKCNIAGWILGNPECESLSTASSWSYIVETSSSDNGTCYPGDFIDYEELREQLSSVSSFERFEIFPKTSSWPNHDSNKGVTAACPHAGAKSFYKNLIWLIKKGNSYPKLSKSYINDKGKEVLVLWGIHHPSTSADQQSLYQNADAYVFVGTSRYSKKFKPEIAIRPKVRDQEGRMNYYWTLVEPGDKITFEATGNLVVPRYAFAMERNAGSGIIISDTPVHDCNTTCQTPKGAINTSLPFQNIHPITIGKCPKYVKSTKLRLATGLRNVPSIQSRGLFGAIAGFIEGGWTGMVDGWYGYHHQNEQGSGYAADLKSTQNAIDEITNKVNSVIEKMNTQFTAVGKEFNHLEKRIENLNKKVDDGFLDIWTYNAELLVLLENERTLDYHDSNVKNLYEKVRSQLKNNAKEIGNGCFEFYHKCDNTCMESVKNGTYDYPKYSEEAKLNREEIDGVKLESTRIYQILAIYSTVASSLVLVVSLGAISFWMCSNGSLQCRICI

SEQ ID NO: 4347 - protein, 566 aa, Artificial Sequence
  derived and/or modified protein sequence (wt) from hemagglutinin__InfluenzaA__ADD96946
MKAILVVLLYTFATANADTLCIGYHANNSTDTVDTVLEKNVTVTHSVNLLEDKHNGKLCKLRGVAPLHLGKCNIAGWILGNPECESLSTASSWSYIVETSSSDNGTCYPGDFIDYEELREQLSSVSSFKRFEIFPKTSSWPNHDSNKGVTAACPHAGAKSFYKNLIWLVKKGNSYPKLSKSYINDKGKEVLVLWGIHHPSTSADQQSLYQNADAYVFVGTSRYSKKFKPEIAIRPKVRDQEGRMNYYWTLVEPGDKITFEATGNLVVPRYAFAMERNAGSGIIISDTPVHDCNTTCQTPKGAINTSLPFQNIHPITIGECPKYVKSTKLRLATGLRNVPSIQSRGLFGAIAGFIEGGWTGMVDGWYGYHHQNEQGSGYAADLKSTQNAIDKITNKVNSVIEKMNTQFTAVGKEFNHLEKRIENLNKKVDDGFLDIWTYNAELLVLLENERTLDYHDSNVKNLYEKVRSQLKNNAKEIGNGCFEFYHKCDNTCMESVKNGTYDYPKYSEEAKLNREEIDGVKLESTRIYQILAIYSTVASSLVLVVSLGAISFWMCSNGSLQCRICI

SEQ ID NO: 4348 - protein, 566 aa, Artificial Sequence
  derived and/or modified protein sequence (wt) from hemagglutinin__InfluenzaA__ADD96956
MKAILVVLLYTFATANADTLCIGYHANNSTDTVDTVLEKNVTVTHSVNLLEDKHNGKLCKLRGVAPLHLGKCNIAGWILGNPECESLSTASSWSYIVETSSSDNGTCYPGDFIDYEELREQLSSVSSFERFEIFPKTSSWPNHDSNKGVTAACPHAGAKSFYKNLIWLVKKGNSYPKLSKSYINDKGKEVLVLWGIHHPSTSADQQSLYQNADAYVFVGTSRYSKKFKPEIAIRPKVREQEGRMNYYWTLVKPGDKITFEATGNLVVPRYAFAMERNAGSGIIISDTPVHDCNTTCQTPKGAINTSLPFQNIHSITIGKCPKYVKSTKLRLATGLRNVPSIQSRGLFGAIAGFIEGGWTGMVDGWYGYHHQNEQGSGYAADLKSTQNAIDEITNKVNSVIEKMNTQFTAVGKEFNHLEKRIENLNKKVDDGFLDIWTYNAELLVLLENERTLDYHDSNVKNLYEKVRSQLKNNAKEIGNGCFEFYHKCDNTCMESVKNGTYDYPKYSEEAKLNREEIDGVKLESTRIYQILAIYSTVASSLVLVVSLGAISFWMCSNGSLQCRICI

SEQ ID NO: 4349 - protein, 566 aa, Artificial Sequence; identical to SEQ ID NO: 2669
  derived and/or modified protein sequence (wt) from hemagglutinin__InfluenzaA__ADD96976

SEQ ID NO: 4350 - protein, 566 aa, Artificial Sequence; identical to SEQ ID NO: 2669
  derived and/or modified protein sequence (wt) from hemagglutinin__InfluenzaA__ADD96986

SEQ ID NO: 4351 - protein, 566 aa, Artificial Sequence
  derived and/or modified protein sequence (wt) from hemagglutinin__InfluenzaA__ADD97035
MKAILVVLLYTFATANADTLCIGYHANNSTDTVDTVLEKNVTVTHSVNLLEDKHNGKLCKLRGVAPLHLGKCNIAGWILGNPECESLSTASSWSYIVETSSSDNGTCYPGDFIDYEELREQLSSVSSFERFEIFPKTSSWPNHDSNKGVTAACPHAGAKSFYKNLIWLVKKGNSYPKLSKSYINDKGKEVLVLWGIHHPSTSADQQSLYQNADAYVFVGTSRYSKKFKPEIAIRPKVRDQEGRMNYYWTLVEPGDKITFEATGNLVVPRYAFAMERNAGSGIIISDTPVHDCNTTCQTPKGAINTSLPFQNIHPITIGKCPKYVKSTKLRMATGLRNVPSIQSRGLFGAIAGFIEGGWTGMVDGWYGYHHQNEQGSGYAADLKSTQNAIDEITNKVNSVIEKMNTQFTAVGKEFNHLEKRIENLNKKVDDGFLDIWTYNAELLVLLENERTLDYHDSNVKNLYEKVRSQLKNNAKEIGNGCFEFYHKCDNTCMESVKNGTYDYPKYSEEAKLNREEIDGVKLESTRIYQILAIYSTVASSLVLVVSLGAISFWMCSNGSLQCRICI

SEQ ID NO: 4352 - protein, 566 aa, Artificial Sequence
  derived and/or modified protein sequence (wt) from hemagglutinin__InfluenzaA__ADD97045
MKAILVVLLYTFATANADTLCIGYHANNSTDTVDTVLEKNVTVTHSVNLLEDKHNGKLCKLRGVAPLHLGKCNIAGWILGNPECESLSTASSWSYIVETSSSDNGTCYPGDFTDYEELREQLSSVSSFERFEIFPKTSSWPNHDSNKGVTAACPHAGAKSFYKNLIWLVKKGNSYPKLSKSYINDKGKEVLVLWGIHHPSTSADQQSLYQNADAYVFVGTSRYSKKFKPEIAIRPKVRDQEGRMNYYWTLVEPGDKITFEATGNLVVPRYAFAMERNAGSGIIISDTPVHDCNTTCQTPKGAINTSLPFQNIHPITIGKCPKYVKSTKLRLATGLRNVPSIQSRGLFGAIAGFIEGGWTGMVDGWYGYHHQNEQGSGYAADLKSTQNAIDEITNKVNSVIEKMNTQFTAVGKEFNHLEKRIENLNKKVDDGFLDIWTYNAELLVLLENERTLDYHDSNVKNLYEKVRSQLKNNAKEIGNGCFEFYHKCDNTCMESVKNGTYDYPKYSEEAKLNREEIDGVKLESTRIYQILAIYSTVASSLVLVVSLGAISFWMCSNGSLQCRICI

SEQ ID NO: 4353 - protein, 566 aa, Artificial Sequence; identical to SEQ ID NO: 4352
  derived and/or modified protein sequence (wt) from hemagglutinin__InfluenzaA__ADD97055

SEQ ID NO: 4354 - protein, 566 aa, Artificial Sequence; identical to SEQ ID NO: 4352
  derived and/or modified protein sequence (wt) from hemagglutinin__InfluenzaA__ADD97123

SEQ ID NO: 4355 - protein, 566 aa, Artificial Sequence
  derived and/or modified protein sequence (wt) from hemagglutinin__InfluenzaA__ADD97161
MKAILVVLLYTFATANADTLCIGYHANNSTDTVDTVLEKNVTVTHSVNLLEDKHNGKLCKLRGVAPLHLGKCNIAGWILGNPECESLSTASSWSYIVETSSSDNGTCYPGDFIDYEELREQLSSVSSFERFEIFPKTSSWPNHDSNKGVTAACPHAGAKSFYKNLIWLVKKGKSYPKLSKSYINDKGKKVLVLWGIHHPSTSADQQSLYQNADAYVFVGTSRYSKKFKPEIAIRPKVRDQEGRMNYYWTLVEPGDKITFEATGNLVVPRYAFAMERNAGSGIIISDTPVHDCNTTCQTPKGAINTSLPFQNIHPITIGKCPKYVKSTKLRLATGLRNVPSIQSRGLFGAIAGFIEGGWTGMVDGWYGYHHQNEQGSGYAADLKSTQNAIDEITNKVNSVIEKMNTQFTAVGKEFNHLEKRIENLNKKVDDGFLDIWTYNAELLVLLENERTLDYHDSNVKNLYEKVRSQLKNNAKEIGNGCFEFYHKCDNTCMESVKNGTYDYPKYSEEAKLNREEIDGVKLESTRIYQILAIYSTVASSLVLVVSLGAISFWMCSNGSLQCRICI

SEQ ID NO: 4356 - protein, 566 aa, Artificial Sequence
  derived and/or modified protein sequence (wt) from hemagglutinin__InfluenzaA__ADD97171
MKAILVVLLYTFATANADTLCIGYHANNSTDTVDTVLEKNVTVTHSVNLLEDKHNGKLCKLRGVAPLHLGKCNIAGWILGNPECESLSTASSWSYIVETSSSDNGTCYPGDFIDYEELREQLSSVSSFERFEIFPKTSSWPNHDSNKGVTAACPHAGAKSFYKNLIWLVKKGNSYPKLSKSYINDKGKEVLVLWGIHHPSTSADQQSLYQNADAYVFVGTSRYSKKFKPEIAIRPKVRDQEGRMNYYWTLVEPGDKITFEATGNLVVPRYAFAMERNAGSGIIISDTPVHDCNTTCQTPKGAINTSLPFQNIHPITIGKCPKYVKSTKLRLATGLRNVPSIQSRGLFGAIAGFIEGGWTGMVDGWYGYHHQNEQGSGYAADLKSTQNAIDEITNKVNSVIEKMNTQFTAVGKEFNHLEKRIENLNKKVDDGFLDIWTYNAELLVLLENERTLDYHDSNVKNLYEKVRSQLKNNAKEIGNGCFEFYHKCDNTCMESVKNGTYDYPKYSEEAKLNREEIDGVKLESTRIYQILAIYSTVASSLVLVVSLGAVSFWMCSNGSLQCRICI

SEQ ID NO: 4357 - protein, 566 aa, Artificial Sequence; identical to SEQ ID NO: 2669
  derived and/or modified protein sequence (wt) from hemagglutinin__InfluenzaA__ADD97181

SEQ ID NO: 4358 - protein, 566 aa, Artificial Sequence; identical to SEQ ID NO: 2669
  derived and/or modified protein sequence (wt) from hemagglutinin__InfluenzaA__ADD97201

SEQ ID NO: 4359 - protein, 566 aa, Artificial Sequence; identical to SEQ ID NO: 4352
  derived and/or modified protein sequence (wt) from hemagglutinin__InfluenzaA__ADD97211

SEQ ID NO: 4360 - protein, 566 aa, Artificial Sequence; identical to SEQ ID NO: 2669
  derived and/or modified protein sequence (wt) from hemagglutinin__InfluenzaA__ADD97231

SEQ ID NO: 4361 - protein, 566 aa, Artificial Sequence
  derived and/or modified protein sequence (wt) from hemagglutinin__InfluenzaA__ADD97241
MKAILVVLLYTFATANADTLCIGYHANNSTDTVDTVLEKNVTVTHSVNLLEDKHNGKLCKLRGVAPLHLGKCNIAGWILGNPECESLSTASSWSYIVETSSSDNGTCYPGDFTDYEELREQLSSVSSFERFEIFPKTSSWPNHDSNKGVTAACPHAGAKSFYKNLIWLVKKGNSYPKLSKSYINDKGKEVLVLWGIHHPSTSADQQSLYQNADAYVFVGTSRYSKKFKPEIAIRPKVRDQEGRMNYYWTLVEPGDKITFEATGNLVVPRYAFAMERNAGSGIIISDTPVHNCNTTCQTPKGAINTSLPFQNIHPITIGKCPKYVKSTKLRLATGLRNVPSIQSRGLFGAIAGFIEGGWTGMVDGWYGYHHQNEQGSGYAADLKSTQNAIDEITNKVNSVIEKMNTQFTAVGKEFNHLEKRIENLNKKVDDGFLDIWTYNAELLVLLENERTLDYHDSNVKNLYEKVRSQLKNNAKEIGNGCFEFYHKCDNTCMESVKNGTYDYPKYSEEAKLNREEIDGVKLESTRIYQILAIYSTVASSLVLVVSLGAISFWMCSNGSLQCRICI

SEQ ID NO: 4362 - protein, 566 aa, Artificial Sequence; identical to SEQ ID NO: 4352
  derived and/or modified protein sequence (wt) from hemagglutinin__InfluenzaA__ADD97251

SEQ ID NO: 4363 - protein, 566 aa, Artificial Sequence; identical to SEQ ID NO: 2669
  derived and/or modified protein sequence (wt) from hemagglutinin__InfluenzaA__ADD97261

SEQ ID NO: 4364 - protein, 566 aa, Artificial Sequence
  derived and/or modified protein sequence (wt) from hemagglutinin__InfluenzaA__ADD97271
MKAILVVLLYTFATANADTLCIGYHANNSTDTVDTVLEKNVTVTHSVNLLEDKHNGKLCKLRGVTPLHLGKCNIAGWILGNPECESLSTASSWSYIVETSSSDNGTCYPGDFIDYEELREQLSSVSSFERFEIFPKTSSWPNHDSNKGVTAACPHAGAKSFYKNLIWLVKKGNSYPKLSKSYINDKGKEVLVLWGIHHPSTSADQQSLYQNADAYVFVGTSRYSKKFKPEIAIRPKVRDQEGRMNYYWTLVEPGDKITFEATGNLVVPRYAFAMERNAGSGIIISDTPVHDCNTTCQTPKGAINTSLPFQNIHPITIGKCPKYVKSTKLRLATGLRNIPSIQSRGLFGAIAGFIEGGWTGMVDGWYGYHHQNEQGSGYAADLKSTQNAIDEITNKVNSVIEKMNTQFTAVGKEFNHLEKRIENLNKKVDDGFLDIWTYNAELLVLLENERTLDYHDSNVKNLYEKVRSQLKNNAKEIGNGCFEFYHKCDNTCMESVKNGTYDYPKYSEEAKLNREEIDGVKLESTRIYQILAIYSTVASSLVLVVSLGAISFWMCSNGSLQCRICI

SEQ ID NO: 4365 - protein, 566 aa, Artificial Sequence; identical to SEQ ID NO: 4356
  derived and/or modified protein sequence (wt) from hemagglutinin__InfluenzaA__ADD97281

SEQ ID NO: 4366 - protein, 566 aa, Artificial Sequence; identical to SEQ ID NO: 2669
  derived and/or modified protein sequence (wt) from hemagglutinin__InfluenzaA__ADD97291

SEQ ID NO: 4367 - protein, 566 aa, Artificial Sequence
  derived and/or modified protein sequence (wt) from hemagglutinin__InfluenzaA__ADD97311
MKAILVVLLYTFATANADTLCIGYHANNSTDTVDTILEKNVTVTHSVNLLEDKHNGKLCKLRGVAPLHLGKCNIAGWILGNPECESLSTASSWSYIVETSSSDNGTCYPGDFIDYEELREQLSSVSSFERFEIFPKTSSWPNHDSNKGVTAACPHAGAKSFYKNLIWLVKKGNSYPKLSKSYINDKGKEILVLWGIHHPSTIADQQSLYQNADAYVFVGTSRYSKKFKPEIAIRPKVRDQEGRMKYYWTLVEPGDKITFEATGNLVVPRYAFAMERNAGSGIIISDTPVHNCNTTCQTSKGAINTSLPFQNIHPITIGKCPKYVKSTKLRLATGLRNVPSIQSRGLFGAIAGFIEGGWTGMVDGWYGYHHQNEQGSGYAADLKSTQNAIDEITNKVNSVIEKMNTQFTAVGKEFNHLEKRIENLNKKVDDGFLDIWTYNAELLVLLENERTLDYHDSNVKNLYEKVRSQLKNNAKEIGNGCFEFYHKCDNTCMESVKNGTYDYPKYSEEAKLNREEIDGVKLESTRIYQILAIYSTVASSLVLVVSLGAISFWMCSNGSLQCRICI

SEQ ID NO: 4368 - protein, 566 aa, Artificial Sequence; identical to SEQ ID NO: 4352
  derived and/or modified protein sequence (wt) from hemagglutinin__InfluenzaA__ADD97321

SEQ ID NO: 4369 - protein, 566 aa, Artificial Sequence; identical to SEQ ID NO: 3833
  derived and/or modified protein sequence (wt) from hemagglutinin__InfluenzaA__ADD97331

SEQ ID NO: 4370 - protein, 566 aa, Artificial Sequence
  derived and/or modified protein sequence (wt) from hemagglutinin__InfluenzaA__ADD97341
MKAILVVLLYTFATVNADTLCIGYHANNSTDTVDTVLEKNVTVTHSVNLLEDKHNGKLCKLRGVAPLHLGKCNIAGWILGNPECESLSTASSWSYIVETSSSDNGTCYPGDFIDYEELREQLSSVSSFERFEIFPKTSSWPNHDSNKGVTAACPHAGAKSFYKNLIWLVKKGNSYPKLSKSYINDKGKEVLVLWGIHHPSTSTDQQSLYQNADAYVFVGTSRYSKKFKPEIAIRPKVRDQEGRMNYYWTLVEPGDKITFEATGNLVVPRYAFAMERNAGSGIIISDTPVHDCNTTCQTPKGAINTSLPFQNIHPITIGKCPKYVKSTKLRLATGLRNIPSIQSRGLFGAIAGFIEGGWTGMVDGWYGYHHQNEQGSGYAADLKSTQNAIDEITNKVNSVIEKMNTQFTAVGKEFNHLEKRIENLNKKVDDGFLDIWTYNAELLVLLENERTLDYHDSNVKNLYEKVRSQLKNNAKEIGNGCFEFYHKCDNTCMESVKNGTYDYPKYSEEAKLNREEIDGVKLESTRIYQILAIYSTVASSLVLVVSLGAISFWMCSNGSLQCRICI

SEQ ID NO: 4371 - protein, 566 aa, Artificial Sequence; identical to SEQ ID NO: 3833
  derived and/or modified protein sequence (wt) from hemagglutinin__InfluenzaA__ADD97351

SEQ ID NO: 4372 - protein, 566 aa, Artificial Sequence; identical to SEQ ID NO: 3833
  derived and/or modified protein sequence (wt) from hemagglutinin__InfluenzaA__ADD97361

SEQ ID NO: 4373 - protein, 566 aa, Artificial Sequence
  derived and/or modified protein sequence (wt) from hemagglutinin__InfluenzaA__ADD97371
MKAILVVLLYTFATANADTLCIGYHANNSTDTVDTVLEKNVTVTHSVNLLEDKHNGKLCKLRGVAPLHLGKCNIAGWILGNPECESLSTASSWSYIVETSSSDNGTCYPGDFIDYEELREQLSSVSSFERFEIFPKTSSWPNHDSNKGVTAACPHAGAKSFYKNLIWLVKKGNSYPKLSKSYINDKGKEVLVLWGIHHPSTSADQQSLYQNADAYVFVGTSRYSKKFKPEIAIRPKVREQEGRMNYYWTLVEPGDKITFEATGNLVVPRYAFAMERNAGSGIIISDTPVHDCNTTCQTPKGAINTSLPFQNIHPITIGKCPKYVKSTKLRLATGLRNVPSIQSRGLFGAIAGFIEGGWTGMVDGWYGYHHQNEQGSGYAADLKSTQNAIDEITNKVNSVIEKMNTQFTAVGKEFNHLEKRIENLNKKVDDGFLDIWTYNAELLVLLENERTLDYHDSNVKNLYEKVRSQLKNNAKEIGNGCFEFYHKCDNTCMESVKNGTYDYPKYSEEAKLNREEIDGVKLESTRIYQILAIYSTVASSLVLVVSLGAISFWMCSNGSLQCRVCI

SEQ ID NO: 4374 - protein, 566 aa, Artificial Sequence; identical to SEQ ID NO: 3833
  derived and/or modified protein sequence (wt) from hemagglutinin__InfluenzaA__ADD97381

SEQ ID NO: 4375 - protein, 566 aa, Artificial Sequence; identical to SEQ ID NO: 2669
  derived and/or modified protein sequence (wt) from hemagglutinin__InfluenzaA__ADD97391

SEQ ID NO: 4376 - protein, 566 aa, Artificial Sequence; identical to SEQ ID NO: 3833
  derived and/or modified protein sequence (wt) from hemagglutinin__InfluenzaA__ADD97411

SEQ ID NO: 4377 - protein, 566 aa, Artificial Sequence; identical to SEQ ID NO: 3833
  derived and/or modified protein sequence (wt) from hemagglutinin__InfluenzaA__ADD97421

SEQ ID NO: 4378 - protein, 566 aa, Artificial Sequence; identical to SEQ ID NO: 2669
  derived and/or modified protein sequence (wt) from hemagglutinin__InfluenzaA__ADD97431

SEQ ID NO: 4379 - protein, 566 aa, Artificial Sequence
  derived and/or modified protein sequence (wt) from hemagglutinin__InfluenzaA__ADD97441
MKAILVVLLYTFATANADTLCIGYHANNSTDTVDTILEKNVTVTHSVNLLEDKHNGKLCKLRGVAPLHLGKCNIAGWILGNPECESLSTASSWSYIVETSSSDNGTCYPGDFIDYEELREQLSSVSSFERFEIFPKTSSWPNHDSNKGVTAACPHAGAKSFYKNLIWLVKKGNSYPKLSKSYINDKGKEILVLWGIHHPSTSADQQSLYQNADAYVFVGTSRYSKKFKPEIAIRPKVRDQEGRMNYYWTLVEPGDKITFEATGNLVVPRYAFAMERNAGSGIIISDTPVHDCNTTCQTPKGAINTSLPFQNIHPITIGKCPKYVKSTKLRLATGLRNVPSIQSRGLFGAIAGFIEGGWTGMVDGWYGYHHQNEQGSGYAADLKSTQNAIDEITNKVNSVIEKMNTQFTAVGKEFNHLEKRIENLNKKVDDGFLDIWTYNAELLVLLENERTLDYHDSNVKNLYEKVRSQLKNNAKEIGNGCFEFYHKCDNTCMESVKNGTYDYPKYSEEAKLNREEIDGVKLESTRIYQILAIYSTVASSLVLVVSLGAISFWMCSNGSLQCRICI

SEQ ID NO: 4380 - protein, 566 aa, Artificial Sequence; identical to SEQ ID NO: 4373
  derived and/or modified protein sequence (wt) from hemagglutinin__InfluenzaA__ADD97451

SEQ ID NO: 4381 - protein, 566 aa, Artificial Sequence; identical to SEQ ID NO: 4373
  derived and/or modified protein sequence (wt) from hemagglutinin__InfluenzaA__ADD97461

SEQ ID NO: 4382 - protein, 566 aa, Artificial Sequence; identical to SEQ ID NO: 4221
  derived and/or modified protein sequence (wt) from hemagglutinin__InfluenzaA__ADD97471

SEQ ID NO: 4383 - protein, 566 aa, Artificial Sequence; identical to SEQ ID NO: 4221
  derived and/or modified protein sequence (wt) from hemagglutinin__InfluenzaA__ADD97481

SEQ ID NO: 4384 - protein, 566 aa, Artificial Sequence
  derived and/or modified protein sequence (wt) from hemagglutinin__InfluenzaA__ADD97491
MKAILVVLLYTFATANADTLCIGYHANNSTDTVDTVLEKNVTVTHSVNLLEDKHNGKLCKLRGEAPLHLGKCNIAGWILGNPECESLSTASSWSYIVETSSSDNGTCYPGDFINYEELREQLSSVSSFERFEIFPKTSSWPNHDSNKGVTAACPHAGAKSFYKNLIWLVKKGNSYPKLSKSYINDKGKEVLVLWGIHHPSTSADQQSLYQNADAYVFVGTSRYSKKFKPEIAIRPKVRDQEGRMNYYWTLVEPGDKITFEATGNLVVPRYAFAMERNAGSGIIISDTPVHDCNTTCQTPKGAINTSLPFQNIHPITIGKCPKYVKSTKLRLATGLRNVPSIQSRGLFGAIAGFIEGGWTGMVDGWYGYHHQNEQGSGYAADLKSTQNAIDKITNKVNSVIEKMNTQFTAVGKEFNHLEKRIENLNKKVDDGFLDIWTYNAELLVLLENERTLDYHDSNVKNLYEKVRSQLKNNAKEIGNGCFEFYHKCDNTCMESVKNGTYDYPKYSEEAKLNREEIDGVKLESTRIYQILAIYSTVASSLVLVVSLGAISFWMCSNGSLQCRICI

SEQ ID NO: 4385 - protein, 566 aa, Artificial Sequence; identical to SEQ ID NO: 4384
  derived and/or modified protein sequence (wt) from hemagglutinin__InfluenzaA__ADD97501

SEQ ID NO: 4386 - protein, 566 aa, Artificial Sequence; identical to SEQ ID NO: 3022
  derived and/or modified protein sequence (wt) from hemagglutinin__InfluenzaA__ADD97511

SEQ ID NO: 4387 - protein, 566 aa, Artificial Sequence
  derived and/or modified protein sequence (wt) from hemagglutinin__InfluenzaA__ADD97531
MKAILVVLLYTFATANADTLCIGYHANNSTDTVDTILEKNVTVTHSVNLLEDKHNGKLCKLRGVAPLHLGKCNIAGWILGNPECESLSTASSWSYIVETSSSDNGTCYPGDFIDYEELREQLSSVSSFERFEIFPKTSSWPNHDSNKGVTAACPHAGAKSFYKNLIWLVKKGNSYPKLSKSYINDKGKEILVLWGIHHPSTIADQQSLYQNADAYVFVGTSRYSKKFKPEIAIRPKVRDQEGRMKYYWTLVEPGDKITFEATGNLVVPRYAFAMERNAGSGIIISDTPVHNCNTTCQTPKGAINTSLPFQNIHPITIGKCPKYVKSTKLRLATGLRNVPSIQSRGLFGAIAGFIEGGWTGMVDGWYGYHHQNEQGSGYAADLKSTQNAIDEITNKVNSVIEKMNTQFTAVGKEFNHLEKRIENLNKKVDDGFLDIWTYNAELLVLLENERTLDYHDSNVKNLYEKVRSQLKNNAKEIGNGCFEFYHKCDNTCMESVKNGTYDYPKYSEEAKLNREEIDGVKLESTRIYQILAIYSTVASSLVLVVSLGAISFWMCSNGSLQCRICI

SEQ ID NO: 4388 - protein, 566 aa, Artificial Sequence
  derived and/or modified protein sequence (wt) from hemagglutinin__InfluenzaA__ADD97541
MKAILVVLLYTFATANADTLCIGYHANNSTDTVDTVLEKNVTVTHSVNLLEDKHNGKLCKLRGVAPLHLGKCNIAGWILGNPECESLSTASSWSYIVETSSSDNGTCYPGDFIDYEELREQLSSVSSFERFEIFPKTSSWPNHDSNKGVTAACPHTGAKSFYKNLIWLVKKGNSYPKLSKSYINDKGKEVLVLWGIHHPSTSTDQQSLYQNADAHVFVGTSRYSKKFKPEIAIRPKVRDQEGRMNYYWTLVEPGDKITFEATGNLVVPRYAFAMERNAGSGIIISDTPVHDCNTTCQTPKGAINTSLPFQNIHPITIGKCPKYVKSTKLRLATGLRNIPSIQSRGLFGAIAGFIEGGWTGMVDGWYGYHHQNEQGSGYAADLKSTQNAIDEITNKVNSVIEKMNTQFTAVGKEFNHLEKRIENLNKKVDDGFLDIWTYNAELLVLLENERTLDYHDSNVKNLYEKVRSQLKNNAKEIGNGCFEFYHKCDNTCMESVKNGTYDYPKYSEEAKLNREEIDGVKLESTRIYQILAIYSTVASSLVLVVSLGAISFWMCSNGSLQCRICI

SEQ ID NO: 4389 - protein, 566 aa, Artificial Sequence; identical to SEQ ID NO: 4221
  derived and/or modified protein sequence (wt) from hemagglutinin__InfluenzaA__ADD97551

SEQ ID NO: 4390 - protein, 566 aa, Artificial Sequence; identical to SEQ ID NO: 3833
  derived and/or modified protein sequence (wt) from hemagglutinin__InfluenzaA__ADD97561

SEQ ID NO: 4391 - protein, 566 aa, Artificial Sequence
  derived and/or modified protein sequence (wt) from hemagglutinin__InfluenzaA__ADD97571
MKAILVVLLYTFATANADTLCIGYHANNSTDTVDTVLEKNVTVTHSVNLLEDKHNGKLCKLRGVAPLHLGKCNIAGWILGNPECESLSTASSWSYIVETSSSDNGTCYPGDFINYEELREQLSSVSLFERFEIFPKTSSWPNHDSNKGVTAACPHAGAKSFYKNLIWLVKKGNSYPKLSKSYINDKGKEVLVLWGIHHPSTSADQQSLYQNADAYVFVGTSRYSKKFKPEIAIRPKVRDQEGRMNYYWTLVEPGDKITFEATGNLVVPRYAFAMERNAGSGIIISDTPVHDCNTTCQTPKGAINTSLPFQNIHPITIGKCPKYVKSTKLRLATGLRNVPSIQSRGLFGAIAGFIEGGWTGMVDGWYGYHHQNEQGSGYAADLKSTQNAIDKITNKVNSVIEKMNTQFTAVGKEFNHLEKRIENLNKKVDDGFLDIWTYNAELLVLLENERTLDYHDSNVKNLYEKVRSQLKNNAKEIGNGCFEFYHKCDNTCMESVKNGTYDYPKYSEEAKLNREEIDGVKLESTRIYQILAIYSTVASSLVLVVSLGAISFWMCSNGSLQCRICI

SEQ ID NO: 4392 - protein, 566 aa, Artificial Sequence; identical to SEQ ID NO: 2669
  derived and/or modified protein sequence (wt) from hemagglutinin__InfluenzaA__ADD97581

SEQ ID NO: 4393 - protein, 566 aa, Artificial Sequence; identical to SEQ ID NO: 2669
  derived and/or modified protein sequence (wt) from hemagglutinin__InfluenzaA__ADD97591

SEQ ID NO: 4394 - protein, 566 aa, Artificial Sequence; identical to SEQ ID NO: 2669
  derived and/or modified protein sequence (wt) from hemagglutinin__InfluenzaA__ADD97688

SEQ ID NO: 4395 - protein, 566 aa, Artificial Sequence; identical to SEQ ID NO: 4221
  derived and/or modified protein sequence (wt) from hemagglutinin__InfluenzaA__ADD97698

SEQ ID NO: 4396 - protein, 566 aa, Artificial Sequence; identical to SEQ ID NO: 4221
  derived and/or modified protein sequence (wt) from hemagglutinin__InfluenzaA__ADD97888

SEQ ID NO: 4397 - protein, 566 aa, Artificial Sequence
  derived and/or modified protein sequence (wt) from hemagglutinin__InfluenzaA__ADD97898
MKAILVVLLYTFATANADTLCIGYHANNSTDTVDTVLEKNVTVTHSVNLLEDKHNGKLCKLRGVAPLHLGKCNIAGWILGNPECESLSTASSWSYIVETSSSDNGTCYPGDFIDYEELREQLSSVSSFERFEIFPKTSSWPNHDSNKGVTAACPHAGAKSFYKNLIWLVKKGNSYPKLSKSYINDKGKEVLVLWGIHHPSTSTDQQSLYQNADAYVFVGTSRYSKKFKPEIAIRPKVRDQEGRMNYYWTLVEPGDKITFEATGNLVVPRYAFAMERNAGSGIIISDTPVHDCNTTCQTPKGAINTSLPFQNIHPITIGKCPKYVKSTKLRLATGLRNIPSIQSRGLFGAIAGFIEGGWTGMVDGWYGYHHQNEQGSGYAADLKSTQNAIDEITNKVNSVIEKMNTQFTAVGKEFNHLEKRIENLNKKVDDGFLDIWTYNAELLVLLENERTLDYHDSNVKNLYEKVRSQLKNNAKEIGNGCFEFYHKCDNTCMESVKNGTYDYPKYSEEAKLNREEIDGVKLESTRIYQILAIYSTVASSLVLVVSLGAISFWMCSNGSLQCRICI

SEQ ID NO: 4398 - protein, 566 aa, Artificial Sequence; identical to SEQ ID NO: 3022
  derived and/or modified protein sequence (wt) from hemagglutinin__InfluenzaA__ADD97908

SEQ ID NO: 4399 - protein, 566 aa, Artificial Sequence; identical to SEQ ID NO: 3833
  derived and/or modified protein sequence (wt) from hemagglutinin__InfluenzaA__ADD97918

SEQ ID NO: 4400 - protein, 566 aa, Artificial Sequence
  derived and/or modified protein sequence (wt) from hemagglutinin__InfluenzaA__ADD97928
MKAILVVLLYTFATANADTLCIGYHANNSTDTVDTVLEKNVTVTHSVNLLEDKHNGKLCKLRGVAPLHLGKCNIAGWILGNPECESLSTASSWSYIVETSSSGNGTCYPGDFIDYEELREQLSSVSSFERFEIFPKTSSWPNHDSNKGVTAACPHAGAKSFYKNLIWLVKKGNSYPKLSKSYINDKGKEVLVLWGIHHPSTSADQQSLYQNADAYVFVGTSRYSKKFKPEIAIRPKVRDQEGRMNYYWTLVEPGDKITFEATGNLVVPRYAFAMERNAGSGIIISDTPVHDCNTTCQTPKGAINTSLPFQNIHPITIGKCPKYVKSTKLRLATGLRNVPSIQSRGLFGAIAGFIEGGWTGMVDGWYGYHHQNEQGSGYAADLKSTQNAIDGITNKVNSVIEKMNTQFTAVGKEFNHLEKRIENLNKKVDDGFLDIWTYNAELLVLLENERTLDYHDSNVKNLYEKVRSQLKNNAKEIGNGCFEFHHKCDNTCMESVKNGTYDYPKYSEEAKLNREEIDGVKLESTRIYQILAIYSTVASSLVLVVSLGAISFWMCSNGSLQCRICI

SEQ ID NO: 4401 - protein, 566 aa, Artificial Sequence
  derived and/or modified protein sequence (wt) from hemagglutinin__InfluenzaA__ADD97938
MKAILVVLLYTFATANADTLCIGYHANNSTDTVDTILEKNVTVTHSVNLLEDKHNGKLCKLRGVAPLHLGKCNIAGWILGNPECESLSTASSWSYIVETSSSDNGTCYPGDFIDYEELREQLSSVSSFERFEIFPMTSSWPNHDSNKGVTAACPHAGAKSFYKNLIWLVKKGNSYPKLSKSYINDKGKEILVLWGIHHPSTSADQQSLYQNADAYVFVGTSRYSKKFKPEIAIRPKVRDQEGRMNYYWTLVEPGDKITFEATGNLVVPRYAFAMERNAGSGIIISDTPVHDCNTTCQTPKGAINTSLPFQNIHPITIGKCPKYVKSTKLRLATGLRNVPSIQSRGLFGAIAGFIEGGWTGMVDGWYGYHHQNEQGSGYAADLKSTQNAIDEITNKVNSVIEKMNTQFTAVGKEFNHLEKRIENLNKKVDDGFLDIWTYNAELLVLLENERTLDYHDSNVKNLYEKVRSQLKNNAKEIGNGCFEFYHKCDNTCMESVKNGTYDYPKYSEEAKLNREEIDGVKLESTRIYQILAIYSTVASSLVLVVSLGAISFWMCSNGSLQCRICI

SEQ ID NO: 4402 - protein, 566 aa, Artificial Sequence
  derived and/or modified protein sequence (wt) from hemagglutinin__InfluenzaA__ADD97948
MKAILLVLLYTFATANADTLCIGYHANNSTDTVDTVLEKNVTVTHSVNLLEDKHNGKLCKLRGVAPLHLGKCNIAGWILGNPECESLSTASSWSYIVETSSSDNGTCYPGDFIDYEELREQLSSVSSFERFEMFPKTSSWPNHDSNKGVTAACPHAGAKSFYKNLIWLVKKGNSYPKLSKSYINDKGKEVLVLWGIHHPSTSADQQSLYQNADAYVFVGTSRYSKKFKPEIAIRPKVRDQEGRMNYYWTLVEPGDKITFEATGNLVVPRYAFAMERNAGSGIIISDTPVHDCNTTCQTPKGAINTSLPFQNIHPITIGKCPKYVKSTKLRLATGLRNVPSIQSRGLFGAIAGFIEGGWTGMVDGWYGYHHQNEQGSGYAADLKSTQNAIDEITNKVNSVIEKMNTQFTAVGKEFNHLEKRIENLNKKVDDGFLDIWTYNAELLVLLENERTLDYHDSNVKNLYEKVRSQLKNNAKEIGNGCFEFYHKCDNTCMESVKNGTYDYPKYSEEAKLNREEIDGVKLESTRIYQILAIYSTVASSLVLVVSLGAISFWMCSNGSLQCRICI

SEQ ID NO: 4403 - protein, 566 aa, Artificial Sequence
  derived and/or modified protein sequence (wt) from hemagglutinin__InfluenzaA__ADD97958
MKAILVVLLYTFATANADTLCIGYHANNSTDTVDTVLEKNVTVTHSVNLLEDKHNGKLCKLRGVAPLHLGKCNIAGWILGNPECESLSTASSWSYIVETSSSDNGTCYPGDFIDYEELREQLSSVSSFERFEIFPKTSSWPNHDSNKGVTAACPHAGAKSFYKNLIWLVKKGNSYPKLSKSYINDKGKEVLVLWGIHHPSTSADQQSLYQNADAYVFVGTSRYSKKFQPEIAIRPKVRDQEGRMNYYWTLLEPGDKITFEATGNLVVPRYAFAMERNAGSGIIISDTPVHDCNTTCQTPKGAINTSLPFQNIHPITIGKCPKYVKSTKLRLATGLRNVPSIQSRGLFGAIAGFIEGGWTGMVDGWYGYHHQNEQGSGYAADLKSTQNAIDEITNKVNSVIEKMNTQFTAVGKEFNHLEKRIENLNKKVDDGFLDIWTYNAELLVLLENERTLDYHDSNVKNLYEKVRSQLKNNAKEIGNGCFEFYHKCDNTCMESVKNGTYDYPKYSEEAKLNREEIDGVKLESTRIYQILAIYSTVASSLVLVVSLGAISFWMCSNGSLQCRICI

SEQ ID NO: 4404 - protein, 566 aa, Artificial Sequence; identical to SEQ ID NO: 2669
  derived and/or modified protein sequence (wt) from hemagglutinin__InfluenzaA__ADD97968

SEQ ID NO: 4405 - protein, 566 aa, Artificial Sequence; identical to SEQ ID NO: 4397
  derived and/or modified protein sequence (wt) from hemagglutinin__InfluenzaA__ADD97978

SEQ ID NO: 4406 - protein, 566 aa, Artificial Sequence; identical to SEQ ID NO: 4351
  derived and/or modified protein sequence (wt) from hemagglutinin__InfluenzaA__ADD97988

SEQ ID NO: 4407 - protein, 566 aa, Artificial Sequence
  derived and/or modified protein sequence (wt) from hemagglutinin__InfluenzaA__ADD97998
MKAILVVLLYTFATANADTLCIGYHANNSTDTVDTVLEKNVTVTHSVNLLEDKHNGKLCKLRGVAPLHLGKCNIAGWILGNPECESLSTASSWSYIVETSSSDNGTCYPGDFIDYEELREQLSSVSSFERFEIFPKASSWPNHDSNKGVTAACPHAGAKSFYKNLIWLVKKGNSYPKLSKSYINDKGKEVLVLWGIHHPSTSADQQSLYQNADAYVFVGTSRYSKKFKPEIAIRPKVRDQEGRMNYYWTLVEPGDKITFEATGNLVVPRYAFEMERNAGSGIIISDTPVHDCNTTCQTPKGAINTSLPFQNIHPITIGKCPKYVKSTKLRLATGLRNVPSIQSRGLFGAIAGFIEGGWTGMVDGWYGYHHQNEQGSGYAADLKSTQNAIDEITNKVNSVIEKMNTQFTAVGKEFNHLEKRIENLNKKVDDGFLDIWTYNAELLVLLENERTLDYHDSNVKNLYEKVRSQLKNNAKEIGNGCFEFYHKCDNTCMESVKNGTYDYPKYSEEAKLNREEIDGVKLESTRIYQILAIYSTVASSLVLVVSLGAISFWMCSNGSLQCRICI

SEQ ID NO: 4408 - protein, 566 aa, Artificial Sequence; identical to SEQ ID NO: 4221
  derived and/or modified protein sequence (wt) from hemagglutinin__InfluenzaA__ADD98008

SEQ ID NO: 4409 - protein, 566 aa, Artificial Sequence
  derived and/or modified protein sequence (wt) from hemagglutinin__InfluenzaA__ADD98018
MKAILVVLLYTFATANADTLCIGYHANNSTDTVDTVLEKNVTVTHSVNLLEDKHNGKLCKLRGVAPLHLGKCNIAGWILGNPECESLSTASSWSYIVETSSSDNGTCYPGDFIDYEELREQLSSVSSFERFEIFPKTSSWPNHDSNKGVTAACPHAGAKSFYKNLIWLVKKGNSYPKLSKSYINDKGKEILVLWGIHHPSTSADQQSLYQNADAYVFVGTSRYSKKFKPEIATRPKVREQEGRMNYYWTLVEPGDKITFEATGNLVVPRYAFAMERNAGSGIIISDTPVHDCNTTCQTPKGAINTSLPFQNIHSITIGKCPKYVKSTKLRLATGLRNVPSIQSRGLFGAIAGFIEGGWTGMVDGWYGYHHQNEQGSGYAADLKSTQNAIDEITNKVNSVIEKMNTQFTAVGKEFNHLEKRIENLNKKVDDGFLDIWTYNAELLVLLENERTLDYHDSNVKNLYEKVRSQLKNNAKEIGNGCFEFYHKCDNTCMESVKNGTYDYPKYSEEAKLNREEIDGVKLESTRIYQILAIYSTVASSLVLVVSLGAISFWMCSNGSLQCRICI

SEQ ID NO: 4410 - protein, 566 aa, Artificial Sequence; identical to SEQ ID NO: 4373
  derived and/or modified protein sequence (wt) from hemagglutinin__InfluenzaA__ADD98028

SEQ ID NO: 4411 - protein, 566 aa, Artificial Sequence
  derived and/or modified protein sequence (wt) from hemagglutinin__InfluenzaA__ADD98038
MKAILVVLLYTFATANADTLCIGYHANNSTDTVDTVLEKNVTVTHSVNLLEDKHNGKLCKLRGVAPLHLGKCNIAGWILGNPECESISTASSWSYIVETSSSDNGTCYPGDFIDYEELREQLSSVSSFERFEIFPKASSWPNHDSNKGVTAACPHAGAKSFYKNLIWLVKKGNSYPKLSKSYINDKGKEVLVLWGIHHPSTSADQQSLYQNADAYVFVGTSRYSKKFKPEIAIRPKVRDQEGRMNYYWTLVEPGDKITFEATGNLVVPRYAFEMERNAGSGIIISDTPVHDCNTTCQTPKGAINTSLPFQNIHPITIGKCPKYVKSTKLRLATGLRNVPSIQSRGLFGAIAGFIEGGWTGMVDGWYGYHHQNEQGSGYAADLKSTQNAIDEITNKVNSVIEKMNTQFTAVGKEFNHLEKRIENLNKKVDDGFLDIWTYNAELLVLLENERTLDYHDSNVKNLYEKVRSQLKNNAKEIGNGCFEFYHKCDNTCMESVKNGTYDYPKYSEEAKLNREEIDGVKLESTRIYQILAIYSTVASSLVLVVSLGAISFWMCSNGSLQCRICI

SEQ ID NO: 4412 - protein, 566 aa, Artificial Sequence; identical to SEQ ID NO: 4397
  derived and/or modified protein sequence (wt) from hemagglutinin__InfluenzaA__ADD98048

SEQ ID NO: 4413 - protein, 566 aa, Artificial Sequence; identical to SEQ ID NO: 2669
  derived and/or modified protein sequence (wt) from hemagglutinin__InfluenzaA__ADD98058

SEQ ID NO: 4414 - protein, 566 aa, Artificial Sequence; identical to SEQ ID NO: 2669
  derived and/or modified protein sequence (wt) from hemagglutinin__InfluenzaA__ADD98068

SEQ ID NO: 4415 - protein, 566 aa, Artificial Sequence; identical to SEQ ID NO: 2911
  derived and/or modified protein sequence (wt) from hemagglutinin__InfluenzaA__ADD98078

SEQ ID NO: 4416 - protein, 566 aa, Artificial Sequence
  derived and/or modified protein sequence (wt) from hemagglutinin__InfluenzaA__ADD98098
MKAILVVLLYTFATANADTLCIGYHANNSTDTVDTILEKNVTVTHSVNLLEDKHNGKLCKLRGVAPLHLGKCNIAGWILGNPECESLSTASSWSYIVETSSSDNGTCYPGDFIDYEELREQLSSVSSFERFEIFPKTSSWPNHDSNKGVTAACPHAGAKSFYKNLIWLVKKGNSYPKLSKSYINDKGKEVLVLWGIHHPSTSSDQQSLYQNADAYVFVGTSRYSKKFKPEIAIRPKVRDQEGRMNYYWTLVEPGDKITFEATGNLVVPRYAFAVERNAGSGIIISDTPVHDCNTTCQTPKGAINTSLPFQNIHPITIGKCPKYVKSTKLRLATGLRNVPSIQSRGLFGAIAGFIEGGWTGMVDGWYGYHHQNEQGSGYAADLKSTQNAIDEITNKVNSVIEKMNTQFTAVGKEFNHLEKRIENLNKKVDDGFLDIWTYNAELLVLLENERTLDYHDSNVKNLYEKVRSQLKNNAKEIGNGCFEFYHKCDNTCMESVKNGTYDYPKYSEEAKLNREEIDGVKLESTRIYQILAIYSTVASSLVLVVSLGAISFWMCSNGSLQCRICI

SEQ ID NO: 4417 - protein, 566 aa, Artificial Sequence; identical to SEQ ID NO: 4384
  derived and/or modified protein sequence (wt) from hemagglutinin__InfluenzaA__ADD98118

SEQ ID NO: 4418 - protein, 566 aa, Artificial Sequence; identical to SEQ ID NO: 4384
  derived and/or modified protein sequence (wt) from hemagglutinin__InfluenzaA__ADD98128

SEQ ID NO: 4419 - protein, 566 aa, Artificial Sequence
  derived and/or modified protein sequence (wt) from hemagglutinin__InfluenzaA__ADD98138
MKAILVVLLYTFATANADTLCIGYHANNSTDTVDTVLEKNVTVTHSVNLLEDKHNGKLCKLRGVAPLHLGKCNIAGWILGNPECESLSTASSWSYIVETSSSDNGTCYPGDFINYEELREQLSSVSSFERFEIFPKTSSWPNHDSNKGVTAACPHAGAKSFYKNLIWLVKKGNSYPKLSKSYINDKGKEVLVLWGIHHPSTSTDQQSLYQNADAYVFVGTSRYSKKFKPEIAIRPKVRDQEGRMNYYWTLVEPGDKITFEATGNLVVPRYAFAMERNTGSGIIISDTPVHDCNTTCQTPNGAINTSLPFQNIHPITIGKCPKYVKSTKLRLATGLRNVPSIQSRGLFGAIAGFIEGGWTGMVDGWYGYHHQNEQGSGYAADLKSTQNAIDKITNKVNSVIEKMNTQFTAVGKEFNHLEKRIENLNKKVDDGFLDIWTYNAELLVLLENERTLDYHDSNVKNLYEKVRSQLKNNAKEIGNGCFEFYHKCDNTCMESVKNGTYDYPKYSEEAKLNREEIDGVKLESTRIYQILAIYSTVASSLVLVVSLGAISFWMCSNGSLQCRICI

SEQ ID NO: 4420 - protein, 566 aa, Artificial Sequence
  derived and/or modified protein sequence (wt) from hemagglutinin__InfluenzaA__ADD98148
MKAILVVLLYTFATANADTLCIGYHANNSTDTVDTVLEKNVTVTHSVNLLEDKHNGKLCKLRGVAPLHLGKCNIAGWILGNPECESLSTASSWSYIVETSSSDNGTCYPGDFIDYEELREQLSSVSSFERFEIFPKTSSWPNHDSNKGVTAACPHAGAKSFYKNLIWLVKKGNSYPKLSKSYINDKGKEVLVLWGIHHPSTSADQQSLYQNADAYVFVGTSRYSKKFKPEIAIRPKVRDQEGRMNYYWTLVEPGDKITFEATGNLVVPRYAFAMERNAGSGIFISDTPVHDCNTTCQTPKGAINTSLPFQNIHPITIGKCPKYVKSTKLRLATGLRNVPSIQSRGLFGAIAGFIEGGWTGMVDGWYGYHHQNEQGSGYAADLKSTQNAIDKITNKVNSVIEKMNTQFTAVGKEFNHLEKRIENLNKKVDDGFLDIWTYNAELLVLLENERTLDYHDSNVKNLYEKVRSQLKNNAKEIGNGCFEFYHKCDNTCMESVKNGTYDYPKYSEEAKLNREEIDGVKLESTRIYQILAIYSTVASSLVLVVSLGAISFWMCSNGSLQCRICI

SEQ ID NO: 4421 - protein, 566 aa, Artificial Sequence
  derived and/or modified protein sequence (wt) from hemagglutinin__InfluenzaA__ADD98158
MKAILVVLLYTFATANADTLCIGYHANNSTDTVDTVLEKNVTVTHSVNLLEDKHNGKLCELRGVAPLHLGKCNIAGWILGNPECESLSTASSWSYIVETSSSDNGTCYPGDFIDYEELREQLSSVSSFERFEIFPKTSSWPNHDSNKGVTAACPHAGAKSFYKNLIWLVKKGNSYPKLSKSYINDKGKEVLVLWGIHHPSTSADQQSLYQNADAYVFVGTSRYSKKFKPEIAIRPKVRDQEGRMNYYWTLVEPGDKITFEATGNLVIPRYAFAMERNAGSGIIISDTPVHDCNTTCQTPKGAINTSLPFQNIHPITIGKCPKYVKSTKLRLATGLRNVPSIQSRGLFGAIAGFIEGGWTGMVDGWYGYHHQNEQGSGYAADLKSTQNAIDKITNKVNSVIEKMNTQFTAVGKEFNHLEKRIENLNKKVDDGFLDIWTYNAELLVLLENERTLDYHDSNVKNLYEKVRSQLKNNAKEIGNGCFEFYHKCDNTCMESVKNGTYDYPKYSEEAKLNREEIDGVKLESTRIYQILAIYSTVASSLVLVVSLGAISFWMCSNGSLQCRICI

SEQ ID NO: 4422 - protein, 566 aa, Artificial Sequence
  derived and/or modified protein sequence (wt) from hemagglutinin__InfluenzaA__ADD98168
MKAILVVLLYTFATANADTLCIGYHANNSTDTVDTVLEKNVTVTHSINILEDKHNGKLCKLRGVAPLHLGKCNIAGWILGNPECESLSTASSWSYIVETSSSDNGTCYPGDFIDYEELREQLSSVSSFERFEIFPKTSSWPNHDSNKGVTAACPHAGAKSFYKNLIWLVKKGNSYPKLSKSYINDKGKEVLVLWGIHHPSTSADQQSLYQNADAYVFVGTSRYSKKFKPEIAIRPKVRDQEGRMNYYWTLVEPGDKITFEATGNLVVPKYAFAMERNAGSGIIISDTPVHDCNTTCQTPKGAINTSLPFQNIHPITIGKCPKYVKSTKLRLATGLRNVPSIQSRGLFGAIAGFIEGGWTGMVDGWYGYHHQNEQGSGYAADLKSTQNAIDEITNKVNSVIEKMNTQFTAVGKEFNHLEKRIENLNKKVDDGFLDIWTYNAELLVLLENERTLDYHDSNVKNLYEKVRSQLKNNAKEIGNGCFEFYHKCDNTCMESVKNGTYDYPKYSEEAKLNREEIDGVKLESTRIYQILAIYSTVASSLVLVVSLGAISFWMCSNGSLQCRICI

SEQ ID NO: 4423 - protein, 566 aa, Artificial Sequence; identical to SEQ ID NO: 3841
  derived and/or modified protein sequence (wt) from hemagglutinin__InfluenzaA__ADD98188

SEQ ID NO: 4424 - protein, 566 aa, Artificial Sequence
  derived and/or modified protein sequence (wt) from hemagglutinin__InfluenzaA__ADD98198
MKAILVVLLYTFATANADTLCIGYHANNSTDTVDTVLEKNVTVTHSVNLLEDKHNGKLCKLRGVAPLHLGKCNIAGWILGNPECESLSTASSWSYIVETSSSDNGTCYPGDFIDYEELREQLSSVSSFERFEIFPKTSSWPNHDSNKGVTAACPHAGAKSFYKNLIWLVKKGNSYPKLSKSYINDKGKEVLVLWGIHHPSTSADQQSLYQNADAYVFVGTSRYSKKFKPEIAIRPKVRDQEGRMNYYWTLVEPGDKITFEATGNLVVPRYAFAMERNAGSGIIISDTPVHDCNTTCQTPKGAINTSLPFQNIHPITIGKCPKYVKSTKMRLATGLRNVPSIQSRGLFGAIAGFIEGGWTGMVDGWYGYHHQNEQGSGYAADLKSTQNAIDEITNKVNSVIEKMNTQFTAVGKEFNHLEKRIENLNKKVDDGFLDIWTYNAELLVLLENERTLDYHDSNVKNLYEKVRSQLKNNAKEIGNGCFEFYHKCDNTCMESVKNGTYDYPKYSEEAKLNREEIDGVKLESTRIYQILAIYSTVASSLVLVVSLGAISFWMCSNGSLQCRICI

SEQ ID NO: 4425 - protein, 566 aa, Artificial Sequence; identical to SEQ ID NO: 2669
  derived and/or modified protein sequence (wt) from hemagglutinin__InfluenzaA__ADD98208

SEQ ID NO: 4426 - protein, 566 aa, Artificial Sequence; identical to SEQ ID NO: 2849
  derived and/or modified protein sequence (wt) from hemagglutinin__InfluenzaA__ADE20321

SEQ ID NO: 4427 - protein, 566 aa, Artificial Sequence; identical to SEQ ID NO: 2849
  derived and/or modified protein sequence (wt) from hemagglutinin__InfluenzaA__ADE20331

SEQ ID NO: 4428 - protein, 566 aa, Artificial Sequence; identical to SEQ ID NO: 2849
  derived and/or modified protein sequence (wt) from hemagglutinin__InfluenzaA__ADE20341

SEQ ID NO: 4429 - protein, 566 aa, Artificial Sequence; identical to SEQ ID NO: 4257
  derived and/or modified protein sequence (wt) from hemagglutinin__InfluenzaA__ADE20351

SEQ ID NO: 4430 - protein, 566 aa, Artificial Sequence; identical to SEQ ID NO: 2849
  derived and/or modified protein sequence (wt) from hemagglutinin__InfluenzaA__ADE20375

SEQ ID NO: 4431 - protein, 566 aa, Artificial Sequence; identical to SEQ ID NO: 4257
  derived and/or modified protein sequence (wt) from hemagglutinin__InfluenzaA__ADE20388

SEQ ID NO: 4432 - protein, 566 aa, Artificial Sequence; identical to SEQ ID NO: 2849
  derived and/or modified protein sequence (wt) from hemagglutinin__InfluenzaA__ADE20628

SEQ ID NO: 4433 - protein, 566 aa, Artificial Sequence; identical to SEQ ID NO: 4257
  derived and/or modified protein sequence (wt) from hemagglutinin__InfluenzaA__ADE20638

SEQ ID NO: 4434 - protein, 566 aa, Artificial Sequence; identical to SEQ ID NO: 2849
  derived and/or modified protein sequence (wt) from hemagglutinin__InfluenzaA__ADE20648

SEQ ID NO: 4435 - protein, 566 aa, Artificial Sequence; identical to SEQ ID NO: 2849
  derived and/or modified protein sequence (wt) from hemagglutinin__InfluenzaA__ADE20658

SEQ ID NO: 4436 - protein, 566 aa, Artificial Sequence; identical to SEQ ID NO: 4257
  derived and/or modified protein sequence (wt) from hemagglutinin__InfluenzaA__ADE20668

SEQ ID NO: 4437 - protein, 566 aa, Artificial Sequence; identical to SEQ ID NO: 4257
  derived and/or modified protein sequence (wt) from hemagglutinin__InfluenzaA__ADE20678

SEQ ID NO: 4438 - protein, 566 aa, Artificial Sequence; identical to SEQ ID NO: 2849
  derived and/or modified protein sequence (wt) from hemagglutinin__InfluenzaA__ADE20688

SEQ ID NO: 4439 - protein, 566 aa, Artificial Sequence; identical to SEQ ID NO: 2849
  derived and/or modified protein sequence (wt) from hemagglutinin__InfluenzaA__ADE20708

SEQ ID NO: 4440 - protein, 566 aa, Artificial Sequence; identical to SEQ ID NO: 2849
  derived and/or modified protein sequence (wt) from hemagglutinin__InfluenzaA__ADE20718

SEQ ID NO: 4441 - protein, 566 aa, Artificial Sequence
  derived and/or modified protein sequence (wt) from hemagglutinin__InfluenzaA__ADE20728
MKAILVVLLYTFATANADTLCIGYHANNSTDTVDTVLEKNVTVTHSVNILEDKHNGKLCKLKGVAPLHLGKCNIAGWILGNPECESLSTASSWSYIVETSSSDNGTCYPGDFIDYEELREQLSSVSSFERFEIFPKTSSWPNHDSNKGVTAACPHAGAKSFYKNLIWLVKKGNSYPKLSKSYINDKGKEVLVLWGIHHPSTSADQQSLYQNADAYVFVGSSKYSKKFKPEIAIRPKVRDQEGRMNYYWTLVEPGDKITFEATGNLVVPRYAFAMERNAGSGIIISDTPVHDCNTTCQTPKGAINTSLPFQNIHPITIGKCPKYVKSTKLRLATGLRNVPSIQSRGLFGAIAGFIEGGWTGMVDGWYGYHHQNEQGSGYAADLKSTQNAIDEITNKVNSVIEKMNTQFTAVGKEFNHLEKRIENLNKKVDDGFLDIWTYNAELLVLLENERTLDYHDSNVKNLYEKVRSQLKNNAKEIGNGCFEFYHKCDNTCMESVKNGTYDYPKYSEEAKLNREEIDGVKLESTRIYQILAIYSTVASSLVLVVSLGAISFWMCSNGSLQCRICI

SEQ ID NO: 4442 - protein, 566 aa, Artificial Sequence; identical to SEQ ID NO: 2849
  derived and/or modified protein sequence (wt) from hemagglutinin__InfluenzaA__ADE20738

SEQ ID NO: 4443 - protein, 566 aa, Artificial Sequence; identical to SEQ ID NO: 2849
  derived and/or modified protein sequence (wt) from hemagglutinin__InfluenzaA__ADE20748

SEQ ID NO: 4444 - protein, 566 aa, Artificial Sequence; identical to SEQ ID NO: 4441
  derived and/or modified protein sequence (wt) from hemagglutinin__InfluenzaA__ADE20758

SEQ ID NO: 4445 - protein, 566 aa, Artificial Sequence; identical to SEQ ID NO: 2849
  derived and/or modified protein sequence (wt) from hemagglutinin__InfluenzaA__ADE20768

SEQ ID NO: 4446 - protein, 566 aa, Artificial Sequence
  derived and/or modified protein sequence (wt) from hemagglutinin__InfluenzaA__ADE20778
MKAILVVLLYTFATANADTLCIGYHANNSTDTVDTVLEKNVTVTHSVNILEDKHNGKLCKLKGVAPLHLGKCNIAGWILGNPECESLSTASSWSYIVETSSSDNGTCYPGDFIDYEELREQLSSVSSFERFEIFPKTSSWPNHDSNKGVTAACPHAGAKSFYKNLIWLVKKGNSYPKLSKSYINDKGKKVLVLWGIHHPSTSADQQSLYQNADAYVFVGSSKYSKKFKPEIAIRPKVRDQEGRMNYYWTLVEPGDKITFEATGNLVVPRYAFAMERNAGSGIIISDTPVHDCNTTCQTPKGAINTSLPFQNIHPITIGKCPKYVKSTKLRLATGLRNVPSIQSRGLFGAIAGFIEGGWTGMVDGWYGYHHQNEQGSGYAADLKSTQNAIDEITNKVNSVIEKMNTQFTAVGKEFNHLEKRIENLNKKVDDGFLDIWTYNAELLVLLENERTLDYHDSNVKNLYEKVRSQLKNNAKEIGNGCFEFYHKCDNTCMESVKNGTYDYPKYSEEAKLNREEIDGVKLESTRIYQILAIYSTVASSLVLVVSLGAISFWMCSNGSLQCRICI

SEQ ID NO: 4447 - protein, 566 aa, Artificial Sequence; identical to SEQ ID NO: 3833
  derived and/or modified protein sequence (wt) from hemagglutinin__InfluenzaA__ADE20788

SEQ ID NO: 4448 - protein, 566 aa, Artificial Sequence
  derived and/or modified protein sequence (wt) from hemagglutinin__InfluenzaA__ADE20808
MKAILVVLLYTFATANADTLCIGYHANNSTDTVDTVLEKNVTVTHSVNLLEDKHNGKLCKLRGVAPLHLGKCNIAGWILGNPECESLSTASSWSYIVETSSSDNGTCYPGDFIDYEELREQLSSVSSFERFEIFPKTSSWPNHDSNKGVTAACPHAGAKSFYKNLIWLVKKGNSYPKLSKSYINDKEKEVLVLWGIHHPSTSADQQSLYQNADAYVFVGTSRYSKKFKPEIAIRPKVRDQEGRMNYYWTLVEPGDKITFEATGNLVVPRYAFAMERNAGSGIIISDTPVHDCNTTCQTPKGAINTSLPFQNIHPITIGKCPKYVKSTKLRLATGLRNVPSIQSRGLFGAIAGFIEGGWTGMVDGWYGYHHQNEQGSGYAADLKSTQNAIDKITNKVNSVIEKMNTQFTAVGKEFNHLEKRIENLNKKVDDGFLDIWTYNAELLVLLENERTLDYHDSNVKNLYEKVRSQLKNNAKEIGNGCFEFYHKCDNTCMESVKNGTYDYPKYSEEAKLNREEIDGVKLESTRIYQILAIYSTVASSLVLVVSLGAISFWMCSNGSLQCRICI

SEQ ID NO: 4449 - protein, 566 aa, Artificial Sequence; identical to SEQ ID NO: 3833
  derived and/or modified protein sequence (wt) from hemagglutinin__InfluenzaA__ADE20818

SEQ ID NO: 4450 - protein, 566 aa, Artificial Sequence; identical to SEQ ID NO: 4391
  derived and/or modified protein sequence (wt) from hemagglutinin__InfluenzaA__ADE20828

SEQ ID NO: 4451 - protein, 566 aa, Artificial Sequence
  derived and/or modified protein sequence (wt) from hemagglutinin__InfluenzaA__ADE20848
MKAILVVLLYTFATANADTLCIGYHANNSTDTVDTVLEKNVTVTHSVNLLEDKHNGKLCKLRGVAPLHLGKCNIAGWILGNPECESLSTASSWSYIVETSSSDNGTCYPGDFINYEELREQLSSVSSFERFEIFPKTSSWPNHDSNKGVTAACPHAGAKSFYKNLIWLVKKGNSYPKLSKSYINDKGKEVLVLWGIHHPSTSADQQSLYQNADAYVFVGTSRYSKKFKPEIAIRPKVRDQEGRMNYYWTLVEPGDKITFEATGNLVVPRYAFAMERNAGSGIIISDTPVHDCNTTCQTPKGAINTSLPFQNIHPITIGKCPKYVKSTKLRLATGLRNVPSIQSRGLFGAIAGFIEGGWTGMIDGWYGYHHQNEQGSGYAADLKSTQNAIDKITNKVNSVIEKMNTQFTAVGKEFNHLEKRIENLNKKVDDGFLDIWTYNAELLVLLENERTLDYHDSNVKNLYEKVRSQLKNNAKEIGNGCFEFYHKCDNTCMESVKNGTYDYPKYSEEAKLNREEIDGVKLESTRIYQILAIYSTVASSLVLVVSLGAISFWMCSNGSLQCRICI

SEQ ID NO: 4452 - protein, 566 aa, Artificial Sequence; identical to SEQ ID NO: 3833
  derived and/or modified protein sequence (wt) from hemagglutinin__InfluenzaA__ADE20858

SEQ ID NO: 4453 - protein, 566 aa, Artificial Sequence
  derived and/or modified protein sequence (wt) from hemagglutinin__InfluenzaA__ADE20868
MKAILVVLLYTFATANADTLCIGYHANNSTDTVDTVLEKNVTVTHSVNLLEGKHNGKLCKLRGVAPLHLGKCNIAGWILGNPECESLTTASSWSYIVETSSSDNGTCYPGDFIDYEELREQLSSVSSFERFEMFPKTSSWPNHDSNKGVTAACPHAGAKSFYKNLIWLVKKGNSYPKLSKSYINDKGKEVLVLWGIHHPSTSADQQSLYQNADAYVFVGTSRYSKKFKPEIAIRPKVRDQEGRMNYYWTLVEPGDKITFEATGNLVVPRYAFAMERNAGSGIIISDTPVHDCNTTCQTPKGAINTSLPFQNIHPITIGKCPKYVKSTKLRLATGLRNVPSIQSRGLFGAIAGFIEGGWTGMVDGWYGYHHQNEQGSGYAADLKSTQNAIDEITNKVNSVIEKMNTQFTAVGKEFNHLEKRIENLNKKVDDGFLDIWTYNAELLVLLENERTLDYHDSNVKNLYEKVRSQLKNNAKEIGNGCFEFYHKCDNTCMESVKNGTYDYPKYSEEAKLNREEIDGVKLESTRIYQILAIYSTVASSLVLVVSLGAISFWMCSNGSLQCRICI

SEQ ID NO: 4454 - protein, 566 aa, Artificial Sequence; identical to SEQ ID NO: 4387
  derived and/or modified protein sequence (wt) from hemagglutinin__InfluenzaA__ADE20878

SEQ ID NO: 4455 - protein, 566 aa, Artificial Sequence; identical to SEQ ID NO: 3771
  derived and/or modified protein sequence (wt) from hemagglutinin__InfluenzaA__ADE20888

SEQ ID NO: 4456 - protein, 566 aa, Artificial Sequence
  derived and/or modified protein sequence (wt) from hemagglutinin__InfluenzaA__ADE20898
MKAILVVLLYTFATANADTLCIGYHANNSTDTVDTILEKNVTVTHSVNLLEDKHNGKLCKLRGVAPLHLGKCNIAGWILGNPECESLSTASSWSYIVETSSSDNGTCYPGDFIDYEELREQLSSVSSFERFEIFPKTSSWPNHDSNKGVTAACPHAGAKSFYKNLIWLVKKGNSYPKLSKSYINDKGKEILVLWGIHHPSTSADQQSLYQNADAYVFVGTSRYSKKFKPEIAIRPKVRDQEGRMNYYWTLVEPGDKITFEATGNLVVPRYAFAMERNAGSGIIISDTPVHDCNTTCQTPKGAINTSLPFQNIHPITIGKCPKYVKSTKLRLATGLRNVPSIQSRGLFGAIAGFIEGGWTGMVDGWYGYHHQNEQGSGYAADLKSTQNAIDEITNKVNSVIEKMNTQFTAVGKEFNHLEKRIENLNKKVDDGFLDIWTYNAELLVLLENERTLDYHDSNVKNLYEKVRSQLKNNAKEIGNGCFEFYHKCDNTCMEGVKNGTYDYPKYSEEAKLNREEIDGVKLESTRIYQILAIYSTVASSLVLVVSLGAISFWMCSNGSLQCRICI

SEQ ID NO: 4457 - protein, 566 aa, Artificial Sequence; identical to SEQ ID NO: 4420
  derived and/or modified protein sequence (wt) from hemagglutinin__InfluenzaA__ADE20908

SEQ ID NO: 4458 - protein, 566 aa, Artificial Sequence
  derived and/or modified protein sequence (wt) from hemagglutinin__InfluenzaA__ADE20918
MKAILVVLLYTFATANADTLCIGYHANNSTDTVDTVLEKNVTVTHSVNILEDKHNGKLCKLRGVAPLHLGKCNIAGWILGNPECESLSTASSWSYIVETSSSDNGTCYPGDFIDYEELREQLSSVSSFERFEIFPKTSSWPNHDSNKGVTAACPHAGAKSFYKNLIWLVKKGNSYPKLSKSYINDKGKEVLVLWGIHHPSTSADQQSLYQNADAYVFVGTSRYSKKFKPEIAIRPKVRDQEGRMNYYWILVEPGDKITFEATGNLVVPRYAFAMERNAGSGIIISDTPVHDCNTTCQTPKGAINTSLPFQNIHPITIGKCPKYVKSTKLRLATGLRNVPSIQSRGLFGAIAGFIEGGWTGMVDGWYGYHHQNEQGSGYAADLKSTQNAIDEITNKVNSVIEKMNTQFTAVGKEFNHLEKRIENLNKKVDDGFLDIWTYNAELLVLLENERTLDYHDSNVKNLYEKVRSQLKNNAKEIGNGCFEFYHKCDNTCMESVKNGTYDYPKYSEEAKLNREEIDGVKLESTRIYQILAIYSTVASSLVLVVSLGAISFWMCSNGSLQCRICI

SEQ ID NO: 4459 - protein, 566 aa, Artificial Sequence; identical to SEQ ID NO: 3022
  derived and/or modified protein sequence (wt) from hemagglutinin__InfluenzaA__ADE20928

SEQ ID NO: 4460 - protein, 566 aa, Artificial Sequence
  derived and/or modified protein sequence (wt) from hemagglutinin__InfluenzaA__ADE20948
MKAILVVLLYTFATANADTLCIGYHANNSTDTVDTVLEKNVTVTHSVNLLEDKHNGKLCKLRGVAPLHLGKCNIAGWILGNPECESLSTASSWSYIVETSSSDNGTCYPGDFINYEELREQLSSVSSFERFEIFPKTSSWPNHDSNKGVTAACPHAGAKSFYKNLIWLVKKGNSYPKLSKSYINDKGKEVLVLWGIHHPSTSADQQSLYQNADSYVFVGTSRYSKKFKPEIAIRPKVRDQEGRMNYYWTLVEPGDKITFEATGNLVVPRYAFAMERNAGSGIIISDTPVHDCNTTCQTPKGAINTSLPFQNIHPITIGKCPKYVKSTKLRLATGLRNVPSIQSRGLFGAIAGFIEGGWTGMVDGWYGYHHQNEQGSGYAADLKSTQNAIDKITNKVNSVIEKMNTQFTAVGKEFNHLEKRIENLNKKVDDGFLDIWTYNAELLVLLENERTLDYHDSNVKNLYEKVRSQLKNNAKEIGNGCFEFYHKCDNTCMESVKNGTYDYPKYSEEAKLNREEIDGVKLESTRIYQILAIYSTVASSLVLVVSLGAISFWMCSNGSLQCRICI

SEQ ID NO: 4461 - protein, 566 aa, Artificial Sequence
  derived and/or modified protein sequence (wt) from hemagglutinin__InfluenzaA__ADE20968
MKAILVVLLYTFATANADTLCIGYHANNSTDTVDTVLEKNVTVTHSVNLLEDKHNGKLCKLRGEAPLHLGKCNIAGWILGNPECESLSTASSWSYIVETSSSDNGTCYPGDFINYEELREQLSSVSSFERFEIFPKTSSWPNHDSNKGVTAACPHSGAKSFYKNLIWLVKKGNSYPKLSKSYINDKGKEVLVLWGIHHPSTSADQQSLYQNADAYVFVGTSRYSKKFKPEIAIRPKVRDQEGRMNYYWTLVEPGDKITFEATGNLVVPRYAFAMERNAGSGIIISDTPVHDCNTTCQTPKGAINTSLPFQNIHPITIGKCPKYVKSTKLRLATGLRNVPSIQSRGLFGAIAGFIEGGWTGMVDGWYGYHHQNEQGSGYAADLKSTQNAIDKITNKVNSVIEKMNTQFTAVGKEFNHLEKRIENLNKKVDDGFLDIWTYNAELLVLLENERTLDYHDSNVKNLYEKVRSQLKNNAKEIGNGCFEFYHKCDNTCMESVKNGTYDYPKYSEEAKLNREEIDGVKLESTRIYQILAIYSTVASSLVLVVSLGAISFWMCSNGSLQCRICI

SEQ ID NO: 4462 - protein, 566 aa, Artificial Sequence; identical to SEQ ID NO: 3833
  derived and/or modified protein sequence (wt) from hemagglutinin__InfluenzaA__ADE20978

SEQ ID NO: 4463 - protein, 566 aa, Artificial Sequence
  derived and/or modified protein sequence (wt) from hemagglutinin__InfluenzaA__ADE20988
MKAILVVLLYTFATANADTLCIGYHANNSTDTVDTVLEKNVTVTHSVNLLEDKHNGKLCKLRGVAPLHLGKCNIAGWILGNPECESLSTASSWSYIVETSSSDNGTCYPGDFIDYEELREQLSSVSSFERFEIFPKTSSWPNHDSNKGVTAACPHAGAKSFYKNLIWLVKKGNSYPKLSKSYINDKGKEVLVLWGIHHPSTSTDQQSLYQNADAYVFVGTSRYSKKFKPEIAIRPKVRDQEGRMNYYWTLVEPGDKITFEATGNLVVPRYAFAMERNAGSGIIISDTPVHDCNTTCQTPKGAINTSLPFQNIHPITIGKCPKYVKSTKLRLATGLRNIPSIQSRGLFGAIAGFIEGGWTGMVDGWYGYHHQNEQGSGYAADLKSTQNAIDEITNKVNSVIEKMNTQFTAVGKEFNHLEKRIENLNKKVDDGFLDIWTYNAELLVLLENERTLDYHDSNVKNLYEKVRSQLKNNAKEIGNGCFEFYHKCDNTCMESVKNGTYDYPKYSEEAKLKREEIDGVKLESTRIYQILAIYSTVASSLVLVVSLGAISFWMCSNGSLQCRICI

SEQ ID NO: 4464 - protein, 566 aa, Artificial Sequence; identical to SEQ ID NO: 3833
  derived and/or modified protein sequence (wt) from hemagglutinin__InfluenzaA__ADE20998

SEQ ID NO: 4465 - protein, 566 aa, Artificial Sequence; identical to SEQ ID NO: 3997
  derived and/or modified protein sequence (wt) from hemagglutinin__InfluenzaA__ADE21008

SEQ ID NO: 4466 - protein, 566 aa, Artificial Sequence
  derived and/or modified protein sequence (wt) from hemagglutinin__InfluenzaA__ADE21018
MKAILVVLLYTFATANADTLCIGYHANNSTDTVDTVLEKNVTVTHSVNLLEDKHNGKLCKLRGVAPLHLGKCNIAGWILGNPECESLSTASSWSYIVETSSSDNGTCYPGDFIDYEELREQLSSVSSFERFEIFPKTSSWPNHDSNKGVTTACPHAGAKSFYKNLIWLVKKGNSYPKLSKSYINDKGKEVLVLWGIHHPSTSTDQQSLYQNADAYVFVGTSRYSKKFKPEIAIRPKVRDQEGRMNYYWTLVEPGDKITFEATGNLVVPRYAFAMERNAGSGIIISDTPVHDCNTTCQTPKGAINTSLPFQNIHPITIGKCPKYVKSTKLRLATGLRNIPSIQSRGLFGAIAGFIEGGWTGMVDGWYGYHHQNEQGSGYAADLKSTQNAIDEITNKVNSVIEKMNTQFTAVGKEFNHLEKRIENLNKKVDDGFLDIWTYNAELLVLLENERTLDYHDSNVKNLYEKVRSQLKNNAKEIGNGCFEFYHKCDNTCMESVKNGTYDYPKYSEEAKLNREEIDGVKLESTRIYQILAIYSTVASSLVLVVSLGAISFWMCSNGSLQCRICI

SEQ ID NO: 4467 - protein, 566 aa, Artificial Sequence; identical to SEQ ID NO: 4407
  derived and/or modified protein sequence (wt) from hemagglutinin__InfluenzaA__ADE21028

SEQ ID NO: 4468 - protein, 566 aa, Artificial Sequence; identical to SEQ ID NO: 4397
  derived and/or modified protein sequence (wt) from hemagglutinin__InfluenzaA__ADE21038

SEQ ID NO: 4469 - protein, 566 aa, Artificial Sequence; identical to SEQ ID NO: 4420
  derived and/or modified protein sequence (wt) from hemagglutinin__InfluenzaA__ADE21048

SEQ ID NO: 4470 - protein, 566 aa, Artificial Sequence
  derived and/or modified protein sequence (wt) from hemagglutinin__InfluenzaA__ADE21058
MKAILVVLLYTFATANADTLCIGYHANNSTDTVDTVLEKNVTVTHSVNLLEDKHNGKLCKLRGVAPLHLGKCNIAGWILGNPECESLSTASSWSYIVETSSSDNGTCYPGDFIDYEELREQLSSVSSFERFEIFPKTSSWPNHDSNKGVTAACPHAGAKSFYKNLIWLVKKGNSYPKLSKSYINDKGKEVLVLWGIHHPSTSADQQSLYQNADAYVFVGTSRYSKKFKPEIAIRPKVRDQEGRINYYWTLVEPGDKITFEATGNLVVPRYAFAMERNAGSGIIISDTPAHDCNTTCQTPKGAINTSLPFQNIHPITIGKCPKYVKSTKLRLATGLRNVPSIQSRGLFGAIAGFIEGGWTGMVDGWYGYHHQNEQGSGYAADLKSTQNAIDKITNKVNSVIEKMNTQFTAVGKEFNHLEKRIENLNKKVDDGFLDIWTYNAELLVLLENERTLDYHDSNVKNLYEKVRSQLKNNAKEIGNGCFEFYHKCDNTCMESVKNGTYDYPKYSEEAKLNREEIDGVKLESTRIYQILAIYSTVASSLVLVVSLGAISFWMCSNGSLQCRICI

SEQ ID NO: 4471 - protein, 566 aa, Artificial Sequence
  derived and/or modified protein sequence (wt) from hemagglutinin__InfluenzaA__ADE21068
MKAILVVLLYTFATANADTLCIGYHANNSTDTVDTVLEKNVTVTHSVNLLEDKHNGKLCKLRGVAPLHLGKCNIAGWILGNPECESLSTASSWSYIVETSSSDNGTCYPGDFIDYEELREQLSSVSSFERFEIFPKTSSWPNHDSNKGVTAACPHAGAKSFYKNLIWLVKKGNSYPKLSKSYINDKGKEVLVLWGIHHPSTSADQQSLYQNADAYVFVGTSRYSKKFKPEIAIRPKVREQEGRMNYYWTLVEPGDKITFEATGNLVVPRYAFAMERNAGSGIIISDTPVHDCNTTCQTPKGAINTSLPFQNIHSITIGKCPKYVKSTKLRLATGLRNVPSIQSRGLFGAIAGFIEGGWTGMVDGWYGYHHQNEQGSGYAADLKSTQNAIDEITNKVNSVIEKMNTQFTAVGKEFNHLEKRIENLNKKVDDGFLDIWTYNAELLVLLENERTLDYHDSNVKNLYEKVRSQLKNNAKETGNGCFEFYHKCDNTCMESVKNGTYDYPKYSEEAKLNREEIDGVKLESTRIYQILAIYSTVASSLVLVVSLGAISFWMCSNGSLQCRICI

SEQ ID NO: 4472 - protein, 565 aa, Artificial Sequence
  derived and/or modified protein sequence (wt) from hemagglutinin__InfluenzaA__ADE28761
MKVKLLVLLCTFTATYADTICIGYHANNSTDTVDTVLEKNVTVTHSVNLLENSHNGKLCLLKGIAPLQLGNCSVAGWILGNPECELLISKESWSYIVEKPNPENGTCYPGHFADYEELREQLSSVSSFERFEIFPKESSWPNHTVTGVSASCSHNGESSFYRNLLWLTGKNGLYPNLSKSYANNKEKEVLVLWGVHHPPNIGNQKTLYHTENAYVSVVSSHYSRKFTPEIAKRPKVRDQEGRINYYWTLLEPGDTIIFEANGNLIAPRYAFALSRGFGSGIINSNAPMDKCDAKCQTPQGAINSSLPFQNVHPVTIGECPKYVRSAKLRMVTGLRNIPSIQSRGLFGAIAGFIEGGWTGMVDGWYGYHHQNEQGSGYAADQKSTQNAINGITNKVNSVIEKMNTQFTAVGKEFNKLERRMENLNKKVDDGFIDIWTYNAELLVLLENERTLDFHESNVKNLYEKVKSQLKNNAKEIGNGCFEFYHKCNDECMESVKNGTYDYPKYSEESKLNREKIDGVKLESMEVYQILAIYSTVASSLVLLVSLGAISFWMCSNGSLQCRICI

SEQ ID NO: 4473 - protein, 566 aa, Artificial Sequence; identical to SEQ ID NO: 2849
  derived and/or modified protein sequence (wt) from hemagglutinin__InfluenzaA__ADE28780

SEQ ID NO: 4474 - protein, 566 aa, Artificial Sequence; identical to SEQ ID NO: 4257
  derived and/or modified protein sequence (wt) from hemagglutinin__InfluenzaA__ADE28790

SEQ ID NO: 4475 - protein, 566 aa, Artificial Sequence; identical to SEQ ID NO: 4441
  derived and/or modified protein sequence (wt) from hemagglutinin__InfluenzaA__ADE28800

SEQ ID NO: 4476 - protein, 566 aa, Artificial Sequence; identical to SEQ ID NO: 3833
  derived and/or modified protein sequence (wt) from hemagglutinin__InfluenzaA__ADE28810

SEQ ID NO: 4477 - protein, 566 aa, Artificial Sequence
  derived and/or modified protein sequence (wt) from hemagglutinin__InfluenzaA__ADE28820
MKAILVVLLYTFATANADTLCIGYHANNSTDTVDTVLEKNVTVTHSVNLLEDKHNGKLCKLRGVAPLHLGKCNIAGWILGSPECESLSTASSWSYIVETSSSDNGTCYPGDFIDYEELREQLSSVSSFERFEIFPKTSSWPNHDSNKGVTAACPHAGAKSFYKNLIWLVKKGNSYPKLSKSYINDKGKEVLVLWGIHHPSTSADQQSLYQNADAYVFVGTSRYSKKFKPEIAIRPKVRDQEGRMNYYWTLVEPGDKITFEATGNLVVPRYAFAMERNAGSGIIISDTPVHDCNTTCQTPKGAINTSLPFQNIHPITIGKCPKYVKSTKLRLATGLRNVPSIQSRGLFGAIAGFIEGGWTGMVDGWYGYHHQNEQGSGYAADLKSTQNAIDKITNKVNSVIEKMNTQFTAVGKEFNHLEKRIENLNKKVDDGFLDIWTYNAELLVLLENERTLDYHDSNVKNLYEKVRSQLKNNAKEIGNGCFEFYHKCDNTCMESVKNGTYDYPKYSEEAKLNREEIDGVKLESTRIYQILAIYSTVASSLVLVVSLGAISFWMCSNGSLQCRICI

SEQ ID NO: 4478 - protein, 566 aa, Artificial Sequence; identical to SEQ ID NO: 2849
  derived and/or modified protein sequence (wt) from hemagglutinin__InfluenzaA__ADE28830

SEQ ID NO: 4479 - protein, 566 aa, Artificial Sequence; identical to SEQ ID NO: 2849
  derived and/or modified protein sequence (wt) from hemagglutinin__InfluenzaA__ADE28840

SEQ ID NO: 4480 - protein, 566 aa, Artificial Sequence; identical to SEQ ID NO: 2849
  derived and/or modified protein sequence (wt) from hemagglutinin__InfluenzaA__ADE28850

SEQ ID NO: 4481 - protein, 566 aa, Artificial Sequence; identical to SEQ ID NO: 2849
  derived and/or modified protein sequence (wt) from hemagglutinin__InfluenzaA__ADE28881

SEQ ID NO: 4482 - protein, 566 aa, Artificial Sequence; identical to SEQ ID NO: 2849
  derived and/or modified protein sequence (wt) from hemagglutinin__InfluenzaA__ADE28891

SEQ ID NO: 4483 - protein, 566 aa, Artificial Sequence; identical to SEQ ID NO: 4352
  derived and/or modified protein sequence (wt) from hemagglutinin__InfluenzaA__ADE28911

SEQ ID NO: 4484 - protein, 566 aa, Artificial Sequence; identical to SEQ ID NO: 3833
  derived and/or modified protein sequence (wt) from hemagglutinin__InfluenzaA__ADE28921

SEQ ID NO: 4485 - protein, 566 aa, Artificial Sequence; identical to SEQ ID NO: 3833
  derived and/or modified protein sequence (wt) from hemagglutinin__InfluenzaA__ADE28931

SEQ ID NO: 4486 - protein, 566 aa, Artificial Sequence; identical to SEQ ID NO: 3022
  derived and/or modified protein sequence (wt) from hemagglutinin__InfluenzaA__ADE28951

SEQ ID NO: 4487 - protein, 566 aa, Artificial Sequence
  derived and/or modified protein sequence (wt) from hemagglutinin__InfluenzaA__ADE28961
MKAILVVLLYTFATANADTLCIGYHANNSTDTVDTVLEKNVTVTHSVNLLEDKHNGKLCKLRGVAPLHLGKCNVAGWILGNPECESLSTASSWSYIVETSSSDNGTCYPGDFIDYEELREQLSSVSSFERFEIFPKTSSWPNHDSNKGVTAACPHAGAKSFYKNLIWLVKKGNSYPKLSKSYINDKGKEVLVLWGIHHPSTSADQQSLYQNADAYVFVGTSRYSKKFKPEIAIRPKVRDQEGRMNYYWTLVEPGDKITFEATGNLVVPRYAFAMERNAGSGIIISDTPVHDCNTTCQTPKGAINTSLPFQNIHPITIGKCPKYVKSTKLRLATGLRNVPSIQSRGLFGAIAGFIEGGWTGMVDGWYGYHHQNEQGSGYAADLKSTQNAIDEITNKVNSVIEKMNTQFTAVGKEFNHLEKRIENLNKKVDDGFLDIWTYNAELLVLLENERTLDYHDSNVKNLYEKVRSQLKNNAKEIGNGCFEFYHKCDNTCMESVKNGTYDYPKYSEEAKLNREEIDGVKLESTRIYQILAIYSTVASSLVLVVSLGAISFWMCSNGSLQCRICI

SEQ ID NO: 4488 - protein, 566 aa, Artificial Sequence; identical to SEQ ID NO: 4373
  derived and/or modified protein sequence (wt) from hemagglutinin__InfluenzaA__ADE28971

SEQ ID NO: 4489 - protein, 566 aa, Artificial Sequence
  derived and/or modified protein sequence (wt) from hemagglutinin__InfluenzaA__ADE28981
MKAILVVLLYTFATANADTLCIGYHANNSTETVDTVLEKNVTVTHSVNLLEDKHNGKLCKLRGVAPLHLGKCNIAGWILGNPECESLSTASSWSYIVETSSSDNGTCYPGDFIDYEELREQLSSVSSFERFEIFPKTSSWPNHDSNKGVTAACPHAGAKSFYKNLIWLVKKGNSYPKLSKSYINDKGKEVLVLWGIHHPSTSADQQSLYQNADAYVFVGTSRYSKKFKPEIAIRPKVRDQEGRMNYYWTLVEPGDKITFEATGNLVVPRYAFAMERNAGSGIIISDTPVHDCNTTCQTPKGAINTSLPFQNIHPITIGKCPKYVKSTKLRLATGLRNVPSIQSRGLFGAIAGFIEGGWTGMVDGWYGYHHQNEQGSGYAADLKSTQNAIDKITNKVNSVIEKMNTQFTAVGKEFNHLEKRIENLNKKVDDGFLDIWTYNAELLVLLENERTLDYHDSNVKNLYEKVRSQLKNNAKEIGNGCFEFYHKCDNTCMESVKNGTYDYPKYSEEAKLNREEIDGVKLESTRIYQILAIYSTVASSLVLVVSLGAISFWMCSNGSLQCRICI

SEQ ID NO: 4490 - protein, 566 aa, Artificial Sequence; identical to SEQ ID NO: 3833
  derived and/or modified protein sequence (wt) from hemagglutinin__InfluenzaA__ADE28991

SEQ ID NO: 4491 - protein, 566 aa, Artificial Sequence
  derived and/or modified protein sequence (wt) from hemagglutinin__InfluenzaA__ADE29001
MKAILVVLLYTFATANADTLCIGYHANNSTDTVDTVLERNVTVTHSVNLLEDKHNGKLCKLKGVAPLHLGKCNIAGWILGNPECESLSTASSWSYIVETSSSDNGTCYPGDFIDYEELREQLSSVSSFERFEIFPKTSSWPNHDSNKGVTAACPHAGAKSFYKNLIWLVKKGNSYPKLSKSYINDKGKEVLVLWGIHHPSTSADQQSLYQNADAYVFVGTSRYSKKFKPEIAIRPKVRDQEGRMNYYWTLVEPGDKITFEATGNLVVPRYAFAMERNAGSGIIISDTPVHDCNTTCQTPKGAINTSLPFQNIHPITIGKCPKYVKSTKLRLATGLRNVPSIQSRGLFGAIAGFIEGGWTGMVDGWYGYHHQNEQGSGYAADLKSTQNAIDEITNKVNSVIEKMNTQFTAVGKEFNHLEKRIENLNKKVDDGFLDIWTYNAELLVLLENERTLDYHDSNVKNLYEKVRSQLKNNAKEIGNGCFEFYHKCDNTCMESVKNGTYDYPKYSEEAKLNREEIDGVKLESTRIYQILAIYSTVASSLVLVVSLGAISFWMCSNGSLQCRICI

SEQ ID NO: 4492 - protein, 566 aa, Artificial Sequence; identical to SEQ ID NO: 2911
  derived and/or modified protein sequence (wt) from hemagglutinin__InfluenzaA__ADE29011

SEQ ID NO: 4493 - protein, 566 aa, Artificial Sequence
  derived and/or modified protein sequence (wt) from hemagglutinin__InfluenzaA__ADE29021
MKAILVVLLYTFATANADTLCIGYHANNSTDTVDTVLEKNVTVTHSVNLLEDKHNGKLCKLRGVAPLHLGKCNIAGWILGNPECESLSTASSWSYIVETSGSDNGTCYPGDFIDYEELREQLSSVSSFERFEIFPKTSSWPNHDSNKGVTAACPHAGAKSFYKNLIWLVKKGNSYPKLSKSYINDKGKEVLVLWGIHHPSTSTDQQSLYQNADAYVSVGTSRYSKKFKPEIAIRPKVRDQEGRMNYYWTLVEPGDKITFEATGNLVVPRYAFAMERNAGSGIIISDTPVHDCNTTCQTPKGAINTSLPFQNIHPITIGKCPKYVKSTKLRLATGLRNVPSIQSRGLFGAIAGFIEGGWTGMVDGWYGYHHQNEQGSGYAADLKSTQNAIDKITNKVNSVIEKMNTQFTAVGKEFNHLEKRIENLNKKVDDGFLDIWTYNAELLVLLENERTLDYHDSNVKNLYEKVRSQLKNNAKEIGNGCFEFYHKCDNTCMESVKNGTYDYPKYSEEAKLNREEIDGVKLESTRIYQILAIYSTVASSLVLVVSLGAISFWMCSNGSLQCRICI

SEQ ID NO: 4494 - protein, 566 aa, Artificial Sequence; identical to SEQ ID NO: 4318
  derived and/or modified protein sequence (wt) from hemagglutinin__InfluenzaA__ADE29031

SEQ ID NO: 4495 - protein, 566 aa, Artificial Sequence
  derived and/or modified protein sequence (wt) from hemagglutinin__InfluenzaA__ADE29041
MKAILVVLLYTFATANADTLCIGYHANNSTDTVDTVLEKNVTVTHSVNLLEDKHNGKLCKLRGVAPLHLGKCNIAGWILGNPECESLSTASSWSYIVETSSSDNGTCYPGDFIDYEELREQLSSVSSFERFEIFPKTSSWPNHDSNKGVTAACPHAGAKSFYKNLIWLVKKGNSYPKLSKSYINDKGKEVLVLWGIHHPSTSADQQSLYQNADAYVFVGTSRYSKKFKPEIAIRPKVRDQEGRMNYYWTLVEPGDKITFEATGNLVVPRYAFAMEKNAGSGIIISDTPVHDCNTTCQTPKGAINTSLPFQNIHPITIGKCPKYVKSTKLRLATGLRNVPSIQSRGLFGAIAGFIEGGWTGMVDGWYGYHHQNEQGSGYAADLKSTQNAIDEITNKVNSVIEKMNTQFTAVGKEFNHLEKRIENLNKKVDDGFLDIWTYNAELLVLLENERTLDYHDSNVKNLYEKVRSQLKNNAKEIGNGCFEFYHKCDNTCMESVKNGTYDYPKYSEEAKLNREEIDGVKLESTRIYQILAIYSTVASSLVLVVSLGAISFWMCSNGSLQCRICI

SEQ ID NO: 4496 - protein, 566 aa, Artificial Sequence; identical to SEQ ID NO: 4318
  derived and/or modified protein sequence (wt) from hemagglutinin__InfluenzaA__ADE29051

SEQ ID NO: 4497 - protein, 566 aa, Artificial Sequence
  derived and/or modified protein sequence (wt) from hemagglutinin__InfluenzaA__ADE29085
MKAILVVLLYTFATANADTLCIGYHANNSTDTVDTVLEKNVTVTHSVNLLEDKHNGKLCKLRGVAPLHLGKCNIAGWILGNPECESLSTASSWSYIVETPSSDNGTCYPGDFIDYEELREQLSSVSSFERFEIFPKTSSWPNHDSNKGVTAACPHAEAKSFYKNLIWLVKKGNSYPKLSKSYINDKGKEVLVLWGIHHPSTSADQQSLYQNADAYVFVGSSRYSKTFKPEIAIRPKVRDREGRMNYYWTLVEPGDKITFEATGNLVVPRYAFAMERNAGSGIIISDTPVHDCNTTCQTPKGAINTSLPFQNIHPITIGKCPKYVKSTKLRLATGLRNIPSIQSRGLFGAIAGFIEGGWTGMVDGWYGYHHQNEQGSGYAADLKSTQNAIDEITNKVNSVIEKMNTQFTAVGKEFNHLEKRIENLNKKVDDGFLDIWTYNAELLVLLENERTLDYHDSNVKNLYEKVRSQLKNNAKEIGNGCFEFYHKCDNTCMESVKNGTYDYPKYSEEAKLNREEIDGVKLESTRIYQILAIYSTVASSLVLVVSLGAISFWMCSNGSLQCRICI

SEQ ID NO: 4498 - protein, 566 aa, Artificial Sequence
  derived and/or modified protein sequence (wt) from hemagglutinin__InfluenzaA__ADE29095
MKAILVVLLYTFATANADTLCIGYHANNSTDTVDTVLEKNVTVTHSVNLLEDKHNGKLCKLRGVAPLHLGKCNIAGWILGNPECESLSTASSWSYIVETPSSDNGTCYPGDFIDYEELREQLSSVSSFERFEIFPKTSSWPNHDSNKGVTAACPHAGAKSFYKNLIWLVKKGNSYPKLSKSYINDKGKEVLVLWGIHHPSTSADQQSLYQNADAYVFVGSSRYSKTFKPEIAIRPKVRDREGRMNYYWTLVEPGDKITFEATGNLVVPRYAFAMERNAGSGIIISDTPVHDCNTTCQTPKGAINTSLPFQNIHPITIGKCPKYVKSTKLRLATGLRNIPSIQSRGLFGAIAGFIEGGWTGMVDGWYGYHHQNEQGSGYAADLKSTQNAIDEITNKVNSVIEKMNTQFTAVGKEFNHLEKRIENLNKKVDDGFLDIWTYNAELLVLLENERTLDYHDSNVKNLYEKVRSQLKNNAKEIGNGCFEFYHKCDNTCMESVKNGTYDYPKYSEEAKLNREEIDGVKLESTRIYQILAIYSTVASSLVLVVSLGAISFWMCSNGSLQCRICI

SEQ ID NO: 4499 - protein, 566 aa, Artificial Sequence; identical to SEQ ID NO: 3588
  derived and/or modified protein sequence (wt) from hemagglutinin__InfluenzaA__ADE34191

SEQ ID NO: 4500 - protein, 566 aa, Artificial Sequence; identical to SEQ ID NO: 3588
  derived and/or modified protein sequence (wt) from hemagglutinin__InfluenzaA__ADE34202

SEQ ID NO: 4501 - protein, 566 aa, Artificial Sequence
  derived and/or modified protein sequence (wt) from hemagglutinin__InfluenzaA__ADE34213
MKTIIALSYILCLVFAQKLPGNDNSTATLCLGHHAVPNGTIVKTITNDQIEVTNATELVQSSSTGEICDSPHQILDGENCTLIDALLGDPQCDGFQNKKWDLFVERRKAYSNCYPYDVPDYASLRSLVASSGTLEFNNESFNWTGVTQNGTSSACIRRSNNSFFSRLNWLTHLKFKYPALNVTMPNNEQFDKLYIWGVHHPGTDNDQIFLYAQASGRITVSTKRSQQTVIPNIGSRPRVRNIPSRISIYWTIVKPGDILLINSTGNLIAPRGYFKIRSGKSSIMRSDAPIGKCNSECITPNGSIPNDKPFQNVNRITYGACPRYVKQNTLKLATGMRNVPEKQTRGIFGAIAGFIENGWEGMVDGWYGFRHQNSEGRGQAADLKSTQAAIDQINGKLNRLIGKTNEKFHQIEKEFSEVEGRIQDLEKYVEDTKIDLWSYNAELLVALENQHTIDLTDSEMNKLFEKTKKQLRENAEDMGNGCFKIYHKCDNACIGSIRNGTYDHDVYRDEALNNRFQIKGVELKSGYKDWILWISFAISCFLLCVALLGFIMWACQKGNIRCNICI

SEQ ID NO: 4502 - protein, 566 aa, Artificial Sequence; identical to SEQ ID NO: 3588
  derived and/or modified protein sequence (wt) from hemagglutinin__InfluenzaA__ADE34224

SEQ ID NO: 4503 - protein, 566 aa, Artificial Sequence
  derived and/or modified protein sequence (wt) from hemagglutinin__InfluenzaA__ADE34235
MKTIIALSYILCLVFAQKLPGNDNSTATLCLGHHAVPNGTIVKTITNDQIEVTNATELVQSSSTGEICDSPHQILDGKNCTLIDALLGDPQCDGFQNKKWDLFVERSKAYSNCYPYDVPDYASLRSLVASSGTLEFNNESFNWTGVTQDGTSSACIRRSKNSFFSRLNWLTHLNFKYPALNVTMPNNEQFDKLYIWGVHHPGTDKDQIFLYAQASGRTTVSTKRSQQTAIPNIGSRPRVRNIPSRISIYWTIVKPGDILLINSTGNLIAPRGYFKIRSGKSSIMRSDAPIGKCNSECITPNGSIPNDKPFQNVNRITYGACPRYVKQNTLKLATGMRNVPEKQTRGIFGAIAGFIENGWEGMVDGWYGFRHQNSEGRGQAADLKSTQAAIDQINGKLNRLIGKTNEKFHQIEKEFSEVEGRIQDLEKYVEDTKIDLWSYNAELLVALENQHTIDLTDSEMNKLFEKTKKQLRENAEDMGNGCFKIYHKCDNACIGSIRNGTYDHDVYRDEALNNRFQIKGVELKSGYKDWILWISFAISCFLLCVALLGFIMWACQKGNIRCNICI

SEQ ID NO: 4504 - protein, 566 aa, Artificial Sequence; identical to SEQ ID NO: 3588
  derived and/or modified protein sequence (wt) from hemagglutinin__InfluenzaA__ADE34246

SEQ ID NO: 4505 - protein, 566 aa, Artificial Sequence; identical to SEQ ID NO: 3613
  derived and/or modified protein sequence (wt) from hemagglutinin__InfluenzaA__ADE34257

SEQ ID NO: 4506 - protein, 566 aa, Artificial Sequence
  derived and/or modified protein sequence (wt) from hemagglutinin__InfluenzaA__ADE34268
MKTIIALSYILCLVFAQKLPGNDNSTATLCLGHHAVPNGTIVKTITNDQIEVTNATELVQSSSTGEICDSPHQILDGKNCTLIDALLGDPQCDGFQNKKWDLFVERSKAYSNCYPYEVPDYASLRSLVASSGTLEFNNESFNWTGVTQDGTSSACIRRSKNSFFSRLNWLTHLNFKYPALNVTMPNNEQFDKLYIWGVHHPGTDKDQIFLYAQASGRITVSTKRSQQTAIPNIGSRPRVRNIPSRISIYWTIVKPGDILLINSTGNLIAPRGYFKIRSGKSSIMRSDAPIGKCNSECITPNGSIPNDKPFQNVNRITYGACPRYVKQNTLKLATGMRNVPEKQTRGIFGAIAGFIENGWEGMVDGWYGFRHQNSEGRGQAADLKSTQAAIDQINGKLNRLIGKTNEKFHQIEKEFSEVEGRIQDLEKYVEDTKIDLWSYNAELLVALENQHTIDLTDSEMNKLFEKTKKQLRENAEDMGNGCFKIYHKCDNACIGSIRNGTYDHDVYRDEALNNRFQIKGVELKSGYKDWILWISFAISCFLLCVALLGFIMWACQKGNIRCNICI

SEQ ID NO: 4507 - protein, 566 aa, Artificial Sequence
  derived and/or modified protein sequence (wt) from hemagglutinin__InfluenzaA__ADE45499
MKAILVVLLYTFATANADTLCIGYHANNSTDTVDTVLEKNVTVTHSVNLLEDKHNGKLCKLRGVAPLHLGKCNIAGWILGNPECESLSTASSWSYIVETSSSDNGTCYPGDFIDYEELREQLSSVSSFKRFEIFPKTSSWPNHDPNKGVTAACPHAGAKSFYKNLIWLVKKGNSYPKLSKSYINDKGKEVLVLWGIHHPSTSADQQSLYQNADAYVFVGTSRYSKKFKPEIAIRPKVRDQEGRMNYYWTLVEPGDKITFEATGNLVVPRYAFAMERNAGSGIIISDTPVHDCNTTCQTPKGAINTSLPFQNIHPITIGKCPKYVKSTKLRLATGLRNVPSIQSRGLFGAIAGFIEGGWTGMVDGWYGYHHQNEQGSGYAADLKSTQNAIDEITNKVNSVIEKMNTQFTAVGKEFNHLEKRIENLNKKVDDGFLDIWTYNAELLVLLENERTLDYHDSNVKNLYEKVRSQLKNNAKEIGNGCFEFYHKCDNTCMESVKNGTYDYPKYSEEAKLNREEIDGVKLESTRIYQILAIYSTVASSLVLVVSLGAISFWMCSNGSLQCRICI

SEQ ID NO: 4508 - protein, 566 aa, Artificial Sequence; identical to SEQ ID NO: 3467
  derived and/or modified protein sequence (wt) from hemagglutinin__InfluenzaA__ADE45501

SEQ ID NO: 4509 - protein, 566 aa, Artificial Sequence
  derived and/or modified protein sequence (wt) from hemagglutinin__InfluenzaA__ADE45503
MKAILVVLLYTFATANADTLCIGYHANNSTDTVDTVLEKNVTVTHSVNLLEDKHNGKLCKLRGVAPLHLGKCNIAGWILGNPECESLSTASSWSYIVETSSSDNGTCYPGDFIDYEELREQLSSVSSFERFEIFPKTSSWPNHDPNKGVTAACPHAGAKSFYKNLIWLVKKGNSYPKLSKSYINDKGKEVLVLWGIHHPSTSADQQSLYQNADAYVFVGTSRYSKKFKPEIAIRPKVRDQEGRMNYYWTLVEPGDKITFEATGNLVVPRYAFAMERNAGSGIIISDTPVHDCNTTCQTPKGAINTSLPFQNIHPITIGKCPKYVKSTKLRLATGLRNVPSIQSRGLFGAIAGFIEGGWTGMVDGWYGYHHQNEQGSGYAADLKSTQNAIDEITNKVNSVIEKMNTQFTAVGKEFNHLEKRIENLNKKVDDGFLDIWTYNAELLVLLENERTLDYHDSNVKNLYEKVRSQLKNNAKEIGNGCFEFYHKCDNTCMESVKNGTYDYPKYSEEAKLNREEIDGVKLESTRVYQILAIYSTVASSLVLVVSLGAISFWMCSNGSLQCRICI

SEQ ID NO: 4510 - protein, 566 aa, Artificial Sequence; identical to SEQ ID NO: 2669
  derived and/or modified protein sequence (wt) from hemagglutinin__InfluenzaA__ADE45505

SEQ ID NO: 4511 - protein, 566 aa, Artificial Sequence; identical to SEQ ID NO: 3022
  derived and/or modified protein sequence (wt) from hemagglutinin__InfluenzaA__ADE45507

SEQ ID NO: 4512 - protein, 566 aa, Artificial Sequence; identical to SEQ ID NO: 3022
  derived and/or modified protein sequence (wt) from hemagglutinin__InfluenzaA__ADE45509

SEQ ID NO: 4513 - protein, 566 aa, Artificial Sequence; identical to SEQ ID NO: 3467
  derived and/or modified protein sequence (wt) from hemagglutinin__InfluenzaA__ADE45511

SEQ ID NO: 4514 - protein, 566 aa, Artificial Sequence
  derived and/or modified protein sequence (wt) from hemagglutinin__InfluenzaA__ADE45513
MKAILVVLLYTFATANADTLCIGYHANNSTDTVDTVLEKNVTVTHSVNLLEDKHNGKLCKLRGVAPLHLGKCNIAGWILGNPECESLSTASSWSYIVETSSSDNGTCYPGDFIDYEELREQLSSVSSFERFEIFPKTSSWPNHDPNKGVTAACPHAGAKSFYKNLIWLVKKGNSYPKLSKSYINDKGKEVLVLWGIHHPSTSADQQSLYQNADAYAFVGTSRYSKKFKPEIAIRPKVRDQEGRINYYWTLVEPGDKIIFEATGNLVVPRYAFAMERNAGSGIIISDTPAHDCNTTCQTPKGAINTSLPFQNIHPITIGKCPKYVKSTKLRLATGLRNVPSIQSRGLFGAIAGFIEGGWTGMVDGWYGYHHQNEQGSGYAADLKSTQNAIDEITNKVNSVIEKMNTQFTAVGKEFNHLEKRIENLNKKVDDGFLDIWTYNAELLVLLENERTLDYHDSNVKNLYEKVRSQLKNNAKEIGNGCFEFYHKCDNTCMESVKNGTYDYPKYSEEAKLNREEIDGVKLESTRIYQILAIYSTVASSLVLVVSLGAISFWMCSNGSLQCRICI

SEQ ID NO: 4515 - protein, 566 aa, Artificial Sequence
  derived and/or modified protein sequence (wt) from hemagglutinin__InfluenzaA__ADE75388
MKAILVVLLYTFATANADTLCIGYHANNSTDTVDTVLEKNVTVTHSVNLLEDKHNGKLCKLRGVAPLHLGKCNIAGWILGNPECESLSTASSWSYIVETSSSENGTCYPGDFIDYEELREQLSSVSSFERFEIFPKTSSWPNHDSNKGVTAACPHAGAKSFYKNLIWLVKKGNSYPKLSKSYINDKGKEVLVLWGIHHPSTSADQQSLYQNADAYVFVGTSRYSKKFKPEIAIRPKVRDQEGRMNYYWTLVEPGDKITFEATGNLVVPRYAFAMERNAGSGIIISDTPVHDCNTTCQTPKGAINTSLPFQNIHPITIGKCPKYVKSTKLRLATGLRNVPSIQSRGLFGAIAGFIEGGWTGMVDGWYGYHHQNEQGSGYAADLKSTQNAIDEITNKVNSVIEKMNTQFTAVGKEFNHLEKRIENLNKKVDDGFLDIWTYNAELLVLLENERTLDYHDSNVKNLYEKVRSQLKNNAKEIGNGCFEFYHKCDNTCMESVKNGTYDYPKYSEEAKLNREEIDGVKLESTRIYQILAIYSTVASSLVLVVSLGAISFWMCSNGSLQCRICI

SEQ ID NO: 4516 - protein, 566 aa, Artificial Sequence; identical to SEQ ID NO: 2669
  derived and/or modified protein sequence (wt) from hemagglutinin__InfluenzaA__ADE75390

SEQ ID NO: 4517 - protein, 566 aa, Artificial Sequence; identical to SEQ ID NO: 2669
  derived and/or modified protein sequence (wt) from hemagglutinin__InfluenzaA__ADF10067

SEQ ID NO: 4518 - protein, 566 aa, Artificial Sequence; identical to SEQ ID NO: 2669
  derived and/or modified protein sequence (wt) from hemagglutinin__InfluenzaA__ADF10077

SEQ ID NO: 4519 - protein, 566 aa, Artificial Sequence
  derived and/or modified protein sequence (wt) from hemagglutinin__InfluenzaA__ADF10087
MKAILVVLLYTFATANADTLCIGYHANNSTDTVDTVLEKNVTVTHSVNLLEDKHNGKLCKLRGVAPLHLGKCNIAGWILGNPECESLSTASSWSYIVETSSSDNGTCYPGDFIDYEELREQLSSVSSFERFEIFPKTSSWPNHDSNKGVTAACPHAGAKSFYKNLIWLVKKGNSYPKLSKSYINDKGKEVLVLWGIHHPSTSADQQSLYQNADAYVFVGTSRYSKKFKPEIAIRPKVRDQEGRMNYYWTLVEPGDKITFEATGNLVVPRYAFAMKRNAGSGIIISDTPVHDCNTTCQTPKGAINTSLPFQNIHPITIGKCPKYVKSTKLRLATGLRNVPSIQSRGLFGAIAGFIEGGWTGMVDGWYGYHHQNEQGSGYAADLKSTQNAIDEITNKVNSVIEKMNTQFTAVGKEFNHLEKRIENLNKKVDDGFLDIWTYNAELLVLLENERTLDYHDSNVKNLYEKVRNQLKNNAKEIGNGCFEFYHKCDNTCMESVKNGTYDYPKYSEEAKLNREEIDGVKLESTRIYQILAIYSTVASSLVLVVSLGAISFWMCSNGSLQCRICI

SEQ ID NO: 4520 - protein, 566 aa, Artificial Sequence
  derived and/or modified protein sequence (wt) from hemagglutinin__InfluenzaA__ADF10097
MEAILVVLLYTFATANADTLCIGYHANNSTDTVDTVLEKNVTVTHSVNLLEDKHNGKLCKLRGVAPLHLGKCNIAGWILGNPECESLSTASSWSYIVETSSSDNGTCYPGDFIDYEELREQLSSVSSFERFEIFPKTSSWPNHDSNKGVTAACPHAGAKSFYKNLIWLVKKGNSYPKLSKSYINDKGKEVLVLWGIHHPSTSADQQSLYQNADAYVFVGSSKYSKKFKPEIAIRPKVRDQEGRMNYYWTLVEPGDKITFEATGNLVVPRYAFAMERNAGSGIIISDTPVHDCNTTCQTPKGAINTSLPFHNIHPITIGKCPKYVKSTKLRLATGLRNVPSIQSRGLFGAIAGFIEGGWTGMVDGWYGYHHQNEQGSGYAADLKSTQNAIDEITNKVNSVIEKMNTQFTAVGKEFNHLEKRIENLNKKVDDGFLDIWTYNAELLVLLENERTLDYHDSNVKNLYEKVRSQLKNNAKEIGNGCFEFYHKCDNTCMESVKNGTYDYPKYSEEAKLNREEIDGVKLESTKIYQILAIYSTVASSLVLVVSLGAISFWMCSNGSLQCRICI

SEQ ID NO: 4521 - protein, 566 aa, Artificial Sequence
  derived and/or modified protein sequence (wt) from hemagglutinin__InfluenzaA__ADF10107
MEAILVVLLYTFATANADTLCIGYHANNSTDTVDTVLEKNVTVTHSVNLLEDKHNGKLCKLRGVAPLHLGKCNIAGWILGNPECESLSTASSWSYIVETSSSDNGTCYPGDFIDYEELREQLSSVSSFERFEIFPKTSSWPNHDSNKGVTAACPHAGAKSFYKNLIWLVKKGNSYPKLSKSYINDKGKEVLVLWGIHHPPTSADQQSLYQNADAYVFVGSSKYSKKFKPEIAIRPKVRDQEGRMNYYWTLVEPGDKITFEATGNLVVPRYAFAMERNAGSGIIISDTPAHDCNTTCQTPKGAINTSLPFHNIHPITIGKCPKYVKSTKLRLATGLRNVPSIQSRGLFGAIAGFIEGGWTGMVDGWYGYHHQNEQGSGYAADLKSTQNAIDEITNKVNSVIEKMNTQFTAVGKEFNHLEKRIENLNKKVDDGFLDIWTYNAELLVLLENERTLDYHDSNVKNLYEKVRSQLKNNAKEIGNGCFEFYHKCDNTCMESVKNGTYDYPKYSEEAKLNREEIDGVKLESTKIYQILAIYSTVASSLVLVVSLGAISFWMCSNGSLQCRICI

SEQ ID NO: 4522 - protein, 566 aa, Artificial Sequence; identical to SEQ ID NO: 2669
  derived and/or modified protein sequence (wt) from hemagglutinin__InfluenzaA__ADF10117

SEQ ID NO: 4523 - protein, 566 aa, Artificial Sequence; identical to SEQ ID NO: 4373
  derived and/or modified protein sequence (wt) from hemagglutinin__InfluenzaA__ADF10127

SEQ ID NO: 4524 - protein, 566 aa, Artificial Sequence; identical to SEQ ID NO: 2669
  derived and/or modified protein sequence (wt) from hemagglutinin__InfluenzaA__ADF10137

SEQ ID NO: 4525 - protein, 566 aa, Artificial Sequence
  derived and/or modified protein sequence (wt) from hemagglutinin__InfluenzaA__ADF10154
MKAILVVLLYTFATANADTLCIGYHANNSTDTVDTVLEKNVTVTHSVNLLEDKHNGKLCKLRGVAPLHLGKCNIAGWILGNPECESLSTASSWSYIVETSSSDNGTCYPGDFIDYEELREQLSSVSSFERFEIFPKTSSWPDHDSNKGVTAACPHAGAKSFYKNLIWLVKKGNSYPKLSKSYINDKGKEVLVLWGIHHPSTSADQQSLYQNADAYVFVGTSRYSKKFKPEIAIRPKVREQEGRMNYYWTLVEPGDKITFEATGNLVVPRYAFAMERNAGSGIIISDTPVHDCNTTCQTPKGAINTSLPFQNIHPITIGKCPKYVKSTKLRLATGLRNVPSIQSRGLFGAIAGFIEGGWTGMVDGWYGYHHQNEQGSGYAADLKSTQNAIDEITNKVNSVIEKMNTQFTAVGKEFNHLEKRIENLNKKVDDGFLDIWTYNAELLVLLENERTLDYHDSNVKNLYERVRSQLKNNAKEIGNGCFEFYHKCDNTCMESVKNGTYDYPKYSEEAKLNREEIDGVKLESTRIYQILAIYSTVASSLVLVVSLGAISFWMCSNGSLQCRICI

SEQ ID NO: 4526 - protein, 566 aa, Artificial Sequence
  derived and/or modified protein sequence (wt) from hemagglutinin__InfluenzaA__ADF10174
MKAILVVLLYTFATANADTLCIGYHANNSTDTVDTVLEKNVTVTHSVNLLEDKHNGKLCKLRGVAPLHLGKCNIAGWILGNPECESLSTASSWSYIVETSSSDNGTCYPGDFIDYEELREQLSSVSSFERFEIFPKTSSWPNHDSNKGVTAACPHAGAKSFYKNLIWLVKKGNSYPKLSKSYINDKGKEVLVLWGIHHPSTSADQQSLYQNADAYVFVGTSRYSKKFKPEIAIRPKVREQEGRMNYYWTLVEPGDKITFEATGNLVVPRYAFAMERNAGSGIIISDTPVHDCNTTCQTPKGAINTSLPFQNIHPITIGKCPKYVKSTKLRLATGLRNVPSIQSRGLFGAIAGFIEGGWTGMVDGWYGYHHQNEQGSGYAADLKSTQNAIDEITNKVNSVIEKMNTQFTAVGKEFNHLEKRIENLNKKVDDGFLDIWTYNAELLVLLENERTLDYHDSNVKNLYERVRSQLKNNAKEIGNGCFEFYHKCDNTCMESVKNGTYDYPKYSEEAKLNREEIDGVKLESTRIYQILAIYSTVASSLVLVVSLGAISFWMCSNGSLQCRICI

SEQ ID NO: 4527 - protein, 566 aa, Artificial Sequence; identical to SEQ ID NO: 4526
  derived and/or modified protein sequence (wt) from hemagglutinin__InfluenzaA__ADF10190

SEQ ID NO: 4528 - protein, 566 aa, Artificial Sequence; identical to SEQ ID NO: 4373
  derived and/or modified protein sequence (wt) from hemagglutinin__InfluenzaA__ADF10237

SEQ ID NO: 4529 - protein, 566 aa, Artificial Sequence; identical to SEQ ID NO: 4526
  derived and/or modified protein sequence (wt) from hemagglutinin__InfluenzaA__ADF10262

SEQ ID NO: 4530 - protein, 566 aa, Artificial Sequence
  derived and/or modified protein sequence (wt) from hemagglutinin__InfluenzaA__ADF10288
MKAILVVLLYTFATANADTLCIGYHANNSTDTVDTVLEKNVTVTHSVNLLEDKHNGKLCKLRGVAPLHLGKCNIAGWILGNPECESLSTASSWSYIVETSSSDNGTCYPGDFIDYEELREQLSSVSSFERFEIFPKTSSWPNHDSNKGVTAACPHAGAKSFYKNLIWLVKKGNSYPKLSKSYINDKGKEVLVLWGIHHPSTSADQQSLYQNADAYVFVGTSRYSKKFKPEIAIRPKVREQEGRMNYYWTLVEPGDKITFEATGNLVVPRYAFAMERNAGSGIIISDTPVHDCNTTCQTPKGAINTSLPFQNIHPITIGKCPKYVKSTKLRLATGLRNVPSIQSRGLFGAIAGFIEGGWTGMVDGWYGYHHQNEQGSGYAADLKSTQNAIDEITNKVNSVIEKMNTQFTAVGKEFNHLEKRIENLNKKVDDGFLDIWTYNAELLVLLENERTLDYHDSNVKNLYERVRSQLKNNAKEIGNGCFEFYHKCDNTCMESVKNGTYDYPKYSEEAKLNREEIDGVKLESTRIYQILAIYSTVASSLVLVVSLGAISFWMCSNGSLQCRVCI

SEQ ID NO: 4531 - protein, 566 aa, Artificial Sequence; identical to SEQ ID NO: 4373
  derived and/or modified protein sequence (wt) from hemagglutinin__InfluenzaA__ADF10302

SEQ ID NO: 4532 - protein, 566 aa, Artificial Sequence; identical to SEQ ID NO: 4373
  derived and/or modified protein sequence (wt) from hemagglutinin__InfluenzaA__ADF10335

SEQ ID NO: 4533 - protein, 566 aa, Artificial Sequence; identical to SEQ ID NO: 4373
  derived and/or modified protein sequence (wt) from hemagglutinin__InfluenzaA__ADF10359

SEQ ID NO: 4534 - protein, 566 aa, Artificial Sequence; identical to SEQ ID NO: 4526
  derived and/or modified protein sequence (wt) from hemagglutinin__InfluenzaA__ADF10369

SEQ ID NO: 4535 - protein, 566 aa, Artificial Sequence; identical to SEQ ID NO: 4526
  derived and/or modified protein sequence (wt) from hemagglutinin__InfluenzaA__ADF10390

SEQ ID NO: 4536 - protein, 566 aa, Artificial Sequence; identical to SEQ ID NO: 4373
  derived and/or modified protein sequence (wt) from hemagglutinin__InfluenzaA__ADF10528

SEQ ID NO: 4537 - protein, 566 aa, Artificial Sequence; identical to SEQ ID NO: 4526
  derived and/or modified protein sequence (wt) from hemagglutinin__InfluenzaA__ADF10598

SEQ ID NO: 4538 - protein, 566 aa, Artificial Sequence; identical to SEQ ID NO: 4526
  derived and/or modified protein sequence (wt) from hemagglutinin__InfluenzaA__ADF10670

SEQ ID NO: 4539 - protein, 566 aa, Artificial Sequence; identical to SEQ ID NO: 4526
  derived and/or modified protein sequence (wt) from hemagglutinin__InfluenzaA__ADF10724

SEQ ID NO: 4540 - protein, 566 aa, Artificial Sequence; identical to SEQ ID NO: 4373
  derived and/or modified protein sequence (wt) from hemagglutinin__InfluenzaA__ADF10757

SEQ ID NO: 4541 - protein, 566 aa, Artificial Sequence
  derived and/or modified protein sequence (wt) from hemagglutinin__InfluenzaA__ADF10828
MKAILVVLLYTFATANADTLCIGYHANNSTDTVDTVLEKNVTVTHSVNLLEDKHNGKLCKLRGVAPLHLGKCNIAGWILGNPECESLSTASSWSYIVETSSSDNGTCYPGDFIDYEELREQLSSVSSFERFEIFPKTSSWPNHDSNKGVTAACPHAGAKSFYKNLIWLVKKGNSYPKLSKSYINDKGKEVLVLWGIHHPSTSTDQQSLYQNADAYVFVGTSRYSKKFKPEIAIRPKVRDQEGRMNYYWTLVEPGDKITFEATGNLVVPRYAFAMERNAGSGIIISDTPVHDCNTTCQTPKGAINTSLPFQNIHPITIGKCPKYVKSTKLRLATGLRNVPSIQSRGLFGAIAGFIEGGWTGMVDGWYGYHHQNEQGSGYAADLKSTQNAIDKITNKVNSVIEKMNTQFTAVGKEFNHLEKRIENLNKKVDDGFLDIWTYNAELLVLLENERTLDYHDSNVKNLYEKVRSQLKNNAKEIGNGCFEFYHKCDNTCMESVKNGTYDYPKYSEEAKLNREEIDGVKLESTRIYQILAIYSTVASSLVLVVSLGAISFWMCSNGSLQCRICI

SEQ ID NO: 4542 - protein, 566 aa, Artificial Sequence; identical to SEQ ID NO: 2669
  derived and/or modified protein sequence (wt) from hemagglutinin__InfluenzaA__ADF10874

SEQ ID NO: 4543 - protein, 566 aa, Artificial Sequence; identical to SEQ ID NO: 3292
  derived and/or modified protein sequence (wt) from hemagglutinin__InfluenzaA__ADF10929

SEQ ID NO: 4544 - protein, 566 aa, Artificial Sequence; identical to SEQ ID NO: 3292
  derived and/or modified protein sequence (wt) from hemagglutinin__InfluenzaA__ADF10996

SEQ ID NO: 4545 - protein, 566 aa, Artificial Sequence; identical to SEQ ID NO: 2669
  derived and/or modified protein sequence (wt) from hemagglutinin__InfluenzaA__ADF27367

SEQ ID NO: 4546 - protein, 566 aa, Artificial Sequence; identical to SEQ ID NO: 2669
  derived and/or modified protein sequence (wt) from hemagglutinin__InfluenzaA__ADF27369

SEQ ID NO: 4547 - protein, 566 aa, Artificial Sequence
  derived and/or modified protein sequence (wt) from hemagglutinin__InfluenzaA__ADF27370
MKAILVILLYTFATANADTLCIGYHANNSTDTVDTVLEKNVTVTHSVNLLEDKHNGKLCKLRGVAPLHLGKCNIAGWILGNPECESLSTASSWSYIVETSSSDNGTCYPGDFIDYEELREQLSSVSSFERFEIFPKTSSWPNHDSNKGVTAACPHAGAKSFYKNLIWLVKKGNSYPKLSKSYINDKGKEVLVLWGIHHPSTSADQQSLYQNADAYVLVGTSRYSKKFKPEIAIRPKVRDQEGRMNYYWTLVEPGDKITFEATGNLVVPRYAFAMERNAGSGIIISDTPVHDCNTTCQTPKGAINTSLPFQNIHPITIGKCPKYVKSTKLRLATGLRNVPSIQSRGLFGAIAGFIEGGWTGMVDGWYGYHHQNEQGSGYAADLKSTQNAIDKITNKVNSVIEKMNTQFTAVGKEFNHLEKRIENLNKKVDDGFLDIWTYNAELLVLLENERTLDYHDSNVKNLYEKVRSQLKNNAKEIGNGCFEFYHKCDNTCMESVKNGTYDYPKYSEEAKLNREEIDGVKLESTRIYQILAIYSTVASSLVLVVSLGAISFWMCSNGSLQCRICI

SEQ ID NO: 4548 - protein, 566 aa, Artificial Sequence; identical to SEQ ID NO: 3841
  derived and/or modified protein sequence (wt) from hemagglutinin__InfluenzaA__ADF27371

SEQ ID NO: 4549 - protein, 566 aa, Artificial Sequence
  derived and/or modified protein sequence (wt) from hemagglutinin__InfluenzaA__ADF27372
MKAILVVLLYTFATANADTLCIGYHTNNSTDTVDTVLEKNVTVTHSVNLLEDKHNGKLCKLRGVAPLHLGKCNIAGWILGNPECESLSTASSWSYIVETSSSDNGTCYPGDFIDYEELREQLSSVSSFERFEIFPKTSSWPNHDSNKGVTAACPHAGAKSFYKNLIWLVKKGNSYPKLSKSYINDKGKEVLVLWGIHHPSTSADQQSLYQNADAYVFVGTSRYSKKFKPEIAIRPKVRDQEGRMNYYWTLVEPGDKITFEATGNLVVPRYAFAMERNAGSGIIISDTPVHDCNTTCQTPKGAINTSLPFQNIHPITIGKCPKYVKSTKLRLATGLRNVPSIQSRGLFGAIAGFIEGGWTGMVDGWYGYHHQNEQGSGYAADLKSTQNAIDKITNKVNSVIEKMNTQFTAVGKEFNHLEKRIENLNKKVDDGFLDIWTYNAELLVLLENERTLDYHDSNVKNLYEKVRSQLKNNAKEIGNGCFEFYHKCDNTCMESVKNGTYDYPKYSEEAKLNREEIDGVKLESTRIYQILAIYSTVASSLVLVVSLGAISFWMCSNGSLQCRICI

SEQ ID NO: 4550 - protein, 566 aa, Artificial Sequence
  derived and/or modified protein sequence (wt) from hemagglutinin__InfluenzaA__ADF27373
MEAILVVLLYTFATANADTLCIGYHANNSTDTVDTVLEKNVTVTHSVNLLEDKHNGKLCKLRGVAPLHLGKCNIAGWILGNPECESLSTASSWSYIVETSSSDNGTCYPGDFIDYEELIEQLSSVSSFERFEIFPKTSSWPNHDSNKGVTAACPHAGAKSFYKNLIWLVKKGNSYPKLSKSYINDKGKEVLVLWGIHHPSTSADQQSLYQNADAYVFVGSSRYSKKFKPEIAIRPKVRDQEGRMNYYWTLVEPGDKITFEATGNLVVPRYAFAMERNAGSGIIISDTPVHDCNTTCQTPKGAINTSLPFHNIHPITIGKCPKYVKSTKLRLATGLRNVPSIQTRGLFGAIAGFIEGGWTGMVDGWYGYHHQNEQGSGYAADLKSTQNAIDEITNKVNSVIEKMNTQFTAVGKEFNHLEKRIENLNKKVDDGFLDIWTYNAELLVLLENERTLDYHDSNVKNLYEKVRSQLKNNAKEIGNGCFEFYHKCDNTCMESVKNGTYDYPKYSEEAKLNREEIDGVKLESTRIYQILAIYSTVASSLVLVVSLGAISFWMCSNGSLQCRICI

SEQ ID NO: 4551 - protein, 566 aa, Artificial Sequence; identical to SEQ ID NO: 2911
  derived and/or modified protein sequence (wt) from hemagglutinin__InfluenzaA__ADF27374

SEQ ID NO: 4552 - protein, 566 aa, Artificial Sequence
  derived and/or modified protein sequence (wt) from hemagglutinin__InfluenzaA__ADF27375
MEAILVVLLYTFATANADTLCIGYHANNSTDTVDTVLEKNVTVTHSVNLLEDKHNGKLCKLRGVAPLHLGKCNIAGWILGNPECESLSTASSWSYIVETSSSDNGTCYPGDFIDYEELREQLSSVSSFERFEIFPKTSSWPNHDSNKGVTAACPHAGAKSFYKNLIWLVKKGNSYPKLSKSYINDKGKEVLVLWGIHHPSTSADQQSLYQNADAYVFVGSSRYSKKFKPEIAIRPKVRDQEGRMNYYWTLVEPGDKITFEATGNLVVPRYAFAMERNAGSGIIISDTPVHDCNTTCQTPKGAINTSLPFHNIHPITIGKCPKYVKSTKLRLATGLRNVPSIQSRGLFGAIAGFIEGGWTGMVDGWYGYHHQNEQGSGYAADQKSTQNAIDEITNKINSVIEKMNTQFTAVGKEFNHLEKRIENLNKKVDDGFLDIWTYNAELLVLLENERTLDYHDSNVKNLYEKVRSQLKNNAKEIGNGCFEFYHKCDNTCMESVKNGTYDYPKYSEEAKLNREEIDGVKLESTRIYQILAIYSTVASSLVLVVSLGAISFWMCSNGSLQCRICI

SEQ ID NO: 4553 - protein, 566 aa, Artificial Sequence
  derived and/or modified protein sequence (wt) from hemagglutinin__InfluenzaA__ADF27376
MKAILVVLLYTFVTANADTLCIGYHANNSTDTVDTVLEKNVTVTHSVNLLEDKHNGKLCKLRGVAPLHLGKCNIAGWILGNPECESLSTASSWSYIVETSNSDNGTCYPGDFIDYEELREQLSSVSSFERFEIFPKTSSWPNHDSNKGVTAACPHAGAKSFYKNLIWLVKKGNSYPKLSKSYINDKGKEVLVLWGIHHPSTSADQQSLYQNADAYVFVGTSRYSKKFKPEIEIRPKVRDQEGRMNYYWTLVEPGDKITFEATGNLVVPRYAFAMERNAGSGIIISDTPVHDCNTTCQTPKGAINTSLPFQNIHPITIGKCPKYVKSTKLRLATGLRNVPSIQSRGLFGAIAGFIEGGWTGMVDGWYGYHHQNEQGSGYAADLKSTQNAIDKITNKVNSVIEKMNTQFTAVGKEFNHLEKRIENLNKKVDDGFLDIWTYNAELLVLLENERTLDYHDSNVKNLYEKVRSQLKNNAKEIGNGCFEFYHKCDNTCMESVKNGTYDYPKYSEEAKLNREEIDGVKLESTRIYQILAIYSTVASSLVLVVSLGAISFWMCSNGSLQCRICI

SEQ ID NO: 4554 - protein, 566 aa, Artificial Sequence
  derived and/or modified protein sequence (wt) from hemagglutinin__InfluenzaA__ADF27378
MKAILVVLLYTFVTANADTLCIGYHANNSTDTVDTVLEKNVTVTHSVNLLEDKHNGKLCKLRGVAPLHLGKCNIAGWILGNPECESLSTASSWSYIVETSNSDNGTCYPGDFIDYEELREQLSSVSSFERFEIFPKTSSWPNHDSNKGVTAACPHAGAKSFYKNLIWLVKKGNSYPKLSKSYINDKGKEVLVLWGIHHPSTSADQQSLYQNADAYVFVGTSRYSKKFKPEIAIRPKVRDQEGRMNYYWTLVEPGDKITFEATGNLVVPRYAFAMERNAGSGIIISDTPVHDCNTTCQTPKGAINTSLPFQNIHPITIGKCPKYVKSTKLRLATGLRNVPSIQSRGLFGAIAGFIEGGWTGMVDGWYGYHHQNEQGSGYAADLKSTQNAIDKITNKVNSVIEKMNTQFTAVGKEFNHLEKRIENLNKKVDDGFLDIWTYNAELLVLLENERTLDYHDSNVKNLYEKVRSQLKNNAKEIGNGCFEFYHKCDNTCMESVKNGTYDYPKYSEEAKLNREEIDGVKLESTRIYQILAIYSTVASSLVLVVSLGAISFWMCSNGSLQCRICI

SEQ ID NO: 4555 - protein, 566 aa, Artificial Sequence
  derived and/or modified protein sequence (wt) from hemagglutinin__InfluenzaA__ADF27389
MKAILVVLLYTFATANADTLCIGYHANNSTDTVDTVLEKNVTVTHSVNLLEDKHNGKLCKLRGVAPLHLGKCNIAGWILGNPECESLSTASSWSYIVETSSSDNGTCYPGDFIDYEELREQLSSVSSFERFEIFPKTSSWPNHDSNKGVTAACPHAGAKSFYKNLIWLVKKGNSYPKLSKSYINDKGKEVLVLWGIHHPSTSADQQSLYQNADAYVFVGTSRYSKKFKPEIAIRPKVRDQEGRMNYYWTLVEPGDKITFEATGNLVVPRYAFAMERNAGSGIITSDTPVHDCNTTCQTPKGAINTSLPFQNIHPITIGKCPKYVKSTKLRLATGLRNVPSIQSRGLFGAIAGFIEGGWTGMVDGWYGYHHQNEQGSGYAADLKSTQNAIDEITNKVNSVIEKMNTQFTAVGKEFNHLEKRIENLNKKVDDGFLDIWTYNAELLVLLENERTLDYHDSNVKNLYEKVRSQLKNNAKEIGNGCFEFYHKCDNTCMESVKNGTYDYPKYSEEAKLNREEIDGVKLESTRIYQILAIYSTVASSLVLVVSLGAISFWMCSNGSLQCRICI

SEQ ID NO: 4556 - protein, 566 aa, Artificial Sequence
  derived and/or modified protein sequence (wt) from hemagglutinin__InfluenzaA__ADF27399
MKAILVVLLYTFATANADTLCIGYHANNSTDTVDTVLEKNVTVTHSVNLLEDKHNGKLCKLRGVAPLHLGKCNIAGWILGNPECESLSTASSWSYIVETSSSDNGTCYPGDFIDYEELREQLSSVSSFERFEIFPKTSSWPNHDSNKGVTAACPHAGAKSFYKNLIWLVKKGNSYPKLSKSYINDKGKEVLVLWGIHHPSTSADQQSLYQNADAYVFVGTSRYSKKFKPEIAIRPKVRDQEGRMNYYWTLVEPGDKITFEATGNLVVPRYAFAMERNAGSGIIISDTPVHDCNTTCQTPKGAINTSLPFQNIHPITIGECPKYVKSTKLRLATGLRNVPSIQSRGLFGAIAGFIEGGWTGMVDGWYGYHHQNEQGSGYAADLKSTQNAIDEITNKVNSVIEKMNTQFTAVGKEFNHLEKRIENLNKKVDDGFLDIWTYNAELLVLLENERTLDYHDSNVKNLYEKVRSQLKNNAKEIGNGCFEFYHKCDNTCMESVKNGTYDYPKYSEEAKLNREEIDGVKLESTRIYQILAIYSTVASSLVLVVSLGAISFWMCSNGSLQCRICI

SEQ ID NO: 4557 - protein, 566 aa, Artificial Sequence; identical to SEQ ID NO: 3833
  derived and/or modified protein sequence (wt) from hemagglutinin__InfluenzaA__ADF27409

SEQ ID NO: 4558 - protein, 566 aa, Artificial Sequence; identical to SEQ ID NO: 4541
  derived and/or modified protein sequence (wt) from hemagglutinin__InfluenzaA__ADF27419

SEQ ID NO: 4559 - protein, 566 aa, Artificial Sequence
  derived and/or modified protein sequence (wt) from hemagglutinin__InfluenzaA__ADF27429
MKAILVVLLYTFATANADTLCIGYHANNSTDTVDTVLEKNVTVTHSVNLLEDKHNGKLCKLRGVAPLHLGKCNIAGWILGNPECESLSTASSWSYIVETSSSDNGTCYPGDFIDYEELREQLSSVSSFERFEIFPKTSSWPNHDSNKGVTAACPHAGAKSFYKNLIWLVKKGNSYPKLSKFYINDKGKEVLVLWGIHHPSTSADQQSLYQNADAYVFVGTSRYSKKFKPEIAIRPKVRDQEGRMNYYWTLVEPGDKITFEATGNLVVPRYAFAMERNAGSGIIISDTPVHDCNTTCQTPKGAINTSLPFQNIHPITIGKCPKYVKSTKLRLATGLRNVPSIQSRGLFGAIAGFIEGGWTGMVDGWYGYHHQNEQGSGYAADLKSTQNAIDKITNKVNSVIEKMNTQFTAVGKEFNHLEKRIENLNKKVDDGFLDIWTYNAELLVLLENERTLDYHDSNVKNLYEKVRSQLKNNAKEIGNGCFEFYHKCDNTCMKSVKNGTYDYPKYSEEAKLNREEIDGVKLESTRIYQILAIYSTVASSLVLVVSLGAISFWMCSNGSLQCRICI

SEQ ID NO: 4560 - protein, 566 aa, Artificial Sequence; identical to SEQ ID NO: 2669
  derived and/or modified protein sequence (wt) from hemagglutinin__InfluenzaA__ADF27439

SEQ ID NO: 4561 - protein, 566 aa, Artificial Sequence
  derived and/or modified protein sequence (wt) from hemagglutinin__InfluenzaA__ADF27449
MKAILVVLLYTFATVNADTLCIGYHANNSTDTVDTVLEKNVTVTHSVNLLEDKHNGKLCKLRGVAPLHLGKCNIAGWILGNPECESLSTASSWSYIVETSSSDNGTCYPGDFIDYEELREQLSSVSSFERFEIFPKTSSWPNHDSNKGVTAACPHAGAKSFYKNLIWLVKKGNSYPKLSKSYINDKGKEVLVLWGIHHPSTSADQQSLYQNADAYVFVGTSRYSKKFKPEIAIRPKVRDQEGRMNYYWTLVEPGDKITFEATGNLVVPRYAFAMERNAGSGIIISDTPVHDCNTTCQTPKGAINTSLPFQNIHPITIGKCPKYVKSTKLRLATGLRNIPSIQSRGLFGAIAGFIEGGWTGMVDGWYGYHHQNEQGSGYAADLKSTQNAIDEITNKVNSVIEKMNTQFTAVGKEFNHLEKRIENLNKKVDDGFLDIWTYNAELLVLLENERTLDYHDSNVKNLYEKVRSQLKNNAKEIGNGCFEFYHKCDNTCMESVKNGTYDYPKYSEEAKLNREEIDGVKLESTRIYQILAIYSTVASSLVLVVSLGAISFWMCSNGSLQCRICI

SEQ ID NO: 4562 - protein, 566 aa, Artificial Sequence; identical to SEQ ID NO: 3829
  derived and/or modified protein sequence (wt) from hemagglutinin__InfluenzaA__ADF27459

SEQ ID NO: 4563 - protein, 566 aa, Artificial Sequence; identical to SEQ ID NO: 2669
  derived and/or modified protein sequence (wt) from hemagglutinin__InfluenzaA__ADF27469

SEQ ID NO: 4564 - protein, 566 aa, Artificial Sequence
  derived and/or modified protein sequence (wt) from hemagglutinin__InfluenzaA__ADF27479
MKAILVVLLYTFATANADTLCIGYHANNSTDTVDTVLEKNVTVTHSVNLLEDKHNGKLCKLRGVAPLHLGKCNIAGWILGNPECESLSTASSWSYIVETSSSDNGTCYPGDFIDYEELREQLSSVSSFERFEIFPKTSSWPNHDSNKGVTAACPHAGAKSFYKNLIWLVKKGNSYPKLSKSYINDKGKEVLVLWGIHHPSTSADQQSLYQNADAYVFVGTSRYSKKFKPEIAIRPKVRDQEGRMNYYWTLVEPGDKITFEATGNLVVPRYAFAMERNAGSGIIISDTPVHDCNTTCQTPKGAINTSLPFQNIHPITIGKCPKYVKSTKLRLATGLRNVPSIHSRGLFGAIAGFIEGGWTGMVDGWYGYHHQNEQGSGYAADLKSTQNAIDKITNKVNSVIEKMNTQFTAVGKEFNHLEKRIENLNKKVDDGFLDIWTYNAELLVLLENERTLDYHDSNVKNLYEKVRSQLKNNAKEIGNGCFEFYHKCDNTCMESVKNGTYDYPKYSEEAKLNREEIDGVKLESTRIYQILAIYSTVASSLVLVVSLGAISFWMCSNGSLQCRICI

SEQ ID NO: 4565 - protein, 566 aa, Artificial Sequence
  derived and/or modified protein sequence (wt) from hemagglutinin__InfluenzaA__ADF27489
MKAILVVLLYTFATANADTLCIGYHANNSTDTVDTVLEKNVTVTHSVNLLEYKHNGKLCKLRGVAPLHLGKCNIAGWILGNPECESLSTASSWSYIVETSSSDNGTCYPGDFIDYEELREQLSSVSSFERFEIFPKTSSWPNHDSNKGVTAACPHAGAKSFYKNLIWLVKKGNSYPKLSKSYINDKGKEVLVLWGIHHPSTSADQQSLYQNADAYVFVGTSRYSKKFKPEIAIRPKVRDQEGRMNYYWTLVEPGDKITFEATGNLVVPRYAFAMERNAGSGIIISDTPVHDCNTTCQTPKGAINTSLPFQNIHPITIGECPKYVKSTKLRLATGLRNVPSIQSRGLFGAIAGFIEGGWTGMVDGWYGYHHQNEQGSGYAADLKSTQNAIDEITNKVNSVIEKMNTQFTAVGKEFNHLEKRIENLNKKVDDGFLDIWTYNAELLVLLENERTLDYHDSNVKNLYEKVRSQLKNNAKEIGNGCFEFYHKCDNTCMESVKNGTYDYPKYSEEAKLNREEIDGVKLESTRIYQILAIYSTVASSLVLVVSLGAISFWMCSNGSLQCRICI

SEQ ID NO: 4566 - protein, 566 aa, Artificial Sequence; identical to SEQ ID NO: 3833
  derived and/or modified protein sequence (wt) from hemagglutinin__InfluenzaA__ADF27499

SEQ ID NO: 4567 - protein, 566 aa, Artificial Sequence; identical to SEQ ID NO: 2669
  derived and/or modified protein sequence (wt) from hemagglutinin__InfluenzaA__ADF27509

SEQ ID NO: 4568 - protein, 566 aa, Artificial Sequence; identical to SEQ ID NO: 4266
  derived and/or modified protein sequence (wt) from hemagglutinin__InfluenzaA__ADF27529

SEQ ID NO: 4569 - protein, 566 aa, Artificial Sequence; identical to SEQ ID NO: 3841
  derived and/or modified protein sequence (wt) from hemagglutinin__InfluenzaA__ADF27539

SEQ ID NO: 4570 - protein, 566 aa, Artificial Sequence; identical to SEQ ID NO: 3841
  derived and/or modified protein sequence (wt) from hemagglutinin__InfluenzaA__ADF27549

SEQ ID NO: 4571 - protein, 566 aa, Artificial Sequence; identical to SEQ ID NO: 2669
  derived and/or modified protein sequence (wt) from hemagglutinin__InfluenzaA__ADF27559

SEQ ID NO: 4572 - protein, 566 aa, Artificial Sequence
  derived and/or modified protein sequence (wt) from hemagglutinin__InfluenzaA__ADF27569
MKAILVVLLYTFATANADTLCIGYHANNSTDTVDTVLEKNVTVTHSVNLLEDKHNGKLCKLRGVAPLHLGKCNIAGWILGNPECESLSTASSWSYIVETSSSDNGTCYPGDFIDYEELREQLSSVSSFERFEIFPKTSSWPNHDSNKGVTAACPHAGAKSFYKNLIWLVKKGNSYPKLSKSYINDKGKEVLVLWGIHHPSTSADQQSLYQNADAYVFVGTSRYSKKFKPEIAIRPKVRDQEGRVNYYWTLVEPGDKITFEATGNLVVPRYAFAMERNAGSGIIISDTPVHDCNTTCQTPKGAINTSLPFQNIHPITIGKCPKYVKSTKLRLATGLRNVPSIQSRGLFGAIAGFIEGGWTGMVDGWYGYHHQNEQGSGYAADLKSTQNAIDKITNKVNSVIEKMNTQFTAVGKEFNHLEKRIENLNKKVDDGFLDIWTYNAELLVLLENERTLDYHDSNVKNLYEKVRSQLKNNAKEIGNGCFEFYHKCDNTCMESVKNGTYDYPKYSEEAKLNREEIDGVKLESTRIYQILAIYSTVASSLVLVVSLGAISFWMCSNGSLQCRICI

SEQ ID NO: 4573 - protein, 566 aa, Artificial Sequence; identical to SEQ ID NO: 3841
  derived and/or modified protein sequence (wt) from hemagglutinin__InfluenzaA__ADF27579

SEQ ID NO: 4574 - protein, 566 aa, Artificial Sequence
  derived and/or modified protein sequence (wt) from hemagglutinin__InfluenzaA__ADF27589
MKAILVVLLYTFATANADTLCIGYHANNSTDTVDTVLEKNVTVTHSVNLLEDKHNGKLCKLRGVAPLHLGKCNIAGWILGNPECESLSTASSWSYIVETSSSDNGTCYPGDFIDYEELREQLSSVSSFERFEIFPKTSSWPNHDSNKGVTAACPHAGAKSFYKNLIWLVKKGNSYPKLSKSYINDKGKEVLVLWGIHHPSTSADQQSLYQNADAYVFVGTSRYSKKFKPEIAIRPKVRDQEGRMNYYWTLVEPGDKITFEATGNLVVPRYAFAMERNAGSGIIISDTSVHDCNTTCQTPKGAINTSLPFQNIHPITIGKCPKYVKSTKLRLATGLRNVPSIQSRGLFGAIAGFIEGGWTGMVDGWYGYHHQNEQGSGYAADLKSTQNAIDEITNKVNSVIEKMNTQFTAVGKEFNHLEKRIENLNKKVDDGFLDIWTYNAELLVLLENERTLDYHDSNVKNLYEKVRSQLKNNAKEIGNGCFEFYHKCDNTCMESVKNGTYDYPKYSEEAKLNREEIDGVKLESTRIYQILAIYSTVASSLVLVVSLGAISFWMCSNGSLQCRICI

SEQ ID NO: 4575 - protein, 566 aa, Artificial Sequence
  derived and/or modified protein sequence (wt) from hemagglutinin__InfluenzaA__ADF27599
MKAILVVLLYTFATANADTLCIGYHANNSTDTVDTVLEKNVTVTHSVNLLEDKHNGKLCKLRGVAPLHLGKCNIAGWILGNPECESLSTASSWSYIVETSSSDNGTCYPGDFIDYEELREQLSSVSSFERFEIFPKTSSWPNHDSNKGVTAACPHAGAKSFYKNLIWLVKKGNSYPKLSKSYINDKGKEVLVLWGIHHPSTSADQQSLYQNADAYVFVGTSRYSKKFKPEIAIRPKVRDQEGRMNYYWTLVEPGDKITFEATGNLVVPRYAFTMERNAGSGIIISDTPVHDCNTTCQTPKGAINTSLPFQNIHPITIGKCPKYVKSTKLRLATGLRNVPSIQSRGLFGAIAGFIEGGWTGMVDGWYGYHHQNEQGSGYAADLKSTQNAIDEITNKVNSVIEKMNTQFTAVGKEFNHLEKRIENLNKKVDDGFLDIWTYNAELLVLLENERTLDYHDSNVKNLYEKVRSQLKSNAKEIGNGCFEFYHKCDNTCMESVKNGTYDYPKYSEEAKLNREEIDGVKLESTRIYQILAIYSTVASSLVLVVSLGAISFWMCSNGSLQCRICI

SEQ ID NO: 4576 - protein, 566 aa, Artificial Sequence
  derived and/or modified protein sequence (wt) from hemagglutinin__InfluenzaA__ADF27609
MKAILVVLLYTFATANADTLCIGYHANNSTDTVDTVLEKNVTVTHSVNLLEDKHNGKLCKLRGVAPLHLGKCNIAGWILGNPECESLSTASSWSYIVETSSSDNGTCYPGDFIDYEELREQLSSVSSFERFEIFPKTSSWPNHDSNKGVTAACPQAGAKSFYKNLIWLVKKGNSYPKLSKSYINDKGKEVLVLWGIHHPSTSADQQSLYQNADAYVFVGTSRYSKKFKPEIAIRPKVRDQEGRMNYYWTLVEPGDKITFEATGNLVVPRYAFAMERNAGSGIIISDTPVHDCNTTCQTPKGAINTSLPFQNIHPITIGKCPKYVKSTKLRLATGLRNVPSIQSRGLFGAIAGFIEGGWTGMVDGWYGYHHQNEQGSGYAADLKSTQNAIDEITNKVNSVIEKMNTQFTAVGKEFNHLEKRIENLNKKVDDGFLDIWTYNAELLVLLENERTLDYHDSNVKNLYEKVRSQLKNNAKEIGNGCFEFYHKCDNTCMESVKNGTYDYPKYSEEAKLNREEIDGVKLESTRIYQILAIYSTVASSLVLVVSLGAISFWMCSNGSLQCRICI

SEQ ID NO: 4577 - protein, 566 aa, Artificial Sequence
  derived and/or modified protein sequence (wt) from hemagglutinin__InfluenzaA__ADF27619
MKAILVVLLYTFATANADTLCIGYHANNSTDTVDTVLEKNVTVTHSVNLLEDKHNGKLCKLRGVVPLHLGKCNIAGWILGNPECESLSTASSWSYIVETSSSDNGTCYPGDFIDYEELREQLSSVSSFERFEIFPKTSSWPNHDSNKGVTAACPHAGAKSFYKNLIWLVKKGNSYPKLSKSYINDKGKEVLVLWGIHHPSTSADQQSLYQNADAYVFVGTSRYSKKFKPEIAIRPKVRDQEGRMNYYWTLVEPGDKITFEATGNLVVPRYAFAMERNAGSGIIISDTPVHDCNTTCQTPKGAINTSLPFQNIHPITIGKCPKYVKSTKLRLATGLRNVPSIQSRGLFGAIAGFIEGGWTGMVDGWYGYHHQNEQGSGYAADLKSTQNAIDKITNKVNSVIEKMNTQFTAVGKEFNHLEKRIENLNKKVDDGFLDIWTYNAELLVLLENERTLDYHDSNVKNLYEKVRSQLKNNAKEIGNGCFEFYHKCDNTCMESVKNGTYDYPKYSEEAKLNREEIDGVKLESTRIYQILAIYSTVASSLVLVVSLGAISFWMCSNGSLQCRICI

SEQ ID NO: 4578 - protein, 566 aa, Artificial Sequence; identical to SEQ ID NO: 3841
  derived and/or modified protein sequence (wt) from hemagglutinin__InfluenzaA__ADF27629

SEQ ID NO: 4579 - protein, 566 aa, Artificial Sequence
  derived and/or modified protein sequence (wt) from hemagglutinin__InfluenzaA__ADF27649
MKAILVVLLYTFATANADTLCIGYHANNSTDTVDTVLEKNVTVTHSVNLLEDKHNGKLCKLRGVAPLHLGKCNIAGWILGNPECESLSTASSWSYIVETSSSDNGTCYPGDFIDYEELREQLSSVSSFERFEIFPKTSSWPNHDSNKGVTAACPHAGAKSFYKNLIWLVKKGNSYPKLSKSYINDKGKEVLVLWGIHHPSTSADQQSLYQNADAYVFVGTSRYSKKFKPEIAIRPKVRDQEGRMNYYWTLVEPGDKITFEATGNLVVPRYAFAMERNAGSGIIISDTPVHDCNTTCQTPKGAINTSLPFQNIHPITIGKCPKYVKSTKLRLATGLRNVPSIQPRGLFGAIAGFIEGGWTGMVDGWYGYHHQNEQGSGYAADLKSTQNAIDKITNKVNSVIEKMNTQFTAVGKEFNHLEKRIENLNKKVDDGFLDIWTYNAELLVLLENERTLDYHDSNVKNLYEKVRSQLKNNAKEIGNGCFEFYHKCDNTCMESVKNGTYDYPKYSEEAKLNREEIDGVKLESTRIYQILAIYSTVASSLVLVVSLGAISFWMCSNGSLQCRICI

SEQ ID NO: 4580 - protein, 566 aa, Artificial Sequence; identical to SEQ ID NO: 3841
  derived and/or modified protein sequence (wt) from hemagglutinin__InfluenzaA__ADF27659

SEQ ID NO: 4581 - protein, 566 aa, Artificial Sequence; identical to SEQ ID NO: 4318
  derived and/or modified protein sequence (wt) from hemagglutinin__InfluenzaA__ADF27669

SEQ ID NO: 4582 - protein, 566 aa, Artificial Sequence; identical to SEQ ID NO: 3770
  derived and/or modified protein sequence (wt) from hemagglutinin__InfluenzaA__ADF27679

SEQ ID NO: 4583 - protein, 566 aa, Artificial Sequence; identical to SEQ ID NO: 4379
  derived and/or modified protein sequence (wt) from hemagglutinin__InfluenzaA__ADF27689

SEQ ID NO: 4584 - protein, 566 aa, Artificial Sequence
  derived and/or modified protein sequence (wt) from hemagglutinin__InfluenzaA__ADF27699
MKAILVVLLYTFATANADTLCIGYHANNSTDTVDTVLEKNVTVTHSVNLLEDKHNGKLCKLRGVAPLHLGKCNIAGWILGNPECESLSTASSWSYIVETSSSDNGTCYPGDFIDYEELREQLSSVSSFERFEMFPKTSSWPNHDSNKGVTAACPHAGAKSFYKNLIWLVKKGNSYPKLSKSYINDKGKEVLVLWGIHHPSTSADQQSLYQNADAYVFVGTSRYSKKFKPEIAIRPKVRDQEGRMNYYWTLVEPGDKITFEATGNLVVPRYAFAMERNAGSGIIISDTPVHNCNTTCQTPKGAINTSLPFQNIHPITIGKCPKYVKSTKLRLATGLRNVPSIQSRGLFGAIAGFIEGGWTGMVDGWYGYHHQNEQGSGYAADLKSTQNAIDEITNKVNSVIEKMNTQFTAVGKEFNHLEKRIENLNKKVDDGFLDIWTYNAELLVLLENERTLDYHDSNVKNLYEKVRSQLKNNAKEVGNGCFEFYHKCDNTCMESVKNGTYDYPKYSEEAKLNREEIDGVKLESTRIYQILAIYSTVASSLVLVVSLGAISFWMCSNGSLQCRICI

SEQ ID NO: 4585 - protein, 566 aa, Artificial Sequence
  derived and/or modified protein sequence (wt) from hemagglutinin__InfluenzaA__ADF27709
MKAILVVLLYTFATANADTLCIGYHANNSTDTVDTVLEKNVTVTHSVNLLEDKHNGKLCKLRGVAPLHLGKCNIAGWILGNPECESLSTASSWSYIVEISSSDNGTCYPGDFINYEELREQLSSVSSFERFEIFPKTSSWPNHDSNKGVTAACPHAGAKSFYKNLIWLVKKGNSYPKLSKSYINDKGKEVLVLWGIHHPSTSADQQSLYQNADAYVFVGTSRYSKKFKPEIAIRPKVRDQEGRMNYYWTLVEPGDKITFEATGNLVVPRYAFAMERNAGSGIIISDTPVHDCNTTCQTPKGAINTSLPFQNIHPITIGKCPKYVKSTKLRLATGLRNVPSIQSRGLFGAIAGFIEGGWTGMVDGWYGYHHQNEQGSGYAADLKSTQNAIDKITNKVNSVIEKMNTQFTAVGKEFNHLEKRIENLNKKVDDGFLDIWTYNAELLVLLENERTLDYHDSNVKNLYEKVRSQLKNNAKEIGNGCFEFYHKCDNTCMESVKNGTYDYPKYSEEAKLNREEIDGVKLESTRIYQILAIYSTVASSLVLVVSLGAISFWMCSNGSLQCRICI

SEQ ID NO: 4586 - protein, 566 aa, Artificial Sequence; identical to SEQ ID NO: 3833
  derived and/or modified protein sequence (wt) from hemagglutinin__InfluenzaA__ADF27785

SEQ ID NO: 4587 - protein, 566 aa, Artificial Sequence
  derived and/or modified protein sequence (wt) from hemagglutinin__InfluenzaA__ADF27795
MKAILVVLLYTFATANADTLCIGYHANNSTDTVDTVLEKNVTVTHSVNLLEDKHNGKLCKLRGVAPLHLGKCNIAGWILGNPECESLSTASSWSYIVETSSSDNGTCYPGDFIDYEELREQLSSVSSFERFEIFPKTSSWPNHDSNKGVTAACPHAGAKSFYKNLIWLVKKGNSYPKLSKSYINDKGKEVLVLWGIHHPSTSADQQSLYQNADAYVFVGTSRYSKKFKPEIAIRPKVRDQEGRMNYYWTLVKPGDKITFEATGNLVVPRYAFAMERNAGSGIIISDTPVHDCNTTCQTPKGAINTSLPFQNIHPITIGKCPKYVKSTKLRLATGLRNVPSIQSRGLFGAIAGFIEGGWTGMVDGWYGYHHQNEQGSGYAADLKSTQNAIDEITNKVNSVIEKMNTQFTAVGKEFNHLEKRIENLNKKVDDGFLDIWTYNAELLVLLENERTLDYHDSNVKNLYEKVRSQLKNNAKEIGNGCFEFYHKCDNTCMESVKNGTYDYPKYSEEAKLNREEIDGVKLESTRIYQILAIYSTVASSLVLVVSLGAISFWMCSNGSLQCRICI

SEQ ID NO: 4588 - protein, 566 aa, Artificial Sequence; identical to SEQ ID NO: 3841
  derived and/or modified protein sequence (wt) from hemagglutinin__InfluenzaA__ADF27805

SEQ ID NO: 4589 - protein, 566 aa, Artificial Sequence
  derived and/or modified protein sequence (wt) from hemagglutinin__InfluenzaA__ADF27815
MKAILVVLLYTFATANADTLCIGYHANNSTDTVDTVLEKNVTVTHSVNLLEDKHNGKLCKLRGVAPLHLGKCNIAGWILGNPECESLSTASSWSYIVETSSSDNGTCYPGDFIDYEELREQLSSVSSFERFEIFPKTSSWPNHDSNKGVTAACPHDGAKSFYKNLIWLVKKGNSYPKLSKSYINDKGKEVLVLWGIHHPSTSADQQSLYQNADAYVFVGTSRYSKKFKPEIAIRPKVRDQEGRMNYYWTLVEPGDKITFEATGNLVVPRYAFAMERNAGSGIIISDTPVHDCNTTCQTPKGAINTSLPFQNIHPITIGKCPKYVKSTKLRLATGLRNVPSIQSRGLFGAIAGFIEGGWTGMVDGWYGYHHQNEQGSGYAADLKSTQNAIDKITNKVNSVIEKMNTQFTAVGKEFNHLEKRIENLNKKVDDGFLDIWTYNAELLVLLENERTLDYHDSNVKNLYEKVRSQLKNNAKEIGNGCFEFYHKCDNTCMESVKNGTYDYPKYSEEAKLNREEIDGVKLESTRIYQILAIYSTVASSLVLVVSLGAISFWMCSNGSLQCRICI

SEQ ID NO: 4590 - protein, 566 aa, Artificial Sequence
  derived and/or modified protein sequence (wt) from hemagglutinin__InfluenzaA__ADF27825
MKAILVVLLYTFATANADTLCIGYHANNSTDTVDTVLERNVTVTHSVNLLEDKHNGKLCKLRGVAPLHLGKCNIAGWILGNPECESLSTASSWSYIVETSSSDNGTCYPGDFIDSEELREQLSSVSSFERFEIFPKTSSWPNHDSNKGVTAACPHAGAKSFYKNLIWLVKKGNSYPKLSKSYINDKGKEVLVLWGIHHPSTSADQQSLYQNADAYVFVGTSRYSKKFKPEIAIRPKVRDQEGRMNYYWTLVEPGDKITFEATGNLVVPRYAFAMERNAGSGIIISDTPVHDCNTTCQTPKGAINTSLPFQNIHPITIGKCPKYVKSTKLRLATGLRNVPSIQSRGLFGAIAGFIEGGWTGMVDGWYGYHHQNEQGSGYAADLKSTQNAIDEITNKVNSVIEKMNTQFTAVGKEFNHLEKRIENLNKKVDDGFLDIWTYNAELLVLLENERTLDYHDSNVKNLYEKVRSQLKNNAKEIGNGCFEFYHKCDNTCMESVKNGTYDYPKYSEEAKLNREEIDGVKLESTRIYQILAIYSTVASSLVLVVSLGAISFWMCSNGSLQCRICI

SEQ ID NO: 4591 - protein, 566 aa, Artificial Sequence
  derived and/or modified protein sequence (wt) from hemagglutinin__InfluenzaA__ADF27845
MKAILVVLLYTFATANADTLCIGYHANNSTDTVDTVLEKNVTVTHSANLLEDKHNGKLCKLRGVAPLHLGKCNIAGWILGNPECESLSTASSWSYIVETSSSDNGTCYPGDFIDYEELREQLSSVSSFERFEIFPKTSSWPNHDSNKGVTAACPHAGAKSFYKNLIWLVKKGNSYPKLSKSYINDKGKEVLVLWGIHHPSTNADQQSLYQNADAYVFVGTSRYSKKFKPEIAIRPKVRDQEGRMNYYWTLVEPGDKITFEATGNLVVPRYAFAMERNAGSGIIISDTPVHDCNTTCQTPKGAINTSLPFQNIHPITIGKCPKYVKSTKLRLATGLRNVPSIQSRGLFGAIAGFIEGGWTGMVDGWYGYHHQNEQGSGYAADLKSTQNAIDEITNKVNSVIEKMNTQFTAVGKEFNHLEKRIENLNKKVDDGFLDIWTYNAELLVLLENERTLDYHDSNVKNLYEKVRSQLKNNAKEIGNGCFEFYHKCDNTCMESVKNGTYDYPKYSEEAKLNREEIDGVKLESTRIYQILAIYSTVASSLVLVVSLGAISFWMCSNGSLQCRICI

SEQ ID NO: 4592 - protein, 566 aa, Artificial Sequence; identical to SEQ ID NO: 3833
  derived and/or modified protein sequence (wt) from hemagglutinin__InfluenzaA__ADF27855

SEQ ID NO: 4593 - protein, 566 aa, Artificial Sequence; identical to SEQ ID NO: 3833
  derived and/or modified protein sequence (wt) from hemagglutinin__InfluenzaA__ADF27865

SEQ ID NO: 4594 - protein, 566 aa, Artificial Sequence; identical to SEQ ID NO: 3833
  derived and/or modified protein sequence (wt) from hemagglutinin__InfluenzaA__ADF27875

SEQ ID NO: 4595 - protein, 566 aa, Artificial Sequence; identical to SEQ ID NO: 3833
  derived and/or modified protein sequence (wt) from hemagglutinin__InfluenzaA__ADF27885

SEQ ID NO: 4596 - protein, 566 aa, Artificial Sequence; identical to SEQ ID NO: 2669
  derived and/or modified protein sequence (wt) from hemagglutinin__InfluenzaA__ADF27895

SEQ ID NO: 4597 - protein, 566 aa, Artificial Sequence
  derived and/or modified protein sequence (wt) from hemagglutinin__InfluenzaA__ADF27915
MKAILVVLLYTFATANADTLCIGYHANNSTDTVDTVLEKNVTVTHSVNLLEDKHNGKLCKLRGVAPLHLGKCNIAGWILGNPECESLSTASSWSYIVETSSSDNGTCYPGDFIDYEELREQLSSVSSFERFEIFPKTSSWPNHDSNKGVTAACPHAGAKSFYKNLIWLVKKGNSYPKLSKSYINDKGKEVLVLWGIHHPSASADQQSLYQNADAYVFVGTSRYSKKFKPEIAIRPKVRDQEGRMNYYWTLVEPGDKITFEATGNLVVPRYAFAMERNAGSGIIISDTPVHDCNTTCQTPKGAINTSLPFQNIHPITIGKCPKYVKSTKLRLATGLRNVPSIQSRGLFGAIAGFIEGGWTGMVDGWYGYHHQNEQGSGYAADLKSTQNAIDKITNKVNSVIEKMNTQFTAVGKEFNHLEKRIENLNKKVDDGFLDIWTYNAELLVLLENERTLDYHDSNVKNLYEKVRSQLKNNAKEIGNGCFEFYHKCDNTCMESVKNGTYDYPKYSEEAKLNREEIDGVKLESTRIYQILAIYSTVASSLVLVVSLGAISFWMCSNGSLQCRICI

SEQ ID NO: 4598 - protein, 566 aa, Artificial Sequence
  derived and/or modified protein sequence (wt) from hemagglutinin__InfluenzaA__ADF27925
MKAILVVLLYTFATANADTLCIGYHANNSTDTVDTVLEKNVTVTHSVNLLEDKHNGKLCKLRGVAPLHLGKCNIAGWILGNPECESLSTASSWSYIVETSSSDNGTCYPGDFIDYEELREQLSSVSSFERFEIFPKTSSWPNHDSNKGVTAACPHAGAKSFYKNLIWLVKKGNSYPKLSNSYINDKGKEVLVLWGIHHPSTSADQQSLYQNADAYVFVGTSRYSKKFKPEIAIRPKVRDQEGRMNYYWTLVEPGDKITFEATGNLVVPRYAFAMERNAGSGIIISDTPAHDCNTTCQTPKGAINTSLPFQNIHPITIGKCPKYVKSTKLRMATGLRNVPSIQSRGLFGAIAGFIEGGWTGMVDGWYGYHHQNEQGSGYAADLKSTQNAIDEITNKVNSVIEKMNTQFTAVGKEFNHLEKRIENLNKKVDDGFLDIWTYNAELLVLLENERTLDYHDSNVKNLYEKVRSQLKNNAKEIGNGCFEFYHKCDNTCMESVKNGTYDYPKYSEEAKLNREEIDGVKLESTRIYQILAIYSTVASSLVLVVSLGAISFWMCSNGSLQCRICI

SEQ ID NO: 4599 - protein, 566 aa, Artificial Sequence
  derived and/or modified protein sequence (wt) from hemagglutinin__InfluenzaA__ADF27935
MKAILVVLLYTFATANADTLCIGYHANNSTDTVDTVLEKNVTVTHSVNLLEDKHNGKLCKLRGVAPLHLGKCNIAGWILGNPKCESLSTESSWSYIVETSSSDNGTCYPGDFINYEELREQLSSVSSFERFEIFPKTSSWPNHDSNKGVTAACPHAGAKSFYKNLIWLVKKGNSYPKLSKSYINDKGKEVLVLWGIHHPSTSADQQSLYQNADAYVFVGTSRYSKKFKPEIAIRPKVRDQEGRMNYYWTLVEPGDKITFEATGNLVVPRYAFAMERNAGSGIIISDTPVHDCNTTCQTPKGAINTSLPFQNIHPITIGKCPKYVKSTKLRLATGLRNVPSIQSRGLFGAIAGFIEGGWTGMVDGWYGYHHQNEQGSGYAADLKSTQNAIDKITNKVNSVIEKMNTQFTAVGKEFNHLEKRIENLNKKVDDGFLDIWTYNAELLVLLENERTLDYHDSNVKNLYEKVRSQLKNNAKEIGNGCFEFYHKCDNTCMESVKNGTYDYPKYSEEAKLNREEIDGVKLESTRIYQILAIYSTVASSLVLVVSLGAISFWMCSNGSLQCRICI

SEQ ID NO: 4600 - protein, 566 aa, Artificial Sequence
  derived and/or modified protein sequence (wt) from hemagglutinin__InfluenzaA__ADF27955
MKAILVVLLYTFATANADTLCIGYHANNSTDTVDTVLEKNVTVTHSVNLLEDKHNGKLCKLRGVAPLHLGKCNIAGWILGNPECESLSTASSWSYIVETSSSDNGTCYPGDFIDYEELREQLSSVSSFERFEIFPKTSSWPNHDSNKGVTAACPHAGAKSFYKNLIWLVKKGNSYPKLSNSYINDKGKEVLVLWGIHHPSTSADQQSLYQNADAYVFVGTSRYSKKFKPEIAIRPKVRDQEGRMNYYWTLVEPGDKITFEATGNLVVPRYAFAMERNAGSGIIISDTPVHDCNTTCQTPKGAINTSLPFQNIHPITIGKCPKYVKSTKLRLATGLRNVPSIQSRGLFGAIAGFIEGGWTGMVDGWYGYHHQNEQGSGYAADLKSTQNAIDKITNKVNSVIEKMNTQFTAVGKEFNHLEKRIENLNKKVDDGFLDIWTYNAELLVLLENERTLDYHDSNVKNLYEKVRSQLKNNAKEIGNGCFEFYHKCDNTCMESVKNGTYDYPKYSEEAKLNREEIDGVKLESTRIYQILAIYSTVASSLVLVVSLGAISFWMCSNGSLQCRICI

SEQ ID NO: 4601 - protein, 566 aa, Artificial Sequence
  derived and/or modified protein sequence (wt) from hemagglutinin__InfluenzaA__ADF27965
MKAILVVLLYTFATANADTLCIGYHANNSTDTVDTVLEKNVTVTHSVNLLEDKHNGKLCKLRGVAPLHLGKCNIAGWILGNPECESLSTASSWSYIVETSSSDNGTCYPGDFIDYEELREQLSSVSSFERFEIFPKTSSWPNHDSNKGVTAACPHAGAKSFYKNLIWLVKKGNSYPKLSKSYINDKGKKVLVLWGIHHPSTSADQQSLYQNADAYVFVGTSRYSKKFKPEIAIRPKVRDQEGRMNYYWTLVEPGDKITFEATGNLVVPRYAFAMERNAGSGIIISDTPVNDCNTTCQTPKGAINTSLPFQNIHPITIGKCPKYVKSTKLRLATGLRNVPSIQSRGLFGAIAGFIEGGWTGMVDGWYGYHHQNEQGSGYAADLKSTQNAIDKITNKVNSVIEKMNTQFTAVGKEFNHLEKRIENLNKKVDDGFLDIWTYNAELLVLLENERTLDYHDSNVKNLYEKVRSQLKNNAKEIGNGCFEFYHKCDNTCMESVKNGTYDYPKYSEEAKLNREEIDGVKLESTRIYQILAIYSTVASSLVLVVSLGAISFWMCSNGSLQCRICI

SEQ ID NO: 4602 - protein, 566 aa, Artificial Sequence; identical to SEQ ID NO: 3833
  derived and/or modified protein sequence (wt) from hemagglutinin__InfluenzaA__ADF27975

SEQ ID NO: 4603 - protein, 566 aa, Artificial Sequence; identical to SEQ ID NO: 3841
  derived and/or modified protein sequence (wt) from hemagglutinin__InfluenzaA__ADF27985

SEQ ID NO: 4604 - protein, 566 aa, Artificial Sequence
  derived and/or modified protein sequence (wt) from hemagglutinin__InfluenzaA__ADF27995
MKAILVVLLYTFATANADTLCIGYHANNSTDTVDTVLEKNVTVTHSANLLEDKHNGKLCKLRGVAPLHLGKCNIAGWILGNPECESLSTASSWSYIVETSSSDNGTCYPGDFIDYEELREQLSSVSSFERFEIFPKTSSWPNHDSNKGVTAACPHAGAKSFYKNLIWLVKKGNSYPKLSKSYINDKGKEVLVLWGIHHPSTNADQQSLYQNADAYVFVGTSRYSKKFKPEIAIRPKVRDQEGRMNYYWTLVEPGDKITFEATGNLVVPRYAFAMERNAGSGIIISDTPAHDCNTTCQTPKGAINTSLPFQNIHPITIGKCPKYVKSTKLRLATGLRNIPSIQSRGLFGAIAGFIEGGWTGMVDGWYGYHHQNEQGSGYAADLKSTQNAIDEITNKVNSVIEKMNTQFTAVGKEFNHLEKRIENLNKKVDDGFLDIWTYNAELLVLLENERTLDYHDSNVKNLYEKVRSQLKNNAKEIGNGCFEFYHKCDNTCMESVKNGTYDYPKYSEEAKLNREEIDGVKLESTRIYQILAIYSTVASSLVLVVSLGAISFWMCSNGSLQCRICI

SEQ ID NO: 4605 - protein, 566 aa, Artificial Sequence; identical to SEQ ID NO: 4221
  derived and/or modified protein sequence (wt) from hemagglutinin__InfluenzaA__ADF28005

SEQ ID NO: 4606 - protein, 566 aa, Artificial Sequence; identical to SEQ ID NO: 4221
  derived and/or modified protein sequence (wt) from hemagglutinin__InfluenzaA__ADF28015

SEQ ID NO: 4607 - protein, 566 aa, Artificial Sequence; identical to SEQ ID NO: 3833
  derived and/or modified protein sequence (wt) from hemagglutinin__InfluenzaA__ADF28025

SEQ ID NO: 4608 - protein, 566 aa, Artificial Sequence; identical to SEQ ID NO: 3833
  derived and/or modified protein sequence (wt) from hemagglutinin__InfluenzaA__ADF28045

SEQ ID NO: 4609 - protein, 566 aa, Artificial Sequence
  derived and/or modified protein sequence (wt) from hemagglutinin__InfluenzaA__ADF28055
MKAILVVLLYTFATANADTLCIGYHANNSTDTVDTVLEKNVTVTHSVNLLEDKHNGKLCKLRGVAPLHLGKCNIAGWILGNPECESLSTASSWSYIVETSSSDNGTCYPGDFIDYEELREQLSSVSSFERFEIFPKTSSWPNYDSNKGVTAACPHAGAKSFYKNLIWLVKKGNSYPKLSKSYINDKGKEVLVLWGIHHPSTSADQQSLYQNADAYVFVGTSRYSKKFKPEIAIRPKVRDQEGRMNYYWTLVEPGDKITFEATGNLVVPRYAFAMERNAGSGIIISDTPVHDCNTTCQTPKGAINTSLPFQNIHPITIGKCPKYVKSTKLRLATGLRNVPSIQSRGLFGAIAGFIEGGWTGMVDGWYGYHHQNEQGSGYAADLKSTQNAIDKITNKVNSVIEKMNTQFTAVGKEFNHLEKRIENLNKKVDDGFLDIWTYNAELLVLLENERTLDYHDSNVKNLYEKVRSQLKNNAKEIGNGCFEFYHKCDNTCMESVKNGTYDYPKYSEEAKLNREEIDGVKLESTRIYQILAIYSTVASSLVLVVSLGAISFWMCSNGSLQCRICI

SEQ ID NO: 4610 - protein, 566 aa, Artificial Sequence; identical to SEQ ID NO: 3833
  derived and/or modified protein sequence (wt) from hemagglutinin__InfluenzaA__ADF28065

SEQ ID NO: 4611 - protein, 566 aa, Artificial Sequence; identical to SEQ ID NO: 2851
  derived and/or modified protein sequence (wt) from hemagglutinin__InfluenzaA__ADF28075

SEQ ID NO: 4612 - protein, 566 aa, Artificial Sequence; identical to SEQ ID NO: 3770
  derived and/or modified protein sequence (wt) from hemagglutinin__InfluenzaA__ADF28085

SEQ ID NO: 4613 - protein, 566 aa, Artificial Sequence; identical to SEQ ID NO: 2849
  derived and/or modified protein sequence (wt) from hemagglutinin__InfluenzaA__ADF28107

SEQ ID NO: 4614 - protein, 566 aa, Artificial Sequence; identical to SEQ ID NO: 4221
  derived and/or modified protein sequence (wt) from hemagglutinin__InfluenzaA__ADF28117

SEQ ID NO: 4615 - protein, 566 aa, Artificial Sequence
  derived and/or modified protein sequence (wt) from hemagglutinin__InfluenzaA__ADF29918
MKAILVVLLYTFATANADTLCIGYHANNSTDTVDTVLEKNVTVTHSVNLLEDKHNGKLCKLRGVAPLHLGKCNIAGWILGNPECESLSTASSWSYIVETSSSDNGTCYPGDFIDYEELREQLSSVSSFERFEIFPKTSSWPNHDSNKGVTAACPHAGAKSFYKNLIWLVKKGNSYPKLSRSYINDKGKEVLVLWGIHHPSTSADQQSLYQNADAYVFVGTSRYSKKFKPEIAIRPKVRNQEGRMNYYWTLVEPGDKITFEATGNLVVPRYAFAMERNAGSGIIISDTPVHDCNTTCQTPKGAINTSLPFQNIHPITIGKCPKYVKSTKLRLATGLRNVPSIQSRGLFGAIAGFIEGGWTGMVDGWYGYHHQNEQGSGYAADLKSTQNAIDEITNKVNSVIEKMNTQFTAVGKEFNHLEKRIENLNKKVDDGFLDIWTYNAELLVLLENERTLDYHDSNVKNLYEKVRSQLKNNAKEIGNGCFEFYHKCDNTCMESVKNGTYDYPKYSEEAKLNREEIDGVKLESTRIYQILAIYSTVASSLVLVVSLGAISFWMCSNGSLQCRICI

SEQ ID NO: 4616 - protein, 566 aa, Artificial Sequence
  derived and/or modified protein sequence (wt) from hemagglutinin__InfluenzaA__ADF42689
MKAILVVLLYTFATANADTLCIGYHANNSTDTVDTVLEKNVTVTHSVNLLEDKHNGKLCKLRGVAPLHLGKCNIAGWILGNPECESLSTASSWSYIVETSSSDNGTCYPGDFIDYEELREQLSSVSSFERFEIFPKTSSWPNHDSNKGVTAACPHAGAKSFYKNLIWLVKKGNSYPKLSKSYINDKGKEVLVLWGIHHPSTSADQQSLYQNADAYVFVGTSRYSKKFKPEIAIRPKVRDQEGRMNYYWTLVEPGDKITFEATGNLVVPRYAFAMERNAGSGIIISDTPVHDCNTTCQTPKGAINTSLPFQNIHPITIGKCPKYVKSTKLRLATGLRNVPSIQSRGLFGAIAGFIEGGWTGMVDGWYGYHHQNEQGSGYAADLKSTQNAIDEITNKVNSVIEKMNTQFTAVGKEFNHLEKRIENLNKKVDDGFLDIWTYNAELLVLLENERTLDYHDSNVKNLYEKVRSQLKNNAKEIGNGCFEFYHKCDNTCMESVKNGTYDYPKYSEEAKLNREEIDGVKLESTRIYQILAIYSTVASSLVLAVSLGAIGFWMCSNGSLQCRICI

SEQ ID NO: 4617 - protein, 566 aa, Artificial Sequence
  derived and/or modified protein sequence (wt) from hemagglutinin__InfluenzaA__ADF42699
MKAILVVLLYTFATANADTLCIGYHANNSTDTVDTVLEKNVTVTHSVNLLEDKHNGTLCKLRGVAPLHLGKCNIAGWILGNPECESLSTASSWSYIVETSSSDNGTCYPGDFIDYEELREQLSSVSSFERFEMFPKTSSWPNHDSNKGVTAACPHAGAKSFYKNLIWLVKKGNSYPKLSKSYINDKGKEVLVLWGIHHPSTSADQQSLYQNADAYVFVGTSRYSKKFKPEIAIRPKVRDQEGRMNYYWTLVEPGDKITFEATGNLVVPRYAFAMERNAGSGIIISDTPVHDCNTTCQTPKGAINTSLPFQNIHPITIGKCPKYVKSTKLRLATGLRNVPSIQSRGLFGAIAGFIEGGWTGMVDGWYGYHHQNEQGSGYAADLKSTQNAIDEITNKVNSVIEKMNTQFTAVGKEFNHLEKRIENLNKKVDDGFLDIWTYNAELLVLLENERTLDYHDSNVKNLYEKVRSQLKNNAKEIGNGCFEFYHKCDNTCMESVKNGTYDYPKYSEEAKLNREEIDGVKLESTRIYQILAIYSTVASSLVLVVSLGAISFWMCSNGSLQCRICI

SEQ ID NO: 4618 - protein, 566 aa, Artificial Sequence; identical to SEQ ID NO: 3833
  derived and/or modified protein sequence (wt) from hemagglutinin__InfluenzaA__ADF42709

SEQ ID NO: 4619 - protein, 566 aa, Artificial Sequence; identical to SEQ ID NO: 3833
  derived and/or modified protein sequence (wt) from hemagglutinin__InfluenzaA__ADF42719

SEQ ID NO: 4620 - protein, 566 aa, Artificial Sequence; identical to SEQ ID NO: 3833
  derived and/or modified protein sequence (wt) from hemagglutinin__InfluenzaA__ADF42729

SEQ ID NO: 4621 - protein, 566 aa, Artificial Sequence; identical to SEQ ID NO: 3833
  derived and/or modified protein sequence (wt) from hemagglutinin__InfluenzaA__ADF42739

SEQ ID NO: 4622 - protein, 566 aa, Artificial Sequence
  derived and/or modified protein sequence (wt) from hemagglutinin__InfluenzaA__ADF58349
MKAILVVLLYTFATANADTLCIGYHANNSTDTVDTVLEKNVTVTHSVNLLEDKHNGKLCKLRGVAPLHLGKCNIAGWILGNPECESLSTASSWSYIVETSSSDNGTCYPGDFIDYEELREQLSSVSSFERFEIFPKTSSWPDHDSNKGVTAACPHAGAKSFYKNLIWLVKKGNSYPKLSKSYINDKGKEVLVLWGIHHPSTSADQQSLYQNADAYVFVGTSRYSKKFKPEIAIRPKVREREGRMNYYWTLVEPGDKITFEATGNLVVPRYAFAMERNAGSGIIISDTPVHDCNTTCQTPKGAINTSLPFQNIHPITIGKCPKYVKSTKLRLATGLRNVPSIQSRGLFGAIAGFIEGGWTGMVDGWYGYHHQNEQGSGYAADLKSTQNAIDEITNKVNSVIEKMNTQFTAVGKEFNHLEKRIENLNKKVDDGFLDIWTYNAELLVLLENERTLDYHDSNVKNLYEKVRSQLKNNAKEIGNGCFEFYHKCDNTCMESVKNGTYDYPKYSEEAKLNREEIDGVKLESTRIYQILAIYSTVASSLVLVVSLGAISFWMCSNGSLQCRICI

SEQ ID NO: 4623 - protein, 566 aa, Artificial Sequence; identical to SEQ ID NO: 4266
  derived and/or modified protein sequence (wt) from hemagglutinin__InfluenzaA__ADF58351

SEQ ID NO: 4624 - protein, 566 aa, Artificial Sequence
  derived and/or modified protein sequence (wt) from hemagglutinin__InfluenzaA__ADF80454
MKAILVVLLYTFATANADTLCIGYHANNSTDTVDTVLEKNVTVTHSVNLLEDKHNGKLCKLRGVAPLHLGKCNIAGWILGNPECESLSTASSWSYIVETSSSDNGTCYPGDFIDYEELREQLSSVSSFERFEIFPKTSSWPNHDSNKGVTAACPHAGAKSFYKNLIWLVKKGNSYPKLSKSYINDKGKEVLVLWGIHHPSTSADQQSLYQNADAYVFVGTSRYSKKFKPEIAIRPKVRDQEGRMNYYWTLVEPGDKITFEATGNLVVPRYAFAMERNAGSGIIISDTPVHDCNTTCQTPEGAINTSLPFQNIHPITIGKCPKYVKSTKLRLATGLRNVPSIQSRGLFGAIAGFIEGGWTGMVDGWYGYHHQNEQGSGYAADLKSTQNAIDEITNKVNSIIEKMNTQFTAVGKEFNHLEKRIENLNKKVDDGFLDIWTYNAELLVLLENERTLDYHDSNVKNLYEKVRSQLKNNAKEIGNGCFEFYHKCDDTCMESVKNGTYDYPKYSEEAKLNREEIDGVKLESTRIYQILAIYSTVASSLVLVVSLGAISFWMCSNGSLQCRICI

SEQ ID NO: 4625 - protein, 566 aa, Artificial Sequence
  derived and/or modified protein sequence (wt) from hemagglutinin__InfluenzaA__ADF80462
MKAILVVLLYTFATANADTLCIGYHANNSTDTVDTVLEKNVTVTHSVNLLEDKHNGKLCKLRGVAPLHLGKCNIAGWILGNPECESLSTASSWSYIVETSNSDNGTCYPGDFIDYEELREQLSSVSSFERFEIFPKISSWPNHDSNKGVTAACPHAGAKSFYKNLIWLVKKGNSYPKLSKSYINDKGKEVLVLWGIHHPSTSADQQSLYQNADAYVFVGTSRYSKKFKPEIAIRPKVRDQEGRMNYYWTLVEPGDKITFEATGNLVVPRYAFAMERNAGSGIIISDTPVHDCNTTCQTPKGAINTSLPFQNIHPITIGKCPKYVKSTKLRLATGLRNVPSIQSRGLFGAIAGFIEGGWTGMVDGWYGYHHQNEQGSGYAADLKSTQNAIDEITNKVNSVIEKMNTQFTAVGKEFNHLEKRIENLNKKVDDGFLDIWTYNAELLVLLENERTLDYHDSNVKNLYEKVRSQLKNNAKEIGNGCFEFYHKCDNTCMESVKNGTYDYPKYSEEAKLNREEIDGVKLESTRIYQILAIYSTVASSLVLVVSLGAISFWMCSNGSLQCRICI

SEQ ID NO: 4626 - protein, 566 aa, Artificial Sequence; identical to SEQ ID NO: 2669
  derived and/or modified protein sequence (wt) from hemagglutinin__InfluenzaA__ADF80470

SEQ ID NO: 4627 - protein, 566 aa, Artificial Sequence
  derived and/or modified protein sequence (wt) from hemagglutinin__InfluenzaA__ADF80478
MKAILVVLLYTFATANADTLCIGYHANNSTDTVDTVLEKNVTVTHSVNLLEDKHNGKLCKLRGVAPLHLGKCNIAGWILGNPECESLSTASSWSYIVETSSSDNGTCYPGDFIDYEELREQLSSVSSFERFEIFPKTSSWPNHDPNKGVTAACPHAGAKSFYKNLIWLVKKGNSYPKLSKSYINDKGKEVLVLWGIHHPSTSADQQSLYQNADAYVFVGTSRYSKKFKPEIAIRPKVRDQEGRMNYYWTLVEPGDKITFEATGNLMVPRYAFAMERNAGSGIIISDTPVHDCNTTCQTPKGAINTSLPFQNIHPITIGKCPKYVKSTKLRLATGLRNVPSIQSRGLFGAIAGFIEGGWTGMVDGWYGYHHQNEQGSGYAADLKSTQNAIDEITNKVNSVIEKMNTQFTAVGKEFNHLEKRIENLNKKVDDGFLDIWTYNAELLVLLENERTLDYHDSNVKNLYEKVRSQLKNNAKEIGNGCFEFYHKCDNTCMESVKNGTYDYPKYSEEAKLNREEIDGVKLESTRIYQILAIYSTVASSLVLVVSLGAISFWMCSNGSLQCRICI

SEQ ID NO: 4628 - protein, 566 aa, Artificial Sequence
  derived and/or modified protein sequence (wt) from hemagglutinin__InfluenzaA__ADF80494
MKAILVVLLYTFATANADTLCIGYHANNSTDTVDTVLEKNVTVTHSVNLLEDKHNGKLCKLRGVAPLHLGKCNIAGWILGNPECESLSTASSWSYIVETSSSDNGTCYPGDFIDYEELREQLSSVSSFERFEIFPKTSSWPNHDSNKGVTAACPHAGAKSFYKNLIWLVKKGNSYPKLSKSYINDKGKEVLVLWGIHHPSTSADQQSLYQNADAYVFVGTSRYSKKFKPEIAIRPKVRDQEGRMNYYWTLVEPGDKITFEATGNLLVPRYAFAMERNAGSGIIISDTPVHDCNTTCQTPKGAINTSLPFQNIHPITIGKCPKYVKSTKLRLATGLRNVPSIQSRGLFGAIAGFIEGGWTGMVDGWYGYHHQNEQGSGYAADLKSTQNAIDEITNKVNSVIEKMNTQFTAVGKEFNHLEKRIENLNKKVDDGFLDIWTYNAELLVLLENERTLDYHDSNVKNLYEKVRSQLKTNAKEIGNGCFEFYHKCDNTCMESVKNGTYDYPKYSEEAKLNREEIDGVKLESTRIYQILAIYSTVASSLVLVVSLGAISFWMCSNGSLQCRICI

SEQ ID NO: 4629 - protein, 566 aa, Artificial Sequence; identical to SEQ ID NO: 4628
  derived and/or modified protein sequence (wt) from hemagglutinin__InfluenzaA__ADF80498

SEQ ID NO: 4630 - protein, 566 aa, Artificial Sequence; identical to SEQ ID NO: 3293
  derived and/or modified protein sequence (wt) from hemagglutinin__InfluenzaA__ADF80502

SEQ ID NO: 4631 - protein, 566 aa, Artificial Sequence
  derived and/or modified protein sequence (wt) from hemagglutinin__InfluenzaA__ADF80506
MKAILVVLLYTFATANADTLCIGYHANNSTDTVDTVLERNVTVTHSVNLLEDKHNGKLCKLRGVAPLHLGKCSIAGWILGNPECESLSTASSWSYIVETSSSDNGTCYPGDFIDYEELREQLSSVSSFERFEIFPKTSSWPNHDPNKGVTAACPHAGAKSFYKNLIWLVKKENSYPKLSKSYINDKGKEVLVLWGIHHPSTSADQQSLYQNADAYVFVGTSRYSKKFKPEIAIRPKVRDQEGRMNYYWTLVEPGDKITFEATGNLVVPRYAFAMERNAGSGIIISDTPVHDCNTTCQTPKGAINTSLPFQNIHPITIGKCPKYVKSTKLRLATGLRNVPSIQSRGLFGAIAGFIEGGWTGMVDGWYGYHHQNEQGSGYAADLKSTQNAIDEITNKVNSVIEKMNTQFTAVGKEFNHLEKRIENLNKKVDDGFLDIWTYNAELLVLLENERTLDYHDSNVKNLYEKVRSQLKNNAKEIGNGCFEFYHKCDNTCMESVKNGTYDYPKYSEEAKLNREEIDGVKLESTRIYQILAIYSTVASSLVLVVSLGAISFWMCSNGSLQCRICI

SEQ ID NO: 4632 - protein, 566 aa, Artificial Sequence
  derived and/or modified protein sequence (wt) from hemagglutinin__InfluenzaA__ADF83741
MKTIIALSYILCLVFAQKLPGNDNSTATLCLGHHAVPNGTIVKTITNDQIEVTNATELVQSSSTGEICDSPHQILDGKNCTLIDALLGDPQCDGFQNKKWDLFVERSKAYSNCYPYDVPDYASLRSLVASSGTLEFNNESFNWTGVTQNGTSSACIRRSKNSFFSRLNWLTHLNFKYPALNVTMPNNEQFDKLYIWGVHHPGTDKDQIFLYAQASGRITVSTKRSQQTAIPNIGSRPRVRNIPSRISIYWTIVKPGDILLINSTGNLIAPRGYFKIRSGKSSVMRSDAPIGKCNSDCITPNGSIPNDKPFQNVNRITYGACPRYVKQNTLKLATGMRNVPEKQTRGIFGAIAGFIENGWEGMVDGWYGFRHQNSEGRGQAADLKSTQAAIDQINGKLNRLIGKTNEKFHQIEKEFSEVEGRIQDLEKYVEDTKIDLWSYNAELLVALENQHTIDLTDSEMNKLFEKTKKQLRENAEDMGNGCFKIYHKCDNACIGSIRNGTYDHDVYRDEALNNRFQIKGVELKSGYKDWILWISFAISCFLLCVALLGFIMWACQKGNIRCNICI

SEQ ID NO: 4633 - protein, 566 aa, Artificial Sequence; identical to SEQ ID NO: 3411
  derived and/or modified protein sequence (wt) from hemagglutinin__InfluenzaA__ADF83752

SEQ ID NO: 4634 - protein, 566 aa, Artificial Sequence; identical to SEQ ID NO: 4221
  derived and/or modified protein sequence (wt) from hemagglutinin__InfluenzaA__ADF83763

SEQ ID NO: 4635 - protein, 566 aa, Artificial Sequence; identical to SEQ ID NO: 4221
  derived and/or modified protein sequence (wt) from hemagglutinin__InfluenzaA__ADF83773

SEQ ID NO: 4636 - protein, 566 aa, Artificial Sequence
  derived and/or modified protein sequence (wt) from hemagglutinin__InfluenzaA__ADF83783
MKAILVVLLYTFATANADTLCIGYHANNSTDTVDTVLEKNVTVTHSVNLLEDKHNGKLCKLRGVAPLHLGKCNIAGWILGNPECESLSTASSWSYIVETSSSDNGTCYPGDFIDYEELREQLSSVSSFERFEIFPKTSSWPNHDSNKGVTAACPHAGAKSFYKNLIWLVKKGNSYPKLSKSYINDKGKEVLVLWGIHHPSTSADQQSLYQNADAYVFVGTSRYSKKFKPEIAIRPKVRDQEGRMNYYWTLVEPGDKITFEATGNLVVPRYAFAMERNAGSGIIISDTPVHDCNTTCQTPKGAINTSLPFQNIHPTTIGKCPKYVKSTKLRLATGLRNVPSIQSRGLFGAIAGFIEGGWTGMVDGWYGYHHQNEQGSGYAADLKSTQNAIDEITNKVNSVIEKMNTQFTAVGKEFNHLEKRIENLNKKVDDGFLDIWTYNAELLVLLENERTLDYHDSNVKNLYEKVRSQLKNNAKEIGNGCFEFYHKCDNTCMESVKNGTYDYPKYSEEAKLNREEIDGVKLESTRIYQILAIYSTVASSLVLVVSLGAISFWMCSNGSLQCRICI

SEQ ID NO: 4637 - protein, 566 aa, Artificial Sequence; identical to SEQ ID NO: 4296
  derived and/or modified protein sequence (wt) from hemagglutinin__InfluenzaA__ADF83793

SEQ ID NO: 4638 - protein, 566 aa, Artificial Sequence
  derived and/or modified protein sequence (wt) from hemagglutinin__InfluenzaA__ADF83803
MKAILVVLLYTFATANADTLCIGYHANNSTDTVDTVLEKNVTVTHSVNLLEDKHNGKLCKLRGVAPLHLGKCNIAGWILGNPECETLSTASSWSYIVETSSSDNGTCYPGDFIDYEELREQLSSVSSFERFEIFPKTSSWPNHDSNKGVTAACPHAGAKSFYKNLIWLVKKGNSYPKLSKSYINDKGKEVLVLWGIHHPSTSADQQSLYQNADAYVFVGTSRYSKKFKPEIAIRPKVRDQEGRMNYYWTLVEPGDKITFEATGNLVVPRYAFAMERNAGSGIIISDTPVHDCNTTCQTPKGAINTSLPFQNVHPITIGKCPKYVKSTKLRLATGLRNVPSIQSRGLFGAIAGFIEGGWTGMVDGWYGYHHQNEQGSGYAADLKSTQNAIDEITNKVNSVIEKMNTQFTAVGKEFNHLEKRIENLNKKVDDGFLDIWTYNAELLVLLENERTLDYHDSNVKNLYEKVRSQLKNNAKETGNGCFEFYHKCDNTCMESVKNGTYDYPKYSEEAKLNREEIDGVKLESTRIYQILAIYSTVASSLVLVVSLGAISFWMCSNGSLQCRICI

SEQ ID NO: 4639 - protein, 566 aa, Artificial Sequence
  derived and/or modified protein sequence (wt) from hemagglutinin__InfluenzaA__ADF83813
MKAILVVLLYTFATANADTLCIGYHANNSTDTVDTVLEKNVTVTHSVNLLEDKHNGKLCKLRGVAPLHLGKCNIAGWILGNPECESLSTASSWSYIVETSSSDNGTCYPGDFIDYEELREQLSSVSSFERFEIFPKTSSWPNHDSNKGVTAACPHAGAKSFYKNLIWLVKKGNSYPKLSKSYINDKGKEVLVLWGIHHPSTSTDQQSLYQNADAYVFVGTSRYSKKFKPEIAIRPKVRDQEGRMNYYWTLVEPGDKITFEATGNLVVPRYAFAMERNAGSGIIISDTPVHDCNTTCQTPKGAINTSLPFQNIHPITIGKCPKYVKSTKLRLATGLRNVPSIQSRGLFGAIAGFIEGGWTGMVDGWYGYHHQNEQGSGYAADLKSTQNAIDEITNKVNSVIEKMNTQFTAVGKEFNHLEKRIENLNKKVDDGFLDIWTYNAELLVLLENERTLDYHDSNVKNLYEKVRSQLKNNAKEIGNGCFEFYHKCDNTCMESVKNGTYDYPKYSEEAKLNREEIDGVKLESTRIYQILAIYSTVASSLVLVVSLGAISFWMCSNGSLQCRICI

SEQ ID NO: 4640 - protein, 566 aa, Artificial Sequence
  derived and/or modified protein sequence (wt) from hemagglutinin__InfluenzaA__ADF83823
MKAILVVLLYTFATANADTLCIGYHANNSTDTVDTVLEKNVTVTHSVNLLEDKHNGKLCKLRGVAPLHLGKCNIAGWILGNPECESLSTASSWSYIVETSSSDNGTCYPGDFIDYEELREQLSSVSSFERFEIFPKTSSWPNHDSNKGVTAACPHAGAKSFYKNLIWLVKKGNSYPKLSKSYINDKGKEVLVLWGIHHPSTSADQQSLYQNADSYVFVGTSRYSKKFKPEIAIRPKVRDQEGRMNYYWTLVEPGDKITFEATGNLVVPRYAFAMERNAGSGIIISDTPVHDCNTTCQTPKGAINTSLPFQNIHPITIGKCPKYVKSTKLRLATGLRNIPSIQSRGLFGAIAGFIEGGWTGMVDGWYGYHHQNEQGSGYAADLKSTQNAIDEITNKVNSVIEKMNTQFTAVGKEFNHLEKRIENLNKKVDDGFLDIWTYNAELLVLLENERTLDYHDSNVKNLYEKVRSQLKNNAKEIGNGCFEFYHKCDNTCMESVKNGTYDYPKYSEEAKLNREEIDGVKLESTRIYQILAIYSTVASSLVLVVSLGAISFWMCSNGSLQCRICI

SEQ ID NO: 4641 - protein, 566 aa, Artificial Sequence; identical to SEQ ID NO: 4221
  derived and/or modified protein sequence (wt) from hemagglutinin__InfluenzaA__ADF83833

SEQ ID NO: 4642 - protein, 566 aa, Artificial Sequence; identical to SEQ ID NO: 4221
  derived and/or modified protein sequence (wt) from hemagglutinin__InfluenzaA__ADF83843

SEQ ID NO: 4643 - protein, 566 aa, Artificial Sequence; identical to SEQ ID NO: 4221
  derived and/or modified protein sequence (wt) from hemagglutinin__InfluenzaA__ADF83853

SEQ ID NO: 4644 - protein, 566 aa, Artificial Sequence
  derived and/or modified protein sequence (wt) from hemagglutinin__InfluenzaA__ADF83873
MKAILVVLLYTFATANADTLCIGYHANNSTDTVDTVLEKNVTVTHSVNLLEDKHNGKLCKLRGVAPLHLGKCNIAGWILGNPECESLSTANSWSYIVETSSSDNGTCYPGDFIDYEELREQLSSVSSFERFEIFPKTSSWPNHDSNKGVTAACPHAGAKSFYKNLIWLVKKGNSYPKLSKSYINDKGKEVLVLWGIHHPSTSTDQQSLYQNADAYVFVGTSRYSKKFKPEIAIRPKVRDQEGRMNYYWTLVEPGDKITFEATGNLVVPRYAFAMERNAGSGIIISDTPVHDCNTTCQTPKGAINTSLPFQNIHPITIGKCPKYVKSTKLRLATGLRNVPSIQSRGLFGAIAGFIEGGWTGMVDGWYGYHHQNEQGSGYAADLKSTQNAIDKITNKVNSVIEKMNTQFTAVGKEFNHLEKRIENLNKKVDDGFLDIWTYNAELLVLLENERTLDYHDSNVKNLYEKVRSQLKNNAKEIGNGCFEFYHKCDNTCMESVKNGTYDYPKYSEEAKLNREEIDGVKLESTRIYQILAIYSTVASSLVLVVSLGAISFWMCSNGSLQCRICI

SEQ ID NO: 4645 - protein, 566 aa, Artificial Sequence; identical to SEQ ID NO: 3833
  derived and/or modified protein sequence (wt) from hemagglutinin__InfluenzaA__ADF83885

SEQ ID NO: 4646 - protein, 566 aa, Artificial Sequence
  derived and/or modified protein sequence (wt) from hemagglutinin__InfluenzaA__ADF83895
MKAILVVLLYTFATVNADTLCIGYHANNSTDTVDTVLEKNVTVTHSVNLLEDKHNGKLCKLRGVAPLHLGKCNIAGWILGNPECESLSTASSWSYIVETSSSDNGTCYPGDFIDYEELREQLSSVSSFERFEIFPKTSSWPNHDSNKGVTAACPHAGAKSFYKNLIWLVKKGNSYPKLSKSYINDKGKEVLVLWGIHHPSTSADQQSLYQNADAYVFVGTSRYSKKFKPEIAIRPKVRDQEGRMNYYWTLVEPGDKITFEATGNLVVPRYAFAMERNAGSGIIISDTPVHDCNTTCQTPKGAINTSLPFQNIHPITIGKCPKYVKSTKLRLATGLRNVPSIQSRGLFGAIAGFIEGGWTGMVDGWYGYHHQNEQGSGYAADLKSTQNAIDKITNKVNSVIEKMNTQFTAVGKEFNHLEKRIENLNKKVDDGFLDIWTYNAELLVLLENERTLDYHDSNVKNLYEKIRSQLKNNAKEIGNGCFEFYHKCDNTCMESVKNGTYDYPKYSEEAKLNREEIDGVKLESTRIYQILAIYSTVASSLVLVVSLGAISFWMCSNGSLQCRICI

SEQ ID NO: 4647 - protein, 566 aa, Artificial Sequence; identical to SEQ ID NO: 4221
  derived and/or modified protein sequence (wt) from hemagglutinin__InfluenzaA__ADF83915

SEQ ID NO: 4648 - protein, 566 aa, Artificial Sequence
  derived and/or modified protein sequence (wt) from hemagglutinin__InfluenzaA__ADF84441
MKAILVVLLYTFATANADTLCIGYHANNSTDTVDTVLEKNVTVTHSVNLLEDKHNGKLCKLRGVAPLHLGKCNIAGWILGNPECESLSTASSWSYIVETSSSDNGTCYPGDFINYEELREQLSSVSSFERFEIFPKTSSWPSHDSNKGVTAACPHAGAKSFYKNLIWLVKKGNSYPKLSKSYINDKGKEVLVLWGIHHPSTSADQQSLYQNADAYVFVGTSRYSKKFKPEIAIRPKVRDQEGRMNYYWTLVEPGDKITFEATGNLVVPRYAFAMERNAGSGIIISDTPVHDCNTTCQTPKGAINTSLPFQNIHPITIGKCPKYVKSTKLRLATGLRNVPSIQSRGLFGAIAGFIEGGWTGMVDGWYGYHHQNEQGSGYAADLKSTQNAIDKITNKVNSVIEKMNIQFTAVGKEFNHLEKRIENLNKKVDDGFLDIWTYNAELLVLLENERTLDYHDSNVKNLYEKVRSQLKNNAKEIGNGCFEFYHKCDNTCMESVKNGTYDYPKYSEEAKLNREEIDGVKLESTRIYQILAIYSTVASSLVLVVSLGAISFWMCSNGSLQCRICI

SEQ ID NO: 4649 - protein, 566 aa, Artificial Sequence; identical to SEQ ID NO: 3833
  derived and/or modified protein sequence (wt) from hemagglutinin__InfluenzaA__ADF84459

SEQ ID NO: 4650 - protein, 566 aa, Artificial Sequence; identical to SEQ ID NO: 4221
  derived and/or modified protein sequence (wt) from hemagglutinin__InfluenzaA__ADF84469

SEQ ID NO: 4651 - protein, 566 aa, Artificial Sequence; identical to SEQ ID NO: 4282
  derived and/or modified protein sequence (wt) from hemagglutinin__InfluenzaA__ADF84479

SEQ ID NO: 4652 - protein, 566 aa, Artificial Sequence; identical to SEQ ID NO: 4221
  derived and/or modified protein sequence (wt) from hemagglutinin__InfluenzaA__ADF84489

SEQ ID NO: 4653 - protein, 566 aa, Artificial Sequence; identical to SEQ ID NO: 4221
  derived and/or modified protein sequence (wt) from hemagglutinin__InfluenzaA__ADF85017

SEQ ID NO: 4654 - protein, 566 aa, Artificial Sequence; identical to SEQ ID NO: 4221
  derived and/or modified protein sequence (wt) from hemagglutinin__InfluenzaA__ADF87152

SEQ ID NO: 4655 - protein, 566 aa, Artificial Sequence
  derived and/or modified protein sequence (wt) from hemagglutinin__InfluenzaA__ADF87162
MKAILVVLLYTFATANADTLCIGYHANNSTDTVDTVLEKNVTVTHSVNLLEDKHNGKLCKLRGVAPLHLGKCNIAGWILGNPECESLSTASSWSYIVETSSSDNGTCYPGDFIDYEELREQLSSVSSFERFEIFPKTSSWPNHDSNKGVTAACPHAGAKSFYKNLIWLVKKGNSYPKLSKSYINDKGKEVLVLWGIHHPSTSADQQSLYQNADSYVFVGTSKYSKKFKPEIAIRPKVRDQEGRMNYYWTLVEPGDKITFEATGNLVVPRYAFAMERNAGSGIIISDTPVHDCNTTCQTPEGAINTSLPFQNIHPITIGKCPKYVKSTKLRLATGLRNVPSIQSRGLFGAIAGFIEGGWTGMVDGWYGYHHQNEQGSGYAADLKSTQNAIDEITNKVNSVIEKMNTQFTAVGKEFNHLEKRIENLNKKVDDGFLDIWTYNAELLVLLENERTLDYHDSNVKNLYEKVRSQLKNNAKEIGNGCFEFYHKCDNTCMESVKNGTYDYPKYSEEAKLNREEIDGVKLESTRIYQILAIYSTVASSLVLVVSLGAISFWMCSNGSLQCRICI

SEQ ID NO: 4656 - protein, 566 aa, Artificial Sequence; identical to SEQ ID NO: 4221
  derived and/or modified protein sequence (wt) from hemagglutinin__InfluenzaA__ADF87172

SEQ ID NO: 4657 - protein, 566 aa, Artificial Sequence
  derived and/or modified protein sequence (wt) from hemagglutinin__InfluenzaA__ADF87182
MNAILVVLLYTFATANADTLCIGYHANNSTDTVDTLLEKNVTVTHSVNLLEDKHNGKLCKLRGVAPLHLGKCNIAGWILGNPECESLSTASSWSYIVETSSSDNGTCYPGDFIDYEELREQLSSVSSFERFEIFPKTSSWPNHDSNKGVTAACPHAGAKSFYKNLIWLVKKGNSYPKLSKSYINDKGKEVLVLWGIHHPSTSADQQSLYQNADAYVFVGTSRYSKKFKPEIAIRPKVRDQEGRMNYHWTLVEPGDKITFEATGNLVVPRYAFAMERNAGSGIIISDAPVHDCNTTCQTPKGAINTSLPFQNIHPITIGKCPKYVKSTKLRLATGLRNVPSIQSRGLFGAIAGFIEGGWTGMVDGWYGYHHQNEQGSGYAADLKSTQNAIDEITNKINSVIEKMNTQFTAVGKEFNHLEKRIENLNKKVDDGFLDIWTYNAELLVLLENERTLDYHDSNVKNLYEKVRSQLKNNAKEIGNGCFEFYHKCDNTCMESVKNGTYDYPKYSEEAKLNREEIDGVKLESTRIYQILAIYSTVASSLVLVVSLGAISFWMCSNGSLQCRICI

SEQ ID NO: 4658 - protein, 566 aa, Artificial Sequence; identical to SEQ ID NO: 4221
  derived and/or modified protein sequence (wt) from hemagglutinin__InfluenzaA__ADF87192

SEQ ID NO: 4659 - protein, 566 aa, Artificial Sequence
  derived and/or modified protein sequence (wt) from hemagglutinin__InfluenzaA__ADF87202
MKAILVVLLYTFATANADTLCIGYHANNSTDTVDTVLEKNVTVTHSVNLLEDKHNGKLCKLRGVAPLHLGKCNIAGWILGNPECESLSTASSWSYIVETSSSDNGTCYPGDFIDYEELREQLSSVSSFERFEIFPKTSSWPNHDSNKGVTAACPHAGAKSFYKNLIWLVKKGNSYPKLSKSYINDKGKEVLVLWGIHHPSTSADQQSLYQNADAYVFVGTSRYSKKFKPEIAIRPKVRDQEGRMNYYWTLVEPGDKITFEATGNLVVPRYAFAMERNAGSGIIISDTPVHDCNTTCQTPKGAINTSLPFQNIHPITIGKCPKYVKSTKLRLATGLRNVPSIQSRGLFGAIAGFIEGGWTGMVDGWYGYHHQNEQGSGFAADLKSTQNAIDKITNKVNSVIEKMNTQFTAVGKEFNHLEKRIENLNKKVDDGFLDIWTYNAELLVLLENERTLDYHDSNVKNLYEKVRSQLKNNAKEIGNGCFEFYHKCDNTCMESVKNGTYDYPKYSEEAKLNREEIDGVKLESTRIYQILAIYSTVASSLVLVVSLGAISFWMCSNGSLQCRICI

SEQ ID NO: 4660 - protein, 566 aa, Artificial Sequence; identical to SEQ ID NO: 4221
  derived and/or modified protein sequence (wt) from hemagglutinin__InfluenzaA__ADF87212

SEQ ID NO: 4661 - protein, 566 aa, Artificial Sequence; identical to SEQ ID NO: 4384
  derived and/or modified protein sequence (wt) from hemagglutinin__InfluenzaA__ADF87232

SEQ ID NO: 4662 - protein, 566 aa, Artificial Sequence; identical to SEQ ID NO: 4221
  derived and/or modified protein sequence (wt) from hemagglutinin__InfluenzaA__ADF87242

SEQ ID NO: 4663 - protein, 566 aa, Artificial Sequence
  derived and/or modified protein sequence (wt) from hemagglutinin__InfluenzaA__ADF87252
MKAILVVLLYTFATANADTLCIGYHANNSTDTVDTVLEKNVTVTHSVNLLEDKHNGKLCKLRGVAPLHLGKCNIAGWILGNPECESLSTASSWSYIVETSSSDNGTCYPGDFINYEELREQLSSVSSFERFEIFPKTSSWPNHDSNKGVTAACPHAGAKSFYKNLIWLVKKGKSYPKLSKSYINDKGKEVLVLWGIHHPSTSADQQSLYQNADAYVFVGTSRYSKKFKPEIAIRPKVRDQEGRMNYYWTLVEPGDKITFEATGNLVVPRYAFAMERNAGSGIIISDTPVHDCNTTCQTPKGAINTSLPFQNIHPITIGKCPKYVKSTKLRLATGLRNVPSIQSRGLFGAIAGFIEGGWTGMVDGWYGYHHQNEQGSGYAADLKSTQNAIDKITNKVNSVIEKMNTQFTAVGKEFNHLEKRIENLNKKVDDGFLDIWTYNAELLVLLENERTLDYHDSNVKNLYEKVRSQLKNNAKEIGNGCFEFYHKCDNTCMESVKNGTYDYPKYSEEAKLNREEIDGVKLESTRIYQILAIYSTVASSLVLVVSLGAISFWMCSNGSLQCRICI

SEQ ID NO: 4664 - protein, 566 aa, Artificial Sequence; identical to SEQ ID NO: 4221
  derived and/or modified protein sequence (wt) from hemagglutinin__InfluenzaA__ADF87262

SEQ ID NO: 4665 - protein, 566 aa, Artificial Sequence; identical to SEQ ID NO: 3833
  derived and/or modified protein sequence (wt) from hemagglutinin__InfluenzaA__ADF87272

SEQ ID NO: 4666 - protein, 566 aa, Artificial Sequence; identical to SEQ ID NO: 3833
  derived and/or modified protein sequence (wt) from hemagglutinin__InfluenzaA__ADF87282

SEQ ID NO: 4667 - protein, 566 aa, Artificial Sequence
  derived and/or modified protein sequence (wt) from hemagglutinin__InfluenzaA__ADF87292
MKAILVVLLYTFATANADTLCIGYHANNSTDTVDTVLKKNVTVTHSVNLLEDKHNGKLCKLRGVAPLHLGKCNIAGWILGNPECESLSTAGSWSYIVETSSSDNGTCYPGDFIDYEELREQLSSVSSFERFEIFPKTSSWPNHDSNKGVTAACPHAGAKSFYKNLIWLVKKGNSYPKLSKSYINDKGKEVLVLWGIHHPSTSADQQSLYQNADAYVFVGTSRYSKKFKPEIAIRPKVRDQEGRMNYYWTLVEPGDKITFEATGNLVVPRYAFAMERNAGSGIIISDTPVHDCNTTCQTPKGAINTSLPFQNIHPITIGKCPKYVKSTKLRLATGLRNVPSIQSRGLFGAIAGFIEGGWTGMVDGWYGYHHQNEQGSGYAADLKSTQNAIDEITNKVNSVIEKMNTQFTAVGKEFNHLEKRIENLNKKVDDGFLDIWTYNAELLVLLENERTLDYHDSNVKNLYEKVRSQLKNNAKEIGNGCFEFYHKCDNMCMESVKNGTYDYPKYSEEAKLNREEIDGVKLESTRIYQILAIYSTVASSLVLVVSLGAISFWMCSNGSLQCRICI

SEQ ID NO: 4668 - protein, 566 aa, Artificial Sequence; identical to SEQ ID NO: 3833
  derived and/or modified protein sequence (wt) from hemagglutinin__InfluenzaA__ADF87302

SEQ ID NO: 4669 - protein, 566 aa, Artificial Sequence
  derived and/or modified protein sequence (wt) from hemagglutinin__InfluenzaA__ADF87331
MKAILVVLLYTFATANADTLCIGYHANNSTDTVDTVLEKNVTVTHSVNLLEDKHNGKLCKLRGVAPLHLGKCNIAGWILGNPECESLSTASSWSYIVETSNSDNGTCYPGDFINYEELREQLSSVSSFERFEIFPKTSSWPNHDSNKGITAACPHAGAKSFYKNLIWLVKKGNSYPKLSKSYINDKGKEVLVLWGIHHPSTSADQQSLYQNADAYVFVGSSRYSKKFKPEIAIRPKVRDQEGRMNYYWTLVEPGDKITFEATGNLVVPRYAFAMERNAGSGIIISDTPVHDCNTTCQTPKGAINTSLPFQNIHPITIGKCPKYVKSTKLRLATGLRNVPSIQSRGLFGAIAGFIEGGWTGMVDGWYGYHHQNEQGSGYAADLKSTQNAIDKITNKVNSVIEKMNTQFTAVGKEFNHLEKRIENLNKKVDDGFLDIWTYNAELLVLLENERTLDYHDSNVKNLYEKVRSQLKNNAKEIGNGCFEFYHKCDNTCMESVKNGTYDYPKYSEEAKLNREEIDGVKLESTRIYQILAIYSTVASSLVLVVSLGAISFWMCSNGSLQCRICI

SEQ ID NO: 4670 - protein, 566 aa, Artificial Sequence; identical to SEQ ID NO: 2669
  derived and/or modified protein sequence (wt) from hemagglutinin__InfluenzaA__ADF87341

SEQ ID NO: 4671 - protein, 566 aa, Artificial Sequence
  derived and/or modified protein sequence (wt) from hemagglutinin__InfluenzaA__ADF87351
MKAILVVLLYTFATANADTLCIGYHANNSTDTVDTVLEKNVTVTHSVNLLEDKHNGKLCKLRGVAPLHLGKCNIAGWILGNPECDSLSTASSWSYIVETSSSDNGTCYPGDFIDYEELREQLSSVSSFERFEMFPKTSSWPNHDSNKGVTAACPHAGAKSFYKNLIWLVKKGNSYPKLSKSYINDKGKEVLVLWGIHHPSTSADQQSLYQNADAYVFVGTSRYSKKFKPEIAIRPKVRDQEGRMNYYWTLVEPGDKITFEATGNLVVPRYAFAMERNAGSGIIISDTPVHDCNTTCQTPKGAINTSLPFQNIHPITIGKCPKYVKSTKLRLATGLRNVPSIQSRGLFGAIAGFIEGGWTGMVDGWYGYHHQNEQGSGYAADLKSTQNAIDEITNKVNSVIEKMNTQFTAVGKEFNHLEKRIENLNKKVDDGFLDIWTYNAELLVLLENERTLDYHDSNVKNLYEKVRSQLKNNAKEIGNGCFEFYHKCDNTCMESVKNGTYDYPKYSEEAKLNREEIDGVKLESTRIYQILAIYSTVASSLVLVVSLGAISFWMCSNGSLQCRICI

SEQ ID NO: 4672 - protein, 566 aa, Artificial Sequence; identical to SEQ ID NO: 4296
  derived and/or modified protein sequence (wt) from hemagglutinin__InfluenzaA__ADF87361

SEQ ID NO: 4673 - protein, 566 aa, Artificial Sequence; identical to SEQ ID NO: 3833
  derived and/or modified protein sequence (wt) from hemagglutinin__InfluenzaA__ADF87371

SEQ ID NO: 4674 - protein, 566 aa, Artificial Sequence
  derived and/or modified protein sequence (wt) from hemagglutinin__InfluenzaA__ADG08115
MKAILVVLLYTFATANADTLCIGYHANNSTDTVDTVLEKNVTVTHSVNLLEDKHNGKLCKLRGVAPLHLGKCNIAGWILGNPECESLSTASSWSYIVETSSSGNGTCYPGDFIDYEELREQLSSVSSFERFEIFPKTSSWPNHDSNKGVTAACPHAGAKSFYKNLIWLVKKGNSYPKLSKSYINDKGKEVLVLWGIHHPSTSADQQSLYQNADAYVFVGTSRYSKKFKPEIAIRPKVRGQEGRMNYYWTLVEPGDKITFEATGNLVVPRYAFAMERNAGSGIIISDTPVHDCNTTCQTPKGAINTSLPFQNIHPITIGKCPKYVKSTKLRLATGLRNVPSIQSRGLFGAIAGFIEGGWTGMVDGWYGYHHQNEQGSGYAADLKSTQNAIDEITNKVNSVIEKMNTQFTAVGKEFNHLEKRIENLNKKVDDGFLDIWTYNAELLVLLENERTLDYHDSNVKNLYEKVRSQLKNNAKEIGNGCFEFYHKCDNTCMESVKNGTYDYPKYSEEAKLNREEIDGVKLESTRIYQILAIYSTVASSLVLVVSLGAISFWMCSNGSLQCRICI

SEQ ID NO: 4675 - protein, 566 aa, Artificial Sequence; identical to SEQ ID NO: 3411
  derived and/or modified protein sequence (wt) from hemagglutinin__InfluenzaA__ADG21004

SEQ ID NO: 4676 - protein, 566 aa, Artificial Sequence; identical to SEQ ID NO: 3411
  derived and/or modified protein sequence (wt) from hemagglutinin__InfluenzaA__ADG21006

SEQ ID NO: 4677 - protein, 566 aa, Artificial Sequence
  derived and/or modified protein sequence (wt) from hemagglutinin__InfluenzaA__ADG21008
MKTIIALSYILCLVFAQKIPGNDNSTATLCLGHHAVPNGTIVKTITNDQIEVTNATELVQSSSTGEICDSPHQILDGENCTLIDALLGDPQCDGFQNKKWDLFVERSKSYSNCYPYDVPDYASLRSLVASSGTLEFNNESFNWTGVTQNGTSSACIRKSNNSFFSRLNWLTHLKFKYPALNVTMPNNEQFDKLYIWGVHHPGTDNDQIFLYAQASGRITVSTKRSQQTVIPNIGSRPRVRNIPSRISIYWTIVKPGDILLINSTGNLIAPRGYFKIRSGKSSIMRSDAPIGKCNSECITPNGSIPNDKPFQNVNRITYGACPRYVKQNTLKLATGMRNVPEKQTRGIFGAIAGFIENGWEGMVDGWYGFRHQNSEGRGQAADLKSTQAAIDQINGKLNRLIGKTNEKFHQIEKEFSEVEGRIQDLEKYVEDTKIDLWSYNAELLVALENQHTIDLTDSEMNKLFEKTKKQLRENAEDMGNGCFKIYHKCDNACIGSIRNGTYDHDVYRDEALNNRFQIKGVELKSGYKDWILWISFAISCFLLCVALLGFIMWACQKGNIRCNICI

SEQ ID NO: 4678 - protein, 566 aa, Artificial Sequence
  derived and/or modified protein sequence (wt) from hemagglutinin__InfluenzaA__ADG21009
MKTIIALSYILCLVFAQKLPGNDNSTATLCLGHHAVPNGTIVKTITNDQIEVTNATELVQSSSTGEICNSPHQILDGENCTLIDALLGDPQCDGFQNKKWDLFVERSKAYSNCYPYDVPDYASLRSLVASSGTLEFNNESFNWTGVTQNGTSSACIRRSNNSFFSRLNWLTHLRFKYPALNVTMPNNEQFDKLYIWGVHHPGTDNDQIFLYAQASGRITVSTKRSQQTVIPNIGSRPRVRNIPSRISIYWTIVKPGDILLINSTGNLIAPRGYFKIRSGKSSIMRSDAPIGKCNSECITPNGSIPNDKPFQNVNRITYGACPRYVKQNTLKLATGMRNVPEKQTRGIFGAIAGFIENGWEGMVDGWYGFRHQNSEGRGQAADLKSTQAAIDQINGKLNRLIGKTNEKFHQIEKEFSEVEGRIQDLEKYVEDTKIDLWSYNAELLVALENQHTIDLTDSEMNKLFEKTKKQLRENAEDMGNGCFKIYHKCDNACIGSIRNGTYDHDVYRDEALNNRFQIKGVELKSGYKDWILWISFAISCFLLCVALLGFIMWACQKGNIRCNICI

SEQ ID NO: 4679 - protein, 566 aa, Artificial Sequence; identical to SEQ ID NO: 3411
  derived and/or modified protein sequence (wt) from hemagglutinin__InfluenzaA__ADG21010

SEQ ID NO: 4680 - protein, 566 aa, Artificial Sequence
  derived and/or modified protein sequence (wt) from hemagglutinin__InfluenzaA__ADG21011
MKTIIALSYILCLVFAQKLPGNDNSTATLCLGHHAVPNGTIVKTITNDQIEVTNATELVQSSSTGEICDSPHQILDGENCTLIDALLGDPQCDGFQNKKWDLFVERSKAYSNCYPYDVPDYASLRSLVASSGTLEFNNESFNWTGVTQNGTSSACIRRSNNSFFSRLNWLTHLNFKYPALNVTMPNNEQFDKLYIWGVHHPGTDKDQIFLYAQASGRITVSTKRSQQAVIPNIGSRPRVRDIPSRISIYWTIVKPGDILLINSTGNLIAPRGYFKIRSGKSSIMRSDAPIGKCNSECITPNGSIPNDKPFQNVNRITYGACPRYVKQNTLKLATGMRNVPEKQTRGIFGAIAGFIENGWEGMVDGWYGFRHQNSEGRGQAADLKSTQAAIDQINGKLNRLIGKTNEKFHQIEKEFSEVEGRIQDLEKYVEDTKIDLWSYNAELLVALENQHTIDLTDSEMNKLFEKTKKQLRENAEDMGNGCFKIYHKCDNACIGSIRNGTYDHDVYRDEALNNRFQIKGVELKSGYKDWILWISFAISCFLLCVALLGFIMWACQKGNIRCNICI

SEQ ID NO: 4681 - protein, 566 aa, Artificial Sequence; identical to SEQ ID NO: 3411
  derived and/or modified protein sequence (wt) from hemagglutinin__InfluenzaA__ADG21012

SEQ ID NO: 4682 - protein, 566 aa, Artificial Sequence; identical to SEQ ID NO: 3411
  derived and/or modified protein sequence (wt) from hemagglutinin__InfluenzaA__ADG21013

SEQ ID NO: 4683 - protein, 566 aa, Artificial Sequence
  derived and/or modified protein sequence (wt) from hemagglutinin__InfluenzaA__ADG21014
MKTIIALSYILCLVFAQKIPGNDNSTATLCLGHHAVPNGTIVKTITNDQIEVTNATELVQSSSTGEICDSPHQILDGENCTLIDALLGDPQCDGFQNKKWDLFVERSKAYSNCYPYDVPDYASLRSLVASSGTLEFNNESFNWTGVTQNGTSSACIRRSNNSFFSRLNWLTHLNFKYPALNVTMPNNEQFDKLYIWGVHHPGTDKDQIFLYAQASGRITVSTKRSQQAVIPNIGSRPRVRNIPSRISIYWTIVKPGDILLINSTGNLIAPRGYFKIRSGKSSIMRSDAPIGKCNSECITPNGSIPNDKPFQNVNRITYGACPRYVKQNTLKLATGMRNVPEKQTRGIFGAIAGFIENGWEGMVDGWYGFRHQNSEGRGQAADLKSTQAAIDQINGKLNRLIGKTNEKFHQIEKEFSEVEGRIQDLEKYVEDTKIDLWSYNAELLVALENQHTIDLTDSEMNKLFEKTKKQLRENAEDMGNGCFKIYHKCDNACIGSIRNGTYDHDVYRDEALNNRFQIKGVELKSGYKDWILWISFAISCFLLCVALLGFIMWACQKGNIRCNICI

SEQ ID NO: 4684 - protein, 566 aa, Artificial Sequence
  derived and/or modified protein sequence (wt) from hemagglutinin__InfluenzaA__ADG21017
MKTIIALSYILYLVFAQKLPGNDNSTATLCLGHHAVPNGTIVKTITNDQIEVTNATELVQSSSTGEICDSPHQILDGENCTLIDALLGDPQCDGFQNKKWDLFIERSKAYSNCYPYDVPDYASLRSLVASSGTLEFNNESFNWTGVTQNGTSSACIRRSNNSFFSRLNWLTHLNFKYPALNVTMPNNEQFDKLYIWGVHHPGTDKDQIFLYAQASGRITVSTKRSQQAVIPNIGSRPRVRNIPSRISIYWTIVKPGDILLINSTGNLIAPRGYFKIRSGKSSIMRSDAPIGKCNSECITPNGSIPNDKPFQNVNRITYGACPRYVKQNTLKLATGMRNVPEKQTRGIFGAIAGFIENGWEGMVDGWYGFRHQNSEGRGQAADLKSTQAAIDQINGKLNRLIGKTNEKFHQIEKEFSEVEGRIQDLEKYVEDTKIDLWSYNAELLVALENQHTIDLTDSEMNKLFEKTKKQLRENAEDMGNGCFKIYHKCDNACIGSIRNGTYDHDVYRDEALNNRFQIKGVELKSGYKDWILWISFAISCFLLCVALLGFIMWACQKGNIRCNICI

SEQ ID NO: 4685 - protein, 566 aa, Artificial Sequence
  derived and/or modified protein sequence (wt) from hemagglutinin__InfluenzaA__ADG21018
MKTIIALSYILCLVFAQKLPGNDNSTATLCLGHHAVPNGTIVKTITNDQIEVTNATELVQSSSTGEICDSPHQILDGENCTLIDALLGDPQCDGFQNKKWDLFVERSKAYSNCYPYDVPDYASLRSLVASSGTLEFNNESFNWTGVTQNGTSSACIRRSNNSFFSRLNWLTHSNFKYPALNVTMPNNEQFDKLYIWGVHHPGTDKDQIFLYAQASGRITVSTKRSQQAVIPNIGSRHRVRNIPSRISIYWTIVKPGDILLINSTGNLIAPRGYFKIRSGKSSIMRSDAPIGKCNSECITPNGSIPNDKPFQNVNRITYGACPRYVKQNTLKLATGMRNVPEKQTRGIFGAIAGFIENGWEGMVDGWYGFRHQNSEGRGQAADLKSTQAAIDQINGKLNRLIGKTNEKFHQIEKEFSEVEGRIQDLEKYVEDTKIDLWSYNAELLVALENQHTIDLTDSEMNKLFEKTKKQLRENAEDMGNGCFKIYHKCDNACIGSIRNGTYDHDVYRDEALNNRFQIKGVELKSGYKDWILWISFAISCFLLCVALLGFIMWACQKGNIRCNICI

SEQ ID NO: 4686 - protein, 566 aa, Artificial Sequence
  derived and/or modified protein sequence (wt) from hemagglutinin__InfluenzaA__ADG21019
MKTIIALSYILCLVFAQKLPGNDNSTATLCLGHHAVPNGTIVKTITNDQIEVTNATELVQSSSTGEICDSPHQILDGKNCTLIDTLLGDPQCDGFQNKKWDLFVERSKAYSNCYPYDVPDYASLRSLVASSGTLEFNNESFNWTGVTQNGTSSACIRRSKNSFFSRLNWLTHLNFKYPALNVTMPNNEQFDKLYIWGVHHPGTDKDQIFLYAQASGKIIVSTKRSQQTVIPNIGSRPRVRNIPSIISIYWTIVKPGDILLINSTGNLIAPRGYFKIRSGKSSIMRSDAPIGKCNSECITPNGSIPNDKPFQNVNRITYGACPRYVKQNTLKLATGMRNVPEKQTRGIFGAIAGFIENGWEGMVDGWYGFRHQNSEGRGQAADLKSTQAAIDQINGKLNRLIGKTNEKFHQIEKEFSEVEGRIQDLEKYVEDTKIDLWSYNAELLVALENQHTIDLTDSEMNKLFEKTKKQLRENAEDIGNGCFKIYHKCDNACIGSIRNGTYDHDVYRDEALNNRFQIKGVELKSGYKDWILWISFAISCFLLCVALLGFIMWACQKGNIRCNICI

SEQ ID NO: 4687 - protein, 566 aa, Artificial Sequence
  derived and/or modified protein sequence (wt) from hemagglutinin__InfluenzaA__ADG21020
MKTIIALSYILCLVFAQKLPGNDNSTATLCLGHHAVPNGTIVKTITNDQIEVTNATELVQSSSTGEICDSPHQILDGKNCTLIDALLGDPQCDGFQNKKWDLFVERSKAYSNCYPYDVPDYASLRSLVASSGTLEFNNESFNWTGVTQSGTSSACIRRSKNSFFSRLNWLTHLNFKYPALNVTMPNNEQFDKLYIWGVHHPGTDKDQIFLYAQASGRIIVSTKRSQQTVTPNIGSRPRVRNIPSRISIYWTIVKPGDILLINSTGNLIAPRGYFKIRSGKSSIMRSDAPIGKCNSECITPNGSIPNDKPFQNVNRITYGACPRYVKQNTLKLATGMRNVPEKQTRGIFGAIAGFIENGWEGMVDGWYGFRHQNSEGRGQAADLKSTQAAIDQINGKLNRLIGKTNEKFHQIEKEFSEVEGRIQDLEKYVEDTKIDLWSYNAELLVALENQHTIDLTDSEMNKLFEKTKKQLRENAEDMGNGCFKIYHKCDNACIGSIRNGTYDHDVYRDEALNNRFQIKGVELKSGYKDWILWISFAISCFLLCVALLGFIMWACQKGNIRCNICI

SEQ ID NO: 4688 - protein, 566 aa, Artificial Sequence; identical to SEQ ID NO: 2434
  derived and/or modified protein sequence (wt) from hemagglutinin__InfluenzaA__ADG21022

SEQ ID NO: 4689 - protein, 566 aa, Artificial Sequence; identical to SEQ ID NO: 2434
  derived and/or modified protein sequence (wt) from hemagglutinin__InfluenzaA__ADG21023

SEQ ID NO: 4690 - protein, 566 aa, Artificial Sequence
  derived and/or modified protein sequence (wt) from hemagglutinin__InfluenzaA__ADG21024
MKTIIALSYILCLVFTQKLPGNDNSTATLCLGHHAVPNGTIVKTITNDQIEVTNATELVQSSSTGEICDSPHQILDGENCTLIDALLGDPQCDGFQNKKWDLFVERSKAYSNCYPYDVPDYASLRSLVASSGALEFNNESFNWTGVTQNGTSSACIRRSNNSFFSRLNWLTHLNFKYPALNVTMPNNEQFDKLYIWGVHHPGTDKDQIFLYAQASGRITVSTKRSQQAVIPNIGSRPRVRNIPSRISIYWTIVKPGDILLINSTGNLIAPRGYFKIQSGKSSIMRSDAPIGKCNSECITPNGSIPNDKPFQNVNRITYGACPRYVKQSTLKLATGMRNVPEKQTRGIFGAIAGFIENGWEGMVDGWYGFRHQNSEGRGQAADLKSTQAAIDQINGKLNRLIGKTNEKFHQIEKEFSEVEGRIQDLEKYVEDTKIDLWSYNAELLVALENQHTIDLTDSEMNKLFEKTKKQLRENAEDMGNGCFKIYHKCDNACIGSIRNGTYDHDVYRDEALNNRFQIKGVELKSGYKDWILWISFAISCFLLCVALLGFIMWACQKGNIRCNICI

SEQ ID NO: 4691 - protein, 566 aa, Artificial Sequence
  derived and/or modified protein sequence (wt) from hemagglutinin__InfluenzaA__ADG21026
MKTIIALSYILCLVFAQKLPGNDNSTATLCLGHHAVPNGTIVKTITNDQIEVTNATELVQSSSTGEICDSPHQILDGENCTLIDALLGDPQCDGFQNKKWDLFVERSKAYSNCYPYDVPDYASLRSLVASSGTLEFNNESFNWTGVTQNGTSSACIRRSNNSFFSRLNWLTHLNFKYPALNVTMPNNEQFDKLYIWGVHHPGTDKDQIFLYAQASGRITVSTKRSQQAVIPNIGSRLRVRNIPSRISIYWTIVKPGDILLINSTGNLIAPRGYFKIRSGKSSIMRSDAPIGKCNSECITPNGSIPNDKPFQNVNRITYGACPRYVKQSTLKLATGMRNVPEKQTRGIFGAIAGFIENGWEGMVDGWYGFRHQNSEGRGQAADLKSTQAAIDQINGKLNRLIGKTNEKFHQIEKEFSEVEGRIQDLEKYVEDTKIDLWSYNAELLVALENQHTIDLTDSEMNKLFEKTKKQLRENAEDMGNGCFTIYHKCDNACIGSIRNGTYDHNVYRDEALNNRFQIKGVELKSGYKDWILWISFAISCFLLCVALLGFIMWACQKGNIRCNICI

SEQ ID NO: 4692 - protein, 566 aa, Artificial Sequence; identical to SEQ ID NO: 2669
  derived and/or modified protein sequence (wt) from hemagglutinin__InfluenzaA__ADG21037

SEQ ID NO: 4693 - protein, 566 aa, Artificial Sequence
  derived and/or modified protein sequence (wt) from hemagglutinin__InfluenzaA__ADG21038
MKAILVVLLYTFATADADTLCIGYHANNSTDTVDTVLEKNVTVTHSVNLLEDKHNGKLCKLRGVAPLHLGKCNIAGWILGNPECESLSTASSWSYIVETSSSDNGTCYPGDFIDYEELREQLSSVSSFERFEIFPKTSSWPNHDSNKGVTAACPHAGAKSFYKNLIWLVKKGNSYPKLSKSYINDKGKEVLVLWGIHHPSTSADQQSLYQNADAYVFVGTSRYSKKFKPEIAIRPKVRDQEGRMNYYWTLVEPGDKITFEATGNLVVPRYAFAMERNAGSGIIISDTPVHDCNTTCQTPKGAINTSLPFQNIHPITIGKCPKYVKSTKLRLATGLRNVPSIQSRGLFGAIAGFIEGGWTGMVDGWYGYHHQNEQGSGYAADLKSTQNAIDEITNKVNSVIEKMNTQFTAVGKEFNHLEKRIENLNKKVDDGFLDIWTYNAELLVLLENERTLDYHDSNVKNLYEKVRSQLKNNAKEIGNGCFEFYHKCDNTCMESVKNGTYDYPKYSEEAKLNREEIDGVKLESTRIYQILAIYSTVASSLVLVVSLGAISFWMCSNGSLQCRICI

SEQ ID NO: 4694 - protein, 566 aa, Artificial Sequence
  derived and/or modified protein sequence (wt) from hemagglutinin__InfluenzaA__ADG21040
MKAILVVLLYTFATANADTLCIGYHANNSTDTVDTVLEKNVTVTHSVNLLEDKHNGKLCKLRGVAPLHLGKCNIAGWILGNPECESLSTASSWSYIVETSSSDNGTCYPGDFIDYEELREQLSSVSSFERFEIFPKTSSWPNHDSNKGVTAACPHAGAKSFYKNLIWLVKKGNSYPKLSKSYINDKGKEVLVLWGIHHPSTSADQQSLYQNADAYVFVGTSRYSKKFKPEIAIRPKVRDQEGRMNYYWTLVEPGDKITFEATGNLVVPRYAFAMERNAGSGIIISDTPVHDCNTTCQTPKGAINTSLPFQNVHPITIGKCPKYVKSTKLRLATGLRNVPSIQSRGLFGAIAGFIEGGWTGMVDGWYGYHHQNEQGSGYAADLKSTQNAIDEITNKVNSVIEKMNTQFTAVGKEFNHLEKRIENLNKKVDDGFLDIWTYNAELLVLLENERTLDYHDSNVKNLYEKVRSQLKNNAKEIGNGCFEFYHKCDNTCMESVKNGTYDYPKYSEEAKLNREEIDGVKLESTRVYQILAIYSTVASSLVLVVSLGAISFWMCSNGSLQCRICI

SEQ ID NO: 4695 - protein, 566 aa, Artificial Sequence
  derived and/or modified protein sequence (wt) from hemagglutinin__InfluenzaA__ADG21041
MKAILVVLLYTFTTANADTLCIGYHANNSTDTVDTVLEKNVTVTHSVNLLEDKHNGKLCKLRGVAPLHLGKCNIAGWILGNPECESLSTASSWSYIVETSSSDNGTCYPGDFIDYEELREQLSSVSSFERFEIFPKTSSWPNHDSNKGVTAACPHAGAKSFYKNLIWLVKKGNSYPKLSKSYINDKGKEVLVLWGIHHPSTSADQQSLYQNADAYVFVGTSRYSKKFKPEIAIRPKVREQEGRMNYYWTLVEPGDKITFEATGNLVVPRYAFAMERNAGSGIIISDTPVHDCNTTCQTPKGAINTSLPFQNIHSITIGKCPKYVKSTKLRLATGLRNVPSIQSRGLFGAIAGFIEGGWTGMVDGWYGYHHQNEQGSGYAADLKSTQNAIDEITNKVNSVIEKMNTQFTAVGKEFNHLEKRIENLNKKVDDGFLDIWTYNAELLVLLENERTLDYHDSNVKNLYEKVRSQLKNNAKEIGNGCFEFYHKCDNTCMESVKNGTYDYPKYSEEAKLNREEIDGVKLESTRIYQILAIYSTVASSLVLVVSLGAVSFWMCSNGSLQCRICI

SEQ ID NO: 4696 - protein, 566 aa, Artificial Sequence; identical to SEQ ID NO: 3770
  derived and/or modified protein sequence (wt) from hemagglutinin__InfluenzaA__ADG21042

SEQ ID NO: 4697 - protein, 566 aa, Artificial Sequence
  derived and/or modified protein sequence (wt) from hemagglutinin__InfluenzaA__ADG21043
MKAILVVLLYTFTTANADTLCVGYHANNSTDTVDTVLEKNVTVTHSVNLLEDKHNGKLCKLRGVAPLHLGKCNIAGWILGNPECESLSTASSWSYIVETSSSDNGTCYPGDFIDYEELREQLSSVSSFERFEIFPKTSSWPNHDSNKGVTAACPHAGAKSFYKNLIWLVKKGNSYPKLSKSYINDKGKEVLVLWGIHHPSTSADQQSLYQNADAYVFVGTSRYSKKFKPEIAIRPKVREQEGRMNYYWTLVEPGDKITFEATGNLVVPRYAFAMERNAGSGIIISDTPVHDCNTTCQTPKGAINTSLPFQNIHSITIGKCPKYVKSTKLRLATGLRNVPSIQSRGLFGAIAGFIEGGWTGMVDGWYGYHHQNEQGSGYAADLKSTQNAIDEITNKVNSVIEKMNTQFTAVGKEFNHLEKRIENLNKKVDDGFLDIWTYNAELLVLLENERTLDYHDSNVKNLYEKVRSQLKNNAKEIGNGCFEFYHKCDNTCMESVKNGTYDYPKYSEEAKLNREEIDGVKLESTRIYQILAIYSTVASSLVLVVSLGAISFWMCSNGSLQCRICI

SEQ ID NO: 4698 - protein, 566 aa, Artificial Sequence
  derived and/or modified protein sequence (wt) from hemagglutinin__InfluenzaA__ADG21045
MKAILVVLLYTFTTANADTLCIGYHANNSTDTVDTVLEKNVTVTHSVNLLEDKHNGKLCKLRGVAPLHLGKCNIAGWILGNPECESLSTASSWSYIVETSSSDNGTCYPGDFIDYEELREQLSSVSSFERFEIFPKTSSWPNHDSNKGVTAACPHAGAKSFYKNLIWLVKKGNSYPKLSKSYINDKGKEVLVLWGIHHPSTSADQQSLYQNADAYVFVGTSRYSKKFKPEIAIRPKVREQEGRMNYYWTLVEPGDKITFEATGNLVVPRYAFAMERNAGSGIIISDTPVHDCNTTCQTPKGAINTSLPFQNIHSITIGKCPKYVKSTKLRLATGLRNVPSIQSRGLFGAIAGFIEGGWTGMVDGWYGYHHQNEQGSGYAADLKSTQNAIDEITNKVNSVIEKMNTQFTAVGKEFNHLEKRIENLNKKVDDGFLDIWTYNAELLVLLENERTLDYHDSNVKNLYEKVRSQLKNNAKEIGNGCFEFYHKCDNTCMESVKNGTYDYPKYSEEAKLNREEIDGVKLESTRIYQILAIYSTVASSLVLVVSLGAISFWMCSNGSLQCRICI

SEQ ID NO: 4699 - protein, 566 aa, Artificial Sequence; identical to SEQ ID NO: 4698
  derived and/or modified protein sequence (wt) from hemagglutinin__InfluenzaA__ADG21046

SEQ ID NO: 4700 - protein, 566 aa, Artificial Sequence; identical to SEQ ID NO: 3833
  derived and/or modified protein sequence (wt) from hemagglutinin__InfluenzaA__ADG21048

SEQ ID NO: 4701 - protein, 566 aa, Artificial Sequence
  derived and/or modified protein sequence (wt) from hemagglutinin__InfluenzaA__ADG21049
MKAILVVLLYTFATANADTLCIGYHANNSTDTVDTVLEKNVTVTHSVNLLEDKHNGKLCKLRGVAPLHLGKCNIAGWILGNPECESLSTASSWSYIVETSSSDNGTCYPGDFIDYEELREQLSSVSSFERFEIFPKTSSWPNHDSNKGVTAACPHAGAKSFYKNLIWLVKKGNSYPKLSKSYINDKGKEVLVLWGIHHPSTSADQQSLYQNADAYVFVGTSRYSKKFKPEIAIRPKVRNQEGRMNYYWTLVEPGDKITFEATGNLVVPRYAFAMERNAGSGIIISDTPVHDCNTTCQTSKGAINTSLPFQNIHPITIGKCPKYVKSTKLRLATGLRNIPSIQSRGLFGAIAGFIEGGWTGMVDGWYGYHHQNEQGSGYAADLKSTQNAIDEITNKVNSVIEKMNTQFTAVGKEFNHLEKRIENLNKKVDDGFLDIWTYNAELLVLLENERTLDYHDSNVKNLYEKVRSQLKNNAKEIGNGCFEFYHKCDNTCMESVKNGTYDYPKYSEEAKLNREEIDGVKLESTRIYQILAIYSTVASSLVLVVSLGAISFWMCSNGSLQCRICI

SEQ ID NO: 4702 - protein, 566 aa, Artificial Sequence; identical to SEQ ID NO: 3022
  derived and/or modified protein sequence (wt) from hemagglutinin__InfluenzaA__ADG21122

SEQ ID NO: 4703 - protein, 566 aa, Artificial Sequence; identical to SEQ ID NO: 3833
  derived and/or modified protein sequence (wt) from hemagglutinin__InfluenzaA__ADG21123

SEQ ID NO: 4704 - protein, 566 aa, Artificial Sequence; identical to SEQ ID NO: 2669
  derived and/or modified protein sequence (wt) from hemagglutinin__InfluenzaA__ADG21124

SEQ ID NO: 4705 - protein, 566 aa, Artificial Sequence
  derived and/or modified protein sequence (wt) from hemagglutinin__InfluenzaA__ADG21125
MKAILVVLLYTFATANADTLCIGYHANNSTDTVDTVLEKNVTVTHSVNLLEDKHNGKLCKLRGVAPLHLGKCNIAGWILGNPECESLSTASSWSYIVETSSSDNGTCYPGDFIDYEELREQLSSVSSFKRFEIFPKTSSWPNHDSNKGVTAACPHAGAKSFYKNLIWLVKKGNSYPKLSKSYINDKGKEVLVLWGIHHPSTSADQQSLYQNADAYVFVGTSRYSKKFKPEIAIRPKVRDQEGRMNYYWTLVEPGDKITFEATGNLVVPRYAFAMERNAGSGIIISDTPVHDCNTTCQTPKGAINTSLPFQNIHPITIGKCPKYVKSTKLRLATGLRNVPSIQSRGLFGAIAGFIEGGWTGMVDGWYGYHHQNEQGSGYAADLKSTQNAIDEITNKVNSVIEKMNTQFTAVGKEFNHLEKRIENLNKKVDDGFLDIWTYNAELLVLLENERTLDYHDSNVKNLYEKVRSQLKNNAKEIGNGCFEFYHKCDNTCMESVKNGTYDYPKYSEEAKLNREEIDGVKLESTRIYQILAIYSTVASSLVLVVSLGAISFWMCSNGSLQCRICI

SEQ ID NO: 4706 - protein, 566 aa, Artificial Sequence; identical to SEQ ID NO: 2656
  derived and/or modified protein sequence (wt) from hemagglutinin__InfluenzaA__ADG21126

SEQ ID NO: 4707 - protein, 566 aa, Artificial Sequence; identical to SEQ ID NO: 2656
  derived and/or modified protein sequence (wt) from hemagglutinin__InfluenzaA__ADG21127

SEQ ID NO: 4708 - protein, 566 aa, Artificial Sequence; identical to SEQ ID NO: 2656
  derived and/or modified protein sequence (wt) from hemagglutinin__InfluenzaA__ADG21128

SEQ ID NO: 4709 - protein, 566 aa, Artificial Sequence; identical to SEQ ID NO: 2656
  derived and/or modified protein sequence (wt) from hemagglutinin__InfluenzaA__ADG21129

SEQ ID NO: 4710 - protein, 566 aa, Artificial Sequence; identical to SEQ ID NO: 2669
  derived and/or modified protein sequence (wt) from hemagglutinin__InfluenzaA__ADG21130

SEQ ID NO: 4711 - protein, 566 aa, Artificial Sequence; identical to SEQ ID NO: 2656
  derived and/or modified protein sequence (wt) from hemagglutinin__InfluenzaA__ADG21131

SEQ ID NO: 4712 - protein, 566 aa, Artificial Sequence; identical to SEQ ID NO: 2656
  derived and/or modified protein sequence (wt) from hemagglutinin__InfluenzaA__ADG21132

SEQ ID NO: 4713 - protein, 566 aa, Artificial Sequence; identical to SEQ ID NO: 2656
  derived and/or modified protein sequence (wt) from hemagglutinin__InfluenzaA__ADG21133

SEQ ID NO: 4714 - protein, 566 aa, Artificial Sequence; identical to SEQ ID NO: 2656
  derived and/or modified protein sequence (wt) from hemagglutinin__InfluenzaA__ADG21134

SEQ ID NO: 4715 - protein, 566 aa, Artificial Sequence; identical to SEQ ID NO: 2656
  derived and/or modified protein sequence (wt) from hemagglutinin__InfluenzaA__ADG21135

SEQ ID NO: 4716 - protein, 566 aa, Artificial Sequence; identical to SEQ ID NO: 2656
  derived and/or modified protein sequence (wt) from hemagglutinin__InfluenzaA__ADG21136

SEQ ID NO: 4717 - protein, 566 aa, Artificial Sequence; identical to SEQ ID NO: 2656
  derived and/or modified protein sequence (wt) from hemagglutinin__InfluenzaA__ADG21137

SEQ ID NO: 4718 - protein, 566 aa, Artificial Sequence; identical to SEQ ID NO: 2656
  derived and/or modified protein sequence (wt) from hemagglutinin__InfluenzaA__ADG21138

SEQ ID NO: 4719 - protein, 566 aa, Artificial Sequence; identical to SEQ ID NO: 2656
  derived and/or modified protein sequence (wt) from hemagglutinin__InfluenzaA__ADG21139

SEQ ID NO: 4720 - protein, 566 aa, Artificial Sequence
  derived and/or modified protein sequence (wt) from hemagglutinin__InfluenzaA__ADG21140
MKAILVVLLYTFATANADTLCIGYHANNSTDTVDTVLEKNVTVTHSVNLLEDKHNGKLCKLRGVAPLHLGKCNIAGWILGNPECESLSTASSWSYIVETSSSDNGTCYPGDFIDYEELREQLSSVSSFERFEIFPKTSSWPNHDSNKGVTAACPHAGAKSFYKNLIWLVKKGNSYPKLSKSYINDKGKEVLMLWGIHHPSTSADQQSLYQNADAYVFVGSSRYSKKFKPEIAIRPKVRDQEGRMNYYWTLVEPGDKITFEATGNLVVPRYAFAMERNAGSGIIISDTPVHDCNTTCQTPKGAINTSLPFQNIHPITIGKCPKYVKSTKLRLATGLRNVPSIQSRGLFGAIAGFIEGGWTGMVDGWYGYHHQNEQGSGYAADLKSTQNAIDEITNKVNSVIEKMNTQFTAVGKEFNHLEKRIENLNKKVDDGFLDIWTYNAELLVLLENERTLDYHDSNVKNLYEKVRSQLKNNAKEIGNGCFEFYHKCDNTCMESVKNGTYDYPKYSEEAKLNREEIDGVKLESTRIYQILAIYSTVASSLVLVVSLGAISFWMCSNGSLQCRICI

SEQ ID NO: 4721 - protein, 566 aa, Artificial Sequence; identical to SEQ ID NO: 2656
  derived and/or modified protein sequence (wt) from hemagglutinin__InfluenzaA__ADG21141

SEQ ID NO: 4722 - protein, 566 aa, Artificial Sequence
  derived and/or modified protein sequence (wt) from hemagglutinin__InfluenzaA__ADG21142
MKAILVVLLYTFATANADTLCIGYHANNSTDTVDTVLEKNVTVTHSVNLLEDKHNGKLCKLRGVAPLHLGKCNIAGWILGNPECESLSTASSWSYIVETSSSDNGTCYPGDFIDYEELREQLSSVSSFERFEIFPKTSSWPNHDSNKGVTAACPHAGEKSFYKNLIWLVKKGNSYPKLSKSYINDKGKEVLVLWGIHHPSTSADQQSLYQNADAYVFVGSSRYSKKFKPEIAIRPKVRDQEGRMNYYWTLVEPGDKITFEATGNLVVPRYAFAMERNAGSGIIISDTPVHDCNTTCQTPKGAINTSLPFQNIHPITIGKCPKYVKSTKLRLATGLRNVPSIQSRGLFGAIAGFIEGGWTGMVDGWYGYHHQNEQGSGYAADLKSTQNAIDEITNKVNSVIEKMNTQFTAVGKEFNHLEKRIENLNKKVDDGFLDIWTYNAELLVLLENERTLDYHDSNVKNLYEKVRSQLKNNAKEIGNGCFEFYHKCDNTCMESVKNGTYDYPKYSEEAKLNREEIDGVKLESTRIYQILAIYSTVASSLVLVVSLGAISFWMCSNGSLQCRICI

SEQ ID NO: 4723 - protein, 566 aa, Artificial Sequence; identical to SEQ ID NO: 2656
  derived and/or modified protein sequence (wt) from hemagglutinin__InfluenzaA__ADG21143

SEQ ID NO: 4724 - protein, 566 aa, Artificial Sequence; identical to SEQ ID NO: 2656
  derived and/or modified protein sequence (wt) from hemagglutinin__InfluenzaA__ADG21144

SEQ ID NO: 4725 - protein, 566 aa, Artificial Sequence
  derived and/or modified protein sequence (wt) from hemagglutinin__InfluenzaA__ADG21145
MKAILVVLLYTFATANADTLCIGYHANNSTDTVDTVLEKNVTVTHSVNLLEDKHNGKLCKLRGVAPLHLGKCNIAGWILGNPECESLSTASSWSYIVETSSSDNGTCYPGDFIDYEELREQLSSVSSFERFEIFPKTSSWPNHDSNKGVTAACPHAGAKSFYKNLIWLVKKGNSYPKLSISYINDKGKEVLVLWGIHHPSTSADQQSLYQNADAYVFVGSSRYSKKFKPEIAIRPKVRDQEGRMNYYWTLVEPGDKITFEATGNLVVPRYAFAMERNAGSGIIISDTPVHDCNTTCQTPKGAINTSLPFQNIHPITIGKCPKYVKSTKLRLATGLRNVPSIQSRGLFGAIAGFIEGGWTGMVDGWYGYHHQNEQGSGYAADLKSTQNAIDEITNKVNSVIEKMNTQFTAVGKEFNHLEKRIENLNKKVDDGFLDIWTYNAELLVLLENERTLDYHDSNVKNLYEKVRSQLKNNAKEIGNGCFEFYHKCDNTCMESVKNGTYDYPKYSEEAKLNREEIDGVKLESTRIYQILAIYSTVASSLVLVVSLGAISFWMCSNGSLQCRICI

SEQ ID NO: 4726 - protein, 566 aa, Artificial Sequence; identical to SEQ ID NO: 2656
  derived and/or modified protein sequence (wt) from hemagglutinin__InfluenzaA__ADG21146

SEQ ID NO: 4727 - protein, 566 aa, Artificial Sequence; identical to SEQ ID NO: 2656
  derived and/or modified protein sequence (wt) from hemagglutinin__InfluenzaA__ADG21147

SEQ ID NO: 4728 - protein, 566 aa, Artificial Sequence; identical to SEQ ID NO: 2669
  derived and/or modified protein sequence (wt) from hemagglutinin__InfluenzaA__ADG21148

SEQ ID NO: 4729 - protein, 566 aa, Artificial Sequence; identical to SEQ ID NO: 3770
  derived and/or modified protein sequence (wt) from hemagglutinin__InfluenzaA__ADG21149

SEQ ID NO: 4730 - protein, 566 aa, Artificial Sequence; identical to SEQ ID NO: 3833
  derived and/or modified protein sequence (wt) from hemagglutinin__InfluenzaA__ADG21150

SEQ ID NO: 4731 - protein, 566 aa, Artificial Sequence; identical to SEQ ID NO: 2656
  derived and/or modified protein sequence (wt) from hemagglutinin__InfluenzaA__ADG21151

SEQ ID NO: 4732 - protein, 566 aa, Artificial Sequence; identical to SEQ ID NO: 2656
  derived and/or modified protein sequence (wt) from hemagglutinin__InfluenzaA__ADG21152

SEQ ID NO: 4733 - protein, 566 aa, Artificial Sequence; identical to SEQ ID NO: 2669
  derived and/or modified protein sequence (wt) from hemagglutinin__InfluenzaA__ADG21153

SEQ ID NO: 4734 - protein, 566 aa, Artificial Sequence; identical to SEQ ID NO: 2656
  derived and/or modified protein sequence (wt) from hemagglutinin__InfluenzaA__ADG21154

SEQ ID NO: 4735 - protein, 566 aa, Artificial Sequence; identical to SEQ ID NO: 2656
  derived and/or modified protein sequence (wt) from hemagglutinin__InfluenzaA__ADG21155

SEQ ID NO: 4736 - protein, 566 aa, Artificial Sequence; identical to SEQ ID NO: 3833
  derived and/or modified protein sequence (wt) from hemagglutinin__InfluenzaA__ADG21156

SEQ ID NO: 4737 - protein, 566 aa, Artificial Sequence; identical to SEQ ID NO: 3841
  derived and/or modified protein sequence (wt) from hemagglutinin__InfluenzaA__ADG21158

SEQ ID NO: 4738 - protein, 566 aa, Artificial Sequence
  derived and/or modified protein sequence (wt) from hemagglutinin__InfluenzaA__ADG21159
MKAILVVLLYTFATANADTLCIGYHANNSTDTVDTVLEKNVTVTHSVNLLEDKHNGKLCKLRGVAPLHLGKCNIAGWILGNPECESLSTASSWSYIVETSSSDNGTCYPGDFIDYEELREQLSSVSSFERFEIFPKTSSWPNHDSNKGVTAACPHAGAKSFYKNLIWLVKKGNSYPKLSKSYINDKGKEVLVLWGIHHPSTSADQQSLYQNADAYVFVGTSRYSKKFKPEIAIRPKVRDQEGRMNYYWTLVEPGDKITFEATGNLVVPRYAFAMERNAGSGIIISDTPVHDCNTTCQTPKGAINTSLPFQNIHPITIGKCPKYVKSTKLRLATGLRNVPSIQSRGLFGAIAGFIEGGWTGMVDGWYGYHHQNEQGSGYAADLKSTQNAIDEITNKVNSVIEKMNTQFTAVGKEFNHLEKRIENLNKKVDDGFLDIWTYNAELLVLLENERTLDYHDSNVKNLYEKVRSQLKNNAKEIGNGCFEFYHKCDNTCMESVKNGTYDYPKYSEEAKLNREEIDGVKLESTRIYQILAIYSTVASSLVLLVSLGAISFWMCSNGSLQCRICI

SEQ ID NO: 4739 - protein, 566 aa, Artificial Sequence; identical to SEQ ID NO: 3841
  derived and/or modified protein sequence (wt) from hemagglutinin__InfluenzaA__ADG21160

SEQ ID NO: 4740 - protein, 566 aa, Artificial Sequence
  derived and/or modified protein sequence (wt) from hemagglutinin__InfluenzaA__ADG21161
MKAILVVLLYTFATANADTLCIGYHANNSTDTVDTVLEKNVTVTHSVNLLEDKHNGKLCKLRGVAPLHLGKCNIAGWILGNPECESLSTASSWSYIVETSSSDNGTCYPGDFIDYEELREQLSSVSSFERFEIFPKTSSWPNHDSNKGVTAACPHAGAKSFYKNLIWLVKKENSYPKLSKSYINDKGKEVLVLWGIHHPSTSADQQSLYQNADAYVFVGTSRYSKKFKPEIAIRPKVRDQEGRMNYYWTLVEPGDKITFEATGNLVVPRYAFAMERNAGSGIIISDTPVHDCNTTCQTPKGAINTSLPFQNIHPITIGKCPKYVKSTKLRLATGLRNVPSIQSRGLFGAIAGFIEGGWTGMVDGWYGYHHQNEQGSGYAADLKSTQNAIDEITNKVNSVIEKMNTQFTAVGKEFNHLEKRIENLNKKVDDGFLDIWTYNAELLVLLENERTLDYHNSNVKNLYEKVRSQLKNNAKEIGNGCFEFYHKCDNTCMESVKNGTYDYPKYSEEAKLNREEIDGVKLESTRIYQILAIYSTVASSLVLVVSLGAISFWMCSNGSLQCRICI

SEQ ID NO: 4741 - protein, 566 aa, Artificial Sequence
  derived and/or modified protein sequence (wt) from hemagglutinin__InfluenzaA__ADG21163
MKAILVVLLYTFATANADTLCIGYHANNSTDTVDTVLEKNVTVTHSVNLLEDKHNGKLCKLRGVAPLHLGKCNIAGWILGNPECESLSTASSWSYIVETSSSDNGTCYPGDFIDYEELREQLSSVSSFERFEIFPKTSSWPNHDSNKGVTAACPHAGAKSFYKNLIWLVKKGNSYPKLSKSYINDKGKEVLVLWGIHHPSTSADQQSLYQNADAYVFVGTSRYSKKFKPEIAIRPKVRDQEGRMNYYWTLVEPGDKITFEATGNLVVPRYAFAMERNAGSGIIISDTPVHDCNTTCQTPKGAINTSLPFQNVHPITIGKCPKYVKSTKLRLATGLRNVPSIQSRGLFGAIAGFIEGGWTGMVDGWYGYHHQNEQGSGYAADLKSTQNAIDEITNKVNSVIEKMNTQFTAVGKEFNHLEKRIENLNKKVDDGFLDVWTYNAELLVLLENERTLDYHDSNVKNLYEKVRSQLKNNAKEIGNGCFEFYHKCDNTCMESVKNGTYDYPKYSEEAKLNREEIDGVKLESTRIYQILAIYSTVASSLVLVVSLGAISFWMCSNGSLQCRICI

SEQ ID NO: 4742 - protein, 566 aa, Artificial Sequence
  derived and/or modified protein sequence (wt) from hemagglutinin__InfluenzaA__ADG21165
MKAILVVLLYTFATANADTLCIGYHANNSTDTVDTVLEKNVTVTHSVNLLEDKHNGKLCKLRGIAPLHLGKCNIAGWILGNPECESLSTASSWSYIVETSSSDNGTCYPGDFIDYEELREQLSSVSSFKRFEIFPKTNSWPNHDSNKGVTAACPHAGAKSFYKNLIWLVKKGNSYPKLSKSYINDKGKEVLVLWGIHHPSTSADQQSLYQNADAYVFVGTSKYSKKFKPEIAIRPKVRDQEGRMNYYWTLVEPGDKITFEATGNLVVPRYAFAMERNAGSGIIISDTPVHDCNTTCQTPKGAINTSLPFQNIHPITIGKCPKYVKSTKLRLATGLRNVPSIQSRGLFGAIAGFIEGGWTGMVDGWYGYHHQNEQGSGYAADLKSTQNAIDGITNKVNSVIEKMNTQFTAVGKEFNHLEKRIENLNKKVDDGFLDIWTYNAELLVLLENERTLDYHDSNVKNLYEKVRSQLKNNAKEIGNGCFEFYHKCDNTCMESVKNGTYDYPKYSEEAKLNREEIDGVKLESTRIYQILAIYSTVASSLVLVVSLGAISFWMCSNGSLQCRICI

SEQ ID NO: 4743 - protein, 566 aa, Artificial Sequence; identical to SEQ ID NO: 2656
  derived and/or modified protein sequence (wt) from hemagglutinin__InfluenzaA__ADG21166

SEQ ID NO: 4744 - protein, 566 aa, Artificial Sequence
  derived and/or modified protein sequence (wt) from hemagglutinin__InfluenzaA__ADG21168
MKAILVVLLYTFATANADTLCIGYHANNSTDTVDTVLEKNVTVTHSVNLLEDKHNGKLCKLRGVAPLHLGKCNIAGWILGNPECESLSTASSWSYIVETSSSDNGTCYPGDFIDYEELREQLSSVSSFERFEIFPKTSSWPNHDSNKGVTAACPHAGAKSFYKNLIWLVKKGNSYPKLSKFYINDKGKEVLVLWGIHHPSTSADQQSLYQNADAYVFVGSSRYSKKFKPEIAIRPKVRDQEGRMNYYWTLVEPGDKITFEATGNLVVPRYAFAMERNAGSGIIISDTPVHDCNTTCQTPKGAINTSLPFQNIHPITIGKCPKYVKSTKLRLATGLRNVPSIQSRGLFGAIAGFIEGGWTGMVDGWYGYHHQNEQGSGYAADLKSTQNAIDEITNKVNSVIEKMNTQFTAVGKEFNHLEKRIENLNKKVDDGFLDIWTYNAELLVLLENERTLDYHDSNVKNLYEKVRSQLKNNAKEIGNGCFEFYHKCDNTCMESVKNGTYDYPKYSEEAKLNREEIDGVKLESTRIYQILAIYSTVASSLVLVVSLGAISFWMCSNGSLQCRICI

SEQ ID NO: 4745 - protein, 566 aa, Artificial Sequence; identical to SEQ ID NO: 4698
  derived and/or modified protein sequence (wt) from hemagglutinin__InfluenzaA__ADG21169

SEQ ID NO: 4746 - protein, 566 aa, Artificial Sequence; identical to SEQ ID NO: 2656
  derived and/or modified protein sequence (wt) from hemagglutinin__InfluenzaA__ADG21170

SEQ ID NO: 4747 - protein, 566 aa, Artificial Sequence; identical to SEQ ID NO: 2656
  derived and/or modified protein sequence (wt) from hemagglutinin__InfluenzaA__ADG21173

SEQ ID NO: 4748 - protein, 566 aa, Artificial Sequence; identical to SEQ ID NO: 2669
  derived and/or modified protein sequence (wt) from hemagglutinin__InfluenzaA__ADG21174

SEQ ID NO: 4749 - protein, 566 aa, Artificial Sequence; identical to SEQ ID NO: 2669
  derived and/or modified protein sequence (wt) from hemagglutinin__InfluenzaA__ADG21175

SEQ ID NO: 4750 - protein, 566 aa, Artificial Sequence; identical to SEQ ID NO: 2656
  derived and/or modified protein sequence (wt) from hemagglutinin__InfluenzaA__ADG21176

SEQ ID NO: 4751 - protein, 566 aa, Artificial Sequence; identical to SEQ ID NO: 2656
  derived and/or modified protein sequence (wt) from hemagglutinin__InfluenzaA__ADG21177

SEQ ID NO: 4752 - protein, 566 aa, Artificial Sequence; identical to SEQ ID NO: 2656
  derived and/or modified protein sequence (wt) from hemagglutinin__InfluenzaA__ADG21178

SEQ ID NO: 4753 - protein, 566 aa, Artificial Sequence; identical to SEQ ID NO: 3022
  derived and/or modified protein sequence (wt) from hemagglutinin__InfluenzaA__ADG21179

SEQ ID NO: 4754 - protein, 566 aa, Artificial Sequence; identical to SEQ ID NO: 2656
  derived and/or modified protein sequence (wt) from hemagglutinin__InfluenzaA__ADG21180

SEQ ID NO: 4755 - protein, 566 aa, Artificial Sequence; identical to SEQ ID NO: 2656
  derived and/or modified protein sequence (wt) from hemagglutinin__InfluenzaA__ADG21181

SEQ ID NO: 4756 - protein, 566 aa, Artificial Sequence; identical to SEQ ID NO: 2656
  derived and/or modified protein sequence (wt) from hemagglutinin__InfluenzaA__ADG21182

SEQ ID NO: 4757 - protein, 566 aa, Artificial Sequence; identical to SEQ ID NO: 2656
  derived and/or modified protein sequence (wt) from hemagglutinin__InfluenzaA__ADG21183

SEQ ID NO: 4758 - protein, 566 aa, Artificial Sequence; identical to SEQ ID NO: 3833
  derived and/or modified protein sequence (wt) from hemagglutinin__InfluenzaA__ADG21184

SEQ ID NO: 4759 - protein, 566 aa, Artificial Sequence
  derived and/or modified protein sequence (wt) from hemagglutinin__InfluenzaA__ADG21185
MKAILVVLLYTFATANADTLCIGYHANNSTDTVDTVLEKNVTVTHSVNLLEDKHNGKLCKLRGVAPLHLGKCNIAGWILGNPECESLSTASSWSYIVETSSSDNGTCYPGDFIDYEELREQLSSVSSFERFEIFPKTSSWPNHDSNKGVTAACPHAGAKSFYKNLIWLVKKGNSYPKLSKSYINDKGKEVLVLWGIHHPSTSADQQSLYQNADAYVFVGTSRYSKKFKPEIAIRPKVRDQEGRMNYYWTLVKPGDKITFEATGNLVVPRYAFAMERNAGSGIIISDTPVHDCNTTCQTPKGAINTSLPFQNIHPITIGRCPKYVKSTKLRLATGLRNVPSIQSRGLFGAIAGFIEGGWTGMVDGWYGYHHQNEQGSGYAADLKSTQNAIDEITNKVNSVIEKMNTQFTAVGKEFNHLEKRIENLNKKVDDGFLDIWTYNAELLVLLENERTLDYHDSNVKNLYEKVRSQLKNNAKEIGNGCFEFYHKCDNTCMESVKNGTYDYPKYSEEAKLNREEIDGVKLESTRIYQILAIYSTVASSLVLVVSLGAISFWMCSNGSLQCRICI

SEQ ID NO: 4760 - protein, 566 aa, Artificial Sequence; identical to SEQ ID NO: 4015
  derived and/or modified protein sequence (wt) from hemagglutinin__InfluenzaA__ADG21188

SEQ ID NO: 4761 - protein, 568 aa, Artificial Sequence
  derived and/or modified protein sequence (wt) from hemagglutinin__InfluenzaA__ADG21402
MEKIVLLLAIVSLVKSDQICIGYHANNSTEQVDTIMEKNVTVTHAQDILEKTHNGKLCDLDGVKPLILRDCSVAGWLLGNPMCDEFLNVPEWSYIVEKINPANDLCYPGNFNDYEELKHLLSRINHFEKIQIIPKSSWSDHEASSGVSSACPYQGRSSFFRNVVWLIKKDNAYPTIKRSYNNTNQEDLLVLWGIHHPNDAAEQTRLYQNPTTYISVGTSTLNQRLVPKIATRSKVNGQSGRMEFFWTILKSNDAINFESNGNFIAPENAYKIVKKGDSTIMKSELEYGNCNTKCQTPIGAINSSMPFHNIHPLTIGECPKYVKSNRLILATGLRNSPQGERRRKKRGLFGAIAGFIEGGWQGMVDGWYGYHHSNEQGSGYAADKESTQKAIDGVTNKVNSIIDKMNTQFEAVGREFNNLERRIENLNKKMEDGFLDVWTYNAELLVLMENERTLDFHDSNVKNLYDKVRLQLRDNAKELGNGCFEFYHRCDNECMESVRNGTYDYPQYSEEARLKREEISGVKLESIGTYQILSIYSTVASSLALAIMVAGLFLWMCSNGSLQCRICI

SEQ ID NO: 4762 - protein, 567 aa, Artificial Sequence
  derived and/or modified protein sequence (wt) from hemagglutinin__InfluenzaA__ADG21414
MEKIVLLLAIVSIVKSDQICIGYHANNSTEHVDTIMEKNVTVTHAQDILEKTHNGKLCNLDGVKPLILRDCSVAGWLLGNPMCDEFLNVPEWSYIVEKINPANDLCYPGNFNDYEELKHLLSRINHFEKIQIIPKNSWSDHEASGVSSACPYQGRSSFFRNVVWLTKKNNAYPTIKKSYNNTNQEDLLVLWGIHHPNDGAEQTRLYQNPTTYISVGTSTLNQRLVPKIATRSKVNGQSGRMEFFWTILKSNDAINFESNGNFIAPENAYKIVKKGDSTIMKSELEYGNCNTKCQTPIGAINSSMPFHNIHPLTIGECPKYVKSNRLVLATGLRNSPQGERRRKKRGLFGAIAGFIEGGWQGMVDGWYGYHHSNEQGSGYAADKESTQKAIDGVTNKVNSIIDKMNTQFEAVGREFNNLERRIENLNKKMEDGFLDVWTYNAELLVLMENERTLDFHDSNVKNLYDKVRLQLRDNAKELGNGCFEFYHRCDNECMESVRNGTYDYPQYSEEARLKREEISGVKLESIGTYQILSIYSTVASSLALAIMVAGLFLWMCSNGSLQCRICI

SEQ ID NO: 4763 - protein, 567 aa, Artificial Sequence
  derived and/or modified protein sequence (wt) from hemagglutinin__InfluenzaA__ADG21416
MEKIVLLLAIVSIVKSDQICIGYHANNSTEQVDTIMEKNVTVTHAQDILEKTHNGKLCNLDGVKPLILRDCSVAGWLLGNPMCDEFLNVPEWSYIVEKINPANDLCYPGNFNDYEELKHLLSRINHFEKIQIIPKNSWSDHEASGVSSACPYQGRSSFFRNVVWLTKKNNAYPTIKKSYNNTNQEDLLVLWGIHHPNDAAEQTGLYQNPTTYISVGTSTLNQRLVPKIATRSKVNGQSGRMEFFWTILKSNDVINFESNGNFIAPENAYKIVKKGDSTIMKSELEYGNCNTKCQTPIGAINSSMPFHNIHPLTIGECPKYVKSNRLVLATGLRNSPQGERRRKKRGLFGAIAGFIEGGWQGMVDGWYGYHHSNEQGSGYAADKESTQKAIDGVTNKVNSIIDKMNTQFEAVGREFNNLERRIENLNKKMEDGFLDVWTYNAELLVLMENERTLDFHDSNVKNLYDKVRLQLRDNAKELGNGCFEFYHRCDNECMESVRNGTYDYPQYSEEARLKREEISGVKLESIGTYQILSIYSTVASSLALAIMVAGLFLWMCSNGSLQCRICI

SEQ ID NO: 4764 - protein, 567 aa, Artificial Sequence
  derived and/or modified protein sequence (wt) from hemagglutinin__InfluenzaA__ADG21420
MEKIVLLLAIVSIVKSDQICIGYHANNSTEQVDTIMEKNVTVTHAQDILEKTHNGKLCNLDGVKPLILRDCSVAGWLLGNPMCDEFLNVPEWSYIVEKINPANDLCYPGNFNDYEELKHLLSRINHFEKIQIIPKNSWSDHEASGVSSACPYQGRSSFFRNVVWLTKKNNAYPTIKKSYNNTNQEDLLVLWGIHHPNDAAEQTRLYQNPTTYISVGTSTLNQRLVPKIATRSKVNGQSGRMEFFWTILKSNDAINFESNGNFIAPENAYKIVKKGDSTIMKSELEYGNCNTKCQTPIGAINSSMPFHNIHPLTIGECPKYVKSNRLVLATGLRNSPQGERRRKKRGLFGAIAGFIEGGWQGMVDGWYGYHHSNEQGSGYAADKESTQKAIDGVTNKVNSIIDKMNTQFEAVGREFNNLERRIENLNKKMEDGFLDVWTYNAELLVLMENERTLDFHDSNVKNLYDKVRLQLRDNAKELGNGCFEFYHRCDNECMESVRNGTYDYPQYSEEARLKREEISGVKLESIGTYQILSIYSTVASSLALAIMVAGLFLWMCSNGSLQCRICI

SEQ ID NO: 4765 - protein, 567 aa, Artificial Sequence
  derived and/or modified protein sequence (wt) from hemagglutinin__InfluenzaA__ADG21422
MEKIVLLLAIVSLVKSDQICIGYHANNSTEQVDTIMEKNVTVTHAQDILEKTHNGKLCNLDGVKPLILRDCSVAGWLLGNPMCDEFLNVPEWSYIVEKINPTNDLCYPGNFNDYEELKHLLSRINHFEKIQIIPKNSWSDHEASGVSSACPYQGRSSFFRNVVWLTKKNNAYPTIKRSYNNTNQEDLLVLWGIHHPNDAAEQTRLYQNPTTYISVGTSTLNQRLVPKIATRSKVNGQSGRMEFFWTILKSNDAINFESNGNFIAPENAYKIVKKGDSTIMKSELEYGNCNTKCQTPIGAINSSMPFHNIHPLTIGECPKYVKSNRLVLATGLRNSPQGERRRKKRGLFGAIAGFIEGGWQGMVDGWYGYHHSNEQGSGYAADKESTQKAIDGVTNKVNSIIDKMNTQFEAVGREFNNLERRIENLNKKMEDGFLDVWTYNAELLVLMENERTLDFHDSNVKNLYDKVRLQLRDNAKELGNGCFEFYHRCDNECMESVRNGTYDYPQYSEEARSKREEISGVKLESIGTYQILSIYSTVASSLALAIMVAGLFLWMCSNGSLQCRICI

SEQ ID NO: 4766 - protein, 567 aa, Artificial Sequence
  derived and/or modified protein sequence (wt) from hemagglutinin__InfluenzaA__ADG21425
MEKIVLLLAIVSLVKSDQICIGYHANNSTEQVDTIMEKNVTVTHAQDILEKTHNGKLCNLDGVKPLILRDCSVAGWLLGNPMCDEFLNVPEWSYIVEKINPANDLCYPGNFNDYEELKHLLSRINHFEKIQIIPKNSWSDHGASGVSSACPYQGRSSFFRNVVWLTKKNNAYPTIKKSYNNTNQEDLLVLWGIHHPNDAEEQTRLYQNPTTYISVGTSTLNQRLVPKIATRSKVNGQSGRMEFFWTILKSNDAINFESNGNFIAPENAYKIVKKGDSTIMKSELEYDNCNTKCQTPIGAINSSMPFHNIHPLTIGECPKYVKSNKLVLATGLRNSPQGEKRRKKRGLFGAIAGFIEGGWQGMVDGWYGYHHSNEQGSGYAADKESTQKAIDGVTNKVNSIIDKMNTQFEAVGREFNALERRIENLNKKMEDGFLDVWTYNAELLVLMENERTLDFHDSNVKNLYDKVRLQLRDNAKELGNGCFEFYHRCDNECMESVRNGTYDYPQYSEEARLKREEISGVKLESIGTYQILSIYSTVASSLALAIMVAGLSLWMCSNGSLQCRICI

SEQ ID NO: 4767 - protein, 567 aa, Artificial Sequence
  derived and/or modified protein sequence (wt) from hemagglutinin__InfluenzaA__ADG21429
MEKIVLLLAIVSIVKSDQICIGYHANNSTEQVDTIMEKNVTVTHAQDILEKTHNGKLCNLDGVEPLILRDCSVAGWLLGNPMCDEFLNVPEWSYIVEKINPANDLCYPGNFNDYEELKHLLSRINHFEKIQIIPKNSWSDHEASGVSSACPYQGRSSFFRNVVWLTKKNNAYPTIKKSYNNTNQEDLLVLWGIHHPNDAAEQTRLYQNPTTYISVGTSTLNQRLVPKIATRSKVNGQSGRMEFFWTILKSNDVINFESNGNFIAPENAYKIVKKGDSTIMKSELEYGNCNTKCQTPIGAINSSMPFHNIHPLTIGECPKYVKSDRLVLATGLRNSPQGERRRKKRGLFGAIAGFIEGGWQGMVDGWYGYHHSNEQGSGYAADKESTQKAIDGVTNKVNSIIDKMNTQFEAVGREFNNLERRIENLNKKMEDGFLDVWTYNAELLVLMENERTLDFHDSNVKNLYDKVRLQLRDNAKELGNGCFEFYHRCDNECMESVRNGTYDYPQYSEEARLKREEISGVKLESIGTYQILSIYSTVASSLALAIMVAGLLLWMCSNGSLQCRICI

SEQ ID NO: 4768 - protein, 567 aa, Artificial Sequence
  derived and/or modified protein sequence (wt) from hemagglutinin__InfluenzaA__ADG21437
MEKIVLLLAIVSIVKSDQICIGYHANNSTEQVDTIMEKNVTVTHAQDILEKTHNGKLCNLDGVKPLILRDCSVAGWLLGNPMCDEFLNVPEWSYIVEKINPANDLCYPGNFNDYEELKHLLSRINHFEKIQIIPKNSWSDHEASGVSSACPYQGRSSFFRNVVWLTQKNNAYPTIKKSYNNTNQEDLLVLWGIHHPNDAAEQTRLYQNPTTYISVGTSTLNQRLVPKIATRSKVNGQSGRMEFFWTILKSNDVINFESNGNFIAPENAYKIVKKGDSTIMKSELEYGNCNTKCQTPIGAINSSMPFHNIHPLTIGECPKYVKSNRLVLATGLRNSPQGERRRKKRGLFGAIAGFIEGGWQGMVDGWYGYHHSNEQGSGYAADKESTQKAIDGVTNKVNSIIDKMNTQFEAVGREFNNLERRIENLNKKMEDGFLDVWTYNAELLVLMENERTLDFHDSNVKNLYDKVRLQLRDNAKELGNGCFEFYHRCDNECMESVRNGTYDYPQYSEEARLKREEISGVKLESIGTYQILSIYSTVASSLALAIMVAGLFLWMCSNGSLQCRICI

SEQ ID NO: 4769 - protein, 567 aa, Artificial Sequence
  derived and/or modified protein sequence (wt) from hemagglutinin__InfluenzaA__ADG21439
MEKIVLLLAIVSIVKSDQICIGYHANNSTEQVDTIMEKNVTVTHAQDILEKTHNGKLCNLDGVKPLILRDCSVAGWLLGNPMCDEFLNVPEWSYIVEKINPANDLCYPGNFNDYEELKHLLSRINHFEKIQIIPKGSWSDHEASGVSSACPYQGRSSFFRNVVWLTKKNNAYPTIKKSYNNTNQEDLLVLWGIHHPNDAAEQTRLYQNPTTYISVGTSTLNQRLVPQIATRSKVNGQSGRMEFFWTILKSNDAINFESNGNFIAPENAYKIVKKGDSTIMKSELEYGNCNTKCQTPIGAINSSMPFHNIHPLTIGECPKYVKSNRLVLATGLRNSPQGERRRKKRGLFGAIAGFIEGGWQGMVDGWYGYHHSNEQGSGYAADKESTQKAIDGVTNKVNSIIDKMNTQFEAVGREFNNLERRIENLNKKMEDGFLDVWTYNAELLVLMENERTLDFHDSNVKNLYDKVRLQLRDNAKELGNGCFEFYHRCDNECMESVRNGTYDYPQYSEEARLKREEISGVKLESIGTYQILSIYSTVASSLALAIMVAGLFLWMCSNGSLQCRICI

SEQ ID NO: 4770 - protein, 567 aa, Artificial Sequence
  derived and/or modified protein sequence (wt) from hemagglutinin__InfluenzaA__ADG21441
MEKIVLLLAIVSIVKSDQICIGYHANNSTEQVDTIMEKNVTVTHAQDILEKTHNGKLCNLDGVKPLILRDCSVAGWLLGNPMCDEFLNVPEWSYIVEKINPSNDLCYPGNFNDYEELKHLLSRINHFEKIQIIPKNSWSDHEASGVSSACPYQGRSSFFRNVVWLTKKNNAYPTIKKSYNNTNQEDLLVLWGIHHPNDEAEQTSLYQNPTTYISVGTSTLNQRLVPKIATRSKVNGQSGRMEFFWTILKSNDAINFESNGNFIAPENAYKIVKKGDSTIMKSELEYGNCNTKCQTPIGAINSSMPFHNIHPLTIGECPKYVKSNRLVLATGLRNSPQGERRRKKRGLFGAIAGFIEGGWQGMVDGWYGYHHSNEQGSGYAADKESTQKAIDGVTNKVNSIIDKMNTQFEAVGREFNNLERRIENLNKKMEDGFLDVWTYNAELLVLMENERTLDFHDSNVKNLYDKVRLQLRDNAKELGNGCFEFYHRCDNECMESVRNGTYDYPQYSEEARLKREEISGVKLESIGTYQILSIYSTVASSLALAIMVAGLFLWMCSNGSLQCRICI

SEQ ID NO: 4771 - protein, 567 aa, Artificial Sequence
  derived and/or modified protein sequence (wt) from hemagglutinin__InfluenzaA__ADG21443
MEKIVLLLAIVSIVKSDQICIGYHANNSTEQVDTIMEKNVTVTHAQDILEKTHNGKLCNLDGVKPLILRDCSVAGWLLGNPMCDEFLNVPEWSYIVEKINPTNDLCYPGNFNDYEELKHLLSRINHFEKIQIIPKNSWSDHEASGVSSACPYQGRSSFFRNVVWLTKKNNAYPTIKKSYNNTNQEDLLVLWGIHHPNDAAEQTRLYQNPTTYISVGTSTLNQRLVPKIATRSKVNGQSGRMEFFWTILKSNDAINFESNGNFIAPENAYKIVKKGDSTIMKSELEYGNCNTKCQTPIGAINSSMPFHNIHPLTIGECPKYVKSNRLVLATGLRNSPQGERRRKKRGLFGAIAGFIEGGWQGMVDGWYGYHHSNEQGSGYAADKESTQKAIDGVTNKVNSIIDKMNTQFEAVGREFNNLERRIENLNKKMEDGFLDVWTYNAELLVLMENERTLDFHDSNVKNLYDKVRLQLRDNAKELGNGCFEFYHRCDNECMESVRNGTYDYPQYSEEARLKREEISGVKLESIGTYQILSIYSTVASSLALAIMVAGLFLWMCSNGSLQCRICI

SEQ ID NO: 4772 - protein, 567 aa, Artificial Sequence
  derived and/or modified protein sequence (wt) from hemagglutinin__InfluenzaA__ADG21445
MEKIVLLLAIVSIVKSDQICIGYHANNSTEQVDTIMEKNVTVTHAQDILEKTHNGKLCNLDGVKPLILRDCSVAGWLLGNPMCDEFLNVPEWSYIVEKINPSNDLCYPGNFNDYEELKHLLSRINHFEKIQIIPKNSWSDHEASGVSSACPYQGRSSFFRNVVWLTKKNNAYPTIKKSYNNTNQEDLLVLWGIHHPNDEAEQTRLYQNPTTYISVGTSTLNQRLVPKIATRSKVNGQSGRMEFFWTILKSNDAINFESNGNFIAPENAYKIVKKGDSTIMKSELEYGNCNTKCQTPIGAINSSMPFHNIHPLTIGECPKYVKSNRLVLATGLRNSPQGERRRKKRGLFGAIAGFIEGGWQGMVDGWYGYHHSNEQGSGYAADKESTQKAIDGVTNKVNSIIDKMNTQFEAVGREFNNLERRIENLNKKMEDGFLDVWTYNAELLVLMENERTLDFHDSNVKNLYDKVRLQLRDNAKELGNGCFEFYHRCDNECMESVRNGTYDYPQYSEEARLKREEISGVKLESIGTYQILSIYSTVASSLALAIMVAGLFLWMCSNGSLQCRICI

SEQ ID NO: 4773 - protein, 566 aa, Artificial Sequence; identical to SEQ ID NO: 2911
  derived and/or modified protein sequence (wt) from hemagglutinin__InfluenzaA__ADG21912

SEQ ID NO: 4774 - protein, 566 aa, Artificial Sequence; identical to SEQ ID NO: 2669
  derived and/or modified protein sequence (wt) from hemagglutinin__InfluenzaA__ADG21913

SEQ ID NO: 4775 - protein, 566 aa, Artificial Sequence
  derived and/or modified protein sequence (wt) from hemagglutinin__InfluenzaA__ADG21914
MKAIIVVLLYTFATANADTLCIGYHANNSTDTVDTVLEKNVTVTHSVNLLEDKHNGKLCKLRGVAPLHLGKCNIAGWILGNPECESLSTASSWSYIVETSSSDNGTCYPGDFIDYEELREQLSSVSSFERFEIFPKTSSWPNHDSNKGVTAACPHAGAKSFYKNLIWLVKKGNSYPKLSKSYINDKGKEVLVLWGIHHPSTSADQQSLYQNADAYVFVGTSRYSKKFKPEIAIRPKVRDQEGRMNYYWTLVEPGDKITFEATGNLVVPRYAFAMERNAGSGIIISDTPVHDCNTTCQTPKGAINTSLPFQNIHPITIGKCPKYVKSTKLRLATGLRNVPSIQSRGLFGAIAGFIEGGWTGMVDGWYGYHHQNEQGSGYAADLKSTQNAIDEITNKVNSVIEKMNTQFTAVGKEFNHLEKRIENLNKKVDDGFLDIWTYNAELLVLLENERTLDYHDSNVKNLYEKVRSQLKNNAKEIGNGCFEFYHKCDNTCMESVKNGTYDYPKYSEEAKLNREEIDGVKLESTRIYQILAIYSTVASSLVLVVSLGAISFWMCSNGSLQCRICI

SEQ ID NO: 4776 - protein, 566 aa, Artificial Sequence
  derived and/or modified protein sequence (wt) from hemagglutinin__InfluenzaA__ADG21915
MEAILVVLLYTFATANADTLCIGYHANNSTDTVDTVLEKNVTVTHSVNILEDKHNGKLCKLRGVAPLHLGKCNIAGWILGNPECESLSTASSWSYIVETSSSDNGTCYPGDFIDYEELREQLSSVSSFERFEIFPKTSSWPNHDSNKGVTAACPHAGAKSFYKNLIWLVKKGNSYPKLSKSYINDKGKEVLVLWGIHHPSTSADQQSLYQNADAYVFVGSSRYSKKFKPEIAIRPKVRDQEGRMNYYWTLVEPGDKITFEATGNLVVPRYAFAIERNAGSGIIISDTPVHDCNTTCQTPKGAINTSLPFHNIHPITIGKCPKYVKSTKLRLATGLRNVPSIQSRGLFGAIAGFIEGGWTGMVDGWYGYHHQNEQGSGYAADLKSTQNAIDEITNKVNSVIEKMNTQFTAVGKEFNHLEKRIENLNKKVDDGFLDIWTYNAELLVLLENERTLDYHDSNVKNLYEKVRSQLKNNAKEIGNGCFEFYHKCDNTCMESVKNGTYDYPKYSEEAKLNREEIDGVKLESTRIYQILAIYSTVASSLVLVVSLGAISFWMCSNGSLQCRICI

SEQ ID NO: 4777 - protein, 566 aa, Artificial Sequence; identical to SEQ ID NO: 2911
  derived and/or modified protein sequence (wt) from hemagglutinin__InfluenzaA__ADG21916

SEQ ID NO: 4778 - protein, 566 aa, Artificial Sequence; identical to SEQ ID NO: 2669
  derived and/or modified protein sequence (wt) from hemagglutinin__InfluenzaA__ADG21917

SEQ ID NO: 4779 - protein, 566 aa, Artificial Sequence; identical to SEQ ID NO: 4169
  derived and/or modified protein sequence (wt) from hemagglutinin__InfluenzaA__ADG21918

SEQ ID NO: 4780 - protein, 566 aa, Artificial Sequence
  derived and/or modified protein sequence (wt) from hemagglutinin__InfluenzaA__ADG21919
MKAILVVLLYTFATANADTLCIGYHANNSTDTVDTVLEKNVTVTHSVNLLEDKHNGKLCKLRGVTPLHLGKCNIAGWILGNPECESLSTASSWSYIVETSSSDNGTCYPGDFIDYEELREQLSSVSSFERFEIFPKTSSWPNHDSNKGVTAACPHAGAKSFYKNLIWLVKKGNSYPKLSKSYINDKGKEVLVLWGIHHPSTSADQQSLYQNADAYVFVGTSRYSKKFKPEIAIRPKVRDQEGRMNYYWTLVEPGDKITFEATGNLVVPRYAFAMERNAGSGIIISDTPVHDCNTTCQTPKGAINTSLPFQNIHPITIGKCPKYVKSTKLRLATGLRNVPSIQSRGLFGAIAGFIEGGWTGMVDGWYGYHHQNEQGSGYAADLKSTQNAIDEITNKVNSVIEKMNTQFTAVGKEFNHLEKRIENLNKKIDDGFLDIWTYNAELLVLLENERTLDYHDSNVKNLYEKVRSQLKNNAKEIGNGCFEFYHKCDNTCMESVKNGTYDYPKYSEEAKLNREEIDGVKLESTRIYQILAIYSTVASSLVLVVSLGAISFWMCSNGSLQCRICI

SEQ ID NO: 4781 - protein, 566 aa, Artificial Sequence; identical to SEQ ID NO: 2911
  derived and/or modified protein sequence (wt) from hemagglutinin__InfluenzaA__ADG21921

SEQ ID NO: 4782 - protein, 566 aa, Artificial Sequence; identical to SEQ ID NO: 2669
  derived and/or modified protein sequence (wt) from hemagglutinin__InfluenzaA__ADG21922

SEQ ID NO: 4783 - protein, 566 aa, Artificial Sequence
  derived and/or modified protein sequence (wt) from hemagglutinin__InfluenzaA__ADG21923
MKAILVVLLYTFATANADTLCIGYHANNSTDTVDTVLEKNVTVTHSANLLEDKHNGKLCKLRGVAPLHLGKCNIAGWILGNPECESLSTASSWSYIVETSSSDNGTCYPGDFIDYEELREQLSSVSSFERFEIFPKTSSWPNHDSNKGVTAACPHAGAKSFYKNLIWLVKKGNSYPKLSKSYINDKGKEVLVLWGIHHPSTSADQQSLYQNADAYVFVGSSKYSKKFKPEIAIRPKVRDQEGRMNYYWTLVEPGDKITFEATGNLVVPRYAFAMERNAGSGIIISDTPVHDCNTTCQTPKGAINTSLPFHNIHPITIGKCPKYVKSTKLRLATGLRNVPSIQSRGLFGAIAGFIEGGWTGMVDGWYGYHHQNEQGSGYAADLKSTQNAIDEITNKVNSVIEKMNTQFTAVGKEFNHLEKRIENLNKKVDDGFLDIWTYNAELLVLLENERTLDYHDSNVKNLYEKVRSQLKNNAKEIGNGCFEFYHKCDNTCMESVKNGTYDYPKYSEEAKLNREEIDGVKLESTRIYQILAIYSTVASSLVLVVSLGAISFWMCSNGSLQCRICI

SEQ ID NO: 4784 - protein, 566 aa, Artificial Sequence
  derived and/or modified protein sequence (wt) from hemagglutinin__InfluenzaA__ADG21924
MEAILVVLLYTFATANADTLCIGYHANNSTDTVDTVLEKNVTVTHSVNLLENKHNGKLCKLRGVAPLHLGKCNIAGWILGNPECESLSTASSWSYIVETSSSDNGTCYPGDFIDYEELREQLSSVSSFERFEIFPKTSSWPNHDSNKGVTAACPHAGAKSFYKNLIWLVKKGNSYPKLSKSYINDKGKEVLVLWGIHHPSTSADQQSLYQNADAYVFVGSSRYSKKFKPEIAIRPKVRDQEGRMNYYWTLVEPGDKITFEATGNLVVPRYAFAMERNAGSGIIISDTPVHDCNTTCQTPKGAINTSLPFHNIHPITIGKCPKYVKSTKLRLATGLRNVPSIQSRGLFGAIAGFIEGGWTGMVDGWYGYHHQNEQGSGYAADLKSTQNAIDEITNKVNSVIEKMNTQFTAVGKEFNHLEKRIENLNKKVDDGFLDIWTYNAELLVLLENERTLDYHDSNVKNLYEKVRSQLKNNAKEIGNGCFEFYHKCDNTCMESVKNGTYDYPKYSEEAKLNREEIDGVKLESTRIYQILAIYSTVASSLVLVVSLGAISFWMCSNGSLQCRICI

SEQ ID NO: 4785 - protein, 566 aa, Artificial Sequence
  derived and/or modified protein sequence (wt) from hemagglutinin__InfluenzaA__ADG21925
MKAILVVLLYTFATANADTLCIGYHANNSTDTVDTVLEKNVTVTHSVNLLEDKHNGKLCKLRGVAPLHLGKCNIAGWILGNPECESLSTASSWSYIVETSSSDNGTCYPGDFIDYEELREQLSSVSSFERFEIFPKTSSWPNHDSNKGVTAACPHAGAKSFYKNLIWLVKKGNSYPKLSKSYINDKGKEVLVLWGIHHPSTSADQQSLYQNADAYVFVGTSRYSKKFKPEIAIRPKVRDQEGRMNYYWTLVEPGDKITFEATGNLVVPRYAFAMERDAGSGIIISDTPVHDCNTTCQTPKGAINTSLPFQNIHPITIGKCPKYVKSTKLRLATGLRNVPSIQSRGLFGAIAGFIEGGWTGMVDGWYGYHHQNEQGSGYAADLKSTQNAIDEITNKVNSVIEKMNTQFTAVGKEFNHLEKRIENLNKKIDDGFLDIWTYNAELLVLLENERTLDYHDSNVKNLYEKVRSQLKNNAKEIGNGCFEFYHKCDNTCMESVKNGTYDYPKYSEEAKLNREEIDGVKLESTRIYQILAIYSTVASSLVLVVSLGAISFWMCSNGSLQCRICI

SEQ ID NO: 4786 - protein, 566 aa, Artificial Sequence
  derived and/or modified protein sequence (wt) from hemagglutinin__InfluenzaA__ADG21926
MKAILVVLLYTFATANADTLCIGYHANNSTDTVDTILEKNVTVTHSVNLLEDKHNGKLCKLRGVAPLHLGKCNIAGWILGNPECESLSTASSWSYIVETSSSDNGTCYPGDFIDYEELREQLSSVSSFERFEIFPKTSSWPNHDSNKGVTAACPHAGAKSFYKNLIWLVKKGNSYPKLSKSYINDKGKEVLVLWGIHHPSTSADQQSLYQNADAYVFVGTSRYSKKFKPEIAIRPKVRDQEGRMNYYWTLVEPGDKITFEATGNLVVPRYAFAMERNAGSGIIISDTPVHDCNTTCQTPKGAINTSLPFQNIHPITIGKCPKYVKSTKLRLATGLRNVPSIQSRGLFGAIAGFIEGGWTGMVDGWYGYHHQNEQGSGYAADLKSTQNAIDEITNKVNSVIEKMNTQFTAVGKEFNHLEKRIENLNKKVDDGFLDIWTYNAELLVLLENERNLDYHDSNVKNLYEKVRSQLKNNAKEIGNGCFEFYHKCDNTCMESVKNGTYDYPKYSEEAKLNREEIDGVKLESTRIYQILAIYSTVASSLVLVVSLGAISFWMCSNGSLQCRICI

SEQ ID NO: 4787 - protein, 566 aa, Artificial Sequence; identical to SEQ ID NO: 2911
  derived and/or modified protein sequence (wt) from hemagglutinin__InfluenzaA__ADG21927

SEQ ID NO: 4788 - protein, 566 aa, Artificial Sequence
  derived and/or modified protein sequence (wt) from hemagglutinin__InfluenzaA__ADG21928
MKATLVVLLYTFATANADTLCIGYHANNSTDTVDTVLEKNVTVTHSVNLLEDKHNGKLCKLRGVAPLHLGKCNIAGWILGNPECESLSTASSWSYIVETSSSDNGTCYPGDFIDYEELREQLSSVSSFERFEIFPKTSSWPNHDSNKGVTAACPHAGAKSFYKNLIWLVKKGNSYPKLSKSYINDKGKEVLVLWGIHHPSTSADQQSLYQNADAYVFVGTSRYSKKFKPEIAIRPRVRDQEGRMNYYWTLVEPGDKITFEATGNLVVPRYAFAMERDAGSGIIISDTPVHDCNTTCQTPKGAINTSLPFQNIHPITIGKCPKYVKSTKLRLATGLRNVPSIQSRGLFGAIAGFIEGGWTGMVDGWYGYHHQNEQGSGYAADLKSTQNAIDEITNKVNSVIEKMNTQFTAVGKEFNHLEKRIENLNKKIDDGFLDIWTYNAELLVLLENERTLDYHDSNVKNLYEKVRSQLKNNAKEIGNGCFEFYHKCDNTCMESVKNGTYDYPKYSEEAKLNREEIDGVKLESTRIYQILAIYSTVASSLVLVVSLGAISFWMCSNGSLQCRICI

SEQ ID NO: 4789 - protein, 566 aa, Artificial Sequence; identical to SEQ ID NO: 4785
  derived and/or modified protein sequence (wt) from hemagglutinin__InfluenzaA__ADG21930

SEQ ID NO: 4790 - protein, 566 aa, Artificial Sequence; identical to SEQ ID NO: 2911
  derived and/or modified protein sequence (wt) from hemagglutinin__InfluenzaA__ADG21931

SEQ ID NO: 4791 - protein, 566 aa, Artificial Sequence; identical to SEQ ID NO: 2911
  derived and/or modified protein sequence (wt) from hemagglutinin__InfluenzaA__ADG21932

SEQ ID NO: 4792 - protein, 566 aa, Artificial Sequence; identical to SEQ ID NO: 2911
  derived and/or modified protein sequence (wt) from hemagglutinin__InfluenzaA__ADG21933

SEQ ID NO: 4793 - protein, 566 aa, Artificial Sequence; identical to SEQ ID NO: 4785
  derived and/or modified protein sequence (wt) from hemagglutinin__InfluenzaA__ADG21934

SEQ ID NO: 4794 - protein, 566 aa, Artificial Sequence
  derived and/or modified protein sequence (wt) from hemagglutinin__InfluenzaA__ADG21935
MEAILVVLLYTFATANADTLCIGYHANNSTDTVDTVLEKNVTVTHSVNLLEDKHNGKLCKLRGVAPLHLGKCNIAGWILGNPECESLSTASSWSYIVETSSSDNGTCYPGDFIDYEELREQLSSVSSFERFEIFPKTSSWPNHDSNKGVTAACPHAGAKSFYKNLIWLVKKGNSYPKLSKSYINDKGKEVLVLWGIHHPSTSADQQSLYQNADAYVFVGSSRYSKKFKPEIAIRPKVRDQEGRMNYYWTLVEPGDKITFEATGNLVVPRYAFAMERNAGSGIIISDTPVHDCNTNCQTPNGAINTSLPFHNIHPITIGKCPKYVKSTKLRLATGLRNVPSIQSRGLFGAIAGFIEGGWTGMVDGWYGYHHQNEQGSGYAADLKSTQNAIDEITNKVNSVIEKMNTQFTAVGKEFNHLEKRIENLNKKVDDGFLDIWTYNAELLVLLENERTLDYHDSNVKNLYEKVRSQLKNNAKEIGNGCFEFYHKCDNTCMESVKNGTYDYPKYSEEAKLNREEIDGVKLESTRIYQILAIYSTVASSLVLVVSLGAISFWMCSNGSLQCRICI

SEQ ID NO: 4795 - protein, 566 aa, Artificial Sequence; identical to SEQ ID NO: 2911
  derived and/or modified protein sequence (wt) from hemagglutinin__InfluenzaA__ADG21936

SEQ ID NO: 4796 - protein, 566 aa, Artificial Sequence; identical to SEQ ID NO: 2911
  derived and/or modified protein sequence (wt) from hemagglutinin__InfluenzaA__ADG21937

SEQ ID NO: 4797 - protein, 566 aa, Artificial Sequence
  derived and/or modified protein sequence (wt) from hemagglutinin__InfluenzaA__ADG21938
MEAILVVLLYTFATANADTLCIGYHANNSTDTVDTVLEKNVTVTHSVNLLEDKHNGKLCKLRGVAPLHLGKCNIAGWILGNPECESLSTASSWSYIVETSSSDNGTCYPGDFIDYEELREQLSSVSSFERFEIFPKTSSWPNHDSNKGVTAACPHAGAKSFYKNLIWLVKKGNSYPKLSKSYINDKGKEVLVLWGIHHPSTSADQQSLYQNADAYVFVGSSRYSKKFKPEIAIRPKVRDQEGRMNYYWTLVEPGDKITFEATGNLVVPRYAFAMERNAGSGIIISDTPVHDCNTTCQTPKGAINTSLPFHNIHPITIGKCPKYVKSTKLRLATGLRNVPSIQSRGLFGAIAGFIEGGWTGMVDGWYGYHHQNEQGSGYAADLKSTQNAIDEITNKVNSVIEKMNTQFTAVGKEFNHLEKRIENLNKKVDDGFLDIWTYNAELLVLLENERNLDYHDSNVKNLYEKVRSQLKNNAKEIGNGCFEFYHKCDNTCMESVKNGTYDYPKYSEEAKLNREEIDGVKLESTRIYQILAIYSTVASSLVLVVSLGAISFWMCSNGSLQCRICI

SEQ ID NO: 4798 - protein, 566 aa, Artificial Sequence; identical to SEQ ID NO: 2911
  derived and/or modified protein sequence (wt) from hemagglutinin__InfluenzaA__ADG21939

SEQ ID NO: 4799 - protein, 566 aa, Artificial Sequence; identical to SEQ ID NO: 2911
  derived and/or modified protein sequence (wt) from hemagglutinin__InfluenzaA__ADG21940

SEQ ID NO: 4800 - protein, 566 aa, Artificial Sequence
  derived and/or modified protein sequence (wt) from hemagglutinin__InfluenzaA__ADG21941
MEAILVVLLYTFATANADTLCIGYHANNSTDTVDTVLEKNVTVTHSVNLLEDKHNGKLCKLRGVAPLHLGKCNIAGWILGNPECESLSTASSWSYIVETSSSDNGTCYPGDFIDYEELREQLSSVSSFERFEIFPKTSSWPNHDSNKGVTAACPHAGAKSFYKNLIWLVKKGNSYPKLSKSYINDKGKEVLVLWGIHHPSTSADQQSLYQNADAYVFVGSSRYSKKFKPEIAIRPKVRDQEGRMNYYWTLVEPGDKITFEATGNLVVPRYAFAMERNAGSGIIISDTPVHDCNTTCQTPKGAINTSLPFHNIHPITIGKCPKYVKSTKLRLATGLRNVPSIQSRGLFGAIAGFIEGGWTGMVDGWYGYHHQNEQGSGYAADLKSTQNAIDEITNKVNSVIEKMNTQFTAVGKEFNHLEKRIENLNKKIDDGFLDIWTYNAELLVLLENERTLDYHDSNVKNLYEKVRSQLKNNAKEIGNGCFEFYHKCDNTCMESVKNGTYDYPKYSEEAKLNREEIDGVKLESTRIYQILAIYSTVASSLVLVVSLGAISFWMCSNGSLQCRICI

SEQ ID NO: 4801 - protein, 566 aa, Artificial Sequence
  derived and/or modified protein sequence (wt) from hemagglutinin__InfluenzaA__ADG21943
MKAILVVLLYTFATANADTLCIGYHANNSTDTVDTVLEKNVTVTHSVNLLEDKHNGKLCKLRGVAPLHLGKCNIAGWILGNPECESLSTANSWSYIVETSSSDNGTCYPGDFIDYEELREQLSSVSSFERFEIFPKTSSWPNHDSNKGVTAACPHAGAKSFYKNLIWLVKKGNSYPKLSKSYINDKGKEVLVLWGIHHPSTSADQQSLYQNADAYVFVGTSRYSKKFKPEIAIRPKVRDQEGRMNYYWTLVEPGDKITFEATGNLVVPRYAFAMERDAGSGIIISDTPVHDCNTTCQTPKGAINTSLPFQNIHPITIGKCPKYVKSTKLRLATGLRNVPSIQSRGLFGAIAGFIEGGWTGMVDGWYGYHHQNEQGSGYAADLKSTQNAIDEITNKVNSVIEKMNTQFTAVGKEFNHLEKRIENLNKKIDDGFLDIWTYNAELLVLLENERTLDYHDSNVKNLYEKVRSQLKNNAKEIGNGCFEFYHKCDNTCMESVKNGTYDYPKYSEEAKLNREEIDGVKLESTRIYQILAIYSTVASSLVLVVSLGAISFWMCSNGSLQCRICI

SEQ ID NO: 4802 - protein, 566 aa, Artificial Sequence
  derived and/or modified protein sequence (wt) from hemagglutinin__InfluenzaA__ADG21944
MEAILIVLLYTFATANADTLCIGYHANNSTDTVDTVLEKNVTVTHSVNLLEDKHNGKLCKLRGVAPLHLGKCNIAGWILGNPECESLSTASSWSYIVETSSSDNGTCYPGDFIDYEELREQLSSVSSFERFEIFPKTSSWPNHDSNKGVTAACPHAGAKSFYKNLIWLVKKGNSYPKLSKSYINDKGKEVLVLWGIHHPSTSADQQSLYQNADAYVFVGSSRYSKKFKPEIAIRPKVRDQEGRMNYYWTLVEPGDKITFEATGNLVVPRYAFAMERNAGSGIIISDTPVHDCNTTCQTPKGAINTSLPFHNIHPITIGKCPKYVKSTKLRLATGLRNVPSIQSRGLFGAIAGFIEGGWTGMVDGWYGYHHQNEQGSGYAADLKSTQNAIDEITNKVNSVIEKMNTQFTAVGKEFNHLEKRIENLNKKVDDGFLDIWTYNAELLVLLENERTLDYHDSNVKNLYEKVRSQLKNNAKEIGNGCFEFYHKCDNTCMESVKNGTYDYPKYSEEAKLNREEIDGVKLESTRIYQILAIYSTVASSLVLVVSLGAISFWMCSNGSLQCRICI

SEQ ID NO: 4803 - protein, 566 aa, Artificial Sequence; identical to SEQ ID NO: 2911
  derived and/or modified protein sequence (wt) from hemagglutinin__InfluenzaA__ADG21945

SEQ ID NO: 4804 - protein, 566 aa, Artificial Sequence; identical to SEQ ID NO: 2911
  derived and/or modified protein sequence (wt) from hemagglutinin__InfluenzaA__ADG21946

SEQ ID NO: 4805 - protein, 566 aa, Artificial Sequence; identical to SEQ ID NO: 2911
  derived and/or modified protein sequence (wt) from hemagglutinin__InfluenzaA__ADG21947

SEQ ID NO: 4806 - protein, 566 aa, Artificial Sequence
  derived and/or modified protein sequence (wt) from hemagglutinin__InfluenzaA__ADG21948
MEAILVVLLYTFATANADTLCIGYHANNSTDTVDTVLEKNVTVTHSVNLLEDKHNGKLCKLRGVAPLHLGKCNIAGWILGNPECESLSTASSWSYIVETSSSDNGTCYPGDFIDYEELREQLSSVSSFERFEIFPKTSSWPNHDSNKGVTAACPHAGAKSFYKNLIWLVKKGNSYPKLSKSYINDKGKEVLVLWGIHHPSTSADQQSLYQNADAYVFVGSSRYSKKFKPEIAIRPKVRDQEGRMNYYWTLVEPGDKITFEATGNLVVPRYAFAMERNAGSGIIISDTPVHDCNTTCQTPKGAINTSLPFHNIHPITIGKCPKYVKSTKLRLATGLRNVPSIQSRGLFGAIAGFIEGGWTGMVDGWYGYHHQNEQGSGYAADLKSTQNAIDEITNKVNSVIEKMNTQFTAVGKEFNHLEKRIENLNKKVDDGFLDIWTYNAELLVLLENERTLDHHDSNVKNLYEKVRSQLKNNAKEIGNGCFEFYHKCDNTCMESVKNGTYDYPKYSEEAKLNREEIDGVKLESTRIYQILAIYSTVASSLVLVVSLGAISFWMCSNGSLQCRICI

SEQ ID NO: 4807 - protein, 566 aa, Artificial Sequence
  derived and/or modified protein sequence (wt) from hemagglutinin__InfluenzaA__ADG27794
MKAILVVLLYTFATANADTLCIGYHANNSTDTVDTVLEKNVTVTHSVNLLEDKHNGKLCKLRGVAPLHLGKCNIAGWILGNPECESLSTASSWSYIVETSSSDNGTCYPGDFIDYEELREQLSSVSSFERFEIFPKTSSWPNHDSNKGVTAACPHAGAKSFYKNLIWLVKKGNSYPKLSKSYINDKGKEVLVLWGIHHPSTSADQQSLYQNADAYVFVGTSRYSKKFKPEIAIRPKVRDQEGRMNYYWTLVEPGDKITFEATGNLVVPRYAFAMERNAGSGIIISDTPVHDCNTTCQTPKGAINTSLPFQNIHPITIGKCPKYVKSTKLRLATGLRNVPSIQSRGLFGAIAGFIEGGWTGMVDGWYGYHHQNEQGSGYAADLKSTQNAIDEITNKVNSVIEKMNTQFTAVGKEFNHLEKRIENLNKKVDDGFLDIWTYNAELLVLLENERTLDYHDSNVKNLYEKVRSQLKNNAKEIGNGCFEFYHKCDNTCMESVKNGTYDYPKYSEEAKLNREEIDGVKLESTRTYQILAIYSTVASSLVLVVSLGAISFWMCSNGSLQCRICI

SEQ ID NO: 4808 - protein, 566 aa, Artificial Sequence; identical to SEQ ID NO: 2656
  derived and/or modified protein sequence (wt) from hemagglutinin__InfluenzaA__ADG27948

SEQ ID NO: 4809 - protein, 566 aa, Artificial Sequence; identical to SEQ ID NO: 2656
  derived and/or modified protein sequence (wt) from hemagglutinin__InfluenzaA__ADG27966

SEQ ID NO: 4810 - protein, 566 aa, Artificial Sequence
  derived and/or modified protein sequence (wt) from hemagglutinin__InfluenzaA__ADG27974
MKAILVVLLYTFATANADTLCIGYHANNSTDTVDTVLEKNVTVTHSVNLLEDKHNGKLCKLRGVAPLHLGKCNIAGWILGNPECESLSTASSWSYIVETSSSDNGTCYPGDFIDYEELREQLSSVSSFERFEIFPKTSSWPNHDSNKGVTAACPHAGAKSFYKNLIWLVKKGNSYPKLSKSYINDKGKEVLVLWGIHHPSTSADQQSLYQNADAYVFVGSSRYSKKFKPEIAIRPKVRDQEGRMNYYWTLVEPGDKITFEATGNLVVPRYAFAMERNAGSGIIISDTPVHDCNTTCQTPKGAINTSLPFQNIHPITIGKCPKYVKSTKLRLATGLRNVPSIQSRGLFGAIAGFIEGGWTGMVDGWYGYHHQNEQGSGYAADLKSTQNAIDEITNKVNSVIEKMNTQFTAVGKEFNHLEKRIENLNKKVDDGFLDIWTYNAELLVLLENERTLDYHDSNVKNLYEKVRSQLKNNAKEIGNGCFEFYHKCDNTCMESVKNGTYDYPKYSEEAKLNREEIDGVKLESTRIYQILAIYSTVASSLILVVSLGAISFWMCSNGSLQCRICI

SEQ ID NO: 4811 - protein, 566 aa, Artificial Sequence
  derived and/or modified protein sequence (wt) from hemagglutinin__InfluenzaA__ADG27982
MKAILVVLLYTFATANADTLCIGYHANNSTDTVDTVLEKNVTVTHSVNLLEDKHNGKLCKLRGVAPLHLGKCNIAGWILGNPECESLSTASSWSYIVETSSSDNGTCYPGDFIDYEELREQLSSVSSFERFEIFPKTSSWPNHDSNKGVTAACPHAGAKSFYKNLIWLVKKGNSYPKLSKSYINDKGKEVLVLWGIHHPSTSADQQSLYQNADAYVFVGSSRYSKKFKPEIAIRPKVRDQEGRMNYYWTLVEPGDKITFEATGNLVVPRYAFAMERNAGSGIIISDTPVHDCNTTCQTPKGAINTSLPFQNIHPITIGKCPKYVKSTKLRLATGLRNVPSIQSRGLFGAIAGFIEGGWTGMVDGWYGYHHQNEQGSGYAADLKSTQNAIDEITNKVNSVIEKMNTQFTAVGKEFNHLEKRIENLNKKVDDGFLDIWTYNAELLVLLENERTLDYHDSNVKKLYEKVRSQLKNNAKEIGNGCFEFYHKCDNTCMESVKNGTYDYPKYSEEAKLNREEIDGVKLESTRIYQILAIYSTVASSLVLVVSLGAISFWMCSNGSLQCRICI

SEQ ID NO: 4812 - protein, 566 aa, Artificial Sequence; identical to SEQ ID NO: 2656
  derived and/or modified protein sequence (wt) from hemagglutinin__InfluenzaA__ADG27988

SEQ ID NO: 4813 - protein, 566 aa, Artificial Sequence; identical to SEQ ID NO: 2656
  derived and/or modified protein sequence (wt) from hemagglutinin__InfluenzaA__ADG27997

SEQ ID NO: 4814 - protein, 566 aa, Artificial Sequence; identical to SEQ ID NO: 2656
  derived and/or modified protein sequence (wt) from hemagglutinin__InfluenzaA__ADG28011

SEQ ID NO: 4815 - protein, 566 aa, Artificial Sequence; identical to SEQ ID NO: 4221
  derived and/or modified protein sequence (wt) from hemagglutinin__InfluenzaA__ADG42093

SEQ ID NO: 4816 - protein, 566 aa, Artificial Sequence; identical to SEQ ID NO: 3833
  derived and/or modified protein sequence (wt) from hemagglutinin__InfluenzaA__ADG42103

SEQ ID NO: 4817 - protein, 566 aa, Artificial Sequence; identical to SEQ ID NO: 3022
  derived and/or modified protein sequence (wt) from hemagglutinin__InfluenzaA__ADG42113

SEQ ID NO: 4818 - protein, 566 aa, Artificial Sequence; identical to SEQ ID NO: 4221
  derived and/or modified protein sequence (wt) from hemagglutinin__InfluenzaA__ADG42123

SEQ ID NO: 4819 - protein, 566 aa, Artificial Sequence
  derived and/or modified protein sequence (wt) from hemagglutinin__InfluenzaA__ADG42133
MKAILVVLLYTFATANADTLCIGYHANNSTDTVDTVLEKNVTVTHSVNLLEDKHNGKLCKLRGVAPLHLGKCNIAGWILGNPECESLSTASSWSYIVETSSSDNGTCYPGDFIDYEELREQLSSVSSFERFEIFPKTSSWPNHDSNKGVTAACPYAGAKSFYKNLIWLVKKGNSYPKLSKSYINDKGKEVLVLWGIHHPSTSADQQSLYQNADAYVFVGTSRYSKKFKPEIAIRPKVRDQEGRMNYYWTLVEPGDKITFEATGNLVVPRYAFAMERNAGSGIIISDTPVHDCNTTCQTPKGAINTSLPFQNIHPITIGKCPKYVKSTKLRLVTGLRNVPSIQSRGLFGAIAGFIEGGWTGMVDGWYGYHHQNEQGSGYAADLKSTQHAIDEITNKVNSVIEKMNTQFTAVGKEFNHLEKRIENLNKKVDDGFLDIWTYNAELLVLLENERTLDYHDSNVKNLYEKVRSQLKNNAKEIGNGCFEFYHKCDNTCMESVKNGTYDYPKYSEEAKLNREEIDGVKLESTRIYQILAIYSTVASSLVLVVSLGAISFWMCSNGSLQCRICI

SEQ ID NO: 4820 - protein, 566 aa, Artificial Sequence
  derived and/or modified protein sequence (wt) from hemagglutinin__InfluenzaA__ADG42143
MKAILVVLLYTFATANADTLCIGYHANNSTDTVDTVLEKNVTVTHSVNILEDKHNGKLCKLRGVAPLHLGKCNIAGWILGNPECESLSTASSWSYIVETSSSDNGTCYPGDFIDYEELREQLSSVSSFERFEIFPKTSSWPNHDSNKGVTAACPHAGAKSFYKNLIWLVKKGNSYPKLSKSYINDKGKEVLVLWGIHHPSTSADQQSLYQNADAYVFVGSSRYSKKFKPEIAIRPKVRDQEGRMNYYWTLVEPGDKITFEATGNLVVPRYAFAMEKNAGSGIIISDTPVHDCNTTCQTPKGAINTSLPFQNIHPITIGKCPKYVKSTKLRLATGLRNVPSIQSRGLFGAIAGFIEGGWTGMVDGWYGYHHQNEQGSGYAADLKSTQNAIDEITNKVNSVIEKMNTQFTAVGKEFNHLEKRIENLNKKVDDGFLDIWTYNAELLVLLENERTLDYHDSNVKNLYEKVRSQLKNNAKEVGNGCFEFYHKCDNTCMESVKNGTYDYPKYSEEAKLNREEIDGVKLESTRIYQILAIYSTAASSLVLVVSLGAISFWMCSNGSLQCRICI

SEQ ID NO: 4821 - protein, 566 aa, Artificial Sequence
  derived and/or modified protein sequence (wt) from hemagglutinin__InfluenzaA__ADG42153
MKAILVVLLYTFATANADTLCIGYHANNSTDTVDTVLEKNVTVTHSVNLLEDKHNGKLCKLRGVAPLHLGKCNIAGWILGNPECESLSTASSWSYIVETSSSDNGTCYPGDFIDYEELREQLSSVSSFERFEIFPKTSSWPNHDSNKGITAACPHAGAKSFYKNLIWLVKKGNSYPKLSKSYINDKGKEVLVLWGIHHPSTSADQQSLYQNADAYVFVGTSRYSKKFKPEIAIRPKVRDQEGRMNYYWTLVEPGDKITFEATGNLVVPRYAFAMERNAGSGIIISDTPVLDCNTTCQTPKGAINTSLPFQNIHPITIGKCPKYVKSTKLRLATGLRNVPSIQSRGLFGAIAGFIEGGWTGMVDGWYGYHHQNEQGSGYAADLKSTQNAIDEITNKVNSVIEKMNTQFTAVGKEFNHLEKRIENLNKKVDDGFLDIWTYNAELLVLLENERTLDYHDSNVKNLYEKVRSQLKNNAKEIGNGCFEFYHKCDNTCMESVKNGTYDYPKYSEEAKLNREEIDGVKLESTRIYQILAIYSTVASSLVLVVSLGAISFWMCSNGSLQCRICI

SEQ ID NO: 4822 - protein, 566 aa, Artificial Sequence; identical to SEQ ID NO: 2669
  derived and/or modified protein sequence (wt) from hemagglutinin__InfluenzaA__ADG42193

SEQ ID NO: 4823 - protein, 566 aa, Artificial Sequence; identical to SEQ ID NO: 2669
  derived and/or modified protein sequence (wt) from hemagglutinin__InfluenzaA__ADG42213

SEQ ID NO: 4824 - protein, 566 aa, Artificial Sequence; identical to SEQ ID NO: 2669
  derived and/or modified protein sequence (wt) from hemagglutinin__InfluenzaA__ADG42233

SEQ ID NO: 4825 - protein, 566 aa, Artificial Sequence
  derived and/or modified protein sequence (wt) from hemagglutinin__InfluenzaA__ADG42243
MKAILVVLLYTFATANADTLCIGYHANNSTDTVDTVLEKNVTVTHSVNLLEDKHNGKLCKLRGVAPLHLGKCNIAGWILGNPECESLSTASSWSYIVETSSSDNGTCYPGDFIDYEELREQLSSVSSFERFEIFPKTSSWPNHDSNKGVTAACPHAGAKSFYKNLIWLVKKGNSYPKLSKSYINDKGKEVLVLWGIHHPSTSADQQSLYQNADAYVFVGTSRYSKKFKPEIAIRPKVRDQEGRMNYYWTLVEPGDKITFEATGNLVVPRYAFAMERNAGSGIIISDTPVLDCNTTCQTPKGAINTSLPFQNIHPITIGKCPKYVKSTKLRLATGLRNVPSIQSRGLFGAIAGFIEGGWTGMVDGWYGYHHQNEQGSGYAADLKSTQHAIDEITNKVNSVIEKMNTQFTAVGKEFNHLEKRIENLNKKVDDGFLDIWTYNAELLVLLENERTLDYHDSNVKNLYEKVRSQLKNNAKEIGNGCFEFYHKCDNTCMESVKNGTYDYPKYSEEAKLNREEIDGVKLESTRIYQILAIYSTVASSLVLVVSLGAISFWMCSNGSLQCRICI

SEQ ID NO: 4826 - protein, 566 aa, Artificial Sequence; identical to SEQ ID NO: 4089
  derived and/or modified protein sequence (wt) from hemagglutinin__InfluenzaA__ADG42253

SEQ ID NO: 4827 - protein, 566 aa, Artificial Sequence; identical to SEQ ID NO: 2669
  derived and/or modified protein sequence (wt) from hemagglutinin__InfluenzaA__ADG42263

SEQ ID NO: 4828 - protein, 566 aa, Artificial Sequence; identical to SEQ ID NO: 3770
  derived and/or modified protein sequence (wt) from hemagglutinin__InfluenzaA__ADG42273

SEQ ID NO: 4829 - protein, 566 aa, Artificial Sequence; identical to SEQ ID NO: 3770
  derived and/or modified protein sequence (wt) from hemagglutinin__InfluenzaA__ADG42283

SEQ ID NO: 4830 - protein, 566 aa, Artificial Sequence; identical to SEQ ID NO: 4352
  derived and/or modified protein sequence (wt) from hemagglutinin__InfluenzaA__ADG42293

SEQ ID NO: 4831 - protein, 566 aa, Artificial Sequence
  derived and/or modified protein sequence (wt) from hemagglutinin__InfluenzaA__ADG42303
MKAILVVLLYTFATANADTLCIGYHANNSTDTVDTVLEKNVTVTHSVNLLEDKHNGKLCKLKGVAPLHLGKCNIAGWILGNPECESLSTASSWSYIVETSSSDNGTCYPGDFIDYEELREQLSSVSSFERFEIFPKTSSWPNHDSNKGVTAACPHAGAKSFYKNLIWLVKKGNSYPKLSKSYINDKGKEVLVLWGIHHPSTSADQQSLYQNADAYVFVGTSRYSKKFKPEIAIRPKVRDQEGRMNYYWTLVEPGDKITFEATGNLVVPRYAFAMERNAGSGIVISDTPVHDCNTTCQTPKGAINTSLPFQNIHPITIGKCPKYVKSTKLRLATGLRNVPSIQSRGLFGAIAGFIEGGWTGMVDGWYGYHHQNEQGSGYAADLKSTQNAIDEITNKVNSVIEKMNTQFTAVGKEFNHLEKRIENLNKKVDDGFLDIWTYNAELLVLLENERTLDYHDSNVKNLYEKVRSQLKNNAKEIGNGCFEFYHKCDNTCMESVKNGTYDYPKYSEEAKLNREEIDGVKLESTRIYQILAIYSTVASSLVLVVSLGAISFWMCSNGSLQCRICI

SEQ ID NO: 4832 - protein, 566 aa, Artificial Sequence; identical to SEQ ID NO: 4379
  derived and/or modified protein sequence (wt) from hemagglutinin__InfluenzaA__ADG42313

SEQ ID NO: 4833 - protein, 566 aa, Artificial Sequence
  derived and/or modified protein sequence (wt) from hemagglutinin__InfluenzaA__ADG42323
MKAILVVLLYTFATANADTLCIGYHANNSTDTVDTVLEKNVTVTHSVNLLEDKHNGKLCKLRGVAPLHLGKCNIAGWILGNPECESLSTASSWSYIVETSSSDNGTCYPGDFIDYEELREQLSSVSSFERFEMFPKTSSWPNHDSNKGVTAACPHAGAKSFYKNLIWLVKKGNSYPKLSKSYINDKGKEVLVLWGIHHPSTSADQQSLYQNADAYVFVGTSRYSKKFKPEIAIRPKVRDQEGRMNYYWTLVEPGDKITFEATGNLVVPRYAFAMERNAGSGIIISDTPVHDCNTTCQTPKGAINTSLPFQNIHPITIGKCPKYVKSTKLRLATGLRNVPSIQSRGLFGAIAGFIEGGWTGMVDGWYGYHHQNEQGSGYAADLKSTQNAIDEITNKVNSVIEKMNTQFTAVGKEFNHLEKRIENLNKKVDDGFLDIWTYNAELLVLLENERTLDYHDSNVKNLYEKVRSQLKNNAKEVGNGCFEFYHKCDNTCMESVKNGTYDYPKYSEEAKLNREEIDGVKLESTRIYQILAIYSTVASSLVLVVSLGAISFWMCSNGSLQCRICI

SEQ ID NO: 4834 - protein, 566 aa, Artificial Sequence
  derived and/or modified protein sequence (wt) from hemagglutinin__InfluenzaA__ADG42333
MKAILVVLLYTLATANADTLCIGYHANNSTDTVDTVLEKNVTVTHSVNLLEDKHNGKLCKLRGIAPLHLGKCNIAGWILGNPECESLSTASSWSYIVETSSSDNGTCYPGDFIDYEELREQLSSVSSFERFEIFPKTSSWPNHDSNKGVTAACPHAGAKSFYKNLIWLVKKGNSYPKLSKSYINDKGKEVLVLWGIHHPSTSADQQSLYQNADAYVFVGTSRYSKKFKPEIAIRPKVRDQEGRMNYYWTLVEPGDKITFEATGNLVVPRYAFAMERNAGSGIIISDAPVHDCNTTCQTPKGAINTSLPFQNIHPITIGKCPKYVKSTKLRLATGLRNVPSIQSRGLFGAIAGFIEGGWTGMVDGWYGYHHQNEQGSGYAADLKSTQNAIDEITNKVNSVIEKMNTQFTAVGKEFNHLEKRIENLNKKVDDGFLDIWTYNAELLVLLENERTLDYHDSNVKNLYEKVRSQLKNNAKEIGNGCFEFYHKCDNTCMESVKNGTYDYPKYSEEAKLNREEIDGVKLESTRIYQILAIYSTVASSLVLVVSLGAISFWMCSNGSLQCRICI

SEQ ID NO: 4835 - protein, 566 aa, Artificial Sequence
  derived and/or modified protein sequence (wt) from hemagglutinin__InfluenzaA__ADG42343
MKAILVVLLYTFATANADTLCIGYHANNSTDTVDTVLEKNVTVTHSVNLLEDKHNGKLCKLRGVAPLHLGKCNIAGWILGNPECESLSTASSWSYIVETSSSDNGTCYPGDFIDYEELREQLSSVSSFERFEIFPKTSSWPNHDSNKGVTAACPHAGAKSFYKNLIWLVKKGNSYPKLSKSYINDKGKEVLVLWGIHHPSTSADQQSLYQNADAYVFVGTSRYSKKFKPEIAIRPKVRDQEGRMNYYWTLVEPGDKITFEATGNLVVPRYAFAMESNAGSGIIISDTPVHDCNTTCQTPKGAINTSLPFQNIHPITIGKCPKYVKSTKLRLATGLRNVPSIQSRGLFGAIAGFIEGGWTGMVDGWYGYHHQNEQGSGYAADLKSTQHAIDEITNKVNSVIEKMNTQFTAVGKEFNHLEKRIENLNKKVDDGFLDIWTYNAELLVLLENERTLDYHDSNVKNLYEKVRSQLKNNAKEIGNGCFEFYHKCDNTCMESVKNGTYDYPKYSEEAKLNREEIDGVKLESTRIYQILAIYSTVASSLVLVVSLGAISFWMCSNGSLQCRICI

SEQ ID NO: 4836 - protein, 566 aa, Artificial Sequence
  derived and/or modified protein sequence (wt) from hemagglutinin__InfluenzaA__ADG42363
MKAILVVLLYTFATANADTLCIGYHANNSTDTVDTVLEKNVTVTHSVNLLEDKHNGKLCKLRGIAPLHLGKCNIAGWILGNPECESLSTASSWSYIVETSSSDNGTCYPGDFIDYEELREQLSSVSSFERFEIFPKTSSWPNHDSNKGVTAACPHAGAKSFYKNLIWLVKKGNSYPKLSKSYINDKGKEVLVLWGIHHPSTSADQQSLYQNADAYVFVGTSRYSKKFKPEIAIRPKVRDQEGRMNYYWTLVEPGDKITFEATGNLVVPRYAFAMERNAGSGIIISDTPVHDCNTTCQTPKGAINTSLPFQNIHPITIGKCPKYVKSTKLRLATGLRNVPSIQSRGLFGAIAGFIEGGWTGMVDGWYGYHHQNEQGSGYAADLKSTQNAIDEITNKVNSVIEKMNTQFTAVGKEFNHLEKRIENLNKKVDDGFLDIWTYNAELLVLLENERTLDYHDSNVKNLYEKVRSQLKNNAKEIGNGCFEFYHKCDNTCMESVKNGTYDYPKYSEEAKLNREEIDGVKLESTRIYQILAIYSTVASSLVLVVSLGAISFWMCSNGSLQCRICI

SEQ ID NO: 4837 - protein, 566 aa, Artificial Sequence
  derived and/or modified protein sequence (wt) from hemagglutinin__InfluenzaA__ADG42373
MKAILVVLLYTFATANADTLCIGYHANNSTDTVDTVLEKNVTVTHSVNLLEDKHNGKLCKLRGVAPLHLGKCNIAGWILGNPECESLSTASSWSYIVETSSSDNGTCYPGDFIDYEELREQLSSVSSFERFEIFPKTSSWPNHDSNKGVTAACPHAGAKSFYKNLIWLVKKGNSYPKLSKSYINDKGKEVLVLWGIHHPSTSADQQSLYQNADAYVFVGTSRYSKKFKPEIAIRPKVRDQEGRMNYYWTLVEPGDKITFEATGNLVVPRYAFAMERNAGSGIIISDTPVHDCNTTCQTPKGAINTSLPFQNIHPITIGKCPKYVKSTKLRLATGLRNVPSIQSRGLFGAIAGFIEGGWTGMVDGWYGYHHQNEQGSGYAADLKSTQNAIDEITNKVNSVIEKMNTQFTAVGKEFNHLEKRIENLNKKVDDGFLDIWTYNAELLVLLENERTLDYHDSNVKNLYEKVRNQLKNNAKEIGNGCFEFYHKCDNTCMESVKNGTYDYPKYSEEAKLNREEIDGVKLESTRIYQILAIYSTVASSLVLVVSLGAISFWMCSNGSLQCRICI

SEQ ID NO: 4838 - protein, 566 aa, Artificial Sequence
  derived and/or modified protein sequence (wt) from hemagglutinin__InfluenzaA__ADG42393
MKAILVVLLYTFATANADTLCIGYHANNSTDTVDTVLEKNVTVTHSVNLLEDKHNEKLCKLRGVAPLHLGKCNIAGWILGNPECESLSTASSWSYIVETSSSDNGTCYPGDFIDYEELREQLSSVSSFERFEIFPKTSSWPNHDSNKGVTAACPHAGAKSFYKNLIWLVKKGNSYPKLSKSYINDKGKEVLVLWGIHHPSTSADQQSLYQNADAYVFVGTSRYSKKFKPEIAIRPKVREQEGRMNYYWTLVEPGDKITFEATGNLVVPRYAFAMERNAGSGIIISDTPVHDCNTTCQTPKGAINTSLPFQNIHPITIGKCPKYVKSTKLRLATGLRNVPSIQSRGLFGAIAGFIEGGWTGMVDGWYGYHHQNEQGSGYAADLKSTQNAIDEITNKVNSVIEKMNTQFTAVGKEFNHLEKRIENLNKKVDDGFLDIWTYNAELLVLLENERTLDYHDSNVKNLYEKVRSQLKNNAKEIGNGCFEFYHKCDNTCMESVKNGTYDYPKYSEEAKLNREEIDGVKLESTRIYQILAIYSTVASSLVLLVSLGAISFWMCSNGSLQCRICI

SEQ ID NO: 4839 - protein, 566 aa, Artificial Sequence; identical to SEQ ID NO: 3833
  derived and/or modified protein sequence (wt) from hemagglutinin__InfluenzaA__ADG42403

SEQ ID NO: 4840 - protein, 566 aa, Artificial Sequence; identical to SEQ ID NO: 4089
  derived and/or modified protein sequence (wt) from hemagglutinin__InfluenzaA__ADG42413

SEQ ID NO: 4841 - protein, 566 aa, Artificial Sequence; identical to SEQ ID NO: 4836
  derived and/or modified protein sequence (wt) from hemagglutinin__InfluenzaA__ADG42423

SEQ ID NO: 4842 - protein, 566 aa, Artificial Sequence; identical to SEQ ID NO: 4089
  derived and/or modified protein sequence (wt) from hemagglutinin__InfluenzaA__ADG42443

SEQ ID NO: 4843 - protein, 566 aa, Artificial Sequence
  derived and/or modified protein sequence (wt) from hemagglutinin__InfluenzaA__ADG42453
MKAILVVLLYTFATANADTLCIGYHANNSTDTVDTVLEKNVTVTHSVNILEDKHNGKLCKLRGVAPLHLGKCNIAGWILGNPECESLSTASSWSYIVETSSSDNGTCYPGDFIDYEELREQLSSVSSFERFEIFPKTSSWPNHDSNKGVTAACPHAGAKSFYKNLIWLVKKGNSYPKLSKSYINDKGKEVLVLWGIHHPSTSADQQSLYQNADAYVFVGTSRYSKKFKPEIAIRPKVRDQEGRMNYYWTLVEPGDKITFEATGNLVVPRYAFAMERNAGSGIIISDTPVHDCNTTCQTPKGAINTSLPFQNIHPITIGKCPKYVKSTKLRLATGLRNVPSIQSRGLFGAIAGFIEGGWTGMVDGWYGYHHQNEQGSGYAADLKSTQNAIDEITNKVNSVIEKMNTQFTAVGKEFNHLEKRVENLNKKVDDGFLDIWTYNAELLVLLENERTLDYHDSNVKNLYEKVRSQLKNNAKEIGNGCFEFYHKCDNTCMESVKNGTYDYPKYSEEAKLNREEIDGVKLESTRIYQILAIYSTVASSLVLVVSLGAISFWMCSNGSLQCRICI

SEQ ID NO: 4844 - protein, 566 aa, Artificial Sequence; identical to SEQ ID NO: 3022
  derived and/or modified protein sequence (wt) from hemagglutinin__InfluenzaA__ADG42463

SEQ ID NO: 4845 - protein, 566 aa, Artificial Sequence; identical to SEQ ID NO: 2669
  derived and/or modified protein sequence (wt) from hemagglutinin__InfluenzaA__ADG42473

SEQ ID NO: 4846 - protein, 566 aa, Artificial Sequence; identical to SEQ ID NO: 4089
  derived and/or modified protein sequence (wt) from hemagglutinin__InfluenzaA__ADG42483

SEQ ID NO: 4847 - protein, 566 aa, Artificial Sequence; identical to SEQ ID NO: 4221
  derived and/or modified protein sequence (wt) from hemagglutinin__InfluenzaA__ADG42493

SEQ ID NO: 4848 - protein, 566 aa, Artificial Sequence; identical to SEQ ID NO: 4282
  derived and/or modified protein sequence (wt) from hemagglutinin__InfluenzaA__ADG42503

SEQ ID NO: 4849 - protein, 566 aa, Artificial Sequence; identical to SEQ ID NO: 3770
  derived and/or modified protein sequence (wt) from hemagglutinin__InfluenzaA__ADG42513

SEQ ID NO: 4850 - protein, 566 aa, Artificial Sequence
  derived and/or modified protein sequence (wt) from hemagglutinin__InfluenzaA__ADG42533
MKAILVVLLYTFATAKADTLCIGYHANNSTDTVDTVLEKNVTVTHSVNLLEDKHNGKLCKLRGVAPLHLGKCNIAGWILGNPECESLSTASSWSYIVETSSSDNGTCYPGDFIDYEELREQLSSVSSFERFEIFPKTSSWPNHDSNKGVTAACPHAGAKSFYKNLIWLVKKGNSYPKLSKSYINDKGKEVLVLWGIHHPSTSADQQSLYQNADAYVFVGTSRYSKKFKPEIAIRPKVRDQEGRMNYYWTLVEPGDKITFEATGNLVVPRYAFAMERNAGSGIIISDTPVHDCNTTCQTPKGAINTSLPFQNIHPITIGKCPKYVKSTKLRLATGLRNIPSIQSRGLFGAIAGFIEGGWTGMVDGWYGYHHQNEQGSGYAADLKSTQNAIDEITNKVNSVIEKMNTQFTAVGKEFNHLEKRIENLNKKVDDGFLDIWTYNAELLVLLENERTLDYHDSNVKNLYEKVRSQLKNNAKEIGNGCFEFYHKCDNTCMESVKNGTYDYPKYSEEAKLNREEIDGVKLESTRIYQILAIYSTVASSLVLVVSLGAISFWMCSNGSLQCRICI

SEQ ID NO: 4851 - protein, 566 aa, Artificial Sequence
  derived and/or modified protein sequence (wt) from hemagglutinin__InfluenzaA__ADG42553
MKAILVVLLYTFATANADTLCIGYHANNSTDTVDTVLEKNVTVTHSVNLLEDKHNGKLCKLRGVAPLHLGKCNIAGWILGNPECESLSTASSWSYIVETSSSDNGTCYPGDFIDYEELREQLSSVSSFERFEIFPKTSSWPNHDSNKGVTAACSHAGAKSFYKNLIWLVKKGNSYPKLNKSYINDKGKEVLVLWGIHHPSTSADQQSLYQNADAYVFVGTSRYSKKFKPEIAIRPKVREQEGRMNYYWTLVEPGDKITFEATGNLVVPRYAFAMERNAGSGIIISDTPVHDCNTTCQTPKGAINTSLPFQNIHPITIGKCPKYVKSTKLRLATGLRNVPSIQSRGLFGAIAGFIEGGWTGMVDGWYGYHHQNEQGSGYAADLKSTQNAIDEITNKVNSVIEKMNTQFTAVGKEFNHLEKRIENLNKKVDDGFLDIWTYNAELLVLLENERTLDYHDSNVKNLYEKVRSQLKNNAKEIGNGCFEFYHKCDNTCMESVKNGTYDYPKYSEEAKLNREEIDGVKLESTRIYQILAIYSTVASSLVLVVSLGAISFWMCSNGSLQCRICI

SEQ ID NO: 4852 - protein, 566 aa, Artificial Sequence
  derived and/or modified protein sequence (wt) from hemagglutinin__InfluenzaA__ADG42573
MKAILVVLLYTFATANADTLCIGYHANNSTDTVDTVLEKNVTVTHSVNLLEDKHNGKLCKLRGVAPLHLGKCNIAGWILGNPECESLSTASSWSYIVETSSSDNGTCYPGDFIDYEELREQLSSVSSFERFEIFPKTSSWPNHDSNKGVTAACPHAGAKSFYKNLIWLVKKGNSYPKLSKSYINDKGKEVLVLWGIHHPSTSADQQSLYQNADAYVFVGTSRYSKKFKPEIAIRPKVRDQEGRMNYYWTLIEPGDKITFEATGNLVVPRYAFAMERNAGSGIIISDTPVHDCNTTCQTPKGAINTSLPFQNIHPITIGKCPKYVKSTKLRLATGLRNVPSIQSRGLFGAIAGFIEGGWTGMVDGWYGYHHQNEQGSGYAADLKSTQNAIDEITNKVNSVIEKMNTQFTAVGKEFNHLEKRIENLNKKVDDGFLDIWTYNAELLVLLENERTLDYHDSNVKKLYEKVRSQLKNNAKEIGNGCFEFYHKCDNTCMESVKNGTYDYPKYSEEAKLNREEIDGVKLESTRIYQILAIYSTVASSLVLVVSLGAISFWMCSNGSLQCRICI

SEQ ID NO: 4853 - protein, 566 aa, Artificial Sequence
  derived and/or modified protein sequence (wt) from hemagglutinin__InfluenzaA__ADG42583
MKAILVVLLYTFATANADTLCIGYHANNSTDTVDTVLEKNVTVTHSVNLLEDKHNGKLCKLRGVAPLHLGKCNIAGWILGNPECESLSTASSWSYIVETSSSDNGTCYPGDFIDYEELREQLSSVSSFERFEIFPKTSSWPNHDSNKGVTAACPHAGAKSFYKNLIWLVKKGNSYPKLSKSYINDKGKEVLVLWGIHHPSTSADQQSLYQNADSYVFVGTSRYSKKFKPEIAIRPKVRDQEGRMNYYWTLVEPGDKITFEATGNLVVPRYAFAMERNAGSGIIISDTPVHDCNTTCQTPKGAINTSLPFQNIHPITIGKCPKYVKSTKLRLATGLRNVPSIQSRGLFGAIAGFIEGGWTGMVDGWYGYHHQNEQGSGYAADLKSTQHAIDEITNKVNSVIEKMNTQFTAVGKEFNHLEKRIENLNKKVDDGFLDIWTYNAELLVLLENERTLDYHDSNVKNLYEKVRSQLKNNAKEIGNGCFEFYHKCDNTCMESVKNGTYDYPKYSEEAKLNREEIDGVKLESTRIYQILAIYSTVASSLVLVVSLGAISFWMCSNGSLQCRICI

SEQ ID NO: 4854 - protein, 566 aa, Artificial Sequence; identical to SEQ ID NO: 4266
  derived and/or modified protein sequence (wt) from hemagglutinin__InfluenzaA__ADG42593

SEQ ID NO: 4855 - protein, 566 aa, Artificial Sequence
  derived and/or modified protein sequence (wt) from hemagglutinin__InfluenzaA__ADG42603
MKAILVVLLYTFATANADTLCIGYHANNSTDTVDTVLEKNVTVTHSVNLLEDKHNGKLCKLRGVAPLHLGKCNIAGWILGNPECESLSTASSWSYIVETSSSDNGTCYPGDFIDYEELREQLSSVSSFERFEIFPKTSSWPNHDSNKGVTAACPHAGAKSFYKNLIWLVKKGNSYPKLRKSYINDKGKEVLVLWGIHHPSTSADQQSLYQNADAYVFVGTSRYSKKFKPEIATRPKVRDQEGRMNYYWTLVEPGDKITFEATGNLVVPRYAFAMERNAGSGIIISDTPVHDCNTTCQTPKGSINTSLPFQNIHPITIGKCPKYVKSTKLRLATGLRNVPSIQSRGLFGAIAGFIEGGWTGMVDGWYGYHHQNEQGSGYAADLKSTQHAIDEITNKVNSVIEKMNTQFTAVGKEFNHLEKRIENLNKKVDDGFLDIWTYNAELLVLLENERTLDYHDSNVKNLYEKVRSQLKNNAKEIGNGCFEFYHKCDNTCMESVKNGTYDYPKYSEEAKLNREEIDGVKLESTRIYQILAIYSTVASSLVLVVSLGAISFWMCSNGSLQCRICI

SEQ ID NO: 4856 - protein, 566 aa, Artificial Sequence
  derived and/or modified protein sequence (wt) from hemagglutinin__InfluenzaA__ADG42613
MKAILVVLLYTFATANADTLCIGYHANNSTDTVDTVLEKNVTVTHSVNILEDKHNGKLCKLRGVAPLHLGKCNIAGWILGNPECESLSTASSWSYIVETSSSDNGTCYPGDFIDYEELREQLSSVSSFERFEIFPKTSSWPNHDSNKGVTAACPHAGAKSFYKNLIWLVKKGNSYPKLSKSYINDKGKEVLVLWGIHHPSTSADQQSLYQNADAYVFVGTSRYSKKFKPEIAIRPKVRDQEGRMNYYWTLVEPGDKITFEATGNLVVPRYAFAMERNAGSGIIISDTPVHDCNTTCQTPKGAINTSLPFQNIHPITIGKCPKYVKSTKLRLATGLRNVPSIQSRGLFGAIAGFIEGGWTGMVDGWYGYHHQNEQGSGYAADLKSTQNAIDEITNKVNSVIEKMNTQFTAVGKEFNHLEKRIENLNKKVDDGFLDIWTYNAELLVLLENERTLDYHDSNVKNLYEKVRSQLKNNAKEIGNGCFEFYHKCDNTCMESVKNGTYDYPKYSEEAKLNREKIDGVKLESTRIYQILAIYSTVASSLVLVVSLGAISFWMCSNGSLQCRICI

SEQ ID NO: 4857 - protein, 566 aa, Artificial Sequence; identical to SEQ ID NO: 4296
  derived and/or modified protein sequence (wt) from hemagglutinin__InfluenzaA__ADG42623

SEQ ID NO: 4858 - protein, 566 aa, Artificial Sequence; identical to SEQ ID NO: 2669
  derived and/or modified protein sequence (wt) from hemagglutinin__InfluenzaA__ADG42633

SEQ ID NO: 4859 - protein, 566 aa, Artificial Sequence
  derived and/or modified protein sequence (wt) from hemagglutinin__InfluenzaA__ADG42643
MKAILVVLLYTFATANADTLCIGYHANNSTDTVDTVLEKNVTVTHSANLLEDKHNGKLCKLRGAAPLHLGKCNIAGWILGNPECESLSTASSWSYIVETSSSDNGTCYPGDFIDYEELREQLSSVSSFERFEMFPKTSSWPNHDSNKGVTAACPHAGAKSFYKNLIWLVKKGNSYPKLSKSYVNDKGKEVLVLWGIHHPSTSADQQSLYQNADAYVFVGTSRYSKKFKPEIAIRPKVRDQEGRMNYYWTLVEPGDKITFEATGNLVVPRYAFAMERNAGSGIIISDTPVHDCNTTCQTPKGAINTSLPFQNIHPITIGKCPKYVKSTKLRLATGLRNVPSIQSRGLFGAIAGFIEGGWTGMVDGWYGYHHQNEQGSGYAADLKSTQNAIDEITNKVNSVIEKMNTQFTAVGKEFNHLEKRIENLNKKVDDGFLDIWTYNAELLVLLENERTLDYHDSNVKNLYEKVRSQLKNNAKEIGNGCFEFYHKCDNTCMESVKNGTYDYPKYSEEAKLNREEIDGVKLESTRIYQILAIYSTVASSLVLVVSLGAISFWMCSNGSLQCRICI

SEQ ID NO: 4860 - protein, 566 aa, Artificial Sequence
  derived and/or modified protein sequence (wt) from hemagglutinin__InfluenzaA__ADG42653
MKAILVVLLYTSATANADTLCIGYHANNSTDTVDTVLEKNVTVTHSVNLLEDKHNGKLCKLRGVAPLHLGKCNIAGWILGNPECESLSTASSWSYIVETSSSDNGTCYPGDFIDYEELREQLSSVSSFERFEMFPKTSSWPNHDSNKGVTAACPHAGAKSFYKNLIWLVKKGNSYPKLSKSYINDKGKEVLVLWGIHHPSTSADQQSLYQNADAYVFVGTSRYSKKFKPEIAIRPKVRDQEGRMNYYWTLVEPGDKITFEATGNLVVPRYAFAMERNAGSGIIISDTPVHDCNTTCQTPKGAINTSLPFQNIHPITIGKCPKYVKSTKLRLATGLRNVPSIQSRGLFGAIAGFIEGGWTGMVDGWYGYHHQNEQGSGYAADLKSTQNAIDEITNKVNSVIEKMNTQFTAVGKEFNHLEKRIENLNKKVDDGFLDIWTYNAELLVLLENERTLDYHDSNVKNLYEKVRSQLKNNAKEIGNGCFEFYHKCDNTCMESVKNGTYDYPKYSEEAKLNREEIDGVKLESTRIYQILAIYSTVASSLVLVVSLGAISFWMCSNGSLQCRICI

SEQ ID NO: 4861 - protein, 566 aa, Artificial Sequence; identical to SEQ ID NO: 3833
  derived and/or modified protein sequence (wt) from hemagglutinin__InfluenzaA__ADG42663

SEQ ID NO: 4862 - protein, 566 aa, Artificial Sequence
  derived and/or modified protein sequence (wt) from hemagglutinin__InfluenzaA__ADG42673
MKAILVVLLYTFATANADTLCIGYHANNSTDTVDTVLEKNVTVTHSVNLLEDKHNGKLCKLKGVAPLHLGKCNIAGWILGNPECESLSTAGSWSYIVETSSSDNGTCYPGDFIDYEELREQLSSVSSFERFEIFPKTSSWPNHDSNKGVTAACPHAGAKSFYKNLIWLVKKGNSYPKLSKSYINDKGKEVLVLWGIHHPSTSADQQSLYQNADAYVFVGTSRYSKKFKPEIAIRPKVRDQEGRMNYYWTLVEPGDKITFEATGNLVVPRYAFAMERNAGSGIIISDTPVHDCNTTCQTPKGAINTSLPFQNIHPITIGKCPKYVKSTKLRLATGLRNVPSIQSRGLFGAIAGFIEGGWTGMVDGWYGYHHQNEQGSGYAADLKSTQNAIDGITNKVNSVIEKMNTQFTAVGKEFNHLEKRIENLNKKVDDGFLDIWTYNAELLVLLENERTLDYHDSNVKNLYEKVRSQLKNNAKEIGNGCFEFYHKCDNTCMESVKNGTYDYPKYSEEAKLNREEIDGVKLESTRIYQILAIYSTVASSLVLVVSLGAISFWMCSNGSLQCRICI

SEQ ID NO: 4863 - protein, 566 aa, Artificial Sequence
  derived and/or modified protein sequence (wt) from hemagglutinin__InfluenzaA__ADG42683
MKAILVVLLYTFATANADTLCIGYHANNSTDTVDTVLEKNVTVTHSVNILEDKHNGKLCKLRGVAPLHLGKCNIAGWILGNPECESLSTASSWSYIVETSSSDNGTCYPGNFIDYEELREQLSSVSSFERFEIFPKTSSWPNHDSNKGVTAACPHAGAKSFYKNLIWLVKKGNSYPKLSKSYINDKGKEVLVLWGIHHPSTSADQQSLYQNADAYVFVGTSRYSKKFKPEIAIRPKVRDQEGRMNYYWTLVEPGDKITFEATGNLVVPRYAFAMERNAGSGIIISDTPVHDCNTTCQTPKGAINTSLPFQNIHPITIGKCPKYVKSTKLRLATGLRNVPSIQSRGLFGAIAGFIEGGWTGMVDGWYGYHHQNEQGSGYAADLKSTQNAIDEITNKVNSVIEKMNTQFTAVGKEFNHLEKRIENLNKKVDDGFLDIWTYNAELLVLLENERTLDYHDSNVKNLYEKVRSQLKNNAKEIGNGCFEFYHKCDNTCMESVKNGTYDYPKYSEEAKLNREEIDGVKLESTRIYQILAIYSTVASSLVLVVSLGAISFWMCSNGSLQCRICI

SEQ ID NO: 4864 - protein, 566 aa, Artificial Sequence; identical to SEQ ID NO: 3833
  derived and/or modified protein sequence (wt) from hemagglutinin__InfluenzaA__ADG42693

SEQ ID NO: 4865 - protein, 566 aa, Artificial Sequence; identical to SEQ ID NO: 4541
  derived and/or modified protein sequence (wt) from hemagglutinin__InfluenzaA__ADG42703

SEQ ID NO: 4866 - protein, 566 aa, Artificial Sequence
  derived and/or modified protein sequence (wt) from hemagglutinin__InfluenzaA__ADG42723
MKAILVVLLYTFATANADTLCIGYHANNSTDTVDTVLEKNVTVTHSVNLLEDKHNGKLCKLRGVAPLHLGKCNIAGWILGNPECESLSTASSWSYIVETSSSDNGTCYPGDFIDYEELREQLSSVSSFERFEIFPKTSSWPNHDSNKGVTAACPHAGAKSFYKNLIWLVKKGNSYPKLSKSYINDKGKEVLVLWGIHHPSTSADQQSLYQNADAYVFVGTSRYSKKFKPEMAIRPKVRDQEGRMNYYWTLVEPGDKITFEATGNLVVPRYAFAMERNAGSGIIISDTPVHDCNTTCQTPKGAINTSLPFQNIHPITIGKCPKYVKSTKLRLATGLRNVPSIQSRGLFGAIAGFIEGGWTGMVDGWYGYHHQNEQGSGYAADLKSTQNAIDKITNKVNSVIEKMNTQFTAVGKEFNHLEKRIENLNKKVDDGFLDIWTYNAELLVLLENERTLDYHDSNVKNLYEKVRSQLKNNAKEIGNGCFEFYHKCDNTCMESVKNGTYDYPKYSEEAKLNREEIDGVKLESTRIYQILAIYSTVASSLVLVVSLGAISFWMCSNGSLQCRICI

SEQ ID NO: 4867 - protein, 566 aa, Artificial Sequence; identical to SEQ ID NO: 4296
  derived and/or modified protein sequence (wt) from hemagglutinin__InfluenzaA__ADG42743

SEQ ID NO: 4868 - protein, 566 aa, Artificial Sequence
  derived and/or modified protein sequence (wt) from hemagglutinin__InfluenzaA__ADG42753
MKAILVVLLYTFATANADTLCIGYHANNSTDTVDTVLEKNVTVTHSVNLLEDKHNGKLCKLRGVAPLHLGKCNIAGWILGNPECESLSTASSWSYIVETSSSDNGTCYPGDFIDYEELREQLSSVSSFERFEIFPKTSSWPNHDSNKGVTAACPHAGAKSFYKNLIWLVKKGNSYPKLSKSYINDKGKEVLVLWGIHHPSTSTDQQSLYQNADAYVFVGTSRYSKKFKPEIAIRPKVRDQEGRMNYYWTLVEPGDKITFEATGNLVVPRYAFAMERNSGSGIIISDTPVHDCNTTCQTPKGAINTSLPFQNIHPITIGKCPKYVKSTKLRLATGLRNVPSIQSRGLFGAIAGFIEGGWTGMVDGWYGYHHQNEQGSGYAADLKSTQNAIDEITNKVNSVIEKMNTQFTAVGKEFNHLEKRIENLNKKVDDGFLDIWTYNAELLVLLENERTLDYHDSNVKNLYEKVRSQLKNNAKEIGNGCFEFYHKCDNTCMESVKNGTYDYPKYSEEAKLNREEIDGVKLESTRIYQILAIYSTVASSLVLVVSLGAISFWMCSNGSLQCRICI

SEQ ID NO: 4869 - protein, 566 aa, Artificial Sequence; identical to SEQ ID NO: 3833
  derived and/or modified protein sequence (wt) from hemagglutinin__InfluenzaA__ADG42763

SEQ ID NO: 4870 - protein, 566 aa, Artificial Sequence; identical to SEQ ID NO: 3833
  derived and/or modified protein sequence (wt) from hemagglutinin__InfluenzaA__ADG42773

SEQ ID NO: 4871 - protein, 566 aa, Artificial Sequence
  derived and/or modified protein sequence (wt) from hemagglutinin__InfluenzaA__ADG42783
MKAILVVLLYTFATANADTLCIGYHANNSTDTVDTVLEKNVTVTHSVNLLEDKHNGKLCKLRGVAPLHLGKCNIAGWILGNPECESLSTASSWSYIVETSSSDNGTCYPGDFIDYEELREQLSSVSSFERFEMFPKTSSWPNHDSNKGVTAACPHAGAKSFYKNLIWLVKKGNSYPKLSKSYINDKGKEVLVLWGIHHPSTSTDQQSLYQNADAYVFVGTSRYSKKFKPEIAIRPKVRDQEGRMNYYWTLVEPGDKITFEATGNLVVPRYAFAMERNAGSGIIISDTPVHDCNTTCQTPKGAINTSLPFQNIHPITIGKCPKYVKSTKLRLATGLRNVPSIQSRGLFGAIAGFIEGGWTGMVDGWYGYHHQNEQGSGYAADLKSTQNAIDKITNKVNSVIEKMNTQFTAVGKEFNHLEKRIENLNKKVDDGFLDIWTYNAELLVLLENERTLDYHDSNVKNLYEKVRSQLKNNAKEIGNGCFEFYHKCDNTCMESVKNGTYDYPKYSEEAKLNREEIDGVKLESTRIYQILAIYSTVASSLVLVVSLGAISFWMCSNGSLQCRICI

SEQ ID NO: 4872 - protein, 566 aa, Artificial Sequence; identical to SEQ ID NO: 3833
  derived and/or modified protein sequence (wt) from hemagglutinin__InfluenzaA__ADG42793

SEQ ID NO: 4873 - protein, 566 aa, Artificial Sequence; identical to SEQ ID NO: 4871
  derived and/or modified protein sequence (wt) from hemagglutinin__InfluenzaA__ADG42803

SEQ ID NO: 4874 - protein, 566 aa, Artificial Sequence; identical to SEQ ID NO: 4221
  derived and/or modified protein sequence (wt) from hemagglutinin__InfluenzaA__ADG42813

SEQ ID NO: 4875 - protein, 566 aa, Artificial Sequence; identical to SEQ ID NO: 4364
  derived and/or modified protein sequence (wt) from hemagglutinin__InfluenzaA__ADG42823

SEQ ID NO: 4876 - protein, 566 aa, Artificial Sequence; identical to SEQ ID NO: 4266
  derived and/or modified protein sequence (wt) from hemagglutinin__InfluenzaA__ADG42833

SEQ ID NO: 4877 - protein, 566 aa, Artificial Sequence; identical to SEQ ID NO: 3833
  derived and/or modified protein sequence (wt) from hemagglutinin__InfluenzaA__ADG42843

SEQ ID NO: 4878 - protein, 566 aa, Artificial Sequence; identical to SEQ ID NO: 3833
  derived and/or modified protein sequence (wt) from hemagglutinin__InfluenzaA__ADG42853

SEQ ID NO: 4879 - protein, 566 aa, Artificial Sequence; identical to SEQ ID NO: 4387
  derived and/or modified protein sequence (wt) from hemagglutinin__InfluenzaA__ADG42863

SEQ ID NO: 4880 - protein, 566 aa, Artificial Sequence; identical to SEQ ID NO: 4407
  derived and/or modified protein sequence (wt) from hemagglutinin__InfluenzaA__ADG42883

SEQ ID NO: 4881 - protein, 566 aa, Artificial Sequence
  derived and/or modified protein sequence (wt) from hemagglutinin__InfluenzaA__ADG42893
MKAILVVLLYTFATANADTLCIGYHANNSTDTVDTVLEKNVTVTHSVNLLEDKHNGKLCKLRGVAPLHLGKCNIAGWILGNPECESLSTASSWSYIVETSSSDNGTCYPGDFIDYEELREQLSSVSSFERFEIFPKTSSWPNHDSNKGVTAACPHAGAKSFYKNLIWLVKKGNSYPKLSKSYINDKGKEVLVLWGIHHPSTSADQQSLYQNADAYVFVGTSRYSKKFKPEIAIRPKVRDQEGRMNYYWTLVEPGDKITFEATGNLVVPRYAFAMERNAGSGIIISDTPVHDCNTTCQTPKGAINTSLPFQNIHPITIGKCPKYVKSTNLRLATGLRNVPSIQSRGLFGAIAGFIEGGWTGMVDGWYGYHHQNEQGSGYAADLKSTQNAIDEITNKVNSVIEKMNTQFTAVGKEFNHLEKRIENLNKKVDDGFLDIWTYNAELLVLLENERTLDYHDSNVKNLYEKVRSQLKNNAKEIGNGCFEFYHKCDNTCMESVKNGTYDYPKYSEEAKLNREEIDGVKLESTRIYQILAIYSTVASSLVLVVSLGAISFWMCSNGSLQCRICI

SEQ ID NO: 4882 - protein, 566 aa, Artificial Sequence; identical to SEQ ID NO: 2669
  derived and/or modified protein sequence (wt) from hemagglutinin__InfluenzaA__ADG42903

SEQ ID NO: 4883 - protein, 566 aa, Artificial Sequence; identical to SEQ ID NO: 3833
  derived and/or modified protein sequence (wt) from hemagglutinin__InfluenzaA__ADG42913

SEQ ID NO: 4884 - protein, 566 aa, Artificial Sequence; identical to SEQ ID NO: 4397
  derived and/or modified protein sequence (wt) from hemagglutinin__InfluenzaA__ADG42923

SEQ ID NO: 4885 - protein, 566 aa, Artificial Sequence
  derived and/or modified protein sequence (wt) from hemagglutinin__InfluenzaA__ADG57087
MKAILVVLLYTFATANADTLCIGYHANNSTDTVDTVLEKNVTVTHSVNLLEDKHNGKLCKLRGVAPLHLGKCNIAGWILGNPECESLSTASSWSYIVETSSSDNGTCYPGDFIDYEELREQLSSVSSFERFEIFPKTSSWPNHDSNKGVTAACPHAGAKSFYKNLIWLVKKGNSYPKLSKSYINDKGKEVLVLWGIHHPSTSADQQSLYQNADAYVFVGTSRYSKKFKPEIAIRPKVRDQEGRMNYYWTLVEPGDKITFEATGNLVVPRYAFAMERNAGSGIIISDTPVHDCNTTCQTPKGAINTSLPFQNIHPITIGKCPKYVKSTKLRLATGLRNVPSIQSRGLFGAIAGFIEGGWTGMVDGWYGYHHQNEQGSGYAADLKSTQNAIDEITNKVNSVIEKMNTQFTAVGKEFNHLEKRIENLNKKVDDGFLDIWTYNAELLVLLENERTLDYHDSNVKNLYEKVRSQLKNNAKEIGNGCFEFYHKCDNTCMESVKNGTYDYPKYSEEAKLNREEIDGVKLESTRIYQILAIYSTVAISLVLVVSLGAISFWMCSNGSLRCRICI

SEQ ID NO: 4886 - protein, 566 aa, Artificial Sequence; identical to SEQ ID NO: 2669
  derived and/or modified protein sequence (wt) from hemagglutinin__InfluenzaA__ADG57088

SEQ ID NO: 4887 - protein, 566 aa, Artificial Sequence
  derived and/or modified protein sequence (wt) from hemagglutinin__InfluenzaA__ADG57089
MEAILVVLLYTFATANADTLCIGYHANNSTDTVDTVLEKNVTVTHSVNLLEDKHNGKLCKLRGVAPLHLGKCNIAGWILGNPECESLSTASSWSYIVETSSSDNGTCYPGDFIQYEELREQLSSVSSFERFEIFPKTSSWPNHDSNKGVTAACPHAGAKSFYKNLIWLVKKGNSYPKLSKSYINDKGKEVLVLWGIHHPSTSADQQSLYQNADAYVFVGSSRYSKKFKPEIAIRPKVRDQEGRMNYYWTLVEPGDKITFEATGNLVVPRYAFAMERNAGSGIIISDTPVHDCNTTCQTPKGAINTSLPFHNIHPITIGKCPKYVKSTKLRLATGLRNVPSIQSRGLFGAIAGFIEGGWTGMVDGWYGYHHQNEQGSGYAADLKSTQNAIDEITNKVNSVIEKMNTQFTAVGKEFNHLEKRIENLNKKVDDGFLDIWTYNAELLVLLENERTLDYHDSNVKNLYEKVRSQLKNNAEEIGNGCFEFYHKCDNTCMESVKNGTYDYPKYSEEAKLNREEIDGVKLESTRIYQILAIYSTVASSLVLVVSLGAISFWMCSNGSLQCRICI

SEQ ID NO: 4888 - protein, 566 aa, Artificial Sequence
  derived and/or modified protein sequence (wt) from hemagglutinin__InfluenzaA__ADG57090
MKAILVVLLYTFATANADTLCIGYHANNSTDTVDTVLEKNVTVTHSVNLLEDKHNGKLCKLRGVAPLHLGKCNIAGWILGNPECESLSTASSWSYIVETSSSDNGTCYPGDFIDYEELREQLSSVSSFERFEIFPKTSSWPNHDSNKGVTAACPHAGAKSFYKNLIWLVKKGNSYPKLSKSYINDKGKEVLVLWGIHHPSTSADQQSIYQNADAYVFVGTSRYSKKFKPEIAIRPKVRDQEGRMNYYWTLVEPGDKITFEATGNLVVPRYAFAMERNAGSGIIISDTPVHDCNTTCQTPKGAINTSLPFQNIHPITIGKCPKYVKSTKLRLATGLRNVPSIQSRGLFGAIAGFIEGGWTGMVDGWYGYHHQNEQGSGYAADLKSTQNAIDEITNKVNSVIEKMNTQFTAVGKEFNHLEKRIENLNKKVDDGFLDIWTYNAQLLVLLENERTLDYHDSNVKNLYEKVRSQLKNNAKEIGNGCFEFYHKCDNTCMESVKNGTYDYPKYSEEAKLNREEIDGVKLESTRIYQILAIYSTVASSLVLVVSLGAISFWMCSNGSLQCRICI

SEQ ID NO: 4889 - protein, 566 aa, Artificial Sequence
  derived and/or modified protein sequence (wt) from hemagglutinin__InfluenzaA__ADG57091
MEAILVVLLYTFATANADTLCIGYHANNSTDTVDTVLEKNVTVTHSVNLLEDKHNGKLCKLRGVAPLHLGKCNIAGWILGNPECESLSTASSWSYIVETSSSDNGTCYPGDFIDYEELREQLSSVSSFERFEIFPKTSSWPNHDSNKGVTAACPHAGAKSFYKNLIWLVKKGNSYPKLSKSYINDKGKEVLVLWGIHHPSTSADQQSLYQNADAYVFVGSSRYSKKFKPEIAIRPKVRDQEGRMNYYWTLVEPGDKITFEATGNLVVPRYAFAMERNAGSGIIISDTPVHDCNTTCQTPKGAINTSLPFHNIHPITIGKCPKYVKSTKLRLATGLRNVPSIQSRGLFGAIAGFIERGWTGMVDGWYGYHHQNEQGSGYAADLKSTQNAIDEITNKVNSVIEKMNTQFTAVGKEFNHLEKRIENLNKKVDDGFLDIWTYNAELLVLLENERTLDYHDSNVKNLYEKVRSQLKNNAKEIGNGCFEFYHKCDNTCMESVKNGTYDYPKYSEEAKLNREEIDGVKLESTRIYQILAIYSTVASSLVLVVSLGAISFWMCSNGSLQCRICI

SEQ ID NO: 4890 - protein, 566 aa, Artificial Sequence
  derived and/or modified protein sequence (wt) from hemagglutinin__InfluenzaA__ADG57092
MKAILVVLLYTFATANADTLCIGYHANNSTDTVDTVLEKNVTVTHSVNLLEDKHNGKLCKLRGVAPLHLGKCNIAGWILGNPECESLSTASSWSYIVETSSSDNGTCYPGDFIDYEELREQLSSVSSFERFEIFPKTSSWPNHDSNKGVTAACPHAGAKSFYKNLIWLVKKGNSYPKLIKSYINDKGKEVLVLWGIHHPSTSADQQSLYQNADAYVFVGTSRYSKKFKPEIAIRPKVRDQEGRMNYYWTLVEPGDKITFEATGNLVVPRYAFAMERNAGSGIIISDTPVHDCNTTCQTPKGAINTSLPFQNIHPITIGKCPKYVKSTKLRLATGLRNVPSIQSRGLFGAIAGFIEGGWTGMVDGWYGYHHQNEQGSGYAADLKSTQNAIDEITNKVNSVIEKMNTQFTAVGKEFNHLEKRIENLNKKVDDGFLDIWTYNAELLVLLENERTLDYHDSNVKNLYEKVRSQLKNNAKEIGNGCFEFYHKCDNTCMESVKNGTYDYPKYSEEAKLNREEIDGVKLESTRIYQILAIYSTVASSLVLVVSLGAISFWMCSNGSLQCRICI

SEQ ID NO: 4891 - protein, 566 aa, Artificial Sequence
  derived and/or modified protein sequence (wt) from hemagglutinin__InfluenzaA__ADG57093
MEAILVVLLYTFATANADTLCIGYHANNSTDTVDTVLEKNVTVTHSVNLLEDKHNGKLCKLRGVAPLHLGKCNIAGWILGNPECESLSTASSWSYIVETSSSDNGTCYPGDFIDYEELREQLSSVSSFERFEIFPKTSSWPNHDSNKGVTAACPHAGAKSFYKNLIWLVKKGNSYPKLSKSYINDKGKEILVLWGIHHPSTSADQQSLYQNADAYVFVWSSRYSKKFKPEIAIRPKVRDQEGRMNYYWTLVEPGDKITFEATGNLLVPRYAFAMERNAGSGIIISDTPVHDCNTTCQTPKGAINTSLPFHNIHPITIGKCPKYVKSTKLRLATGLRNVPSIQSRGLFGAIAGFIEGGWTGMVDGWYGYHHQNEQGSGYAADLKSTQNAIDEITNKVNSVIEKMNTQFTAVGKEFNHLEKRIENLNKKVDDGFLDIWTYNAELLVLLENERTLDYHDSNVKNLYEKVRSQLKNNAKEIGNGCFEFYHKCDNTCMESVKNGTYDYPKYSEEAKLNREEIDGVKLESTRIYQILAIYSTVASSLVLVVSLGAISFWMCSNGSLQCRICI

SEQ ID NO: 4892 - protein, 566 aa, Artificial Sequence
  derived and/or modified protein sequence (wt) from hemagglutinin__InfluenzaA__ADG57094
MKAILVVLLYTFATANADTLCVGYHANNSTDTVDTVLEKNVTVTHSVNLLEDKHNGKLCKLRGVAPLHLGKCNIAGWILGNPECESLSTASSWSYIVETSSSDNGTCYPGDFIDYEELREQLSSVSSFERFEIFPKTSSWPNHDSNKGVTAACPHAGAKSFYKNLIWLVKKGNSYPKLSKSYINDKGKEVLVLWGIHHPSTSADQQSLYQNADAYVFVGTSRYSKKFKPEIAIRPKVRDREGRMNYYWTLVEPGDKITFEATGNLVVPRYAFAMERNAGSGIIISDTPVHDCNTTCQTPKGAINTSLPFQNIHPITIGKCPKYVKSTKLRLATGLRNVPSIQSRGLFGAIAGFIEGGWTGMVDGWYGYHHQNEQGSGYAADLKSTQNAIDEITNKVNSVIEKMNTQFTAVGKEFNHLEKRIENLNKKVDDGFLDIWTYNAELLVLLENERTLDYHDSNVKNLYEKVRSQLKNNAKEIGNGCFEFYHKCDNTCMESVKNGTYDYPKYSEEAKLNREEIDGVKLESTRIYQILAIYSTVASSLVLVVSLGAISFWMCSNGSLQCRICI

SEQ ID NO: 4893 - protein, 566 aa, Artificial Sequence; identical to SEQ ID NO: 2669
  derived and/or modified protein sequence (wt) from hemagglutinin__InfluenzaA__ADG57095

SEQ ID NO: 4894 - protein, 566 aa, Artificial Sequence
  derived and/or modified protein sequence (wt) from hemagglutinin__InfluenzaA__ADG57097
MEAILVVLLYTFATANADTLCIGYHANNSTDTVDTVLEKNVTVTHSVNLLEDKHNGKLCKLRGVAPLHLGKCNIAGWILGNPECESLSTASSWSYIVETSSSDNGTCYPGDFIDYEELREQLSSVSSFERFEIFPKTSSWPNHDSNKGVTAACPHAGAKSFYKNLIWLVKKGNSYPKLSKSYINDKGKEVLVLWGIHHPSTSADQQSLYQNADAYVFVGSSRYSKKFKPEIAIRPKVRGQEGRMNYYWTLVEPGDKITFEATGNLVVPRYAFAMERNAGSGIIISDTPVHDCNTTCQTPKGAINTSLPFHNIHPITIGKCPKYVKSTKLRLATGLRNVPSIQSRGLFGAIAGFIEGGWTGMVDGWYGYHHQNEQGSGYAADLKSTQNAIDEITNKVNSVIEKMNTQFTAVGKEFNHLEKRIENLNKKVDDGFLDIWTYNAELLVLLENERTLDYHDSNVKNLYEKVRSQLKNNAKEIGNGCFEFYHKCDNTCMESVKNGTYDYPKYSEEAKLNREEIDGVKLESTRIYQILAIYSTVASSLVLVVSLGAISFWMCSNGSLQCRICI

SEQ ID NO: 4895 - protein, 566 aa, Artificial Sequence; identical to SEQ ID NO: 3833
  derived and/or modified protein sequence (wt) from hemagglutinin__InfluenzaA__ADG57098

SEQ ID NO: 4896 - protein, 566 aa, Artificial Sequence
  derived and/or modified protein sequence (wt) from hemagglutinin__InfluenzaA__ADG57099
MKAILVVLLYTFATANADTLCIGYHANNSTDTVDTVLEKNVTVTHSVNLLEDKHNGKLCKLRGVAPLHLGKCNIAGWILGNPECESLSTASSWSYIVETSSSDNGTCYPGDFIDYEELREQLSSVSSFERFEIFPKTSSWPNHDSNKGVTAACPHAGAKSFYKNLIWLVKKGNSYPKLSKSYINDKGKEVLVLWGIHHPSTSADQQSLYQNADAYVFVGTSRYSKKFKPEIAIRPKVRDQEGRMNYHWTLVEPGDKITFEATGNLVVPRYAFAMERNAGSGIIITDTPVHDCNTTCQTPKGAVNTSLPFQNIHPITIGKCPKYVKSTKLRLATGLRNVPSIQSRGLFGAIAGFIEGGWTGMVDGWYGYHHQNEQGSGYAADLKSTQNAIDKITNKVNSVIEKMNTQFTAVGKEFNHLEKRIENLNKKVDDGFLDIWTYNAELLVLLENERTLDYHDSNVKNLYEKVRSQLKNNAKEIGNGCFEFYHKCDNTCMESVKNGTYDYPKYSEEAKLNREEIDGVKLESTRIYQILAIYSTVASSLVLVVSLGAISFWMCSNGSLQCRICI

SEQ ID NO: 4897 - protein, 566 aa, Artificial Sequence
  derived and/or modified protein sequence (wt) from hemagglutinin__InfluenzaA__ADG57100
MKAILVVLLYTFATANADTLCIGYHANNSTDTVDTVLEKNVTVTHSVNLLEDKHNGKLCKLRGVAPLHLGKCNIAGWILGNPECESLSTASSWSYIVETSSSDNGTCYPGDFIDYEELREQLSSVSSFERFEIFPKTSSWPNHDSNKGVTAACPHAGAKSFYKNLIWLVKKGNSYPKLSKSYINDKGKEVLVLWGIHHPSTSADQQSLYQNADAYVFVGTSRYSKKFKPEIAIRPKVRDQEGRMNYYWTLVEPGDKITFEATGNLVVPRYAFAMERNAGSGIIISDTPVHDCNTTCQTPKGAINTSLPFQNIHPITIGKCPKYVKSTKLRLATGLRNVPSIQSRGLFGAIAGFIEGGWTGMVDGWYGYHHQNEQGSGYAADLKSTQNAIDKITNKVNSVIEKMNTQFTAGGKEFNHLEKRIENLNKKVDDGFLDIWTYNAELLVLLENERTLDYHDSNVKNLYEKVRSQLKNNAKEIGNGCFEFYHKCDNTCMESVKNGTYDYPKYSEEAKLNREEIDGVKLESTRIYQILAIYSTVASSLVLVVSLGAISFWMCSNGSLQCRICI

SEQ ID NO: 4898 - protein, 566 aa, Artificial Sequence; identical to SEQ ID NO: 2669
  derived and/or modified protein sequence (wt) from hemagglutinin__InfluenzaA__ADG58939

SEQ ID NO: 4899 - protein, 566 aa, Artificial Sequence; identical to SEQ ID NO: 2669
  derived and/or modified protein sequence (wt) from hemagglutinin__InfluenzaA__ADG58940

SEQ ID NO: 4900 - protein, 566 aa, Artificial Sequence
  derived and/or modified protein sequence (wt) from hemagglutinin__InfluenzaA__ADG58941
MKAILVVLLYTFATANADTLCIGYHANNSTDTVDTVLEKNVTVTHSVNLLEDKHNGKLCKLRGVAPLHLGKCNIAGWILGNPECESLSTASSWSYIVETSSSDNGTCYPGDFIDYEELREQLSSVSSFERFEIFPKTSSWPNHDSNKGVTAACPHAGAKSFYKNLIWLVKKGNSYPKLSKSYINDKGKEVLVLWGIHHPSTSADQQSLYQNADTYVFVGTSRYSKKFKPEIAIRPKVRDQEGRMNYYWTLVEPGDKITFEATGNLVVPRYAFAMERNAGSGIIISDTPVHDCNTTCQTPKGAINTSLPFQNIHPITIGKCPKYVKSTKLRLATGLRNVPSIQSRGLFGAIAGFIEGGWTGMVDGWYGYHHENEQGSGYAADLKSTQNAIDEITNKVNSVIEKMNTQFTAVGKEFNHLEKRIENLNKKIDDGFLDIWTYNAELLVLLENERTLDYHDSNVKNLYEKVRSQLKNNAKEIGNGCFEFYHKCDNTCMESVKNGTYDYPKYSEEAKLNREEIDGVKLESTRIYQILAIYSTVASSLVLVVSLGAISFWMCSNGSLQCRICI

SEQ ID NO: 4901 - protein, 566 aa, Artificial Sequence
  derived and/or modified protein sequence (wt) from hemagglutinin__InfluenzaA__ADG58942
MKAILVVLLYTFATANADTLCIGYHANNSTDTVDTVLEKNVTVTHSVNLLEDKHNGKLCKLRGVAPLHLGKCNIAGWILGNPECESLSTASSWSYIVETSSSDNGTCYPGDFIDYEELREQLSSVSSFERFEIFPKTSSWPNHDSNKGVTAACPHAGAKSFYKNLIWLVKKGNSYPKLSKSYINDKGKEVLVLWGIHHPSTSADQQSLYQNADTYVFVGTSRYSKKFKPEIAIRPKVRDQEGRMNYYWTLVEPGDKITFEATGNLVVPRYAFAMERNAGSGIIISDTPVHDCNTTCQTPKGAINTSLPFQNIHPITIGKCPKYVKSTKLRLATGLRNVPSIQSRGLFGAIAGFIEGGWTGMVDGWYGYLHQNEQGSGYAADLKSTQNAIDEITNKVNSVIEKMNTQFTAVGKEFNHLEKRIENLNKKIDDGFLDIWTYNAELLVLLENERTLDYHDSNVKNLYEKVRSQLKNNAKEIGNGCFEFYHKCDNTCMESVKNGTYDYPKYSEEAKLNREEIDGVKLESTRIYQILAIYSTVASSLVLVVSLGAISFWMCSNGSLQCRICI

SEQ ID NO: 4902 - protein, 566 aa, Artificial Sequence; identical to SEQ ID NO: 2669
  derived and/or modified protein sequence (wt) from hemagglutinin__InfluenzaA__ADG58943

SEQ ID NO: 4903 - protein, 566 aa, Artificial Sequence
  derived and/or modified protein sequence (wt) from hemagglutinin__InfluenzaA__ADG58944
MKAILVVLLYTFATANADTLCIGYHANNSTDTVDTVLEKNVTVTHSVNLLEDKHNGKLCKLRGVAPLHLGKCNIAGWILGNPECESLSTASSWSYIVETSSSDNGTCYPGDFIDYEELREQLSSVSSFERFEIFPKTSSWPNHDSNKGVTAACPHAGAKSFYKNLIWLVKKGNSYPKLSKSYINDKGKEVLVLWGIHHPSTSADQQSLYQNADAYVFVGTSRYSKKFKPEIAIRPKVRDQEGRMNYYWTLVEPGDKITFEATGNLLVPRYAFAMERNAGSGIIISDTPVHDCNTTCQTPKGAINTSLPFQNIHPITIGKCPKYVKSTKLRLATGLRNVPSIQSRGLFGAIAGFIEGGWTGMVDGWYGYHHQNEQGSGYAADLKSTQNAIDEITNKVNSVIEKMNTQFTAVGKEFNHLEKRIENLNKKVDDGFLDIWTYNAELLVLLENERTLDYHDSNVKNLYEKVRSQLKNNAKEIGNGCFEFYHKCDNTCMESVKNGTYDYPKYSEEAKLNREEIDGVKLESTRIYQILAIYSTVASSLVLVVSLGAISFWMCSNGSLQCRICI

SEQ ID NO: 4904 - protein, 566 aa, Artificial Sequence; identical to SEQ ID NO: 3467
  derived and/or modified protein sequence (wt) from hemagglutinin__InfluenzaA__ADG58946

SEQ ID NO: 4905 - protein, 566 aa, Artificial Sequence; identical to SEQ ID NO: 2669
  derived and/or modified protein sequence (wt) from hemagglutinin__InfluenzaA__ADG58947

SEQ ID NO: 4906 - protein, 566 aa, Artificial Sequence
  derived and/or modified protein sequence (wt) from hemagglutinin__InfluenzaA__ADG58948
MKAILIVLLYTFATANADTLCIGYHANNSTDTVDTVLEKNVTVTHSVNLLEDKHNGKLCKLRGVAPLHLGKCNIAGWILGNPECESLSTASSWSYIVETSSSDNGTCYPGDFIDYEELREQLSSVSSFERFEIFPKTSSWPNHDSNKGVTAACPHAGAKSFYKNLIWLVKKGNSYPKLSKSYINDKGKEVLVLWGIHHPSTSADQQSLYQNADTYVFVGTSRYSKKFKPEIAIRPKVRDQEGRMNYYWTLVEPGDKITFEATGNLVVPRYAFAMERNAGSGIIISDTPVHDCNTTCQTPKGAINTSLPFQNIHPITIGKCPKYVKSTKLRLATGLRNVPSIQSRGLFGAIAGFIEGGWTGMVDGWYGYHHQNEQGSGYAADLKSTQNAIDEITNKVNSVIEKMNTQFTAVGKEFNHLEKRIENLNKKIDDGFLDIWTYNAELLVLLENERTLDYHDSNVKNLYEKVRSQLKNNAKEIGNGCFEFYHKCDNTCMESVKNGTYDYPKYSEEAKLNREEIDGVKLESTRIYQILAIYSTVASSLVLVVSLGAISFWMCSNGSLQCRICI

SEQ ID NO: 4907 - protein, 566 aa, Artificial Sequence
  derived and/or modified protein sequence (wt) from hemagglutinin__InfluenzaA__ADG58949
MKAILVVLLYTFATANADTLCIGYHANNSTDTVDTVLEKNVTVTHSVNLLEDKHNGKLCKLRGVAPLHLGKCNIAGWILGNPECESLSTASSWSYIVETSSSDNGTCYPGDFIDYEELREQLSSVSSFERFEIFPKTSSWPNHDSNKGVTAACPHAGAKSFYKNLIWLVKKGNSYPKLSKSYINDKGKEVLVLWGIHHPSTSADQQSLYQNADTYVFVGTSRYSKKFKPEIAIRPKVRDQEGRMNYYWTLVEPGDKITFEATGNLVVPRYAFAMERNAGSGIIISDTSVHDCNTTCQTPKGAINTSLPFQNIHPITIGKCPKYVKSTKLRLATGLRNVPSIQSRGLFGAIAGFIEGGWTGMVDGWYGYHHQNEQGSGYAADLKSTQNAIDEITNKVNSVIEKMNTQFTAVGKEFNHLEKRIENLNKKIDDGFLDIWTYNAELLVLLENERTLDYHDSNVKNLYEKVRSQLKNNAKEIGNGCFEFYHKCDNTCMESVKNGTYDYPKYSEEAKLNREEIDGVKLESTRIYQILAIYSTVASSLVLVVSLGAISFWMCSNGSLQCRICI

SEQ ID NO: 4908 - protein, 566 aa, Artificial Sequence
  derived and/or modified protein sequence (wt) from hemagglutinin__InfluenzaA__ADG58951
MKAILVVLLHTFATANADTLCIGYHANNSTDTVDTVLEKNVTVTHSVNLLEDKHNGKLCKLRGVAPLHLGKCNIAGWILGNPECESLSTASSWSYIVETSNSGNGTCYPGEFIDYEELREQLSSVSSFERFEIFPKTSSWPNHDSNKGVTAACPHAGAKSFYKNLIWLVKKGNSYPKLSKSYINDKGKEVLVLWGIHHPSTSADQQSLYQNADAYVFVGTSRYSKKFKPEIAIRPKVRDQEGRMNYYWTLVEPGDKITFEATGNLVVPRYAFAMERNAGSGIIISDTPVHDCNTTCQTPKGAINTSLPFQNIHPITIGKCPKYVKSTKLRLATGLRNVPSIQSRGLFGAIAGFIEGGWTGMVDGWYGYHHQNEQGSGYAADLKSTQNAIDEITNKVNSVIEKMNTQFTAVGKEFNHLEKRIENLNKKVDDGFLDIWTYNAELLVLLENERTLDYHDSNVKNLYEKVRSQLKNNAKEIGNGCFEFYHKCDNTCIESVKNGTYDYPKYSEEAKLNREEIDGVKLESTRIYQILAIYSTVASSLVLVVSLGAISFWMCSNGSLQCRICI

SEQ ID NO: 4909 - protein, 566 aa, Artificial Sequence; identical to SEQ ID NO: 4908
  derived and/or modified protein sequence (wt) from hemagglutinin__InfluenzaA__ADG58952

SEQ ID NO: 4910 - protein, 566 aa, Artificial Sequence; identical to SEQ ID NO: 4908
  derived and/or modified protein sequence (wt) from hemagglutinin__InfluenzaA__ADG58953

SEQ ID NO: 4911 - protein, 566 aa, Artificial Sequence; identical to SEQ ID NO: 4908
  derived and/or modified protein sequence (wt) from hemagglutinin__InfluenzaA__ADG58954

SEQ ID NO: 4912 - protein, 566 aa, Artificial Sequence; identical to SEQ ID NO: 4908
  derived and/or modified protein sequence (wt) from hemagglutinin__InfluenzaA__ADG58955

SEQ ID NO: 4913 - protein, 566 aa, Artificial Sequence; identical to SEQ ID NO: 4908
  derived and/or modified protein sequence (wt) from hemagglutinin__InfluenzaA__ADG58956

SEQ ID NO: 4914 - protein, 566 aa, Artificial Sequence
  derived and/or modified protein sequence (wt) from hemagglutinin__InfluenzaA__ADG58957
MKAILVVLLHTFATANADTLCIGYHANNSTDTVDTVLEKNVTVTHSVNLLEDKHNGKLCKLRGVAPLHLGKCNIAGWILGNPECESLSTASSWSYIVETSNSGNGTCYPGEFIDYEELREQLSSVSSFERFEIFPKTSSWPNHDSNKGVTAACPHAGAKSFYKNLIWLVKKGNSYPKLSKSYINDKGKEVLVLWGIHHPSTSADQQSLYQNADAYVFVGTSRYSKKFKPEIAIRPKVRDQEGRMNYYWTLVEPGDKITFEATGNLVVPRYAFAMERNAGSGIIISDTPVHDCNTTCQTPKGAINTSLPFQNIHPITIGKCPKYVKSTKLRLATGLRNVPSIQSRGLFGAIAGFIEGGWTGMVDGWYGYHHQNEQGSGYAADLKSTQNAIDEITNKVNSVIEKMNTQFTAVGKEFNHLEKRIENLNKKVDDGFLDIWTYNAELLVLLENERTLDYHDSNVKNLYEKVRSQLKNNAKEIGNGCFEFYHKCDNTCMESVKNGTYDYPKYSEEAKLNREEIDGVKLESTRIYQILAIYSTVASSLVLVVSLGAISFWMCSNGSLQCRICI

SEQ ID NO: 4915 - protein, 566 aa, Artificial Sequence
  derived and/or modified protein sequence (wt) from hemagglutinin__InfluenzaA__ADG58959
MKAILVVLLYTFATANADTLCIGYHANNSTDTVDTVLEKNVTVTHSVNLLEDKHNGKLCKLRGVAPLHLGKCNIAGWILGNPECESLSTANSWSYIVETSSSDNGTCYPGDFIDYEELREQLSSVSSFERFEIFPKTSSWPNHDSNKGVTAACPHAGAKSFYKNLIWLVKKGNSYPKLSKSYINDKGKEVLVLWGIHHPSTSADQQSLYQNADAYVFVGTSRYSKKFKPEIAIRPKVRDQEGRMNYYWTLVEPGDKITFEATGNLVVPRYAFAMERNAGSGIIISDTPVHDCNTTCQTPKGAINTSLPFQNIHPITIGKCPKYVKSTKLRLATGLRNVPSIQSRGLFGAIAGFIEGGWTGMVDGWYGYHHQNEQGSGYAADLKSTQNAIDEITNKVNSVIEKMNTQFTAVGKEFNHLEKRIENLNKKVDDGFLDIWTYNAELLVLLENERTLDYHDSNVKNLYEKVRSQLKNNAKEIGNGCFEFYHKCDNTCMESVKNGTYDYPKYSEEAKLNREEIDGVKLESTRIYQILAIYSTVASSLVLVVSLGAISFWMCSNGSLQCRICI

SEQ ID NO: 4916 - protein, 566 aa, Artificial Sequence; identical to SEQ ID NO: 4833
  derived and/or modified protein sequence (wt) from hemagglutinin__InfluenzaA__ADG58960

SEQ ID NO: 4917 - protein, 566 aa, Artificial Sequence; identical to SEQ ID NO: 4833
  derived and/or modified protein sequence (wt) from hemagglutinin__InfluenzaA__ADG58961

SEQ ID NO: 4918 - protein, 566 aa, Artificial Sequence; identical to SEQ ID NO: 4833
  derived and/or modified protein sequence (wt) from hemagglutinin__InfluenzaA__ADG58962

SEQ ID NO: 4919 - protein, 566 aa, Artificial Sequence; identical to SEQ ID NO: 4833
  derived and/or modified protein sequence (wt) from hemagglutinin__InfluenzaA__ADG58963

SEQ ID NO: 4920 - protein, 566 aa, Artificial Sequence; identical to SEQ ID NO: 4833
  derived and/or modified protein sequence (wt) from hemagglutinin__InfluenzaA__ADG58964

SEQ ID NO: 4921 - protein, 566 aa, Artificial Sequence; identical to SEQ ID NO: 4833
  derived and/or modified protein sequence (wt) from hemagglutinin__InfluenzaA__ADG58965

SEQ ID NO: 4922 - protein, 566 aa, Artificial Sequence; identical to SEQ ID NO: 4833
  derived and/or modified protein sequence (wt) from hemagglutinin__InfluenzaA__ADG58966

SEQ ID NO: 4923 - protein, 566 aa, Artificial Sequence; identical to SEQ ID NO: 4833
  derived and/or modified protein sequence (wt) from hemagglutinin__InfluenzaA__ADG58967

SEQ ID NO: 4924 - protein, 566 aa, Artificial Sequence; identical to SEQ ID NO: 4833
  derived and/or modified protein sequence (wt) from hemagglutinin__InfluenzaA__ADG58968

SEQ ID NO: 4925 - protein, 566 aa, Artificial Sequence; identical to SEQ ID NO: 2669
  derived and/or modified protein sequence (wt) from hemagglutinin__InfluenzaA__ADG59628

SEQ ID NO: 4926 - protein, 566 aa, Artificial Sequence; identical to SEQ ID NO: 2669
  derived and/or modified protein sequence (wt) from hemagglutinin__InfluenzaA__ADG59629

SEQ ID NO: 4927 - protein, 566 aa, Artificial Sequence; identical to SEQ ID NO: 2669
  derived and/or modified protein sequence (wt) from hemagglutinin__InfluenzaA__ADG59630

SEQ ID NO: 4928 - protein, 566 aa, Artificial Sequence; identical to SEQ ID NO: 2669
  derived and/or modified protein sequence (wt) from hemagglutinin__InfluenzaA__ADG59631

SEQ ID NO: 4929 - protein, 566 aa, Artificial Sequence; identical to SEQ ID NO: 2669
  derived and/or modified protein sequence (wt) from hemagglutinin__InfluenzaA__ADG59632

SEQ ID NO: 4930 - protein, 566 aa, Artificial Sequence; identical to SEQ ID NO: 3770
  derived and/or modified protein sequence (wt) from hemagglutinin__InfluenzaA__ADG59633

SEQ ID NO: 4931 - protein, 566 aa, Artificial Sequence; identical to SEQ ID NO: 3770
  derived and/or modified protein sequence (wt) from hemagglutinin__InfluenzaA__ADG59634

SEQ ID NO: 4932 - protein, 566 aa, Artificial Sequence; identical to SEQ ID NO: 2669
  derived and/or modified protein sequence (wt) from hemagglutinin__InfluenzaA__ADG59635

SEQ ID NO: 4933 - protein, 566 aa, Artificial Sequence
  derived and/or modified protein sequence (wt) from hemagglutinin__InfluenzaA__ADG59636
MKAILVVLLYTFATANADTLCIGYHANNSTDTVDTVLEKNVTVTHSVNLLEDKHNGKLCKLRGVAPLHLGKCNIAGWILGNPECESLSTASSWSYIVETSSSDNGTCYPGDFIDYEELREQLSSVSSFERFEIFPKTSSWPNHDSNKGVTAACPHAGAKSFYKNLIWLVKKGNSYPKLSKSYINDKGKEVLVLWGIHHPSTSADQQSLYQNADAYVFVGTSRYSKKFKPEIAIRPKVRGQEGRMNYYWTLVEPGDKITFEATGNLVVPRYAFAMERNAGSGIIISDTPVHDCNTTCQTPKGAINTSLPFQNIHPITIGKCPKYVKSTKLRLATGLRNIPSIQSRGLFGAIAGFIEGGWTGMVDGWYGYHHQNEQGSGYAADLKSTQNAIDEITNKVNSVIEKMNTQFTAVGKEFNHLEKRIENLNKKVDDGFLDIWTYNAELLVLLENERTLDYHDSNVKNLYEKVRSQLKNNAKEIGNGCFEFYHKCDNTCMESVKNGTYDYPKYSEEAKLNREEIDGVKLESTRIYQILAIYSTVASSLVLVVSLGAISFWMCSNGSLQCRICI

SEQ ID NO: 4934 - protein, 566 aa, Artificial Sequence; identical to SEQ ID NO: 3417
  derived and/or modified protein sequence (wt) from hemagglutinin__InfluenzaA__ADG59638

SEQ ID NO: 4935 - protein, 566 aa, Artificial Sequence; identical to SEQ ID NO: 3770
  derived and/or modified protein sequence (wt) from hemagglutinin__InfluenzaA__ADG59639

SEQ ID NO: 4936 - protein, 566 aa, Artificial Sequence; identical to SEQ ID NO: 3022
  derived and/or modified protein sequence (wt) from hemagglutinin__InfluenzaA__ADG59641

SEQ ID NO: 4937 - protein, 566 aa, Artificial Sequence; identical to SEQ ID NO: 3512
  derived and/or modified protein sequence (wt) from hemagglutinin__InfluenzaA__ADG59643

SEQ ID NO: 4938 - protein, 566 aa, Artificial Sequence; identical to SEQ ID NO: 2656
  derived and/or modified protein sequence (wt) from hemagglutinin__InfluenzaA__ADG59644

SEQ ID NO: 4939 - protein, 566 aa, Artificial Sequence; identical to SEQ ID NO: 2669
  derived and/or modified protein sequence (wt) from hemagglutinin__InfluenzaA__ADG59646

SEQ ID NO: 4940 - protein, 566 aa, Artificial Sequence; identical to SEQ ID NO: 3770
  derived and/or modified protein sequence (wt) from hemagglutinin__InfluenzaA__ADG59647

SEQ ID NO: 4941 - protein, 566 aa, Artificial Sequence; identical to SEQ ID NO: 3833
  derived and/or modified protein sequence (wt) from hemagglutinin__InfluenzaA__ADG59648

SEQ ID NO: 4942 - protein, 566 aa, Artificial Sequence; identical to SEQ ID NO: 3833
  derived and/or modified protein sequence (wt) from hemagglutinin__InfluenzaA__ADG59649

SEQ ID NO: 4943 - protein, 566 aa, Artificial Sequence; identical to SEQ ID NO: 3833
  derived and/or modified protein sequence (wt) from hemagglutinin__InfluenzaA__ADG59650

SEQ ID NO: 4944 - protein, 566 aa, Artificial Sequence; identical to SEQ ID NO: 3833
  derived and/or modified protein sequence (wt) from hemagglutinin__InfluenzaA__ADG59651

SEQ ID NO: 4945 - protein, 566 aa, Artificial Sequence; identical to SEQ ID NO: 2669
  derived and/or modified protein sequence (wt) from hemagglutinin__InfluenzaA__ADG59652

SEQ ID NO: 4946 - protein, 566 aa, Artificial Sequence; identical to SEQ ID NO: 2669
  derived and/or modified protein sequence (wt) from hemagglutinin__InfluenzaA__ADG59653

SEQ ID NO: 4947 - protein, 566 aa, Artificial Sequence; identical to SEQ ID NO: 4933
  derived and/or modified protein sequence (wt) from hemagglutinin__InfluenzaA__ADG59655

SEQ ID NO: 4948 - protein, 566 aa, Artificial Sequence; identical to SEQ ID NO: 3770
  derived and/or modified protein sequence (wt) from hemagglutinin__InfluenzaA__ADG59656

SEQ ID NO: 4949 - protein, 566 aa, Artificial Sequence
  derived and/or modified protein sequence (wt) from hemagglutinin__InfluenzaA__ADG59657
MKAILVVLLYTFATANADTLCIGYHANNSTDTVDTVLEKNVTVTHSVNLLEDKHNGKLCKLRGVAPLHLGKCNIAGWILGNPECESLSTASSWSYIVETSSSDNGTCYPGDFIDYEELREQLSSVSSFERFEIFPKTSSWPNHDSNKGVTAACPHAGAKSFYKNLIWLVKKGNSYPKLSKSYINDKGKEVLVLWGIHHPSTSADQQSLYQNADAYVFVGSSKYSKKFKPEIAIRPKVRDQEGRMNYYWTLVEPGDKITFEATGNLVVPRYAFAMERNAGSGIIISDTPVHDCNTTCQTPKGAINTSLPFQNIHPITIGKCPKYVKSTKLRLATGLRNVPSTQSRGLFGAIAGFIEGGWTGMVDGWYGYHHQNEQGSGYAADLKSTQNAIDEITNKVNSVIEKMNTQFTAVGKEFNHLEKRIENLNKKVDDGFLDIWTYNAELLVLLENERTLDYHDSNVKNLYEKVRSQLKNNAKEIGNGCFEFYHKCDNTCMESVKNGTYDYPKYSEEAKLNREEIDGVKLESTRIYQILAIYSTVASSLVLVVSLGAISFWMCSNGSLQCRICI

SEQ ID NO: 4950 - protein, 566 aa, Artificial Sequence
  derived and/or modified protein sequence (wt) from hemagglutinin__InfluenzaA__ADG59658
MKAILVVLLYTFATANADTLCIGYHANNSTDTIDTVLEKNVTVTHSVNLLEDKHNGKLCKLRGVAPLHLGKCNIAGWILGNPECESLSTASSWSYIVETSSSDNGTCYPGDFIDYEELREQLSSVSSFERFEIFPKTSSWPNHDSNKGVTAACPHAGAKSFYKNLIWLVKKGNSYPKLSKSYINDKGKEVLVLWGIHHPSTSADQQSLYQNADAYVFVGTSRYSKKFKPEIAIRPKVRNQEGRMNYYWTLVEPGDKITFEATGNLVVPRYAFAMERNAGSGIIISDTPVHDCNTTCQTPKGAINTSLPFQNIHPITIGKCPKYVKSTKLRLATGLRNIPSIQSRGLFGAIAGFIEGGWTGMVDGWYGYHHQNEQGSGYAADLKSTQNAIDEITNKVNSVIEKMNTQFTAVGKEFNHLEKRIENLNKKVDDGFLDIWTYNAELLVLLENERTLDYHDSNVKNLYEKVRSQLKNNAKEIGNGCFEFYHKCDNTCMESVKNGTYDYPKYSEEAKLNREEIDGVKLESTRIYQILAIYSTVASSLVLVVSLGAISFWMCSNGSLQCRICI

SEQ ID NO: 4951 - protein, 566 aa, Artificial Sequence; identical to SEQ ID NO: 3116
  derived and/or modified protein sequence (wt) from hemagglutinin__InfluenzaA__ADG59659

SEQ ID NO: 4952 - protein, 566 aa, Artificial Sequence; identical to SEQ ID NO: 3116
  derived and/or modified protein sequence (wt) from hemagglutinin__InfluenzaA__ADG59660

SEQ ID NO: 4953 - protein, 566 aa, Artificial Sequence; identical to SEQ ID NO: 3022
  derived and/or modified protein sequence (wt) from hemagglutinin__InfluenzaA__ADG59662

SEQ ID NO: 4954 - protein, 566 aa, Artificial Sequence
  derived and/or modified protein sequence (wt) from hemagglutinin__InfluenzaA__ADG59663
MKAILVVLLYTFATANADTLCIGYHANNSTDTVDTVLEKNVTVTHSVNLLEDKHNGKLCKLRGVAPLHLGKCNIAGWILGNPECESLSTASSWSYIVETSSSDNGTCYPGDFIDYEELREQLSSVSSFERFEIFPKTSSWPNHDSNKGVTAACPHAGAKSFYKNLIWLVKKGNSYPKLSKSYINDKGKEVLVLWGIHHPSTSADQQSLYQNADAYVFVGTSRYSKKFKPEIAIRPKVRDQEGRMNYYWTLVEPGDKITFEATGNLVVPRYAFAMERNAGSGIIISDTPFHDCNTTCQTPKGAINTSLPFQNIHPITIGKCPKYVKSTKLRLATGLRNIPSIQSRGLFGAIAGFIEGGWTGMVDGWYGYHHQNEQGSGYAADLKSTQNAIDEITNKVNSVIEKMNTQFTAVGKEFNHLEKRIENLNKKVDDGFLDIWTYNAELLVLLENERTLDYHDSNVKNLYEKVRSQLKNNAKEIGNGCFEFYHKCDNTCMESVKNGTYDYPKYSEEAKLNREEIDGVKLESTRIYQILAIYSTVASSLVLVVSLGAISFWMCSNGSLQCRICI

SEQ ID NO: 4955 - protein, 566 aa, Artificial Sequence; identical to SEQ ID NO: 3022
  derived and/or modified protein sequence (wt) from hemagglutinin__InfluenzaA__ADG59664

SEQ ID NO: 4956 - protein, 566 aa, Artificial Sequence
  derived and/or modified protein sequence (wt) from hemagglutinin__InfluenzaA__ADG59666
MKAILVVLLYTFATANADTLCIGYHANNSTDTVDTVLEKNVTVTHSVNLLEDKHNGKLCKLRGVAPLHLGKCNIAGWILGNPECESLSTASSWSYIVETSSSDNGTCYPGDFIDYEELREQLSSVSSFERFEIFPKTSSWPNHDSNKGVTAACPHAGAKSFYKNLIWLVKKGNSYPKLSKSYINDKGKEVLVLWGIHHPSTSADQQSLYQNADAYVFVGTSRYSKKFKPEIAIRPKVRDQEGRMNYYWTLVEPGDKITFEATGNLVVPRYAFAMERDAGSGIIISDTPVHDCNTTCQTPKGAINTSLPFQNIHPITIGKCPKYVKSTKLRLATGLRNVPSIQSRGLFGAIAGFIEGGWTGMVDGWYGYHHQNEQGSGYAADLKSTQNAIDEITNKVNSVIEKMNTQFTAVGKEFNHLEKRIENLNKKIDDGFLDIWTYNAELLVLLENERTLDYHDSNVKNLYEKVRSQLKNNAKEIGNGCFEFYHKCDNTCMESVKNGTYDYPKYSEEAKLNREEIDGVKLESTRIYQILAIYSAVASSLVLVVSLGAISFWMCSNGSLQCRICI

SEQ ID NO: 4957 - protein, 566 aa, Artificial Sequence; identical to SEQ ID NO: 3771
  derived and/or modified protein sequence (wt) from hemagglutinin__InfluenzaA__ADG59667

SEQ ID NO: 4958 - protein, 566 aa, Artificial Sequence
  derived and/or modified protein sequence (wt) from hemagglutinin__InfluenzaA__ADG59669
MKAILVVLLYTFATANADTLCIGYHANNSTDTVDTVLEKNVTVTHSVNLLEDKHNGKLCKLRGVAPLHLGKCNIAGWILGNPECESLSTASSWSYIVETSSSDNGTCYPGDFIDYEELREQLSSVSSFERFEIFPKTSSWPNHDSNKGVTAACPHAGAKSFYKNLIWLVKKGNSYPKLSKSYINDKGKEVLVLWGIHHPSTSADQQSLYQNADAYVFVGTSRYSKKFKPEIAIRPKVREQEGRMNYYWTLVDPGDKITFEATGNLVVPRYAFAMERNAGSGIIISDTPVHDCNTTCQTPKGAINTSLPFQNIHSITIGKCPKYVKSTKLRLATGLRNVPSIQSRGLFGAIAGFIEGGWTGMVDGWYGYHHQNEQGSGYAADLKSTQNAIDEITNKVNSVIEKMNTQFTAVGKEFNHLEKRIENLNKKVDDGFLDIWTYNAELLVLLENERTLDYHDSNVKNLYEKVRSQLKNNAKEIGNGCFEFYHKCDNTCMESVKNGTYDYPKYSEEAKLNREEIDGVKLESTRIYQILAIYSTVASSLVLVVSLGAISFWMCSNGSLQCRICI

SEQ ID NO: 4959 - protein, 566 aa, Artificial Sequence; identical to SEQ ID NO: 4958
  derived and/or modified protein sequence (wt) from hemagglutinin__InfluenzaA__ADG59670

SEQ ID NO: 4960 - protein, 566 aa, Artificial Sequence; identical to SEQ ID NO: 4958
  derived and/or modified protein sequence (wt) from hemagglutinin__InfluenzaA__ADG59671

SEQ ID NO: 4961 - protein, 566 aa, Artificial Sequence; identical to SEQ ID NO: 4958
  derived and/or modified protein sequence (wt) from hemagglutinin__InfluenzaA__ADG59672

SEQ ID NO: 4962 - protein, 566 aa, Artificial Sequence
  derived and/or modified protein sequence (wt) from hemagglutinin__InfluenzaA__ADG59673
MKAILVVLLYTFATANADTLCIGYHANNSTDTVDTVLEKNVTVTHSVDLLEDKHNGKLCKLRGVAPLHLGECNIAGWILGNPECESLSTASSWSYIVETSSSDNGTCYPGDFIDYEELREQLSSVSSFERFEIFPKTSSWPNHDSNKGVTAACPHAGAKSFYKNLIWLVKKGNSYPKLSKSYINDKGKEVLVLWGIHHPSTSADQQSLYQNADAYVFVGTSRYSKKFKPEIAIRPKVRDQEGRMNYYWTLVEPGDKITFEATGNLVVPRYAFAMERNAGSGIIISDTPVHDCNTTCQTPKGAINTSLPFQNIHPITIGKCPKYVKSTKLRLATGLRNVPSIQSRGLFGAIAGFIEGGWTGMVDGWYGYHHQNEQGSGYAADLKSTQNAIDEITNKVNSVIEKMNTQFTAVGKEFNHLEKRIENLNKKVDDGFLDIWTYNAELLVLLENERTLDYHDSNVKNLYEKVRSQLKNNAKEIGNGCFEFYHKCDNTCMESVKNGTYDYPKYSEEAKLNREEIDGVKLESTRIYQILAIYSTVASSLVLVVSLGAISFWMCSNGSLQCRICI

SEQ ID NO: 4963 - protein, 566 aa, Artificial Sequence
  derived and/or modified protein sequence (wt) from hemagglutinin__InfluenzaA__ADG59674
MKAILVVLLYTFATANADTLCVGYHANNSTDTVDTVLEKNVTVTHSVNLLEDKHNGKLCKLRGVAPLHLGKCNIAGWILGNPECESLSTASSWSYIVETSSSDNGTCYPGDFIDYEELREQLSSVSSFERFEIFPKTSSWPNHDSNKGVTAACPHAGAKSFYKNLIWLVKKGNSYPKLSKSYINDKGKEVLVLWGIHHPSTSADQQSLYQNADAYVFVGTSRYSKKFKPEIAIRPKVREQEGRMNYYWTLVEPGDKITFEATGNLVVPRYAFAMERNAGSGIIISDTPVHDCNTTCQTPKGAINTSLPFQNVHPITIGKCPKYVKSTKLRLATGLRNVPSIQSRGLFGAIAGFIEGGWTGMVDGWYGYHHQNEQGSGYAADLKSTQNAIDEITNKVNSVIEKMNTQFTAVGKEFNHLEKRIENLNKKVDDGFLDIWTYNAELLVLLENERTLDYHDSNVKNLYEKVRSQLKNNAKEIGNGCFEFYHKCDNTCMESVKNGTYDYPKYSEEAKLNREEIDGVKLESTKIYQILAIYSTVASSLVLVVSLGAISFWMCSNGSLQCRICI

SEQ ID NO: 4964 - protein, 566 aa, Artificial Sequence
  derived and/or modified protein sequence (wt) from hemagglutinin__InfluenzaA__ADG59675
MKAILVVLLYTFATANADTLCIGYHANNSTDTVDTVLEKNVTVTHSVNLLEDKHNGKLCKLRGVAPLHLGKCNIAGWILGNPECESLSTASSWSYIVETSSSDNGTCYPGDFIDYEELREQLSSVSSFERFEIFPKTSSWPNHDSNKGVTAACPHAGAKSFYKNLIWLVKKGNSYPKLSKSYINDKGKEVLVLWGIHHPSTSADQQSLYQNADAYVFVGSSRYSKKFKPEIAIRPKVRDQEGRMNYYWTLVEPGDKITFEATGNLVVPRYAFAMERNAGSGIIISDTPVHDCNTTCQTPNGAINTSLPFHNIHPITIGKCPKYVKSTKLRLATGLRNVPSIQSRGLFGAIAGFIEGGWTGMVDGWYGYHHQNEQGSGYAADLKSTQNAIDEITNKVNSVIEKMNTQFTAVGKEFNHLEKRIENLNKKVDDGFLDIWTYNAELLVLLENERTLDYHDSNVKNLYEKVRSQLKNNAKEIGNGCFEFYHKCDNTCMESVKNGTYDYPKYSEEAKLNREEIDGVKLESTRIYQILAIYSTVASSLVLVVSLGAISFWMCSNGSLQCRICI

SEQ ID NO: 4965 - protein, 566 aa, Artificial Sequence
  derived and/or modified protein sequence (wt) from hemagglutinin__InfluenzaA__ADG59676
MKAILVVLLYTFATANADTLCIGYHANNSTDTVDTVLEKNVTVTHSVNLLEDKHNGKLCKLRGVAPLHLGKCNIAGWILGNPECESLSTASSWSYIVETSSSDNGTCYPGDFIDYEELREQLSSVSSFERFEIFPKTSSWPNHDSNKGVTAACPHAGAKSFYKNLIWLVKKGNSYPKLSKSYINDKGKEVLVLWGIHHPSTSADQQSLYQNADAYVFVGTSRYSKKFKPEIAIRPKVRDQEGRMNYYWTLVEPGDKITFEATGNLVVPRYAFAMERNAGSGIIISDTPVHDCNATCQTPKGAINTSLPFQNIHPITIGKCPKYVKSTKLRLATGLRNIPSIQSRGLFGAIAGFIEGGWTGMVDGWYGYHHQNEQGSGYAADLKSTQNAIDEITNKVNSVIEKMNTQFTAVGKEFNHLEKRIENLNKKVDDGFLDIWTYNAELLVLLENERTLDYHDSNVKNLYEKVRSQLKNNAKEIGNGCFEFYHKCDNTCMESVKNGTYDYPKYSEEAKLNREEIDGVKLESTRIYQILAIYSTVASSLVLVVSLGAISFWMCSNGSLQCRICI

SEQ ID NO: 4966 - protein, 566 aa, Artificial Sequence; identical to SEQ ID NO: 3770
  derived and/or modified protein sequence (wt) from hemagglutinin__InfluenzaA__ADG59678

SEQ ID NO: 4967 - protein, 566 aa, Artificial Sequence; identical to SEQ ID NO: 4933
  derived and/or modified protein sequence (wt) from hemagglutinin__InfluenzaA__ADG59680

SEQ ID NO: 4968 - protein, 566 aa, Artificial Sequence; identical to SEQ ID NO: 4933
  derived and/or modified protein sequence (wt) from hemagglutinin__InfluenzaA__ADG59681

SEQ ID NO: 4969 - protein, 566 aa, Artificial Sequence
  derived and/or modified protein sequence (wt) from hemagglutinin__InfluenzaA__ADG59683
MKAILVVLLYTFAIANADTLCIGYHANNSTDTVDTVLKKNVTVTHSVNLLEDKHNGKLCKLRGVAPLHLGKCNIAGWILGNPECESLSTASSWSYIVETSSSDNGTCYPGDFIDYEELREQLSSVSSFERFEIFPKTSSWPNHDSNKGVTAACPHAGAKSFYKNLIWLVKKGNSYPKLSKSYINDKGKEVLVLWGIHHPSTSADQQSLYQNADAYVFVGTSRYSKKFKPEIAIRPKVRDQEGRMNYYWTLVEPGDKITFEATGNLVVPRYAFAMERNAGSGIVISDTPVHDCNTTCQTPKGAINTSLPFQNIHPITIGKCPKYVKSTKLRLATGLRNVPSIQSRGLFGAIAGFIEGGWTGMVDGWYGYHHQNEQGSGYAADLKSTQNAIDEITNKVNSVIEKMNTQFTAVGKEFNHLEKRIENLNKKVDDGFLDIWTYNAELLVLLENERTLDYHDSNVKNLYEKVRSQLKNNAKEIGNGCFEFYHKCDNTCMESVKNGTYDYPKYSEEAKLNREEIDGVKLESTRIYQILAIYSTVASSLVLVVSLGAISFWMCSNGSLQCRICI

SEQ ID NO: 4970 - protein, 566 aa, Artificial Sequence; identical to SEQ ID NO: 3770
  derived and/or modified protein sequence (wt) from hemagglutinin__InfluenzaA__ADG59684

SEQ ID NO: 4971 - protein, 566 aa, Artificial Sequence
  derived and/or modified protein sequence (wt) from hemagglutinin__InfluenzaA__ADG59685
MKAILVVLLYTFATANADTLCIGYHANNSTDTIDTVLEKNVTVTHSVNLLEDKHNGKLCKLRGVAPLHLGKCNIAGWILGNPECESLSTASSWSYIVETSSSDNGTCYPGDFIDYEELREQLSSVSSFERFEIFPKTSSWPNHDSNKGVTAACPHAGAKSFYKNLIWLVKKGNSYPKLSKSYINDKGKEVLVLWGIHHPSTSADQQSLYQNADAYVFVGTSRYSKKFKPEIAIRPKVRDQEGRMNYYWTLVEPGDKITFEATGNLVVPRYAFAMERNAGSGIIISDTPVHDCNTTCQTPKGAINTSLPFQNIHPITIGKCPKYVKSTKLRLATGLRNIPSIQSRGLFGAIAGFIEGGWTGMVDGWYGYHHQNEQGSGYAADLKSTQNAIDEITNKVNSVIEKMNTQFTAVGKEFNHLEKRIENLNKKVDDGFLDIWTYNAELLVLLENERTLDYHDSNVKNLYEKVRSQLKNNAKEIGNGCFEFYHKCDNTCMESVKNGTYDYPKYSEEAKLNREEIDGVKLESTRIYQILAIYSTVASSLVLVVSLGAISFWMCSNGSLQCRICI

SEQ ID NO: 4972 - protein, 566 aa, Artificial Sequence; identical to SEQ ID NO: 3770
  derived and/or modified protein sequence (wt) from hemagglutinin__InfluenzaA__ADG59686

SEQ ID NO: 4973 - protein, 566 aa, Artificial Sequence; identical to SEQ ID NO: 4933
  derived and/or modified protein sequence (wt) from hemagglutinin__InfluenzaA__ADG59687

SEQ ID NO: 4974 - protein, 566 aa, Artificial Sequence
  derived and/or modified protein sequence (wt) from hemagglutinin__InfluenzaA__ADG59688
MKAILVVLLYTIATANADTLCIGYHANNSTDTIDTVLEKNVTVTHSVNLLEDKHNGKLCKLRGVAPLHLGKCNIAGWILGNPECESLSTASSWSYIVETSSSDNGTCYPGDFIDYEELREQLSSVSSFERFEIFPKTSSWPNHDSNKGVTAACPHAGAKSFYKNLIWLVKKGNSYPKLSKSYINDKGKEVLVLWGIHHPSTSADQQSLYQNADAYVFVGTSRYSKKFKPEIAIRPKVRGQEGRMNYYWTLVEPGDKITFEATGNLVVPRYAFAMERNAGSGIIISDTPVHDCNTTCQTPKGAINTSLPFQNIHPITIGKCPKYVKSTKLRLATGLRNIPSIQSRGLFGAIAGFIEGGWTGMVDGWYGYHHQNEQGSGYAADLKSTQNAIDEITNKVNSVIEKMNTQFTAVGKEFNHLEKRIENLNKKVDDGFLDIWTYNAELLVLLENERTLDYHDSNVKNLYEKVRSQLKNNAKEIGNGCFEFYHKCDNTCMESVKNGTYDYPKYSEEAKLNREEIDGVKLESTRIYQILAIYSTVASSLVLVVSLGAISFWMCSNGSLQCRICI

SEQ ID NO: 4975 - protein, 566 aa, Artificial Sequence; identical to SEQ ID NO: 2669
  derived and/or modified protein sequence (wt) from hemagglutinin__InfluenzaA__ADG59689

SEQ ID NO: 4976 - protein, 566 aa, Artificial Sequence; identical to SEQ ID NO: 2669
  derived and/or modified protein sequence (wt) from hemagglutinin__InfluenzaA__ADG59691

SEQ ID NO: 4977 - protein, 566 aa, Artificial Sequence
  derived and/or modified protein sequence (wt) from hemagglutinin__InfluenzaA__ADG59693
MKAILVVLLYTFATANADTLCIGYHANNSTDTVDTVLEKNVTVTHSVNLLEDKHNGKLCKLRGVAPLHLGKCNIAGWILGNPECESLSTASSWSYIVETSSSDNGTCYPGDFIDYEELREQLSSVSSFERFEIFPKTSSWPNHDSNKGVTAACPHAGAKSFYKNLIWLVKKGNSYPKLSKSYINDKGKEVLVLWGIHHPSTSADQQSLYQNADAYVFVGTSRYSKKFKPEIAIRPKVRNQEGRMNYYWTLVEPGDKITFEATGNLVVPRYAFAMERNAGSGIIISDTPVHDCNTTCQTPKGAINTSLPFQNIHPITIGKCPKYVKSTKLRLATGLRNIPSIQSRGLFGAIAGFIEGGWTGMVDGWYGYHHQNEQGSGYAADLKSTQNAIDEITNKVNSVIEKMNTQFTAVGKEFNHLEKRIENLNKKVDDGFLDIWTYNAELLVLLENERTLDYHDSNVKNLYEKVRSQLKNNAKEIGNGCFEFYHKCDNTCMESVKNGTYDYPKYSEEAKLNREEIDGVKLESTRIYQILAIYSTVASSLVLVVSLGAISFWMCSNGSLQCRICI

SEQ ID NO: 4978 - protein, 566 aa, Artificial Sequence
  derived and/or modified protein sequence (wt) from hemagglutinin__InfluenzaA__ADG59696
MKAILVVLLYTFATANADTLCIGYHANNSTDTVDTVLEKNVTVTHSVNLLEDKHNGKLCKLRGVAPLHLGKCNIAGWILGNPECESLSTASSWSYIVETSSSDNGTCYPGDFIDYEELREQLSSVSSFERFEIFPKTSSWPNHDSNKGVTAACPHAGAKSFYKNLIWLVKKGNSYPKLSKSYINDKGKEVLVLWGIHHPSTSADQQSLYQNADAYVFVGTSRYSKKFKPEIAIRPKVREQEGRMNYYWTLVEPGDKITFEATGNLVVPRYAFAMERDAGSGIIISDTPVHDCNTTCQTPKGAINTSLPFQNIHPITIGKCPKYVKSTKLRLATGLRNVPSIQSRGLFGAIAGFIEGGWTGMVDGWYGYHHQNEQGSGYAADLKSTQNAIDEITNKVNSVIEKMNTQFTAVGKEFNHLEKRIENLNKKVDDGFLDIWTYNAELLVLLENERTLDYHDSNVKNLYEKVRSQLKNNAKEIGNGCFEFYHKCDNTCMESVKNGTYDYPKYSEEAKLNREEIDGVKLESTRIYQILAIYSTVASSLVLVVSLGAISFWMCSNGSLQCRICI

SEQ ID NO: 4979 - protein, 566 aa, Artificial Sequence
  derived and/or modified protein sequence (wt) from hemagglutinin__InfluenzaA__ADG59697
MKAILVVLLYTFATANADTLCIGYHANNSTDTVDTVLEKNVTVTHSVNLLEDKHNGKLCKLRGVAPLHLGKCNIAGWILGNPECESLSTASSWSYIVETSSSDNGTCYPGDFIDYEELREQLSSVSSFERFEIFPKTSSWPNHDSNKGVTAACPHAGAKNFYKNLIWLVKKGNSYPKLSKSYINDKGKEVLVLWGIHHPSTSADQQSLYQNADAYVFVGTSRYSKKFKPEIAIRPKVRGQEGRMNYYWTLVEPGDKITFEATGNLVVPRYAFAMERNAGSGIIISDTPVHDCNTTCQTPKGAINTSLPFQNIHPITIGKCPKYVKSTKLRLATGLRNVPSIQSRGLFGAIAGFIEGGWTGMVDGWYGYHHQNEQGSGYAADLKSTQNAIDEITNKVNSVIEKMNTQFTAVGKEFNHLEKRIENLNKKVDDGFLDIWTYNAELLVLLENERTLDYHDSNVKNLYEKVRSQLKNNAKEIGNGCFEFYHKCDNTCMESVKNGTYDYPKYSEEAKLNREEIDGVKLESTRIYQILAIYSTVASSLVLVVSLGAISFWMCSNGSLQCRICI

SEQ ID NO: 4980 - protein, 566 aa, Artificial Sequence
  derived and/or modified protein sequence (wt) from hemagglutinin__InfluenzaA__ADG59700
MKAILVVLLYTFATANADTLCIGYHANNSTDTVDTVLEKNVTVTHSVNLLEDKHNGKLCKLRGVAPLHLGKCNIAGWILGNPECESLSTASSWSYIVETSSSDNGTCYPGDFIDYEELREQLSSVSSFERFEIFPKTSSWPNHDSNKGVTAACPHAGAKSFYKNLIWLVKKGNSYPKLSKSYINDKGKEVLVLWGIHHPSTSADQQSLYQNADAYVFVGTSRYSKKFKPEIAIRPKVRDQEGRMNYYWTLVEPGDKITFEATGNLVVPRYAFAMERNAGSGIIISDTPVHDCNTTCQTLKGAINTSLPFQNIHPITIGKCPKYVKSTKLRLATGLRNIPSIQSRGLFGAIAGFIEGGWTGMVDGWYGYHHQNEQGSGYAADLKSTQNAIDEITNKVNSVIEKMNTQFTAVGKEFNHLEKRIENLNKKVDDGFLDIWTYNAELLVLLENERTLDYHDSNVKNLYEKVRSQLKNNAKEIGNGCFEFYHKCDNTCMESVKNGTYDYPKYSEEAKLNREEIDGVKLESTRIYQILAIYSTVASSLVLVVSLGAISFWMCSNGSLQCRICI

SEQ ID NO: 4981 - protein, 566 aa, Artificial Sequence
  derived and/or modified protein sequence (wt) from hemagglutinin__InfluenzaA__ADG59701
MKAILVVLLYTFAAANADTLCIGYHANNSTDTVDTVLEKNVTVTHSVNLLEDKHNGKLCKLRGVAPLHLGKCNIAGWILGNPECESLSTASSWSYIVETSSSDNGTCYPGDFIDYEELREQLSSVSSFERFEIFPKTSSWPNHDSNKGVTAACPHAGAKSFYKNLIWLVKKGNSYPKLSKSYINDKGKEVLVLWGIHHPSTSADQQSLYQNADAYVFVGTSRYSKKFKPEIAIRPKVRDQEGRMNYYWTLVEPGDKITFEATGNLVVPRYAFAMERNAGSGIIISDTPVHDCNTTCQTPKGAINTSLPFQNIHPITIGKCPKYVKSTKLRLATGLRNVPSIQSRGLFGAIAGFIEGGWTGMVDGWYGYHHQNEQGSGYAADLKSTQNAIDKITNKVNSVIEKMNTQFTAVGKEFNHLEKRIENLNKKVDDGFLDIWTYNAELLVLLENERTLDYHDSNVKNLYEKVRSQLKNNAKEIGNGCFEFYHKCDNTCMESVKNGTYDYPKYSEEAKLNREEIDGVKLESTRIYQILAIYSTVASSLVLVVSLGAISFWMCSNGSLQCRICI

SEQ ID NO: 4982 - protein, 566 aa, Artificial Sequence
  derived and/or modified protein sequence (wt) from hemagglutinin__InfluenzaA__ADG59702
MKAILVVLLYTFATANADTLCIGYHANNSTDTVDTVLEKNVTVTHSVNLLEDKHNGKLCKLRGVAPLHLGKCNIAGWILGNPECESLSTASSWSYIVETSSSDNGTCYPGDFIDYEELREQLSSVSSFERFEIFPKTSSWPNHDSNKGVTAACPHAGAKSFYKNLIWLVKKGNSYPKLSKSYINDKGKEVLVLWGIHHPSTSADQQSLYQNADAYVFVGTSRYSKKFKPEIAIRPKVRDQEGRMNYYWTLVEPGDKITFEATGNLVVPRYAFAMERNAGSGIIISDTPVHDCNTTCQTPKGAINTSLPFQNIHPITIGKCPKYVKSTKLRLATGLRNIPSIQSRGLFGAIAGFIEGGWTGMVDGWYGYHHQNEQGSGYAADLKSTQNAIDEITNKVNSVIEKMNTQFTAVGKEFNHLEKRIENLNKKVDDGFLDIWTYNAELLVLLENERNLDYHDSNVKNLYEKVRSQLKNNAKEIGNGCFEFYHKCDNTCMESVKNGTYDYPKYSEEAKLNREEIDGVKLESTRIYQILAIYSTVASSLVLVVSLGAISFWMCSNGSLQCRICI

SEQ ID NO: 4983 - protein, 566 aa, Artificial Sequence
  derived and/or modified protein sequence (wt) from hemagglutinin__InfluenzaA__ADG59703
MKAILVVLLYTFATANADTLCIGYHANNSTDTVDTVLEKNVTVTHSVNLLEDKHNGKLCKLRGVAPLHLGKCNIAGWILGNPECESLSTASSWSYIVETSSSDNGTCYPGDFIDYEELREQLSSVSSFERFEIFPKTSSWPNHDPNKGVTAACPHAGAKSFYKNLIWLVKKGNSYPKLSKSYINDKGKEVLVLWGIHHPSTSADQQSLYQNADAYVFVGTSRYSKKFKPEIAIRPKVRDQEGRMNYYWTLVEPGDKITFEATGNLVVPRYAFAMERNAGSGIVISDTPVHDCNTTCQTPKGAINTSLPFQNIHPITIGKCPKYVKSTKLRLATGLRNVPSIQSRGLFGAIAGFIEGGWTGMVDGWYGYHHQNEQGSGYAADLKSTQNAIDEITNKVNSVIEKMNTQFTAVGKEFNHLEKRIENLNKKVDDGFLDIWTYNAELLVLLENERTLDYHDSNVKNLYEKVRSQLKNNAKEIGNGCFEFYHKCDNTCMESVKNGTYDYPKYSEEAKLNREEIDGVKLESTRIYQILAIYSTVASSLVLVVSLGAISFWMCSNGSLQCRICI

SEQ ID NO: 4984 - protein, 566 aa, Artificial Sequence; identical to SEQ ID NO: 2684
  derived and/or modified protein sequence (wt) from hemagglutinin__InfluenzaA__ADG76646

SEQ ID NO: 4985 - protein, 566 aa, Artificial Sequence
  derived and/or modified protein sequence (wt) from hemagglutinin__InfluenzaA__ADG76652
MKAILVVLLYTFATANADTLCIGYHANNSTDTVDTVLEKNVTVTHSVNLLEDKHNGKLCKLRGVAPLHLGKCNIAGWILGNPECESFSTSSSWSYIVETPSSDNGTCYPGDFIDYEELREQLSSVSSFERFEIFPKTSSWPNHDSNKGVTAACPHAGAKSFYKNLIWLVKKGNSYPKLSKSYINDKGKEVLVLWGIHHPSTSADQQSLYQNADTYVFVGSSRYSKKFKPEIAIRPKVRDQEGRMNYYWTLVEPGDKITFEATGNLVVPRYAFAMERNAGSGIIISDTPVHDCNTTCQTPKGAINTSLPFQNIHPITIGKCPKYVKSTKLRLATGLRNIPSIQSRGLFGAIAGFIEGGWTGMVDGWYGYHHQNEQGSGYAADLKSTQNAIDEITNKVNSVIEKMNTQFTAVGKEFNHLEKRIENLNKKVDDGFLDIWTYNAELLVLLENERTLDYHDSNVKNLYEKVRSQLKNNAKEIGNGCFEFYHKCDNTCMESVKNGTYDYPKYSEEAKLNREEIDGVKLESTRIYQILAIYSTVASSLVLVVSLGAISFWMCSNGSLQCRICI

SEQ ID NO: 4986 - protein, 566 aa, Artificial Sequence; identical to SEQ ID NO: 2911
  derived and/or modified protein sequence (wt) from hemagglutinin__InfluenzaA__ADH01808

SEQ ID NO: 4987 - protein, 566 aa, Artificial Sequence
  derived and/or modified protein sequence (wt) from hemagglutinin__InfluenzaA__ADH01818
MKAILVVLLYTFATANADTLCIGYHANNSTDTVDTVLEKNVTVTHSVNLLEDKHNGKLCKLRGVAPLHLGKCNIAGWILGNPECESLSTASSWSYIVETSSSDNGTCYPGDFIDYEELREQLSSVSSFERFEIFPKTSSWPNHDSNKGVTAACPHAGAKSFYKNLIWLVKKGNSYPKLSKSYINDKGKEVLVLWGIHHPSTSADQQSLYQNADAYVFVGTSRYSKKFKPEIAIRPKVRDQEGRMNYYWTLVEPGDKITFEATGNLVVPRYAFAMERNAGSGIIISDTPVHDCNTTCQTPKGAINTSLPFQNIHPITIGKCPKYVKSTKLRLATGLRNVPSIQSRGLFGAIAGFIEGGWTGMVDGWYGYHHQNEQGSGYAADLKSTQNAIDEITNKVNSVIEKMNTQFTAVGKEFNHLEKRIENLNKKVDDGFLDIWTYNAELLVLLENERTLDYHDSNVKNLYEKVRSQLKNNAKEIGNGCFEFYHKCDNTCMESVKNGTYDYPKYSEEAKLNREEIDGVKLESTRIYQILAIYSTVASSLVLIVSLGAISFWMCSNGSLQCRICI

SEQ ID NO: 4988 - protein, 566 aa, Artificial Sequence; identical to SEQ ID NO: 2911
  derived and/or modified protein sequence (wt) from hemagglutinin__InfluenzaA__ADH01828

SEQ ID NO: 4989 - protein, 566 aa, Artificial Sequence; identical to SEQ ID NO: 2669
  derived and/or modified protein sequence (wt) from hemagglutinin__InfluenzaA__ADH01838

SEQ ID NO: 4990 - protein, 566 aa, Artificial Sequence; identical to SEQ ID NO: 2911
  derived and/or modified protein sequence (wt) from hemagglutinin__InfluenzaA__ADH01848

SEQ ID NO: 4991 - protein, 566 aa, Artificial Sequence; identical to SEQ ID NO: 2911
  derived and/or modified protein sequence (wt) from hemagglutinin__InfluenzaA__ADH01858

SEQ ID NO: 4992 - protein, 566 aa, Artificial Sequence; identical to SEQ ID NO: 2669
  derived and/or modified protein sequence (wt) from hemagglutinin__InfluenzaA__ADH01868

SEQ ID NO: 4993 - protein, 566 aa, Artificial Sequence; identical to SEQ ID NO: 2669
  derived and/or modified protein sequence (wt) from hemagglutinin__InfluenzaA__ADH01878

SEQ ID NO: 4994 - protein, 566 aa, Artificial Sequence; identical to SEQ ID NO: 2911
  derived and/or modified protein sequence (wt) from hemagglutinin__InfluenzaA__ADH01888

SEQ ID NO: 4995 - protein, 566 aa, Artificial Sequence; identical to SEQ ID NO: 2669
  derived and/or modified protein sequence (wt) from hemagglutinin__InfluenzaA__ADH01898

SEQ ID NO: 4996 - protein, 566 aa, Artificial Sequence; identical to SEQ ID NO: 2760
  derived and/or modified protein sequence (wt) from hemagglutinin__InfluenzaA__ADH01908

SEQ ID NO: 4997 - protein, 566 aa, Artificial Sequence
  derived and/or modified protein sequence (wt) from hemagglutinin__InfluenzaA__ADH01918
MKAILVVLLYTFATANADTLCIGYHANNSTDTVDTVLEKNVTVTHSVNLLEDKHNGKLCKLRGVAPLHLGKCNIAGWILGNPECESLSTESSWSYIVETSSSDNGTCYPGDFIDYEELREQLSSVSSFERFEIFPKTSSWPNHDSNKGVTAACPHAGAKSFYKNLIWLVKKGNSYPKLSKSYINDKEKEVLVLWGIHHPSTSADQQSLYQNADAYVFVGTSRYSKKFKPEIAIRPKVRDQEGRMNYYWTLVEPGDKITFEATGNLVVPRYAFAMERNAGSGIIISDTPVHDCNTTCQTPKGAINTSLPFQNIHPITIGKCPKYVKSTKLRLATGLRNVPSIQSRGLFGAIAGFIEGGWTGMVDGWYGYHHQNEQGSGYAADLKSTQNAIDKITNKVNSVIEKMNTQFTAVGKEFNHLEKRIENLNKKVDDGFLDIWTYNAELLVLLENERTLDYHDSNVKNLYEKVRSQLKNNAKEIGNGCFEFYHKCDNTCMESVKNGTYDYPKYSEEAKLNREEIDGVKLESTRIYQILAIYSTVASSLVLVVSLGAISFWMCSNGSLQCRICI

SEQ ID NO: 4998 - protein, 566 aa, Artificial Sequence
  derived and/or modified protein sequence (wt) from hemagglutinin__InfluenzaA__ADH01928
MKAILVVLLYTFATANADTLCIGYHANNSTDTVDTVLEKNVTVTHSVNLLEDKHNGKLCKLRGVAPLHLGKCNIAGWILGNPECESLSTASSWSYIVETSSSDNGTCYPGDFIDYEELREQLSSASSFERFEIFPKTSSWPNHDSNKGVTAACPHAGAKSFYKNLIWLVKKGNSYPKLSKSYINDKGKEVLVLWGIHHPSTSADQQSLYQNADAYVFVGTSRYSKKFKPEIAIRPKVRDQEGRMNYYWTLVEPGDKITFEATGNLVVPRYAFAMERNAGSGIIISDTPVHDCNTTCQTPKGAINTSLPFQNIHPITIGKCPKYVKSTKLRLATGLRNIPSIQSRGLFGAIAGFIEGGWTGMVDGWYGYHHQNEQGSGYAADLKSTQNAIDEITNKVNSVIEKMNTQFTAVGKEFNHLEKRIENLNKKVDDGFLDIWTYNAELLVLLENERTLDYHDSNVKNLYEKVRSQLKNNAKEIGNGCFEFYHKCDNTCMESVKNGTYDYPKYSEEAKLNREEIDGVKLESTRIYQILAIYSTVASSLVLVVSLGAISFWMCSNGSLQCRICI

SEQ ID NO: 4999 - protein, 566 aa, Artificial Sequence
  derived and/or modified protein sequence (wt) from hemagglutinin__InfluenzaA__ADH01938
MKAILVVLLYTFATANADTLCIGYHANNSTDTVDTVLEKNVTVTHSVNLLEDKHNGKLCKLRGVAPLHLGKCNIAGWILGNPECESLSTASSWSYIVETSSSDNGTCYPGDFIDYEELREQLSSVSSFERFEIFPKTSSWPNHDSNKGVTAACPHAGAKSFYKNLIWLVKKGNSYPKLSKSYINDKGKEVLVLWGIHHPSTSADQQSLYQNADAYVFVGTSRYSKKFKPEIAIRPKVRDQEGRMNYYWTLVEPGDKITFEATGNLVVPRYAFAMERNAGSGIIISDTPVHDCNTTCQTPKGAINTSLPFQNIHPITIGKCPKYVKSTKLRLATGLRNVPSIQSRGLFGAIAGFIEGGWTGMVDGWYGYHHQNEQGSGYAADLKSTQNAIDEITNKVNSVIEKMNTQFTAVGKEFNHLEKRIENLNKKVDDGFLDIWTYNAELLVLLENERTLDYHDSNVKNLYKKVRSQLKNNAKEIGNGCFEFYHKCDNTCMESVKNGTYDYPKYSEEAKLNREEIDGVKLESTRIYQILAIYSTVASSLVLVVSLGAISFWMCSNGSLQCRICI

SEQ ID NO: 5000 - protein, 566 aa, Artificial Sequence; identical to SEQ ID NO: 3833
  derived and/or modified protein sequence (wt) from hemagglutinin__InfluenzaA__ADH01948

SEQ ID NO: 5001 - protein, 566 aa, Artificial Sequence
  derived and/or modified protein sequence (wt) from hemagglutinin__InfluenzaA__ADH01958
MKAILVVLLYTFATANADTLCIGYHANNSTDTVDTVLEKNVTVTHSVNLLEDKHNGKLCKLRGVAPLHLGKCNIAGWILGNPECESLSTASSWSYIVETSSSDNGTCYPGDFIDYEELREQLSSVSSFERFEIFPKTSSWPNHDSNKGVTAACPHAGAKSFYKNLIWLVKKGNSYPKLSKSYINDKGKEVLVLWGIHHPSTSADQQSLYQNADAYVFVGTSRYSKKFKPEIAIRPKVRDQEGRMNYYWTLVEPGDKITFEATGNLVVPRYAFAMERNAGSGIIISDTPVHDCNTTCQTPKGAINTSLPFQNIHPITIGNCPKYVKSTKLRLATGLRNVPSIQSRGLFGAIAGFIEGGWTGMVDGWYGYHHQNEQGSGYAADLKSTQNAIDKITNKVNSVIEKMNTQFTAVGKEFNHLEKRIENLNKKVDDGFLDIWTYNAELLVLLENERTLDYHDSNVKNLYEKVRSQLKNNAKEIGNGCFEFYHKCDNTCMESVKNGTYDYPKYSEEAKLNREEIDGVKLESTRIYQILAIYSTVASSLVLIVSLGAISFWMCSNGSLQCRICI

SEQ ID NO: 5002 - protein, 566 aa, Artificial Sequence
  derived and/or modified protein sequence (wt) from hemagglutinin__InfluenzaA__ADH01968
MKAILVVLLYTFATANADTLCIGYHANNSTDTVDTVLEKNVTVTHSVNLLEDKHNGKLCKLRGVAPLHLGKCNIAGWILGNPECESLSTASSWSYIVETSSSDNGTCYPGDFIDYEELREQLSSVSSFERFEIFPKTSSWPNHDSNKGVTAACPHAGAKSFYKNLIWLVKKGNSYPKLSKSYINDKGKEVLVLWGIHHPSTSADQQSLYQNADAYVFVGTSRYSKKFKPEIAIRPKVREQEGRMNYYWTLVEPGDKITFEATGNLVVPRYAFAMERNAGSGIIISDTPVHDCNTTCQTPKGAINTSLPFQNIHPITIGKCPKYVKSTKLRLATGLRNVPSIQSRGLFGAIAGFIEGGWTGMVDGWYGYHHQNEQGSGYAADLKSTQNAIDKITNKVNSVIEKMNTQFTAVGKEFNHLEKRIENLNKKVDDGFLDIWTYNAELLVLLENERTLDYHDSNVKNLYEKVRNQLKNNAKEIGNGCFEFYHKCDNTCMESVKNGTYDYPKYSEEAKLNREEIDGVKLESTRIYQILAIYSTVASSLVLVVSLGAISFWMCSNGSLQCRICI

SEQ ID NO: 5003 - protein, 566 aa, Artificial Sequence; identical to SEQ ID NO: 3833
  derived and/or modified protein sequence (wt) from hemagglutinin__InfluenzaA__ADH01978

SEQ ID NO: 5004 - protein, 566 aa, Artificial Sequence; identical to SEQ ID NO: 3833
  derived and/or modified protein sequence (wt) from hemagglutinin__InfluenzaA__ADH01988

SEQ ID NO: 5005 - protein, 566 aa, Artificial Sequence; identical to SEQ ID NO: 4836
  derived and/or modified protein sequence (wt) from hemagglutinin__InfluenzaA__ADH01998

SEQ ID NO: 5006 - protein, 566 aa, Artificial Sequence
  derived and/or modified protein sequence (wt) from hemagglutinin__InfluenzaA__ADH02008
MKAILVVLLYTFATANADTLCIGYHANNSTDTVDTVLEKNVTVTHSVNLLEGKHNGKLCKLRGVAPLHLGKCNIAGWILGNPECESLSTASSWSYIVETSSSDNGTCYPGDFIDYEELREQLSSVSSFERFEIFPKTSSWPNHDSNKGVTAACPHAGAKSFYKNLIWLIKKGNSYPKLSKSYINDKEKEVLVLWGIHHPSTSADQQSLYQNADAYVFVGTSRYSKKFKPEIAIRPKVRDQEGRMNYYWTLVEPGDKITFEATGNLVVPRYAFAMERNAGSGIIISDTPVHDCNTTCQTPKGAINTSLPFQNIHPITIGKCPKYVKSTKLRLATGLRNIPSIQSRGLFGAIAGFIEGGWTGMVDGWYGYHHQNEQGSGYAADLKSTQNAIDEITNKVNSVIEKMNTQFTAVGKEFNHLEKRIENLNKKVDDGFLDIWTYNAELLVLLENERTLDYHDSNVKNLYEKVRSQLKNNAKEIGNGCFEFYHKCDNTCMESVKNGTYDYPKYSEEAKLNREEIDGVKLESTRIYQILAIYSTVASSLVLVVSLGAISFWMCSNGSLQCRICI

SEQ ID NO: 5007 - protein, 566 aa, Artificial Sequence; identical to SEQ ID NO: 3833
  derived and/or modified protein sequence (wt) from hemagglutinin__InfluenzaA__ADI24508

SEQ ID NO: 5008 - protein, 566 aa, Artificial Sequence
  derived and/or modified protein sequence (wt) from hemagglutinin__InfluenzaA__ADI24515
MKAILVVLLYTFATANADTLCVGYHANNSTDTVDTVLEKNVTVTHSVNLLEDKHNGKLCKLRGVAPLHLGKCNIAGWILGNPECESLPTASSWSYIVETSSSDNGTCYPGDFIDYEELREQLSSVSSFERFEIFPKTSSWPNHDSNKGVTAACPHAGAKSFYKNLIWLVKKGNSYPKLSKSYINDKGKEVLVLWGIHHPSTSADQQSLYQNADAYVFVGTSRYSKKFKPEIAIRPKVRDQEGRMNYYWTLVEPGDKITFEATGNLVVPRYAFAMERNAGSGIIISDTPVHDCNTTCQTPKGAINTSLPFQNIHPITIGKCPKYVKSTKLRLATGLRNVPSIQSRGLFGAIAGFIEGGWTGMVDGWYGYHHQNEQGSGYAADLKSTQNAIDKSTNKVNSVIEKMNTQFTAVGKEFNHLEKRIENLNKKVDDGFLDIWTYNAELLVLLENERTLDYHDSNVKNLYEKVRSQLKNNAKEIGNGCFEFYHKCDNTCMESVKNGTYDYPKYSEEAKLNREEIDGVKLESTRIYQILAIYSTVASSLVLVVSLGAISFWMCSNGSLQCRICI

SEQ ID NO: 5009 - protein, 566 aa, Artificial Sequence; identical to SEQ ID NO: 3833
  derived and/or modified protein sequence (wt) from hemagglutinin__InfluenzaA__ADI24517

SEQ ID NO: 5010 - protein, 566 aa, Artificial Sequence; identical to SEQ ID NO: 3833
  derived and/or modified protein sequence (wt) from hemagglutinin__InfluenzaA__ADI24519

SEQ ID NO: 5011 - protein, 566 aa, Artificial Sequence; identical to SEQ ID NO: 3833
  derived and/or modified protein sequence (wt) from hemagglutinin__InfluenzaA__ADI24521

SEQ ID NO: 5012 - protein, 566 aa, Artificial Sequence; identical to SEQ ID NO: 4221
  derived and/or modified protein sequence (wt) from hemagglutinin__InfluenzaA__ADI24523

SEQ ID NO: 5013 - protein, 566 aa, Artificial Sequence
  derived and/or modified protein sequence (wt) from hemagglutinin__InfluenzaA__ADI24525
MKAILVVLLYTFATANADTLCIGYHANNSTDTVDTVLEKNVTVTHSVNLLEDKHNGKLCELRGVAPLHLGKCNIAGWILGNPECESLSTARSWSYIVETSSSDNGTCYPGDFIDYEELREQLSSVSSFERFEIFPKTSSWPNHDSNKGVTAACPHAGAKSFYKNLIWLVKKGNSYPKLSKSYINDKGKEVLVLWGIHHPSTSADQQSLYQNADAYVFVGTSRYSKKFKPEIAIRPKVRDQEGRMNYYWTLVEPGDKITFEATGNLVVPRYAFAMERNAGSGIIISDTPVHDCNTTCQTPKGAINTSLPFQNIHPITIGKCPKYVKSTKLRLATGLRNVPSIQSRGLFGAIAGFIEGGWTGMVDGWYGYHHQNEQGSGYAADLKSTQNAIDKITNKVNSVIEKMNTQFTAVGKEFNHLEKRIENLNKKVDDGFLDIWTYNAELLVLLENERTLDYHDSNVKNLYEKVKSQLKNNAKEIGNGCFEFYHKCDNTCMESVKNGTYDYPKYSEEAKLNREEIDGVKLESTRIYQILAIYSTVASSLVLVVSLGAISFWMCSNGSLQCRICI

SEQ ID NO: 5014 - protein, 566 aa, Artificial Sequence; identical to SEQ ID NO: 3833
  derived and/or modified protein sequence (wt) from hemagglutinin__InfluenzaA__ADI24527

SEQ ID NO: 5015 - protein, 566 aa, Artificial Sequence; identical to SEQ ID NO: 4221
  derived and/or modified protein sequence (wt) from hemagglutinin__InfluenzaA__ADI24529

SEQ ID NO: 5016 - protein, 566 aa, Artificial Sequence
  derived and/or modified protein sequence (wt) from hemagglutinin__InfluenzaA__ADI24531
MKAILVVLLYTFATANADTLCIGYHANNSTDTVDTVLEKNVTVTHSVNLLEDKHNGKLCKLRGVAPLHLGKCNIAGWILGNPECESLSTASSWSYIVETSSSDNGTCYPGDFINYEELREQLSSVSSFERFEIFPKTSSWPNHDSNKGVTAACPHAGAKSFYKNLIWLVKKGNSYPKLSKSYINDKGKEVLVLWGIHHPSTSADQQSLYQNADAYVFVGTSRYSKKFKPEIAIRPKVRDQEGRMNYYWTLVEPGDKITFEATGNLVVPRYAFAMERNAGSGIIISDTPVHDCNTTCQTPKGAINTSLPFQNIHPITIGKCPKYVKSTKLRLATGLRNVPSIQSRGLLGAIAGFIEGGWTGMVDGWYGYHHQNEQGSGYAADLKSTQNAIDKITNKVNSVIEKMNTQFTAVGKEFNHLEKRIENLNKKVDDGFLDIWTYNAELLVLLENERTLDYHDSNVKNLYEKVRSQLKNNAKEIGNGCFEFYHKCDNTCMESVKNGTYDYPKYSEEAKLNREEIDGVKLESTRIYQILAIYSTVASSLVLVVSLGAISFWMCSNGSLQCKICI

SEQ ID NO: 5017 - protein, 566 aa, Artificial Sequence
  derived and/or modified protein sequence (wt) from hemagglutinin__InfluenzaA__ADI24536
MKAILVVLLYTFATANADTLCIGYHANNSTDTVDTVLEKNVTVTHSVNLLEDKHNGKLCKLRGVAPLHLGKCNIAGWILGNPECESLSTASSWSYIVETSSSDNGTCYPGDFIDYEELREQLSSVSSFERFEIFPKTSSWPNHDSNKGVTAACPHAGAKSFYKNLIWLVKKGNSYPKLSKSYINDKGKEVLVLWGIHHPSTSADQQSLYQNADAYVFVGTSRYSKKFKPEIAIRPKVRDQEGRMNYYWTLVEPGDKITFEATGNLVVPRYAFAMERDAGSGIIISDTPVHDCNTTCQTPKGAINTSLPFQNIHPITIGKCPKYVKSTKLRLATGLRNVPSIQSRGLFGAIAGFIEGGWTGMVDGWYGYHHQNEQGSGYAADLKSTQNAIDKITNKVNSVIEKMNTQFTAVGKEFNHLEKRIENLNKKIDDGFLDIWTYNAELLVLLENERTLDYHDSNVKNLYEKVRSQLKNNAKEIGNGCFEFYHKCDNTCMESVKNGTYDYPKYSEEAKLNREEIDGVKLESTRIYQILAIYSTVASSLVLVVSLGAISFWMCSNGSLQCRICI

SEQ ID NO: 5018 - protein, 566 aa, Artificial Sequence; identical to SEQ ID NO: 3833
  derived and/or modified protein sequence (wt) from hemagglutinin__InfluenzaA__ADI24546

SEQ ID NO: 5019 - protein, 566 aa, Artificial Sequence; identical to SEQ ID NO: 3833
  derived and/or modified protein sequence (wt) from hemagglutinin__InfluenzaA__ADI24553

SEQ ID NO: 5020 - protein, 566 aa, Artificial Sequence; identical to SEQ ID NO: 3833
  derived and/or modified protein sequence (wt) from hemagglutinin__InfluenzaA__ADI24555

SEQ ID NO: 5021 - protein, 566 aa, Artificial Sequence
  derived and/or modified protein sequence (wt) from hemagglutinin__InfluenzaA__ADI24557
MKAILVVLLYTFATANADTLCIGYHANNSTDTVDTVLEKNVTVTHSVNLLEDKHNGKLCKLRGVAPLHLGKCNIAGWILGNPECESLSTASSWSYIVETSSSDNGTCYPGDFIDYEELREQLSSVSSFERFEIFPKTSSWPNHDSNKGVTAACPHAGAKSFYKNLIWLVKKGNSYPKLSKSYINDKGKEILVLWGIHHPSTSADQQSLYQNADAYVFVGTSRYSKKFKPEIAIRPKVRDQEGRMNYYWTLVEPGDKITFEATGNLVVPRYAFAMERNAGSGIIISDTPVHDCNTTCQTPKGAINTSLPFQNIHPITIGKCPKYVKSTKLRLATGLRNVPSIQSRGLFGAIAGFIEGGWTGMVDGWYGYHHQNEQGSGYAADLKSTQNAIDKITNKVNSVIEKMNTQFTAVGKEFNHLEKRIENLNKKVDDGFLDIWTYNAELLVLLENERTLDYHDSNVKNLYEKVRSQLKNNAKEIGNGCFEFYHKCDNTCMESVKNGTYDYPKYSEEAKLNREEIDGVKLESTRIYQILAIYSTVASSLVLVVSLGAISFWMCSNGSLQCRICI

SEQ ID NO: 5022 - protein, 566 aa, Artificial Sequence; identical to SEQ ID NO: 3833
  derived and/or modified protein sequence (wt) from hemagglutinin__InfluenzaA__ADI24559

SEQ ID NO: 5023 - protein, 566 aa, Artificial Sequence
  derived and/or modified protein sequence (wt) from hemagglutinin__InfluenzaA__ADI24561
MKAILVILLYTFATANADTLCIGYHANNSTDTVDTVLEKNVTVTHSVNLLEDKHDGKLCKLRGVAPLHLGKCNIAGWILGNPECESLSTASSWSYIVETSSSDNGTCYPGDFIDYEELREQLSSVSSFERFEIFPKTSSWPNHDSNKGVTAACPHAGAKSFYKNLIWLVKKGNSYPKLSKSYINDKGKEVLVLWGIHHPSTSADQQSLYQNADAYVFVGTSRYSKKFKPEIAIRPKVRDQEGRMNYYWTLVEPGDKITFEATGNLVVPRYAFAMERNAGSGIIISDTPVHDCNTTCQTPKGAINTSLPFQNIHPITIGKCPKYVKSTKLRLATGLRNVPSIQSRGLFGAIAGFIEGGWTGMVDGWYGYHHQNEQGSGYAADLKSTQNAIDKITNKVNSVIEKMNTQFTAVGKEFNHLEKRIENLNKKVDDGFLDIWTYNAELLVLLENERTLDYHDSNVKNLYEKVRSQLKNNAKEIGNGCFEFYHKCDNTCMESVKNGTYDYPKYSEEAKLNREEIDGVKLESTRIYQILAIYSTVASSLVLVVSLGAISFWMCSNGSLQCRICI

SEQ ID NO: 5024 - protein, 566 aa, Artificial Sequence; identical to SEQ ID NO: 3833
  derived and/or modified protein sequence (wt) from hemagglutinin__InfluenzaA__ADI24563

SEQ ID NO: 5025 - protein, 566 aa, Artificial Sequence
  derived and/or modified protein sequence (wt) from hemagglutinin__InfluenzaA__ADI24565
MKAILVVLLYTFATANADTLCIGYHANNSTDTVDTVLEKNVTVTHSVNLLEDKHDGKLCKLRGVAPLHLGKCNIAGWILGNPECESLSTASSWSYIVETSSSDNGTCYPGDFIDYEELREQLSSVSSFERFEIFPKTSSWPNHDSNKGVTAACPHAGAKSFYKNLIWLVKKGNSYPKLSKSYINDKGKKVLVLWGIHHPSTSADQQSLYQNADAYVFVGTSRYSKKFKPEIAIRPKVRDQEGRMNYYWTLVEPGDKITFEATGNLVVPRYAFAMERNAGSGIIISDTPVHDCNTTCQTPKGAINTSLPFQNIHPITIGKCPKYVKSTKLRLATGLRNVPSIQSRGLFGAIAGFIEGGWTGMVDGWYGYHHQNEQGSGYAADLKSTQNAIDKITNKVNSVIEKMNTQFTAVGKEFNHLEKRIENLNKKVDDGFLDIWTYNAELLVLLENERTLDYHDSNVKNLYEKVRSQLKNNAKEIGNGCFEFYHKCDNTCMESVKNGTYDYPKYSEEAKLNREEIDGVKLESTRIYQILAIYSTVASSLVLVVSLGAISFWMCSNGSLQCRICI

SEQ ID NO: 5026 - protein, 566 aa, Artificial Sequence; identical to SEQ ID NO: 3833
  derived and/or modified protein sequence (wt) from hemagglutinin__InfluenzaA__ADI24567

SEQ ID NO: 5027 - protein, 566 aa, Artificial Sequence
  derived and/or modified protein sequence (wt) from hemagglutinin__InfluenzaA__ADI24569
MKAILVVLLYTFATANADTLCIGYHANNSTDTVDTVLEKNVTVTHSVNLLEDKHNGKLCKLRGVAPLHLGKCNIAGWILGNPECESLSTASSWSYIVETSSSDNGTCYPGDFIDYEELREQLSSVSSFERFEIFPKTSSWPNHDSNKGVTAACPHAGAKSFYKNLIWLVKKGNSYPKLSKSYINDKGKEVLVLWGIHHPSTSADQQSLYQNADAYVFVGTSRYSKKFKPEIAIRPKVRDQEGRMNYYWTLVEPGDKITFEATGNLVVPRYAFAIERNAGSGIIISDTPVHDCNTTCQTPKGAINTSLPFQNIHPITIGKCPKYVKSTKLRLATGLRNVPSIQSRGLFGAIAGFIEGGWTGMVDGWYGYHHQNEQGSGYAADLKSTQNAIDKITNKVNSVIEKMNTQFTAVGKEFNHLEKRIENLNKKVDDGFLDIWTYNAELLVLLENERTLDYHDSNVKNLYEKVRSQLKNNAKEIGNGCFEFYHKCDNTCMESVKNGTYDYPKYSEEAKLNREEIDGVKLESTRIYQILAIYSTVASSLVLVVSLGAISFWMCSNGSLQCRICI

SEQ ID NO: 5028 - protein, 566 aa, Artificial Sequence; identical to SEQ ID NO: 3833
  derived and/or modified protein sequence (wt) from hemagglutinin__InfluenzaA__ADI24571

SEQ ID NO: 5029 - protein, 566 aa, Artificial Sequence; identical to SEQ ID NO: 4221
  derived and/or modified protein sequence (wt) from hemagglutinin__InfluenzaA__ADI24573

SEQ ID NO: 5030 - protein, 566 aa, Artificial Sequence
  derived and/or modified protein sequence (wt) from hemagglutinin__InfluenzaA__ADI24575
MKAILVVLLYTFATANADTLCIGYHANNSTDTVDTVLEKNVTVTHSVNLLEDKHNGKLCKLRGVAPLHLGKCNIAGWILGNPECESLSTASSWSYIVETSSSDNGTCYPGDFINYEELREQLSSVSSFERFEIFPKTSSWPNHDSNKGVTAACPHAGAKSFYKNLIWLVKKGNSYPKLSKSYINDKGKEVLVLWGIHHPSTSADQQSLYQNADAYVFVGTSRYSKKFKPEIAIRPKVRDQEGRMNYYWTLVEPGDKITFEATGNLVVPRYAFAMERNAGSGIIISDTPVHDCNTTCQTPKGAINTSLPFQNIHPITIGKCPKYVKSTKLRLATGLRNVPSIQSRGLFGAIAGFIEGGWTGMVDGWYGYHHQNEQGSGYAADLKSTQNAIDKITNKVNSVIEKMNTQFTAVGKEFNHLEKRIENLNKKVDDGFLDIWTYNAELLVLLENERTLDYHDSNVENLYEKVRSQLKNNAKEIGNGCFEFYHKCDNTCMESVKNGTYDYPKYSEEAKLNREEIDGVKLESTRIYQILAIYSTVASSLVLVVSLGAISFWMCSNGSLQCRICI

SEQ ID NO: 5031 - protein, 566 aa, Artificial Sequence; identical to SEQ ID NO: 3833
  derived and/or modified protein sequence (wt) from hemagglutinin__InfluenzaA__ADI24577

SEQ ID NO: 5032 - protein, 566 aa, Artificial Sequence
  derived and/or modified protein sequence (wt) from hemagglutinin__InfluenzaA__ADI24581
MKAILVVLLYTFATANADTLCIGYHANNSTDTVDTVLEKNVTVTHSVNLLEDKHNGKLCKLRGVAPLHLGKCNIAGWVLGNPECESLSTASSWSYIVETSSSDNGTCYPGDFIDYEELREQLSSVSSFERFEIFPKTSSWPNHDSNKGVTAACPHAGAKSFYKNLIWLVKKGNSYPKLSKSYINDKGKEVLVLWGIHHPSTSADQQSLYQNADAYVFVGTSRYSKKFKPEIAIRPKVRDQEGRMNYYWTLVEPGDKITFEATGNLVVPRYAFAMERNAGSGIIISDTPVHDCNTTCQTPKGAINTSLPFQNIHPITIGKCPKYVKSTKLRLATGLRNVPSIQSRGLFGAIAGFIEGGWTGMVDGWYGYHHQNEQGSGYAADLKSTQNAIDKITNKVNSVIEKMNTQFTAVGKEFNHLEKRIENLNKKVDDGFLDIWTYNAELLVLLENERTLDYHDSNVKNLYEKVRSQLKNNAKEIGNGCFEFYHKCDNTCMESVKNGTYDYPKYSEEAKLNREEIDGVKLESTRIYQILAIYSTVASSLVLVVSLGAISFWMCSNGSLQCRICI

SEQ ID NO: 5033 - protein, 566 aa, Artificial Sequence
  derived and/or modified protein sequence (wt) from hemagglutinin__InfluenzaA__ADI24583
MKAILVVLLYTFATANADTLCIGYHANNSTDTVDTILEKNVTVTHSVNLLEDKHNGKLCKLRGVAPLHLGKCNIAGWILGNPECESLSTASSWSYIVETSSSDNGTCYPGDFIDYEELREQLSSVSSFERFEIFPKTSSWPNHDSNKGVTAACPHAGAKSFYKNLIWLVKKGNSYPKLSKSYINDKGKEVLVLWGIHHPSTSADQQSLYQNADAYVFVGTSRYSKKFKPEIAIRPKVRDQEGRMNYYWTLVEPGDKITFEATGNLVVPRYAFAMERNAGSGIIISDTPVHDCNTTCQTPKGAINTSLPFQNIHPITIGKCPKYVKSTKLRLATGLRNVPSIQSRGLFGAIAGFIEGGWTGMVDGWYGYHHQNEQGSGYAADLKSTQNAIDKITNKVNSVIEKMNTQFTAVGKEFNHLEKRIENLNKKVDDGFLDIWTYNAELLVLLENERTLDYHDSNVKNLYEKVRSQLKNNAKEIGNGCFEFYHKCDNTCMESVKNGTYDYPKYSEEAKLNREEIDGVKLESTRIYQILAIYSTVASSLVLVVSLGAISFWMCSNGSLQCRICI

SEQ ID NO: 5034 - protein, 566 aa, Artificial Sequence
  derived and/or modified protein sequence (wt) from hemagglutinin__InfluenzaA__ADI24590
MKAILVVLLYTFATANADTLCIGYHANNSTDTVDTVLEKNVTVTHSANLLEDKHNGKLCKLRGVAPLHLGKCNIAGWILGNPECESLSTASSWSYIVETSSSDNGTCYPGDFIDYEELREQLSSVSSFERFEIFPKTSSWPNHDSNKGVTAACPHAGAKSFYKNLIWLVKKGNSYPKLSKSYINDKGKEVLVLWGIHHPSTSADQQSLYQNADAYVFVGTSRYSKKFKPEIAIRPKVRDQEGRMNYYWTLVEPGDKITFEATGNLVVPRYAFAMERNAGSGIIISDTPVHDCNTTCQTPKGAINTSLPFQNIHPITIGKCPKYVKSTKLRLATGLRNVPSIQSRGLFGAIAGFIEGGWTGMVDGWYGYHHQNEQGSGYAADLKSTQNAIDKITNKVNSVIEKMNTQFTAVGKEFNHLEKRIENLNKKVDDGFLDIWTYNAELLVLLENERTLDYHDSNVKNLYEKVRSQLKNNAKEIGNGCFEFYHKCDNTCMESVKNGTYDYPKYSEEAKLNREEIDGVKLESTRIYQILAIYSTVASSLVLVVSLGAISFWMCSNGSLQCRICI

SEQ ID NO: 5035 - protein, 566 aa, Artificial Sequence
  derived and/or modified protein sequence (wt) from hemagglutinin__InfluenzaA__ADI24597
MKAILVVLLYTFATANADTLCIGYHANNSTDTVDTVLEKNVTVTHSANLLEDKHNGKLCKLRGVAPLHLGNCNIAGWILGNPECESLSTASSWSYIVETSSSDNGTCYPGDFIDYEELREQLSSVSSFERFEIFPKTSSWPNHDSNKGVTAACPHAGAKSFYKNLIWLVKKGNSYPKLSKSYINDKGKEVLVLWGIHHPSTSADQQSLYQNADAYVFVGTSRYSKKFKPEIAIRPKVRDQEGRMNYYWTLVEPGDKITFEATGNLVVPRYAFAMERNAGSGIIISDTPVHDCNTTCQTPKGAINTSLPFQNIHPITIGKCPKYVKSTKLRLATGLRNVPSIQSRGLFGAIAGFIEGGWTGMVDGWYGYHHQNEQGSGYAADLKSTQNAIDKITNKVNSVIEKMNTQFTAVGKEFNHLEKRIENLNKKVDDGFLDIWTYNAELLVLLENERTLDYHDSNVKNLYEKVRSQLKNNAKEIGNGCFEFYHKCDNTCMESVKNGTYDYPKYSEEAKLNREEIDGVKLESTRIYQILAIYSTVASSLVLVVSLGAISFWMCSNGSLQCRICI

SEQ ID NO: 5036 - protein, 566 aa, Artificial Sequence; identical to SEQ ID NO: 5034
  derived and/or modified protein sequence (wt) from hemagglutinin__InfluenzaA__ADI24612

SEQ ID NO: 5037 - protein, 566 aa, Artificial Sequence
  derived and/or modified protein sequence (wt) from hemagglutinin__InfluenzaA__ADI24619
MKAILVVLLYTFATANADTLCIGYHANNSTDTVDTVLEKNVTVTHSANLLEDKHNGKLCKLRGVAPLHLGKCNIAGWILGNPECESLSTASSWSYIVETSSSDNGTCYPGDFIDYEELREQLSSVSSFERFEIFPKTSSWPNHDSNKGVTAACPHAGAKSFYKNLIWLVKKGNSYPKLSKSYINDKGKEVLVLWGIHHPSTSVDQQSLYQNADAYVFVGTSRYSKKFKPEIAIRPKVRDQEGRMNYYWTLVEPGDKITFEATGNLVVPRYAFAMERNAGSGIIISDTPVHDCNTTCQTPKGAINTSLPFQNIHPITIGKCPKYVKSTKLRLATGLRNVPSIQSRGLFGAIAGFIEGGWTGMVDGWYGYHHQNEQGSGYAADLKSTQNAIDKITNKVNSVIEKMNTQFTAVGKEFNHLEKRIENLNKKVDDGFLDIWTYNAELLVLLENERTLDYHDSNVKNLYEKVRSQLKNNAKEIGNGCFEFYHKCDNTCMESVKNGTYDYPKYSEEAKLNREEIDGVKLESTRIYQILAIYSTVASSLVLVVSLGAISFWMCSNGSLQCRICI

SEQ ID NO: 5038 - protein, 566 aa, Artificial Sequence
  derived and/or modified protein sequence (wt) from hemagglutinin__InfluenzaA__ADI24621
MKAILVVLLYTFATANADTLCIGYHANNSTDTVDTVLEKNVTVTHSVNLLEDKHNGKLCKLRGVAPLHLGKCNIAGWILGNPECESLSTASSWSYIVETSSSDNGTCYPGDFIDYEELREQLSSVSSFERFEIFPKTSSWPNHDSNKGVTAACPHAGAKSFYKNLIWLVKKGNSYPKLSKSYINDKGKEVLVLWGIHHPSTSADQQSLYQNADAYVFVGTSRYSKKFKPEIAIRPKVRDQEGRMNYYWTLVEPGDKITFEATGNLVVPRYAFAMERNAGSGIIISDTPVHDCNTTCQTPKGTINTSLPFQNIHPITIGKCPKYVKSTKLRLATGLRNVPSIQSRGLFGAIAGFIEGGWTGMVDGWYGYHHQNEQGSGYAADLKSTQNAIDKITNKVNSVIEKMNTQFTAVGKEFNHLEKRIENLNKKVDDGFLDIWTYNAELLVLLENERTLDYHDSNVKNLYEKVRSQLKNNAKEIGNGCFEFYHKCDNTCMESVKNGTYDYPKYSEEAKLNREEIDGVKLESTRIYQILAIYSTVASSLVLIVSLGAISFWMCSNGSLQCRICI

SEQ ID NO: 5039 - protein, 566 aa, Artificial Sequence
  derived and/or modified protein sequence (wt) from hemagglutinin__InfluenzaA__ADI48184
MKAILVVLLYTFATANADTLCIGYHANNSTDTVDTVLEKNVTVTHSVNLLEDKHNGKLCKLRGVAPLHLGKCNIAGWILGNPECESLSTASSWSYIVETSSSDNGTCYPGDFIDYEELREQLSSVSSFERFEIFPKTSSWPNHDSNKGVTAACPHAGAKSFYKNLIWLVKKGNSYPKLSKSYINDKGKEVLVLWGIHHPSTSADQQSLYQNADAYVFVGTSRYSKKFKPEIAIRPKVRDQEGRMNYYWTLVEPGDKITFEATGNLVVPRYAFAMGRNAGSGIIISDTPVHDCNTTCQTPKGAINTSLPFQNIHPITIGKCPKYVKSTKLRLATGLRNVPSIQSRGLFGAIAGFIEGGWTGMVDGWYGYHHQNEQGSGYAADLKSTQNAIDKITNKVNSVIEKMNTQFTAVGKEFNHLEKRIENLNKKVDDGFLDIWTYNAELLVLLENERTLDYHDSNVKNLYERVRSQLKNNAKEIGNGCFEFYHKCDNTCMESVKNGTYDYPKYSEEAKLNREEIDGVKLESTRIYQILAIYSTVASSLVLVVSLGAISFWMCSNGSLQCRICI

SEQ ID NO: 5040 - protein, 566 aa, Artificial Sequence; identical to SEQ ID NO: 3833
  derived and/or modified protein sequence (wt) from hemagglutinin__InfluenzaA__ADI48186

SEQ ID NO: 5041 - protein, 566 aa, Artificial Sequence
  derived and/or modified protein sequence (wt) from hemagglutinin__InfluenzaA__ADI48188
MKAILVVLLYTFATANADTLCIGYHANNSTDTVDTVLEKNVTVTHSVNLLEDKHNGKLCKLRGVAPLHLGKCNIAGWILGNPECESLSTASSWSYIVETSSSDNGTCYPGDFIDYEELREQLSSVSSFERFEIFPKTSSWPNHDSNKGVTAACPHAGAKSFYKNLIWLVKKGNSYPKLSKSYINDKGKEVLVLWGIHHPSTSADQQSLYQNADAYVFVGTSRYSKKFKPEIAIRPKVRDQEGRMNYYWTLVEPGDKITFEATGNLVVPRYAFAMERNAGSDIIISDTPVHDCNTTCQTPKGAINTSLPFQNIHPITIGKCPKYVKSTKLRLATGLRNVPSIQSRGLFGAIAGFIEGGWTGMVDGWYGYHHQNEQGSGYAADLKSTQNAIDKITNKVNSVIEKMNTQFTAVGKEFNHLEKRIENLNKKVDDGFLDIWTYNAELLVLLENERTLDYHDSNVKNLYEKVRSQLKNNAKEIGNGCFEFYHKCDNTCMESVKNGTYDYPKYSEEAKLNREEIDGVKLESTRIYQILAIYSTVASSLVLVVSLGAISFWMCSNGSLQCRICI

SEQ ID NO: 5042 - protein, 566 aa, Artificial Sequence
  derived and/or modified protein sequence (wt) from hemagglutinin__InfluenzaA__ADI48190
MKAILVVLLYTFATANADTLCIGYHANNSTDTVDTVLEKNVTVTHSVNLLEDKHNGKLCKLRGVAPLHLGKCNIAGWILGNPECESLSTASSWSYIVETSSSDNGTCYPGDFIDYEELREQLSSVSSFERFEIFPKTSSWPNHDSNKGVTAACPHAGAKSFYKNLIWLVKKGNSYPKLSKSYINDKGKEVLVLWGIHHPSTSADQQSLYQNADAYVFVGTSRYSKKFKPEIAIRPKVRDQEGRMNYYWTLVEPGDKITFEATGNLVVPRYAFAMERNAGSGIIISDTPVHDCNTTCQTPKGAINTSLPFQNIHPITIGKCPKYVKSTKLRLATGLRNVPSIQSRGLFGAIAGFIEGGWTGMVDGWYGYHHQNEQGSGYAADLKSTQNAIDKITNKVNSVIEKMNTQFTAVGKEFNHLEKRIENLNKKVDDGFLDIWTYNAELLVLLENERTLDYHDSNVKNLYEKVRSQLKNNAKEIGNGCFEFYHKCDNTCMESVKNGTYDYPKYSEEAKLNREEIDGVKLESTKIYQILAIYSTVASSLVLVVSLGAISFWMCSNGSLQCRICI

SEQ ID NO: 5043 - protein, 566 aa, Artificial Sequence
  derived and/or modified protein sequence (wt) from hemagglutinin__InfluenzaA__ADI48192
MKAILVVLLYTFATANADTLCIGYHANNSTDTVDTVLEKNVTVTHSVNLLEDKHNGKLCKLRGVAPLHLGKCNIAGWILGNPECESLSTASSWSYIVETSSSDNGTCYPGDFIDYEELREQLSSVSSFERFEIFPKTSSWPNHDSNKGVTAACPHAGAKSFYKNLIWLVKKGNSYPKLSKSYINDKGKEVLVLWGIHHPSTSADQQSLYQNADAYVFVGTSRYSKKFKPEIAIRPKVRDQEGRMNYYWTLVEPGDKITFEATGNLVVPRYAFAMERNAGSGIIISDTPVHDCNTTCQTPKGAINTSLPFQNIHPITIGKCPKYVKSTKLRLATGLRNVPSIQSRGLFGAIAGFIEGGWTGMVDGWYGYHHQNEQGSGYAADLKSTQNAIDKITNKVNSVIEKMNTQFTAVGKEFNHLEKRIENLNKKVDDGFLDIWTYNAELLVLLENERTLDYHDSNVKNLYEKVRSQLKNNAKEIGNGCFEFYHKCDNTCMESVKNGTYDYPKYSEEAKLNREEIDGVKLESTRIYQILTIYSTVASSLVLVVSLGAISFWMCSNGSLQCRICI

SEQ ID NO: 5044 - protein, 566 aa, Artificial Sequence
  derived and/or modified protein sequence (wt) from hemagglutinin__InfluenzaA__ADI48194
MKAILVVLLYTFATANADTLCIGYHANNSTDTVDTVLEKNVTVTHSVNLLEDKHNGKLCKLRGVAPLHLGKCNIAGWILGNPECESLSTASSWSYIVETSSSDNGTCYPGDFIDYEELREQLSLVSSFERFEIFPKTNSWPNHDSNKGVTAACPHAGAKSFYKNLIWLVKKGNSYPKLSKSYINDKGKEVLVLWGIHHPSTSADQQSLYQNADAYVFVGTSRYSKKFKPEIAIRPKVRDQEGRMNYYWTLVEPGDKITFEATGNLVVPRYAFAMERNAGSGIIISDTPVHDCNTTCQTPKGAINTSLPFQNIHPITIGKCPKYVKSTKLRLATGLRNVPSIQSRGLFGAIAGFIEGGWTGMVDGWYGYHHQNEQGSGYAADLKSTQNAIDKITNKVNSVIEKMNTQFTAVGKEFNHLEKRIENLNKKVDDGFLDIWTYNAELLVLLENERTLDYHDSNVKNLYEKVRSQLKNNAKEIGNGCFEFYHKCDNTCMESVKNGTYDYPKYSEEAKLNREEIDGVKLESTRIYQILAIYSTVASSLVLVVSLGAISFWMCSNGSLQCRICI

SEQ ID NO: 5045 - protein, 566 aa, Artificial Sequence
  derived and/or modified protein sequence (wt) from hemagglutinin__InfluenzaA__ADI48196
MKAILVVLLYTFATANADTLCIGYHANNSTDTVDTVLEKNVTVTHSVNLLEDKHNGKLCKLRGVAPLHLGKCNIAGWILGNPECESLSTASSWSYIVETSSSDNGTCYPGDFIDYEELREQLSSVSSFERFEIFPKTSSWPNHDSNKGVTAACPHAGAKSFYKNLIWLVKKGNSYPKLSKSYINDKGKEVLVLWGIHHPSTSADQQSLYQNADAYVFVGTSRYSKKFKPEIAIRPKVRDQEGRMNYYWTLVEPGDKITFEATGNLVVPRYAFAMERNAGSGIIISDTPVHDCNTTCQTPKGAINTSLPFQNIHPITIGKCPKYVKSTKLRLATGLRNVPSIQSRGLFGAIAGFIEGGWTGMVDGWYGYHHQNEQGSGYAADLKSTQNAIDKITNKVNSVIEKMNTQFTAVGKEFNHLEKRIENLNKKVDDGFLDIWTYNAELLVLLENERTLDYHDSNVKNLYEKVRSQLKNNAKEIGNGCFEFYHKCDNTCMESVKNGTYDYPKYSEEAKLNREEIDGVKLDSTRIYQILAIYSTVASSLVLVVSLGAISFWMCSNGSLQCRICI

SEQ ID NO: 5046 - protein, 566 aa, Artificial Sequence; identical to SEQ ID NO: 3833
  derived and/or modified protein sequence (wt) from hemagglutinin__InfluenzaA__ADI48198

SEQ ID NO: 5047 - protein, 566 aa, Artificial Sequence; identical to SEQ ID NO: 3833
  derived and/or modified protein sequence (wt) from hemagglutinin__InfluenzaA__ADI48200

SEQ ID NO: 5048 - protein, 566 aa, Artificial Sequence
  derived and/or modified protein sequence (wt) from hemagglutinin__InfluenzaA__ADI48202
MKAILVVLLYTFATANADTLCIGYHANNSTDTVDTVLEKNVTVTHSVNLLEDKHNGKLCKLRGVAPLHLGKCNIAGWILGNPECESLSTASSWSYIVETSSSDNGTCYPGDFIDYEELREQLSSVSSFERFEIFPKISSWPNHDSNKGVTAACPHAGAKSFYKNLIWLVKKGNSYPKLSKSYINDKGKEVLVLWGIHHPSTSADQQSLYQNADAYVFVGTSRYSKKFKPEIAIRPKVRDQEGRMNYYWTLVEPGDKITFEATGNLVVPRYAFAMERNAGSGIIISDTPVHDCNTTCQTPKGAINTSLPFQNIHPITIGKCPKYVKSTKLRLATGLRNVPSIQSRGLFGAIAGFIEGGWTGMVDGWYGYHHQNEQGSGYAADLKSTQNAIDKITNKVNSVIEKMNTQFTAVGKEFNHLEKRIENLNKKVDDGFLDIWTYNAELLVLLENERTLDYHDSNVKNLYEKVRSQLKNNAKEIGNGCFEFYHKCDNTCMESVKNGTYDYPKYSEEAKLNREEIDGVKLESTRIYQILAIYSTVASSLVLVVSLGAISFWMCSNGSLQCRICI

SEQ ID NO: 5049 - protein, 566 aa, Artificial Sequence
  derived and/or modified protein sequence (wt) from hemagglutinin__InfluenzaA__ADI48204
MKAILVVLLYTFATANADTLCIGYHANNSTDTVDTVLEKNVTVTHSVNLLEDKHNGKLCKLRGVAPLHLGKCNIAGWILGNPECESLSTASSWSYIVETSSSDNGTCYPGDFIDYEELREQLSSVSSFERFEIFPKTSSWPNHDSNKGVTAACPHAGAKSFYKNLIWLVKKGNSYPKLSKSYINDKGKEVLVLWGIHHPSTSADQQSLYQNVDAYVFVGTSRYSKKFKPEIAIRPKVRDQEGRMNYYWTLVEPGDKITFEATGNLVVPRYAFAMERNAGSGIIISDTPVHDCNTTCQTPKGAINTSLPFQNIHPITIGKCPKYVKSTKLRLATGLRNVPSIQSRGLFGAIAGFIEGGWTGMVDGWYGYHHQNEQGSGYAADLKSTQNAIDKITKKVNSVIEKMNTQFTAVGKEFNHLEKRIENLNKKVDDGFLDIWTYNAELLVLLENERTLDYHDSNVKNLYEKVRSQLKNNAKEIGNGCFEFYHKCDNTCMESVKNGTYDYPKYSEEAKLNREEIDGVKLESTRIYQILAIYSTVASSLVLVVSLGAISFWMCSNGSLQCRICI

SEQ ID NO: 5050 - protein, 566 aa, Artificial Sequence; identical to SEQ ID NO: 3833
  derived and/or modified protein sequence (wt) from hemagglutinin__InfluenzaA__ADI48208

SEQ ID NO: 5051 - protein, 566 aa, Artificial Sequence; identical to SEQ ID NO: 3833
  derived and/or modified protein sequence (wt) from hemagglutinin__InfluenzaA__ADI48210

SEQ ID NO: 5052 - protein, 566 aa, Artificial Sequence
  derived and/or modified protein sequence (wt) from hemagglutinin__InfluenzaA__ADI48212
MKAILVVLLYTFATANADTLCIGYHANNSTDTVDTVLEKNVTVTHSVNLLEDKHNGKLCKLRGVAPLHLGKCNIAGWILGNPECESLSTASSWSYIVETSSSDNGTCYPGDFIDYEELREQLSSVSSFERFEIFPKTSSWPNHDSNKGVTAACPHAGAKSFYKNLIWLVKKGNSYPKLSKSYINDKGKEVLVLWGIHHPSTSADQQSLYQNADAYVFVGTSRYSKKFKPEIAIRPKVRDQEGRMNYYWTLVEPGDKITFEATGNLVVPRYAFAMERNAGSGIIISDTPVHDCNTTCQTPKGAINTSLPFQNIHPITIGKCPKYVKSTKLRLATGLRNVPSIQSRGLFGAIAGFIEGGWTGMVDGWYGYHHQNEQGSGYAADLKSTQNAIDKITNKVNSVIEKMNTQFTAVGKEFNHLEKRIENLNKKVDDGFLDVWTYNAELLVLLENERTLDYHDSNVKNLYEKVRSQLKNNAKEIGNGCFEFYHKCDNTCMESVKNGTYDYPKYSEEAKLNREEIDGVKLESTRIYQILAIYSTVASSLVLVVSLGAISFWMCSNGSLQCRICI

SEQ ID NO: 5053 - protein, 566 aa, Artificial Sequence
  derived and/or modified protein sequence (wt) from hemagglutinin__InfluenzaA__ADI48214
MKAILVVLLYTFAIANADTLCIGYHANNSTDTVDTVLEKNVTVTHSVNLLEDKHNGKLCKLRGVAPLHLGKCNIAGWILGNPECESLSTASSWSYIVETSSSDNGTCYPGDFIDYEELREQLSSVSSFERFEIFPKTSSWPNHDSNKGVTAACPHAGAKSFYKNLIWLVKKGNSYPKLSKSYINDKGKEVLVLWGIHHPSTSADQQSLYQNADAYVFVGTSRYSKKFKPEIAIRPKVRDQEGRMNYYWTLVEPGDKITFEATGNLVVPRYAFAMERNAGSGIIISDTPVHDCNTTCQTPKGAINTSLPFQNIHPITIGKCPKYVKSTKLRLATGLRNVPSIQSRGLFGAIAGFIEGGWTGMVDGWYGYHHQNEQGSGYAADLKSTQNAIDKITNKVNSVIEKMNTQFTAVGKEFNHLEKRIENLNKKVDDGFLDIWTYNAELLVLLENERTLDYHDSNVKNLYEKVRSQLKNNAKEIGNGCFEFYHKCDNTCMESVKNGTYDYPKYSEEAKLNREEIDGVKLESTRIYQILAIYSTVASSLVLAVSLGAISFWMCSNGSLQCRICI

SEQ ID NO: 5054 - protein, 566 aa, Artificial Sequence; identical to SEQ ID NO: 5052
  derived and/or modified protein sequence (wt) from hemagglutinin__InfluenzaA__ADI48216

SEQ ID NO: 5055 - protein, 566 aa, Artificial Sequence
  derived and/or modified protein sequence (wt) from hemagglutinin__InfluenzaA__ADI48218
MKAILVVLLYTFATANADTLCIGYHANNSTDTVDTVLEKNVTVTHSVNLLEDKHNGKLCKLRGVAPLHLGKCNIAGWILGNPECESLSTASSWSYIVETSSSDNGTCYPGDFIDYEELREQLSSVSSFERFEIFPKTSSWPNHDSNKGVTAACPHAGAKSFYKNLIWLVKKGNSYPKLSKSYINDKGKEVLVLWGIHHPSTSADQQSLYQNADAYVFVGTSRYSKKFKPEIAIRPKVRDQEGRMNYYWTLVEPGDKITFEATGNLVVPRYAFAMERNAGSGIIISDTPVHDCNTTCQTPKGAINTSLPFQNIHPITIGKCPKYVKSTKLRLATGLRNVPSIQSRGLFGAIAGFIEGGWTGMVDGWYGYHHQNEQGSGYAADLKSTQNAIDKITNKVNSVIEKMNTQFTAVGKEFNHLEKRIENLNKKVDDGFLDIWTYNAELLVLLENERTLDYQDSNVKNLYEKVRSQLKNNAKEIGNGCFEFYHKCDNTCMESVKNGTYDYPKYSEEAKLNREEIDGVKLESTRIYQILAIYSTVASSLVLVVSLGAISFWMCSNGSLQCRICI

SEQ ID NO: 5056 - protein, 566 aa, Artificial Sequence
  derived and/or modified protein sequence (wt) from hemagglutinin__InfluenzaA__ADI48220
MKAILVVLLYTFATANADTLCIGYHANNSTDTVDTVLEKNVTVTHSVNLLEDKHNGKLCKLRGVAPLHLGKCNIAGWILGNPECESLSTASSWSYIVETSSSDNGTCYPGDFIDYEELREQLSSVSSFERFEIFPKTSSWPNHDSNKGVTAACPHAGAKSFYKNLIWLVKKGNSYPKLSKSYINDKGKEVLVLWGIHHPSTSADQQSLYQNADAYVFVGTSRYSKKFKPEIAIRPKVRDQEGRMNYYWTLVEPGDKITFETTGNLVVPRYAFAMERNAGSGIIISDTPVHDCNTTCQTPKGAINTSLPFQNIHPITIGKCPKYVKSTKLRLATGLRNVPSIQSRGLFGAIAGFIEGGWTGMVDGWYGYHHQNEQGSGYAADLKSTQNAIDKITNKVNSVIEKMNTQFTAVGKEFNHLEKRIENLNKKVDDGFLDIWTYNAELLVLLENERTLGYHDSNVKNLYEKVRSQLKNNAKEIGNGCFEFYHKCDNTCMESVKNGTYDYPKYSEEAKLNREEIDGVKLESTRIYQILAIYSTVASSLVLVVSLGAISFWMCSNGSLQCRICI

SEQ ID NO: 5057 - protein, 566 aa, Artificial Sequence
  derived and/or modified protein sequence (wt) from hemagglutinin__InfluenzaA__ADI48622
MKAILVFLLYTFATANADTLCIGYHANNSTDTVDTVLEKNVTVTHSVNLLEDKHNGKLCKLRGVAPLHLGKCNIAGWILGNPECESLSTASSWSYIVETSSSDNGTCYPGDFIDYEELREQLSSVSSFERFEIFPKTSSWPNHDSNKGVTAACPHAGAKSFYKNLIWLVKKGNSYPKLSKSYINDKGKEVLVLWGIHHPSTSADQQSLYQNADAYVFVGTSRYSKKFKPEIAIRPKVRDQEGRMNYYWTLVEPGDKITFEATGNLVVPRYAFAMERNAGSGIIISDTPVHDCNTTCQTPKGAINTSLPFQNIHPITIGKCPKYVKSTKLRLATGLRNVPSIQSRGLFGAIAGFIEGGWTGMVDGWYGYHHQNEQGSGYAADLKSTQNAIDEITNKVNSVIEKMNTQFTAVGKEFNHLEKRIENLNKKVDDGFLDIWTYNAELLVLLENERTLDYHDSNVKNLYEKVRSQLKNNAKEIGNGCFEFYHKCDNTCMESVKNGTYDYPKYSEEAKLNREEIDGVKLESTRIYQILAIYSTVASSLVLVVSLGAISFWMCSNGSLQCRICI

SEQ ID NO: 5058 - protein, 566 aa, Artificial Sequence
  derived and/or modified protein sequence (wt) from hemagglutinin__InfluenzaA__ADI48632
MEAILVVLLYTFATANADTLCIGYHANNSTDTVDTVLEKNVTVTHSVNLLEDKHNGKLCKLRGVAPLHLGKCNIAGWILGNPECESLSTASSWSYIVETSSSDNGTCYPGDFIDYEELREQLSSVSSFERFEIFPKTSSWPNHDSNKGVTAACPHAGAKSFYKNLIWLVKKGNSYPKLSKSYINDKGKEVLVLWGVHHPSTSADQQSLYQNADAYVFVGSSRYSKKFKPEIAIRPKVRDQEGRMNYYWTLVEPGDKITFEATGNLVVPRYAFAMERNAGSGIIISDTPVHDCNTTCQTPKGAINTSLPFHNIHPITIGKCPKYVKSTKLRLATGLRNVPSIQSRGLFGAIAGFIEGGWTGMVDGWYGYHHQNEQGSGYAADLKSTQNAIDEITNKVNSVIEKMNTQFTAVGKEFNHLEKRIENLNKKVDDGFLDIWTYNAELLVLLENERTLDYHDSNVKNLYEKVRSQLKNNAKEIGNGCFEFYHKCDNTCMESVKNGTYDYPKYSEEAKLNREEIDGVKLESTRIYQILAIYSTVASSLVLVVSLGAISFWMCSNGSLQCRICI

SEQ ID NO: 5059 - protein, 566 aa, Artificial Sequence; identical to SEQ ID NO: 2911
  derived and/or modified protein sequence (wt) from hemagglutinin__InfluenzaA__ADI48642

SEQ ID NO: 5060 - protein, 566 aa, Artificial Sequence; identical to SEQ ID NO: 2911
  derived and/or modified protein sequence (wt) from hemagglutinin__InfluenzaA__ADI48652

SEQ ID NO: 5061 - protein, 566 aa, Artificial Sequence
  derived and/or modified protein sequence (wt) from hemagglutinin__InfluenzaA__ADI48672
MEAILVVLLYTFATANADTLCIGYHANNSTDTVDTVLEKNVTVTHSVNLLEDKHNGKLCKLRGVAPLHLGKCNIAGWILGNPECESLSTASSWSYIVETSSSDNGTCYPGDFIDYEELREQLSSVSSFERFEIFPKTSSWPNHDSNKGVTAACPHAGAKSFYNNLIWLVKKGNSYPKLSKSYINDKGKEVLVLWGIHHPSTSADQQSLYQNADAYVFVGSSRYSKKFKPEIAIRPKVRDQEGRMNYYWTLVEPGDKITFEATGNLVVPRYAFAMERNAGSGIIISDTPVHDCNTTCQTPKGAINTSLPFHNIHPITIGKCPKYVKSTKLRLATGLRNVPSIQSRGLFGAIAGFIEGGWTGMVDGWYGYHHQNEQGSGYAADLKSTQNAIDEITNKVNSVIEKMNTQFTAVGKEFNHLEKRIENLNKKVDDGFLDIWTYNAELLVLLENERTLDYHDSNVKNLYEKVRSQLKNNAKEIGNGCFEFYHKCDNTCMESVKNGTYDYPKYSEEAKLNREEIDGVKLESTRIYQILAIYSTVASSLVLVVSLGAISFWMCSNGSLQCRICI

SEQ ID NO: 5062 - protein, 566 aa, Artificial Sequence; identical to SEQ ID NO: 2669
  derived and/or modified protein sequence (wt) from hemagglutinin__InfluenzaA__ADI48682

SEQ ID NO: 5063 - protein, 566 aa, Artificial Sequence; identical to SEQ ID NO: 2911
  derived and/or modified protein sequence (wt) from hemagglutinin__InfluenzaA__ADI48692

SEQ ID NO: 5064 - protein, 566 aa, Artificial Sequence; identical to SEQ ID NO: 2849
  derived and/or modified protein sequence (wt) from hemagglutinin__InfluenzaA__ADI48702

SEQ ID NO: 5065 - protein, 566 aa, Artificial Sequence; identical to SEQ ID NO: 2911
  derived and/or modified protein sequence (wt) from hemagglutinin__InfluenzaA__ADI48712

SEQ ID NO: 5066 - protein, 566 aa, Artificial Sequence; identical to SEQ ID NO: 2911
  derived and/or modified protein sequence (wt) from hemagglutinin__InfluenzaA__ADI48722

SEQ ID NO: 5067 - protein, 566 aa, Artificial Sequence; identical to SEQ ID NO: 2669
  derived and/or modified protein sequence (wt) from hemagglutinin__InfluenzaA__ADI48732

SEQ ID NO: 5068 - protein, 566 aa, Artificial Sequence; identical to SEQ ID NO: 2669
  derived and/or modified protein sequence (wt) from hemagglutinin__InfluenzaA__ADI48742

SEQ ID NO: 5069 - protein, 566 aa, Artificial Sequence
  derived and/or modified protein sequence (wt) from hemagglutinin__InfluenzaA__ADI48752
MEAILVFLLYTFATANADTLCIGYHANNSTDTVDTVLEKNVTVTHSVNLLEDKHNGKLCKLRGVAPLHLGKCNIAGWILGNPECESLSTASSWSYIVETSSSDNGTCYPGDFIDYEELREQLSSVSSFERFEIFPKTSSWPNHDSNKGITAACPHAGAKSFYKNLIWLVKKGNSYPKLSKSYINDKGKEVLVLWGIHHPSTSADQQSLYQNADAYVFVGSSRYSKKFKPEIAIRPKVRDQEGRMNYYWTLVEPGDKITFEATGNLVVPRYAFAMERNAGSGIIISDTPVHDCNTTCQTPKGAINTSLPFHNIHPITIGKCPKYVKSTKLRLATGLRNVPSIQSRGLFGAIAGFIEGGWTGMVDGWYGYHHQNEQGSGYAADLKSTQNAIDEITNKVNSVIEKMNTQFTAVGKEFNHLEKRIENLNKKVDDGFLDIWTYNAELLVLLENERTLDYHDSNVKNLYEKVRSQLKNNAKEIGNGCFEFYHKCDNTCMESVKNGTYDYPKYSEEAKLNREEIDGVKLESTRIYQILAIYSTVASSLVLVVSLGAISFWMCSNGSLQCRICI

SEQ ID NO: 5070 - protein, 566 aa, Artificial Sequence; identical to SEQ ID NO: 2911
  derived and/or modified protein sequence (wt) from hemagglutinin__InfluenzaA__ADI48762

SEQ ID NO: 5071 - protein, 566 aa, Artificial Sequence
  derived and/or modified protein sequence (wt) from hemagglutinin__InfluenzaA__ADI48772
MEAILVVLLYTFATANADTLCIGYQANNSTDTVDTVLEKNVTVTHSVNLLEDKHNGKLCKLRGVAPLHLGKCNIAGWILGNPECESLSTASSWSYIVETSSSDNGTCYPGDFIDYEELREQLSSVSSFERFEIFPKTSSWPNHDSNKGVTAACPHAGAKSFYKNLIWLVKKGNSYPKLSKSYINDKGKEVLVLWGIHHPSTSADQQSLYQNADAYVFVGSSRYSKKFKPEIAIRPKVRDQEGRMNYYWTLVEPGDKITFEATGNLVVPRYAFAMERNAGSGIIISDTPVHDCNTTCQTPKGAINTSLPFHNIHPITIGKCPKYVKSTKLRLATGLRNVPSIQSRGLFGAIAGFIEGGWTGMVDGWYGYHHQNEQGSGYAADLKSTQNAIDEITNKVNSVIEKMNTQFTAVGKEFNHLEKRIENLNKKVDDGFLDIWTYNAELLVLLENERTLDYHDSNVKNLYEKVRSQLKNNAKEIGNGCFEFYHKCDNTCMESVKNGTYDYPKYSEEAKLNREEIDGVKLESTRIYQILAIYSTVASSLVLVVSLGAISFWMCSNGSLQCRICI

SEQ ID NO: 5072 - protein, 566 aa, Artificial Sequence
  derived and/or modified protein sequence (wt) from hemagglutinin__InfluenzaA__ADI48782
MKAILVVLLYTFATANADTLCIGYHANNSTDTVDTVLEKNVTVTHSVNLLEDKHNGKLCKLRGVAPLHLGKCNIAGWILGNPECESLSTASSWSYIVETSSSDNGTCYPGDFIDYEELREQLSSVSSFERFEIFPKTSSWPNHDSNKGVTAACPHAGAKSFYKNLIWLVKKGNSYPKLSKSYINDKGKEVLVLWGIHHPSTSADQQSLYQNADAYVFVGTSRYSKKFKPEIAIRPKVRDQEGRMNYYWTLVEPGDKITFEATGNLVVPRYAFAMERNAGSGIIISDTPVHDCNTTCQTPKGAINTSLPFQNIHPITIGKCPKYVKSTKLRLATGLRNVPSIQSRGLFGAIAGFIEGGWTGMVDGWYGYHHQNEQGSGYAADLKSTQNAIDEITNKVNSVIEKMNTQFTAVGKEFNHLEKRIENLNKKVDDGFLDIWTYNAELLVLLENERTLDYHDSNVKNLYEKVRSQLKNNAKEIGNGCFEFYHKCDNTCMESVKNGTYDYPKYSEESKLNREEIDGVKLESTRIYQILAIYSTVASSLVLVVSLGAISFWMCSNGSLQCRICI

SEQ ID NO: 5073 - protein, 566 aa, Artificial Sequence
  derived and/or modified protein sequence (wt) from hemagglutinin__InfluenzaA__ADI48792
MEAILVVLLYTFATANADTLCIGYHANNSTDTVDTVLEKNVTVTHSVNLLEDKHNGKLCKLRGVAPLHLGKCNIAGWILGNPECESLSTASSWSYIVETSSSDNGTCYPGDFIDYEELREQLSSVSSFERFEIFPKTSSWPNHDSNKGVTAACPHAGAKSFYKNLIWLVKKGNSYPKLSKSYINDKGKEVLVLWGIHHPSTSADQQSLYQNADAYIFVGSSRYSKKFKPEIAIRPKVRDQEGRMNYYWTLVEPGDKITFEATGNLVVPRYAFAMERNAGSGIIISDTPVHDCNTTCQTPKGAINTSLPFHNIHPITIGKCPKYVKSTKLRLATGLRNVPSIQSRGLFGAIAGFIEGGWTGMVDGWYGYHHQNEQGSGYAADLKSTQNAIDEITNKVNSVIEKMNTQFTAVGKEFNHLEKRIENLNKKVDDGFLDIWTYNAELLVLLENERTLDYHDSNVKNLYEKVRSQLKNNAKEIGNGCFEFYHKCDNTCMESVKNGTYDYPKYSEEAKLNREEIDGVKLESTRIYQILAIYSTVASSLVLVVSLGAISFWMCSNGSLQCRICI

SEQ ID NO: 5074 - protein, 566 aa, Artificial Sequence
  derived and/or modified protein sequence (wt) from hemagglutinin__InfluenzaA__ADI49029
MEAILVVLLYTFATANADTLCIGYHANNSTDTVDTVLEKNVTVTHSVNLLEDKHNGKLCKLRGVAPLHLGKCNIAGWILGNPECESLSTASSWSYIVETSISDNGTCYPGDFIDYEELREQLSSVSSFERFEIFPKTSSWPNHDSNKGVTAACPHAGAKSFYKNLIWLVKKGNSYPKLSKSYINDKGKEVLVLWGIHHPSTSADQQSLYQNADAYVFVGSSRYSKKFKPEIAIRPKVRDQEGRMNYYWTLVEPGDKITFEATGNLVVPRYAFAMERNAGSGIIISDTPVHDCNTTCQTPKGAINTSLPFHNIHPITIGKCPKYVKSTKLRLATGLKNVPSIQSRGLFGAIAGFIEGGWTGMVDGWYGYHHQNEQGSGYAADLKSTQNAIDEITNKVNSVIEKMNTQFTAVGKEFNHLEKRIENLNKKVDDGFLDIWTYNAELLVLLENERTLDYHDSNVKNLYEKVRSQLKNNAKEIGNGCFEFYHKCDNTCMESVKNGTYDYPKYSEEAKLNREEIDGVKLESTRIYQILAIYSTVASSLVLVVSLGAISFWMCSNGSLQCRICI

SEQ ID NO: 5075 - protein, 566 aa, Artificial Sequence; identical to SEQ ID NO: 2911
  derived and/or modified protein sequence (wt) from hemagglutinin__InfluenzaA__ADI49240

SEQ ID NO: 5076 - protein, 566 aa, Artificial Sequence; identical to SEQ ID NO: 2911
  derived and/or modified protein sequence (wt) from hemagglutinin__InfluenzaA__ADI49260

SEQ ID NO: 5077 - protein, 566 aa, Artificial Sequence
  derived and/or modified protein sequence (wt) from hemagglutinin__InfluenzaA__ADI49270
MKAILVVLLYTFATANADTLCIGYHANNSTDTVDTVLEKNVTVTHSVNLLEDKHNGKLCKLRGVAPLHLGKCNIAGWILGNPECESLSTASSWSYIVETSSSDNGTCYPGDFIDYEELREQLSSVSSFERFEIFPKTSSWPNHDSNKGVTAACPHAGAKSFYKNLIWLVKKGNSYPKLSKSYINDKGKEVLVLWGIHHPSTSADQQSLYQNADAYVFVGTSRYSKKFKPEIAIRPKVRDQEGRMNYYWTLVEPGDKITFEATGNLVVPRYAFAMERNAGSGIIISDTPVHDCNTTCQTPKGAINTSLPFQNIHPITIGKCPKYVKSTKLRLATGLRNVPSIQSRGLFGAIAGFIEGGWTGMVDGWYGYHHQNEQGSGYAADLKSTQNAIDEITNKVNSVIEKMNTQFTAVGKEFNHLEKRIENLNKKVDDGFLDIWTYNAELLVLLENERTLDYHDSNVKNLYEKVRSQLKNNAREIGNGCFEFYHKCDNTCMESVKNGTYDYPKYSEEAKLNREEIDGVKLESTRIYQILAIYSTVASSLVLVVSLGAISFWMCSNGSLQCRICI

SEQ ID NO: 5078 - protein, 566 aa, Artificial Sequence; identical to SEQ ID NO: 2911
  derived and/or modified protein sequence (wt) from hemagglutinin__InfluenzaA__ADI49280

SEQ ID NO: 5079 - protein, 566 aa, Artificial Sequence; identical to SEQ ID NO: 2911
  derived and/or modified protein sequence (wt) from hemagglutinin__InfluenzaA__ADI49312

SEQ ID NO: 5080 - protein, 566 aa, Artificial Sequence; identical to SEQ ID NO: 2911
  derived and/or modified protein sequence (wt) from hemagglutinin__InfluenzaA__ADI49322

SEQ ID NO: 5081 - protein, 566 aa, Artificial Sequence; identical to SEQ ID NO: 2911
  derived and/or modified protein sequence (wt) from hemagglutinin__InfluenzaA__ADI49332

SEQ ID NO: 5082 - protein, 566 aa, Artificial Sequence; identical to SEQ ID NO: 3238
  derived and/or modified protein sequence (wt) from hemagglutinin__InfluenzaA__ADI49342

SEQ ID NO: 5083 - protein, 566 aa, Artificial Sequence; identical to SEQ ID NO: 2911
  derived and/or modified protein sequence (wt) from hemagglutinin__InfluenzaA__ADI49352

SEQ ID NO: 5084 - protein, 566 aa, Artificial Sequence; identical to SEQ ID NO: 2669
  derived and/or modified protein sequence (wt) from hemagglutinin__InfluenzaA__ADI49362

SEQ ID NO: 5085 - protein, 566 aa, Artificial Sequence; identical to SEQ ID NO: 4221
  derived and/or modified protein sequence (wt) from hemagglutinin__InfluenzaA__ADI49382

SEQ ID NO: 5086 - protein, 566 aa, Artificial Sequence; identical to SEQ ID NO: 3022
  derived and/or modified protein sequence (wt) from hemagglutinin__InfluenzaA__ADI49392

SEQ ID NO: 5087 - protein, 566 aa, Artificial Sequence; identical to SEQ ID NO: 2656
  derived and/or modified protein sequence (wt) from hemagglutinin__InfluenzaA__ADI49717

SEQ ID NO: 5088 - protein, 566 aa, Artificial Sequence
  derived and/or modified protein sequence (wt) from hemagglutinin__InfluenzaA__ADI49727
MKAILVVLLYTFATANADTLCIGYHANNSTDTVDTVLEKNVTVTHSVNLLEDKHNGKLCKLRGVAPLHLGKCNIAGWILGNPECESLSTASSWSYIVETSSSDNGTCYPGDFIDYEELREQLSSVSSFERFEIFPKTSSWPNHDSNKGVTAACPHAGAKSFYKNLIWLVKKGNSYPKLSKSYINDKGKEVLVLWGIHHPSTSADQQSLYQNADAYVFVGSSRYSKKFKPEIAIRPKVRDQEGRMNYYWTLVEPGDKITFEATGNLVVPRYAFAMERNAGSGIIISDTPVHDCNTTCQTPKGAINTSLPFQNIHPITIGKCPKYVKSTKLRLATGLRNVPSIQSRGLFGAIAGFIEGGWTGMVDGWYGYHHQNEQGSGYAADLKSTQNAIDEITNKVNSIIEKMNTQFTAVGKEFNHLEKRIENLNKKVDDGFLDIWTYNAELLVLLENERTLDYHDSNVKNLYEKVRSQLKNNAKEIGNGCFEFYHKCDNTCMESVKNGTYDYPKYSEEAKLNREEIDGVKLESTRIYQILAIYSTVASSLVLVVSLGAISFWMCSNGSLQCRICI

SEQ ID NO: 5089 - protein, 566 aa, Artificial Sequence; identical to SEQ ID NO: 2656
  derived and/or modified protein sequence (wt) from hemagglutinin__InfluenzaA__ADI49737

SEQ ID NO: 5090 - protein, 566 aa, Artificial Sequence; identical to SEQ ID NO: 2656
  derived and/or modified protein sequence (wt) from hemagglutinin__InfluenzaA__ADI49747

SEQ ID NO: 5091 - protein, 566 aa, Artificial Sequence; identical to SEQ ID NO: 2656
  derived and/or modified protein sequence (wt) from hemagglutinin__InfluenzaA__ADI49757

SEQ ID NO: 5092 - protein, 566 aa, Artificial Sequence; identical to SEQ ID NO: 2656
  derived and/or modified protein sequence (wt) from hemagglutinin__InfluenzaA__ADI49767

SEQ ID NO: 5093 - protein, 566 aa, Artificial Sequence
  derived and/or modified protein sequence (wt) from hemagglutinin__InfluenzaA__ADI49777
MKAILVVLLYTFATANADTLCIGYHANNSTDTVDTVLEKNVTVTHSVNILEDKHNGKLCKLRGVAPLHLGKCNIAGWILGNPECESLSTASSWSYIVETSSSDNGTCYPGDFIDYEELREQLSSVSSFERFEIFPKTSSWPNHDSNKGVTAACPHAGAKSFYKNLIWLVKKGNSYPKLSKSYINDKGKEVLVLWGIHHPSTSTDQQSLYQNADAYVFVGSSRYSKKFKPEIAIRPKVRDQEGRMNYYWTLVEPGDKITFEATGNLVVPRYAFAMERNAGSGIIISDTPVHDCNTTCQTPKGAINTSLPFQNIHPITIGKCPKYVKSTKLRLATGLRNVPSIQSRGLFGAIAGFIEGGWTGMVDGWYGYHHQNEQGSGYAADLKSTQNAIDEITNKVNSVIEKMNTQFTAVGKEFNHLEKRIENLNKKVDDGFLDIWTYNAELLVLLENERTLDYHDSNVKNLYEKVRSQLKNNAKEIGNGCFEFYHKCDNTCMESVKNGTYDYPKYSEEAKLNREEIDGVKLESTRIYQILAIYSTVASSLVLVVSLGAISFWMCSNGSLQCRICI

SEQ ID NO: 5094 - protein, 566 aa, Artificial Sequence
  derived and/or modified protein sequence (wt) from hemagglutinin__InfluenzaA__ADI49787
MKAILVVLLYTFATANADTLCIGYHANNSTDTVDTVLEKNVTVTHSVNLLEDKHNGKLCKLRGVAPLHLGKCNIAGWILGNPECESISTASSWSYIVETSSSDNGTCYPGDFIDYEELREQLSSVSSFERFEIFPKTSSWPNHDSNKGVTAACPHAGAKSFYKNLIWLVKKGNSYPKLSKSYINDKGKEVLVLWGIHHPSTSADQQSLYQNADAYVFVGSSRYSKKFKPEIAIRPKVRDQEGRMNYYWTLVEPGDKITFEATGNLVVPRYAFAMERNAGSGIIISDTPVHDCNTTCQTPKGAINTSLPFQNIHPITIGKCPKYVKSTKLRLATGLRNVPSIQSRGLFGAIAGFIEGGWTGMVDGWYGYHHQNEQGSGYAADLKSTQNAIDEITNKVNSVIEKMNTQFTAVGKEFNHLEKRIENLNKKVDDGFLDIWTYNAELLVLLENERTLDYHDSNVKNLYEKVRSQLKNNAKEIGNGCFEFYHKCDNTCMESVKNGTYDYPKYSEEAKLNREEIDGVKLESTRIYQILAIYSTVASSLVLVVSLGAISFWMCSNGSLQCRICI

SEQ ID NO: 5095 - protein, 566 aa, Artificial Sequence; identical to SEQ ID NO: 4004
  derived and/or modified protein sequence (wt) from hemagglutinin__InfluenzaA__ADI49822

SEQ ID NO: 5096 - protein, 566 aa, Artificial Sequence
  derived and/or modified protein sequence (wt) from hemagglutinin__InfluenzaA__ADI50027
MKAILVVLLYTFATANADTLCIGYHANNSTDTVDTVLEKNVTVTHSVNLLEDKHNGKLCKLRGVAPLHLGKCNIAGWILGNPECESLSTASSWSYIVETSSSDNGTCYPGDFIDYEELREQLSSVSSFERFEIFPKTSSWPNHDSNKGVTAACPHAGAKSFYKNLIWLVKKGNSYPKLSKSYINDKGKEVLVLWGIHHPSTSADQQSLYQNADAYVFVGSSRYSKKFKPEIAIRPKVRDQEGRMKYYWTLVEPGDKITFEATGNLVVPRYAFAMERNAGSGIIISDTPVHDCNTTCQTPKGAINTSLPFQNIHPITIGKCPKYVKSTKLRLATGLRNVPSIQSRGLFGAIAGFIEGGWTGMVDGWYGHHHQNEQGSGYAADLKSTQNAIDEITNKVNSVIEKMNTQFTAVGKEFNHLEKRIENLNKKVDDGFLDIWTYNAELLVLLENERTLDYHDSNVKNLYEKVRSQLKNNAKEIGNGCFEFYHKCDNTCMESVKNGTYDYPKYSEEAKLNREEIDGIKLESTRIYQILAIYSTVASSLVLVVSLGAISFWMCSNGSLQCRICI

SEQ ID NO: 5097 - protein, 566 aa, Artificial Sequence
  derived and/or modified protein sequence (wt) from hemagglutinin__InfluenzaA__ADI52834
MKAILVVLLYTFATANADTLCIGYHANNSTDTVDTVLEKNVTVTHSVNILEDKHNGKLCKLRGVAPLHLGKCNIAGWILGNPECESLSTASSWSYIVETSSSDNGTCYPGDFIDYEELREQLSSVSSFERFEIFPKTSSWPNHDSNKGVTAACPHAGAKSFYKNLIWLVKKGNSYPKLSKSYINDKGKEVLVLWGIHHPPTSADQQSLYQNADAYVFVGSSRYSKKFKPEIAIRPKVRDQEGRMNYYWTLVEPGDKITFEATGNLVVPRYAFAMERNAGSGIIISDTPVHDCNTTCQTPKGAINTSLPFQNIHPITIGKCPKYVKSTKLRLATGLRNVPSIQSRGLFGAIAGFIEGGWTGMVDGWYGYHHQNEQGSGYAADLKSTQNAIDEITNKVNSVIEKMNTQFTAVGKEFNHLEKRIENLNKKVDDGFLDIWTYNAELLVLLENERTLDYHDSNVKNLYEKVRSQLKNNAKEVGNGCFEFYHKCDNTCMESVKNGTYDYPKYSEEAKLNREEIDGVKLESTRIYQILAIYSTAASSLVLVVSLGAISFWMCSNGSLQCRICI

SEQ ID NO: 5098 - protein, 566 aa, Artificial Sequence
  derived and/or modified protein sequence (wt) from hemagglutinin__InfluenzaA__ADI52835
MEAILVVLLYTFATANADTLCIGYHANNSTDTVDTVLEKNVTVTHSVNLLEDKHNGKLCKLRGVAPLHLGKCNIAGWILGNPECESLSTASSWSYIVETSSSDNGTCYPGDFIDYEELREQLSSVSSFERFEIFPKTSSWPNHDSNKGVTAACPHAGAKSFYKNLIWLVKKGNSYPKLSKSYINDKGKEVLVLWGIHHPPTSADQQSLYQNADAYVFVGSSKYSKKFKPEIAIRPKVRDQEGRMNYYWTLVEPGDKITFEATGNLVVPRYAFAMERNAGSGIIISDTPVHDCNTTCQTPKGAINTSLPFHNIHPITIGKCPKYVKSTKLRLATGLRNVPSIQSRGLFGAIAGFIEGGWTGMVDGWYGYHHQNEQGSGYAADLKSTQNAIDEITNKVNSVIEKMNTQFTAVGKEFNHLEKRIENLNKKVDDGFLDIWTYNAELLVLLENERTLDYHDSNVKNLYEKVRSQLKNNAKEIGNGCFEFYHKCDNTCMESVKNGTYDYPKYSEEAKLNREEIDGVKLESTKIYQILAIYSTVASSLVLVVSLGAISFWMCSNGSLQCRICI

SEQ ID NO: 5099 - protein, 566 aa, Artificial Sequence
  derived and/or modified protein sequence (wt) from hemagglutinin__InfluenzaA__ADI52836
MEAILVVLLYTFATANADTLCIGYHANNSTDTVDTVLEKNVTVTHSVNLLEDKHNGKLCKLRGVAPLHLGKCNIAGWILGNPECESLSTASSWSYIVETSSSDNGTCYPGDFIDYEELREQLSSVSSFERFEIFPKTSSWPNHDSNKGVTAACPHAGAKSFYKNLIWLVKKENSYPKLSKSYINDKGKEVLVLWGIHHPSTSADQQRLYQNADAYVFVGSSKYSKKFKPEIAIRPKVRDQEGRMNYYWTLVEPGDKITFEATGNLVVPRYAFAMERNAGSGIIISDTPVHDCNTTCQTPKGAINTSLPFHNIHPITIGKCPKYVKSTKLRLATGLRNVPSIQSRGLFGAIAGFIEGGWTGMVDGWYGYHHQNEQGSGYAADLKSTQNAIDEITNKVNSVIEKMNTQFTAVGKEFNHLEKRIENLNKKVDDGFLDIWTYNAELLVLLENERTLDYHDSNVKNLYEKVRSQLKNNAKEIGNGCFEFYHKCDNTCMESVKNGTYDYPKYSEEAKLNREEIDGVKLESTKIYQILAIYSTVASSLVLVVSLGAISFWMCSNGSLQCRICI

SEQ ID NO: 5100 - protein, 566 aa, Artificial Sequence
  derived and/or modified protein sequence (wt) from hemagglutinin__InfluenzaA__ADI52837
MEAILVVLLYTFATANADTLCIGYHANNSTDTVDTVLEKNVTVTHSVNLLEVKHNGKLCKLRGVAPLHLGKCNIAGWILGNPECESLSTASSWSYIVETSSSDNGTCYPGDFIDYEELREQLSSVSSFERFEIFPKTSSWPNHDSNKGVTAACPHAGAKSFYKNLIWLVKKGNSYPKLSKSYINDKGKEVLVLWGIHHPSTSADQQSLYQNADAYVFVGSSKYSKKFKPEIAIRPKVRDQEGRMNYYWTLVEPGDKITFEANGNLVVPRYAFAMERNAGSGIIISDTPVHDCNTTCQTPKGAINTSLPFHNIHPITIGKCPKYVKSTKLRLATGLRNVPSIQSRGLFGAIAGFIEGGWTGMVDGWYGYHHQNEQGSGYAADLKSTQNAIDEITNKVNSVIEKMNTQFTAVGKEFNHLEKRIENLNKKVDDGFLDIWTYNAELLVLLENERTLDYHDSNVKNLYEKVRSQLKNNAKEIGNGCFEFYHKCDNTCMESVKNGTYDYPKYSEEAKLNREEIDGVKLESTKIYQILAIYSTVASSLVLVVSLGAISFWMCSNGSLQCRICI

SEQ ID NO: 5101 - protein, 566 aa, Artificial Sequence; identical to SEQ ID NO: 3467
  derived and/or modified protein sequence (wt) from hemagglutinin__InfluenzaA__ADI72915

SEQ ID NO: 5102 - protein, 566 aa, Artificial Sequence; identical to SEQ ID NO: 3467
  derived and/or modified protein sequence (wt) from hemagglutinin__InfluenzaA__ADI72916

SEQ ID NO: 5103 - protein, 566 aa, Artificial Sequence; identical to SEQ ID NO: 3467
  derived and/or modified protein sequence (wt) from hemagglutinin__InfluenzaA__ADI72917

SEQ ID NO: 5104 - protein, 566 aa, Artificial Sequence
  derived and/or modified protein sequence (wt) from hemagglutinin__InfluenzaA__ADI72918
MKAILVVLLYTFATANADTLCIGYHANNSTDTVDTVLEKNVTVTHSVNLLEDKHNGKLCKLRGVAPLHLGKCNIAGWILGNPECESLSTASSWSYIVETSSSDNGTCYPGDFIDYEELREQLSSVSSFERFEIFPKTSSWPNHDPNKGVTAACPHAGAKSFYKNLIWLVKKGNSYPKLSKSYINDRGKEVLVLWGIHHPSTSADQQSLYQNADAYVFVGTSRYSKKFKPEIAIRPKVRDQEGRMNYYWTLVEPGDKITFEATGNLVVPRYAFAMERNAGSGIIISDTPVHDCNTTCQTPKGAINTSLPFQNIHPITIGKCPKYVKSTKLRLATGLRNVPSIQSRGLFGAIAGFIEGGWTGMVDGWYGYHHQNEQGSGYAADLKSTQNAIDEITNKVNSVIEKMNTQFTAVGKEFNHLEKRIENLNKKVDDGFLDIWTYNAELLVLLENERTLDYHDSNVKKLYEKVRSQLKNNAKEIGNGCFEFYHKCDNTCMESVKNGTYDYPKYSEEAKLNREEIDGVKLESTRIYQILAIYSTVASSLVLVVSLGAISFWMCSNGSLQCRICI

SEQ ID NO: 5105 - protein, 566 aa, Artificial Sequence; identical to SEQ ID NO: 3467
  derived and/or modified protein sequence (wt) from hemagglutinin__InfluenzaA__ADI72919

SEQ ID NO: 5106 - protein, 566 aa, Artificial Sequence; identical to SEQ ID NO: 3467
  derived and/or modified protein sequence (wt) from hemagglutinin__InfluenzaA__ADI72920

SEQ ID NO: 5107 - protein, 566 aa, Artificial Sequence
  derived and/or modified protein sequence (wt) from hemagglutinin__InfluenzaA__ADI72921
MKAILVVLLYTFATANADTLCIGYHANNSTDTVDTVLEKNVTVTHSVNLLEDKHNGKLCKLRGVAPLHLGKCNIAGWILGNPECESLSTASSWSYIVETSSSDNGTCYPGDFIDYEELREQLSSVSSFERFEIFPKTSSWPNHDPNKGVTAACPHAGAKSFYKNLIWLVKKGNSYPKLSKSYINDKGKEVLVLWGIHHPSTSADQQSLYQNADAYVFVGTSRYSKKFKPEIAIRPKVRDQEGRMNYYWTLVEPGDKITFEATGNLVVPRYAFAMERNAGSGIIISDTPVHDCNTTCQTPKGAINTSLPFQNIHPITIGKCPKYVKSTKLRLATGLRNVPSIQSRGLFGAIAGFIEGGWTGMVDGWYGYHHQNEQGSGYAADLKSTQNALDEITNKVNSVIEKMNTQFTAVGKEFNHLEKRIENLNKKVDDGFLDIWTYNAELLVLLENERTLDYHDSNVKNLYEKVRSQLKNNAKEIGNGCFEFYHKCDNTCMESVKNGTYDYPKYSEEAKLNREEIDGVKLESTRIYQILAIYSTVASSLVLVVSLGAISFWMCSNGSLQCRICI

SEQ ID NO: 5108 - protein, 566 aa, Artificial Sequence; identical to SEQ ID NO: 2669
  derived and/or modified protein sequence (wt) from hemagglutinin__InfluenzaA__ADI72922

SEQ ID NO: 5109 - protein, 566 aa, Artificial Sequence
  derived and/or modified protein sequence (wt) from hemagglutinin__InfluenzaA__ADI72923
MKAILVVLLYTFATSNADTLCIGYHANNSTDTVDTVLEKNVTVTHSVNLLEDKHNGKLCKLRGVAPLHLGKCNIAGWILGNPECESLSTASSWSYIVETSSSDNGTCYPGDFIDYEELREQLSSVSSFERFEIFPKTSSWPNHDPNKGVTAACPHAGAKSFYKNLIWLVKKGNSYPKLSKSYINDKGKEVLVLWGIHHPSTSADQQSLYQNADAYVFVGTSRYSKKFKPEIAIRPKVRDQEGRMNYYWTLVEPGDKITFEATGNLVVPRYAFAMERNAGPGIIISDTPVHDCNTTCQTPKGAINTSLPFQNIHPITIGKCPKYVKSTKLRLATGLRNVPSIQSRGLFGAIAGFIEGGWTGMVDGWYGYHHQNEQGSGYAADLKSTQNAIDEITNKVNSVIEKMNTQFTAVGKEFNHLEKRIENLNKKVDDGFLDIWTYNAELLVLLENERTLDYHDSNVKNLYEKVRSQLKNNAKEIGNGCFEFYHKCDNTCMESVKNGTYDYPKYSEEAKLNREEIDGVKLESTRIYQILAIYSTVASSLVLVVSLGAISFWMCSNGSLQCRICI

SEQ ID NO: 5110 - protein, 566 aa, Artificial Sequence; identical to SEQ ID NO: 3467
  derived and/or modified protein sequence (wt) from hemagglutinin__InfluenzaA__ADI72924

SEQ ID NO: 5111 - protein, 566 aa, Artificial Sequence; identical to SEQ ID NO: 2669
  derived and/or modified protein sequence (wt) from hemagglutinin__InfluenzaA__ADI72925

SEQ ID NO: 5112 - protein, 566 aa, Artificial Sequence
  derived and/or modified protein sequence (wt) from hemagglutinin__InfluenzaA__ADI72926
MKAILVVLLYTFATANADTLCIGYHANNSTDTVDTVLEKNVTVTHSVNLLEDKHNGKLCKLRGVAPLHLGKCNIAGWILGNPECESLSTASSWSYIVETSSSDNGTCYPGDFIDYEELREQLSSVSSFERFEIFPKTSSWPNHDPNKGVTAACPHAGAKSFYKNLIWLVKKGNSYPKLSKSYINDKGKEVLVLWGIHHPSTSADQQSLYQNADAYVFVGTSGYSKKFKPEIAIRPKVRDQEGRMNYYWTLVEPGDKITFEATGNLVVPRYAFAMERNAGSGIIISDTPVHDCNTTCQTPKGAINTSLPFQNIHPITIGKCPKYVKSTKLRLATGLRNVPSIQSRGLFGAIAGFIEGGWTGMVDGWYGYHHQNEQGSGYAADLKSTQNAIDEITNKVNSVIEKMNTQFTAVGKEFNHLEKRIENLNKKVDDGFLDIWTYNAELLVLLENERTLDYHDSNVKNLYEKVRSQLKNNAKEIGNGCFEFYHKCDNTCMESVKNGTYDYPKYSEEAKLNREEIDGVKLESTRIYQILAIYSTVASSLVLVVSLGAISFWMCSNGSLQCRICI

SEQ ID NO: 5113 - protein, 566 aa, Artificial Sequence
  derived and/or modified protein sequence (wt) from hemagglutinin__InfluenzaA__ADI72927
MKAILVVLLYTFATANADTLCIGYHANNSTDTVDTVLEKNVTVTHSVNLLEDKHNGKLCKLRGVAPLHLGKCNIAGWILGNPECESLSTASSWSYIVETSSSDNGTCYPGDFIDYEELREQLSSVSSFERFEIFPKTSSWPNHDPNKGVTAACPHAGAKSFYKNLIWLVKKGNSYPKLSKSYINDKGKEVLVLWGIHHPSTSADQQSLYQNADAYVFVGTSRYSKKFKPEIAIRPKVRDQEGRMNYYWTLVEPGDKITFEATGNLVVPRYAFAMERNAGSGIITSDTPVHDCNTTCQTPKGAINTSLPFQNIHPITIGKCPKYVKSTKLRLATGLRNVPSIQSRGLFGAIAGFIEGGWTGMVDGWYGYHHQNEQGSGYAADLKSTQNAIDEITNKVNSVIEKMNTQFTAVGKEFNHLEKRIENLNKKVDDGFLDIWTYNAELLVLLENERTLDYHDSNVKNLYEKVRSQLKNNAKEIGNGCFEFYHKCDNTCMESVKNGTYDYPKYSEEAKLNREEIDGVKLESTRIYQILAIYSTVASSLVLVVSLGAISFWMCSNGSLQCRICI

SEQ ID NO: 5114 - protein, 566 aa, Artificial Sequence
  derived and/or modified protein sequence (wt) from hemagglutinin__InfluenzaA__ADI72928
MKAILVVLLYTFATANADTLCIGYHANNSTDTVDTILEKNVTVTHSVNLLEDKHNGKLCKLRGVAPLHLGKCNIAGWILGNPECESLSTASSWSYIVETSSSDNGTCYPGDFIDYEELREQLSSVSSFERFEIFPKTSSWPNHDPNKGVTAACPHAGAKSFYKNLIWLVKKGNSYPKLSKSYINDKGKEVLVLWGIHHPSTSADQQSLYQNADAYVFVGTSRYSKKFKPEIAIRPKVRDQEGRMNYYWTLVEPGDKITFEATGNLVVPRYAFAMERNAGSGIIISDTPVHDCNTTCQTPKGAINTSLPFQNIHPITIGKCPKYVKSTKLRLATGLRNVPSIQSRGLFGAIAGFIEGGWTGMVDGWYGYHHQNEQGSGYAADLKSTQNAIDEITNKVNSVIEKMNTQFTAVGKEFNHLEKRIENLNKKVDDGFLDIWTYNAELLVLLENERTLDYHDSNVKNLYEKVRSQLKNNAKEIGNGCFEFYHKCDNTCMESVKNGTYDYPKYSEEAKLNRKEIDGVKLESTRIYQILAIYSTVASSLVLVVSLGAISFWMCSNGSLQCRICI

SEQ ID NO: 5115 - protein, 566 aa, Artificial Sequence; identical to SEQ ID NO: 2669
  derived and/or modified protein sequence (wt) from hemagglutinin__InfluenzaA__ADI72929

SEQ ID NO: 5116 - protein, 566 aa, Artificial Sequence; identical to SEQ ID NO: 2669
  derived and/or modified protein sequence (wt) from hemagglutinin__InfluenzaA__ADI72930

SEQ ID NO: 5117 - protein, 566 aa, Artificial Sequence
  derived and/or modified protein sequence (wt) from hemagglutinin__InfluenzaA__ADI72931
MKAILVVLLYTFATANADTLCIGYHANNSTDTVDTVLEKNVTVTHSVNLLEDKHNGKLCKLRGVAPLHLGKCNIAGWILGNPECESLSTASSWSYIVETSSSDNGTCYPGDFIDYEELREQLSSVSSFERFEIFPKTSSWPNHDPNKGVTAACPHAGAKSFYKNLIWLVKKGNSYPKLSKSYINDKGKEVLVLWGIHHPSTSADQQSLYQNADAYVFVGTSRYSKKFKPEIAIRPKVRDQEGRMNYYWTLVEPGDKITFEATGNLVVPRYAFAMERNAGSGIIISDTPVHDCNTTCQTPKGAINTSLPFQNIHPITIGKCPKYVKSTKLRLATGLRNVPSIQSRGLFGAIAGFIEGGWTGMVDGWYGYHHQNEQGSGYAADLKSTQNAIDEITNKVNSVIEKMNTQFTAVGKEFNHLEKRIENLNKKVDDGFLDIWTYNAELLVLLENERTLDYHDSNVKNLYEKVRSQLKNNAKEIGNGCFEFYHKCDNTCMESVKNGTYDYPKYSEEAKLNREEIDGIKLESTRIYQILAIYSTVASSLVLVVSLGAISFWMCSNGSLQCRICI

SEQ ID NO: 5118 - protein, 566 aa, Artificial Sequence; identical to SEQ ID NO: 4325
  derived and/or modified protein sequence (wt) from hemagglutinin__InfluenzaA__ADI72932

SEQ ID NO: 5119 - protein, 565 aa, Artificial Sequence
  derived and/or modified protein sequence (wt) from hemagglutinin__InfluenzaA__ADI75818
MKVKLLVLLCTFTATYADTICIGYHANNSTDTVDTVLEKNVTVTHSVNLLENSHNGKLCLLKGIAPLQLGNCSVAGWILGNPECELLISKESWSYIVEKPNPENGTCYPGHFADYEELREQLSSVSSFERFEIFPKESSWPNHTVTGVSASCSHNGESSFYKNLLWLTEKNGLYPNLSKSYANNKEKEVLVLWGVHHPPSISDQKTLYHTENAYVSVVSSHYSRKFTPEIAKRPKVRDQEGRINYYWTLLEPGDTIIFEANGNLIAPRYAFALSRGFGSGIINSNAPMDKCDAKCQTPQGAINSSLPFQNVHPVTIGECPKYVRSAKLRMVTGLRNIPSIQSRGLFGAIAGFIEGGWTGMVDGWYGYHHQNEQGSGYAADQKSTQNAINGITNKVNSVIEKMNTQFTAVGKEFNKLERRMENLNKKVDDGFIDIWTYNAELLVLLENERTLDFHDSNVKNLYEKVKNQLKNNAKEIGNGCFEFYHKCNDECMESVKNGTYDYPKYSEESKLNREKIDGVKLESMGVYQILAIYSTVASSLVLLVSLGAISFWMCSNGSLQCRICI

SEQ ID NO: 5120 - protein, 565 aa, Artificial Sequence
  derived and/or modified protein sequence (wt) from hemagglutinin__InfluenzaA__ADI75851
MKVKLLVLLCTFTATYADTICIGYHANNSTDTVDTVLEKNVTVTHSVNLLENSHNGKLCLLKGIAPLQLGNCSVAGWILGNPECGLLISKESWSYIVEKPNPENGTCYPGHFADYEELREQLSSVSSFERFEIFPKESSWPNHTVTGVSASCSHNGESSFYRNLLWLTGKNGLYPNLSKSYANNKEKEVLVLWGVHHPPNIVDQKTLYRTENAYVSVVSSHYSRKFTPEIAKRPKVRDQEGRINYYWTLLEPGDTIIFEANGNLIAPRYAFALSRGFGSGIINSNAPMGKCDAKCQTPQGAINSSLPFQNVHPVTIGECPKYVRSAKLRMVTGLRNIPSIQSRGLFGAIAGFIEGGWTGMVDGWYGYHHQNEQGSGYAADQKSTQNAINGITNKVNSVIEKMNTQFTAVGKEFNKLERRMENLNKKVDDGFIDIWTYNAELLVLLENERTLDFHDSNVKNLYEKVKSQLKNNAKEIGNGCFEFYHKCNDECMESVKNGTYDYPKYSEESKLNREKIDGVKLESMGVYQILAIYSTVASSLVLLVSLGAISFWMCSNGSLQCRICI

SEQ ID NO: 5121 - protein, 566 aa, Artificial Sequence; identical to SEQ ID NO: 2434
  derived and/or modified protein sequence (wt) from hemagglutinin__InfluenzaA__ADI75884

SEQ ID NO: 5122 - protein, 566 aa, Artificial Sequence; identical to SEQ ID NO: 2434
  derived and/or modified protein sequence (wt) from hemagglutinin__InfluenzaA__ADI75917

SEQ ID NO: 5123 - protein, 565 aa, Artificial Sequence
  derived and/or modified protein sequence (wt) from hemagglutinin__InfluenzaA__ADI77349
MKVKLLVLLCTFTATYADTICIGYHANNSTDTVDTVLEKNVTVTHSVNLLENSHNGKLCLLKGIAPLQLGNCSVAGWILGNPECELLISKESWSYIVEKPNPENGTCYPGHFADYEELREQLSSVSSFERFEIFPKESSWPNHTVTGVSASCSHNGENSFYRNLLWLTGKNGLYPNLSKSYANNKEKEVLILWGVHHPPNMADQKTLYHTENAYVSVVSSHYSRKFTPEIAKRPKVRDQEGRINYYWTLLEPGDTIIFEANGNLIAPRYAFALSRGFGSGIINSNAPMDKCDTKCQTPQGAINSSLPFQNVHPVTIGECPKYVRSAKLRMVTGLRNIPSIQSRGLFGAIAGFIEGGWTGMVDGWYGYHHQNEQGSGYAADQKSTQNAINGITNKVNSVIEKMNTQFTAVGKEFNKLERRMENLNKKVDDGFIDIWTYNAELLVLLENERTLDFHDSNVKNLYEKVKSQLKNNAKEIGNGCFEFYHKCNDECMESVKNGTYDYPKYSEESKLNREKIDGVKLESMGVYQILAIYSTVASSLVLLVSLGAISFWMCSNGSLQCRICI

SEQ ID NO: 5124 - protein, 566 aa, Artificial Sequence; identical to SEQ ID NO: 2669
  derived and/or modified protein sequence (wt) from hemagglutinin__InfluenzaA__ADI77360

SEQ ID NO: 5125 - protein, 566 aa, Artificial Sequence
  derived and/or modified protein sequence (wt) from hemagglutinin__InfluenzaA__ADI99498
MKTILVVLLYTFATANADTLCIGYHANNSTDTVDTVLEKNVTVTHSVNLLEDKHNGKLCKLRGVAPLHLGKCNIAGWILGNPECESLSTASSWSYIVETSSSDNGTCYPGDFIDYEELREQLSSVSSFERFEIFPKTSSWPNHDSNKGVTAACPHAGAKSFYKNLIWLVKKGNSYPKLNKSYINDKGKEVLVLWGIHHPSTSADQQSLYQNADAYVFVGTSRYSKKFKPEIAIRPKVRGQEGRMNYYWTLVKPGDKITFEATGNLVVPRYAFAMERNAGSGIIISDTPVHDCNTTCQTPKGAINTSLPFQNIHPITIGKCPKYVKSTKLRLATGLRNVPSIQSRGLFGAIAGFIEGGWTGMVDGWYGYHHQNEQGSGYAADLKSTQNAIDEITNKVNSVIEKMNTQFTAVGKEFNHLEKRIENLNKKVDDGFLDIWTYNAELLVLLENERTLDYHDSNVKNLYEKVRSQLKNNAKEIGNGCFEFYHKCDNTCMESVKNGTYDYPKYSEEAKLNREEIDGVKLESTRIYQILAIYSTVASSLVLVVSLGAISFWMCSNGSLQCRICI

SEQ ID NO: 5126 - protein, 566 aa, Artificial Sequence
  derived and/or modified protein sequence (wt) from hemagglutinin__InfluenzaA__ADI99560
MKAILVVLLYTFATANADTLCIGYHANNSTDTVDTVLEKNVTVTHSVNLLEDKHNGKLCKLRGVAPLHLGKCNIAGWILGNPECESLSTASSWSYIVETSSSDNGTCYPGDFINYEELREQLSSVSSFERFEIFPKTSSWPNHDSNKGVTAACPHAGAKSFYKNLIWLVKKGNSYPKLSKSYINDKGKEVLVLWGIHHPSTSADQQSLYQNADAYVFVGTSRYSKKFKPEIAIRPKVRDQEGRMNYYWTLVEPGDKITFEATGNLVVPRYAFAMERNAGSGIIISDTPVHDCNTTCQTPKGAINTSLPFQNIHPITIGKCPKYVKSTKLRLATGLRNVPSIQSRGLFGAIAGFIEGGWTGMVDGWYGYHHQNEQGSGYAADLKSTQNAIDKITNKVNSVIEKMNTQFTAVGKEFNHLEKRIENLNKKVDDGFLDIWTYNAELLVLLENERTLDYHDSNVKNLYEKVRSQLKNNAKEIGNGCFEFYHKCNNTCMESVKNGTYDYPKYSEEAKLNREEIDGVKLESTRIYQILAIYSTVASSLVLVVSLGAISFWMCSNGSLQCRICI

SEQ ID NO: 5127 - protein, 566 aa, Artificial Sequence; identical to SEQ ID NO: 5126
  derived and/or modified protein sequence (wt) from hemagglutinin__InfluenzaA__ADI99570

SEQ ID NO: 5128 - protein, 566 aa, Artificial Sequence; identical to SEQ ID NO: 5126
  derived and/or modified protein sequence (wt) from hemagglutinin__InfluenzaA__ADI99580

SEQ ID NO: 5129 - protein, 566 aa, Artificial Sequence; identical to SEQ ID NO: 4282
  derived and/or modified protein sequence (wt) from hemagglutinin__InfluenzaA__ADI99590

SEQ ID NO: 5130 - protein, 566 aa, Artificial Sequence
  derived and/or modified protein sequence (wt) from hemagglutinin__InfluenzaA__ADI99610
MKAILVVLLYTFATANADTLCIGYHANNSTDTVDTVLEKNVTVTHSVNLLEDKHNGKLCKLRGVAPLHLGKCNIAGWILGNPECESLSTASSWSYIVETSSSDNGTCYPGDFINYEELREQLSSVSSFERFEIFPKTSSWPNHDSNKGVTAACPHAGAKSFYKNLIWLVKKGNSYPKLSKSYINDKGKEILVLWGIHHPSTSADQQSLYQNADAYVFVGTSRYSKKFKPEIAIRPKVRDQEGRMNYYWTLVEPGDKITFEATGNLVVPRYAFAMERNAGSGIIISDTPVHDCNTTCQTPKGAINTSLPFQNIHPITIGKCPKYVKSTKLRLATGLRNVPSIQSRGLFGAIAGFIEGGWTGMVDGWYGYHHQNEQGSGYAADLKSTQNAIDKITNKVNSVIEKMNTQFTAVGKEFNHLEKRIENLNKKVDDGFLDIWTYNAELLVLLENERTLDYHDSNVKNLYEKVRSQLKNNAKEIGNGCFEFYHKCDNTCMESVKNGTYDYPKYSEEAKLNREEIDGVKLESTRIYQILAIYSTVASSLVLVVSLGAISFWMCSNGSLQCRICI

SEQ ID NO: 5131 - protein, 566 aa, Artificial Sequence
  derived and/or modified protein sequence (wt) from hemagglutinin__InfluenzaA__ADI99620
MKAILVVLLYTFATANADTLCIGYHANNSTDTVDTVLEKNVTVTHSVNLLEDKHNGKLCKLRGVAPLHLGKCNIAGWILGNPECESLSTASSWSYIVETSSSDNGTCYPGDFINYEELREQLSSVSSFERFEIFPKTSSWPNHDSNKGVTAACPHAGAKSFYKNLIWLVKKGNSYPKLSKSYINDKGKEVLVLWGIHHPSTSADQQSLYQNADAYVFVGTSRYSKKFKPEIAIRPKVRDQEGRMNYYWTLVEPGDKITFEATGNLVVPRYAFAMERNAGSGIIITDTPVHDCNTTCQTPKGAINTSLPFQNIHPITIGKCPKYVKSTKLRLATGLRNVPSIQSRGLFGAIAGFIEGGWTGMVDGWYGYHHQNEQGSGYAADLKSTQNAIDKITNKVNSVIEKMNTQFTAVGKEFNHLEKRIENLNKKVDDGFLDIWTYNAELLVLLENERTLDYHDSNVKNLYEKVRSQLKNNAKEIGNGCFEFYHKCDNTCMESVKNGTYDYPKYSEEAKLNREEIDGVKLESTRIYQILAIYSTVASSLVLVVSLGAISFWMCSNGSLQCRICI

SEQ ID NO: 5132 - protein, 566 aa, Artificial Sequence
  derived and/or modified protein sequence (wt) from hemagglutinin__InfluenzaA__ADI99630
MKAILVVLLYTFATANADTLCIGYHANNSTDTVDTVLEKNVTVTHSVNLLEDKNNGKLCKLRGVAPLHLGKCNIAGWILGNPECESLSTASSWSYIVETSSSDNGTCYPGNFIDYEELREQLSSVSSFERFEIFPKTSSWPNHDSNKGVTAACPHAGAKSFYKNLIWLVKKGNSYPKLSKSYINDKGKEVLVLWGIHHPSTSADQQSLYQNADAYVFVGTSRYSKKFKPEIAIRPKVRDQEGRMNYYWTLVEPGDKITFEATGNLVVPRYAFAMERNAGSGIIISDTPVHDCNTTCQTPKGAINTSLPFQNIHPITIGKCPKYVKSTKLRLATGLRNVPSIQSRGLFGAIAGFIEGGWTGMVDGWYGYHHQNEQGSGYAADLKSTQNAIDKITNKVNSVIEKMNTQFTAVGKEFNHLEKRIENLNKKVDDGFLDIWTYNAELLVLLENERTLDYHDSNVKNLYEKVRSQLKNNAKEIGNGCFEFYHKCDNTCMESVKNGTYDYPKYSEEAKLNREEIDGVKLESTRIYQILAIYSTVASSLVLVVSLGAISFWMCSNGSLQCRICI

SEQ ID NO: 5133 - protein, 566 aa, Artificial Sequence
  derived and/or modified protein sequence (wt) from hemagglutinin__InfluenzaA__ADI99640
MKAILVVLLYTFATANADTLCIGYHANNSTDTVDTVLEKNVTVTHSVNLLEDKHNGKLCKLRGVAPLHLGKCNIAGWILGNPECESLSTASSWSYIVETSSSDNGTCYPGDFIDYEELREQLSSVSSFERFEIFPKTSSWPNHDSNKGVTAACPHAGAKSFYKNLIWLVKKGNSYPKLSKSYINDKGKEVLVLWGIHHPSTSTDQQSLYQNADSYVFVGTSRYSKKFKPEIAIRPKVRDQEGRMNYYWTLVEPGDKITFEATGNLVVPRYAFAMERNAGSGIIISDTPIHDCNTTCQTPEGAINTSLPFQNIHPITIGKCPKYVKSTKLRLATGLRNVPSIQSRGLFGAIAGFIEGGWTGMVDGWYGYHHQNEQGSGYAADLKSTQNAIDEITNKVNSVIEKMNTQFTAVGKEFNHLEKRIENLNKKVDDGFLDIWTYNAELLVLLENERTLDYHDSNVKNLYEKVRSQLKNNAKEIGNGCFEFYHKCDNTCMESVKNGTYDYPKYSEEAKLNREEIDGVKLESTRIYQILAIYSTVASSLVLVVSLGAISFWMCSNGSLQCRICI

SEQ ID NO: 5134 - protein, 566 aa, Artificial Sequence; identical to SEQ ID NO: 4221
  derived and/or modified protein sequence (wt) from hemagglutinin__InfluenzaA__ADI99660

SEQ ID NO: 5135 - protein, 566 aa, Artificial Sequence
  derived and/or modified protein sequence (wt) from hemagglutinin__InfluenzaA__ADI99670
MKAILVVLLYTFATANADTLCIGYHANNSTDTVDTVLEKNVTVTHSVNILEDKHNGKLCKLRGVAPLHLGKCNIAGWILGNPECESLSTASSWSYIVETSSSDNGTCYPGDFIDYEELREQLSSVSSFERFEIFPKTSSWPNHDSNKGVTAACPHAGAKSFYKNLIWLVKKGNSYPKLSKSYINDKGKEVLVLWGIHHPSTSADQQSLYQNADAYVFVGTSRYSKKFKPEIAIRPKVRDQEGRMNYYWTLVEPGDKITFEATGNLVVPRYAFAMERNAGSGIIISDTPVHDCNTTCQTPKGAINTSLPFQNIHPITIGKCPKYVKSTKLRLATGLRNVPSIQSRGLFGAIAGFIEGGWTGMVDGWYGYHHQNEQGSGYAADLKSTQNAIDEITNKVNSVIEKMNTQFTAVGKEFNHLEKRIENLNKKVDDGFLDIWTYNAELLVLLENERTLDYHDSNVKNLYEKVRSQLKNNAKEIGNGCFEFYHKCDNTCMESVKNGTYGYPKYSEEAKLNREEIDGVKLESTRIYQILAIYSTVASSLVLVVSLGAISFWMCSNGSLQCRICI

SEQ ID NO: 5136 - protein, 566 aa, Artificial Sequence
  derived and/or modified protein sequence (wt) from hemagglutinin__InfluenzaA__ADI99680
MKAILVVLLYTFATANADTLCIGYHANNSTDTVDTVLEKNVTVTHSVNILEDKHNGKLCKLRGVAPLHLGKCNIAGWILGNPECESLSTASSWSYIVETSSSDNGTCYPGDFIDYEELREQLSSVSSFERFEIFPKTSSWPNHDSNKGVTAACPHAGAKSFYKNLIWLVKKGNSYPKLSKSYINDKGKEVLVLWGIHHPSTSADQQSLYQNADAYVFVGTSRYSKKFKPEIAIRPKVRDQEGRMNYYWTIVEPGDKITFEATGNLVVPRYAFAMERNAGSGIIISDTPVHDCNTTCQTPKGAINTSLPFQNIHPITIGKCPKYVKSTKLRLATGLRNVPSIQSRGLFGAIAGFIEGGWTGMVDGWYGYHHQNEQGSGYAADLKSTQNAIDEITNKVNSVIEKMNTQFTAVGKEFNHLEKRIENLNKKVDDGFLDIWTYNAELLVLLENERTLDYHDSNVKNLYEKVRSQLKNNAKEIGNGCFEFYHKCDNTCMESVKNGTYDYPKYSEEAKLNREEIDGVKLESTRIYQILAIYSTVASSLVLVVSLGAISFWMCSNGSLQCRICI

SEQ ID NO: 5137 - protein, 566 aa, Artificial Sequence
  derived and/or modified protein sequence (wt) from hemagglutinin__InfluenzaA__ADI99690
MKAILAVLLYTFAIANADTLCIGYHANNSTDTVDTVLEKNVTVTHSVNILEDKHNGKLCKLRGVAPLHLGKCNIAGWILGNPECESLSTASSWSYIVETSSSDNGTCYPGDFIDYEELREQLSSVSSFERFEIFPKTSSWPNHDSNKGVTAACPHAGAKSFYKNLIWLVKKGNSYPKLSKSYINDKGKKVLVLWGIHHPSTSADQQSLYQNADAYVFVGTSRYSKKFKPEIAIRPKVRDQEGRMNYYWTLVEPGDKITFEATGNLVVPRYAFAMERNAGSGIIISDTPVHDCNTTCQTPKGAINTSLPFQNIHPITIGKCPKYVKSTKLRLATGLRNVPSIQSRGLFGAIAGFIEGGWTGMVDGWYGYHHQNEQGSGYAADLKSTQNAIDEITNKVNSVIEKMNTQFTAVGKEFNHLEKRIENLNKKVDDGFLDIWTYNAELLVLLENERTLDYHDSNVKNLYEKVRSQLKNNAKEIGNGCFEFYHKCDNTCMESVKNGTYDYPKYSEEAKLNREEIDGVKLESTRIYQILAIYSTVASSLVLVVSLGAISFWMCSNGSLQCRICI

SEQ ID NO: 5138 - protein, 566 aa, Artificial Sequence
  derived and/or modified protein sequence (wt) from hemagglutinin__InfluenzaA__ADI99700
MKAILVVLLYTFATANADTLCIGYHANNSTDTVDTVLEKNVTVTHSVNLLEDKHNGKLCKLRGVSPLHLGKCNIAGWILGNPECESLSTASSWSYIVETSSSDNGTCYPGDFIDYEELREQLSSVSSFERFEIFPKTSSWPNHDSNKGVTAACPHAGAKSFYKNLIWLVKKGNSYPKLSKSYINDKGKEVLVLWGVHHPSTSADQQSLYQNADAYVFVGTSRYSKKFKPEIAIRPKVRDQEGRMNYYWTLVEPGDKITFEATGNLVAPRYAFAMERNAGSGIIISDTPVHDCNTTCQTPKGAINTSLPFQNIHPITIGKCPKYVKSTKLRLATGLRNVPSIQSRGLFGAIAGFIEGGWTGMVDGWYGYHHQNEQGSGYAADLKSTQNAIDEITNKVNSVIEKMNTQFTAVGKEFNHLEKRIENLNKKVDDGFLDIWTYNAELLVLLENERTLDYHDSNVKNLYEKVRSQLKNNAKEIGNGCFEFYHKCDNTCMESVKNGTYDYPKYSEEAKLNREEIDGVKLESTRIYQILAIYSTVASSLVLVVSLGAISFWMCSNGSLQCRICI

SEQ ID NO: 5139 - protein, 566 aa, Artificial Sequence; identical to SEQ ID NO: 4318
  derived and/or modified protein sequence (wt) from hemagglutinin__InfluenzaA__ADI99710

SEQ ID NO: 5140 - protein, 566 aa, Artificial Sequence
  derived and/or modified protein sequence (wt) from hemagglutinin__InfluenzaA__ADI99720
MKAILVVLLYTFATANADTLCIGYHANNSTDTVDTVLEKNVTVTHSVNLLEDKHNGKLCKLRGVAPLHLGKCNIAGWILGNPECESLSTASSWSYIVETSSSDNGTCYPGDFIDYEELREQLSSVSSFERFEIFPKTSSWPDHDSNKGVTAACPHAGAKSFYKNLIWLVKKGNSYPKLSKSYINDKGKEVLVLWGIHHPSTSADQQSLYQNADAYVFVGTSRYSKKFKPEIAIRPKVRGQEGRMNYYWTLVEPGDKITFEATGNLVVSRYAFAMERNAGSGIIISDTPVHDCNTTCQTPKGAINTSLPFQNIHPITIGKCPKYVKSTKLRLATGLRNVPSIQSRGLFGAIAGFIEGGWTGMVDGWYGYHHQNEQGSGYAADLKSTQNAIDEITNKVNSVIEKMNTQFTAVGKEFNHLEKRIENLNKKVDDGFLDIWTYNAELLVLLENERTLDYHDSNVKNLYEKVRSQLKNNAKEIGNGCFEFYHKCDNTCMESVKNGTYDYPKYSEEAKLNREEIDGVKLESTRIYQILAIYSTVASSLVLVVSLGAISFWMCSNGSLQCRICI

SEQ ID NO: 5141 - protein, 566 aa, Artificial Sequence; identical to SEQ ID NO: 2669
  derived and/or modified protein sequence (wt) from hemagglutinin__InfluenzaA__ADI99730

SEQ ID NO: 5142 - protein, 566 aa, Artificial Sequence; identical to SEQ ID NO: 2669
  derived and/or modified protein sequence (wt) from hemagglutinin__InfluenzaA__ADJ00497

SEQ ID NO: 5143 - protein, 566 aa, Artificial Sequence; identical to SEQ ID NO: 2669
  derived and/or modified protein sequence (wt) from hemagglutinin__InfluenzaA__ADJ00498

SEQ ID NO: 5144 - protein, 566 aa, Artificial Sequence; identical to SEQ ID NO: 3863
  derived and/or modified protein sequence (wt) from hemagglutinin__InfluenzaA__ADJ00501

SEQ ID NO: 5145 - protein, 566 aa, Artificial Sequence; identical to SEQ ID NO: 3833
  derived and/or modified protein sequence (wt) from hemagglutinin__InfluenzaA__ADJ18163

SEQ ID NO: 5146 - protein, 566 aa, Artificial Sequence; identical to SEQ ID NO: 3833
  derived and/or modified protein sequence (wt) from hemagglutinin__InfluenzaA__ADJ18165

SEQ ID NO: 5147 - protein, 566 aa, Artificial Sequence
  derived and/or modified protein sequence (wt) from hemagglutinin__InfluenzaA__ADJ18167
MKAILVVLLYTFATANADTLCIGYHANNSTDTVDTVLEKNVTVTHSVNLLEDKHNGKLCKLRGVAPLHLGKCNIAGWILGNPECESLSTASSWSYIVETSSSDNGTCYPGDFIDYEELREQLSSVSSFERFEIFPKTSSWPNHDSNKGVTAACPYAGAKSFYKNLIWLVKKGNSYPKLSKSYINDKGKEVLVLWGIHHPSTSADQQSLYQNADAYVFVGTSRYSKKFKPEIAIRPKVRDREGRMNYYWTLVEPGDKITFEATGNLVVPRYAFAMERNAGSGIIISDTPVHDCNTTCQTPKGAINTSLPFQNIHPITIGKCPKYVKSTKLRLATGLRNIPSIQSRGLFGAIAGFIEGGWTGMVDGWYGYHHQNEQGSGYAADLKSTQNAIDKITNKVNSVIEKMNTQFTAVGKEFNHLEKRIENLNKKVDDGFLDIWTYNAELLVLLENERTLDYHDSNVKNLYEKVRSQLKNNAKEIGNGCFEFYHKCDNTCMESVKNGTYDYPKYSEEAKLNREEIDGVKLESTRIYQILAIYSTVASSLVLVVSLGAISFWMCSNGSLQCRICI

SEQ ID NO: 5148 - protein, 566 aa, Artificial Sequence
  derived and/or modified protein sequence (wt) from hemagglutinin__InfluenzaA__ADJ18169
MKAILVVLLYTFATANADTLCIGYHANNSTDTVDTVLEKNVTVTHSVNLLEDKHNGKLCKLRGVAPLHLGKCNIAGWILGNPECESLSTASSWSYIVETSSSDNGTCYPGDFIDYEELREQLSSVSSFERFEIFPKTSSWPNHDSNKGVTAACPHAGAKSFYKNLIWLVKKGNSYPKLSKSYINDKGKEVLVLWGIHHPSTSADQQSLYQNADAYVFVGTSRYSKKFKPEIAIRPKVRDREGRMNYYWTLVEPGDKITFEATGNLVVPRYAFAMERNAGSGIIISDTPVHDCNTTCQTPKGAINTSLPFQNIHPITIGKCPKYVKSTKLRLATGLRNVPSIQSRGLFGAIAGFIEGGWTGMVDGWYGYHHQNEQGSGYAADLKSTQNAIDKITNKVNSVIEKMNTQFTAVGKEFNHLEKRIENLNKKVDDGFLDIWTYNAELLVLLENERTLDYHDSNVKNLYEKVRSQLKNNAKEIGNGCFEFYHKCDNTCMESVKNGTYDYPKYSEEAKLNREEIDGVKLESTRIYQILAIYSTVASSLVLVVSLGAISFWMCSNGSLQCRICI

SEQ ID NO: 5149 - protein, 566 aa, Artificial Sequence
  derived and/or modified protein sequence (wt) from hemagglutinin__InfluenzaA__ADJ18171
MKAILVVLLYTFATANADTLCIGYHANNSTDTVDTVLEKNVTVTHSVNLLEDKHNGKLCKLRGVAPLHLGKCNIAGWILGNPECESLSTASSWPYIVETSSSDNGTCYPGDFIDYEELREQLSSVSSFERFEIFPKTSSWPNHDSNKGVTAACPHAGAKSFYQNLIWLVKKGNSYPKLSKSYIHDKGKEVLVLWGIHHPSTSADQQSLYQNADAYVFVGTSRYSKKFKPEIAIRPKVRDRQGRMNYYWTLVELGDKITFEATGNLVVPRYAFAMERNAGSGIIISDTPVHNCNTTCQTTTGAINTSLPFQNIHPITIGKCPKYVKSTKLRLATGLRNVPSIQSRGLFGAIAGFIEGGWTGMVDGWYGYHHQNEQGSGYAADLKSTQNAIDKITNKVNSVIEKMNTQFTAVGKEFNHLEKRIENLNKKVDDGFLDIWTYNAELLVLLENERTLDYHDSNVKNLYEKVRSQLKNNAKEIGNGCFEFYHKCDNTCMESVKNGTYDYPKYSEEAKLNREEIDGVKLESTRIYQILAIYSTVASSLVLVVSLGAISFWMCSNGSLQCRICI

SEQ ID NO: 5150 - protein, 566 aa, Artificial Sequence; identical to SEQ ID NO: 3833
  derived and/or modified protein sequence (wt) from hemagglutinin__InfluenzaA__ADJ18173

SEQ ID NO: 5151 - protein, 566 aa, Artificial Sequence; identical to SEQ ID NO: 3833
  derived and/or modified protein sequence (wt) from hemagglutinin__InfluenzaA__ADJ18175

SEQ ID NO: 5152 - protein, 566 aa, Artificial Sequence
  derived and/or modified protein sequence (wt) from hemagglutinin__InfluenzaA__ADJ18177
MKAILVVLLYTFATANADTLCIGYHANNSTDTVDTVLEKNVTVTHSVNLLEDKHNGKLCKLRGVAPLHLGKCNIAGWILGNPECESLSTASSWSYIVETSSSDNGTCYPGDFIDYEELREQLSSVSSFERFEIFPKTSSWPNHDSNKGVTAACPHAGAKSFYKNLIWLVKKGNSYPKLSKSYINDKGKEVLVLWGIHHPSTSADQQSLYQNADAYVFVGTSRYSKKFKPEIAIRPKVRGQEGRMNYYWTLVEPGDKITFEATGNLVVPRYAFAMERNAGSGIIISDTPVHDCNTTCQTPKGAINTSLPFQNIHPITIGKCPKYVKSTKLRLATGLRNIPSVQSRGLFGAIAGFIEGGWTGMVDGWYGYHHQNEQGSGYAADLKSTQNAIDKITNKVNSVIEKMNTQFTAVGKEFNHLEKRIENLNKKVDDGFLDIWTYNAELLVLLENERTLDYHDSNVKNLYEKVRSQLKNNAKEIGNGCFEFYHKCDNTCMESVKNGTYDYPKYSEEAKLNREEIDGVKLESTRIYQILAIYSTVASSLVLVVSLGAISFWMCSNGSLQCRICI

SEQ ID NO: 5153 - protein, 566 aa, Artificial Sequence
  derived and/or modified protein sequence (wt) from hemagglutinin__InfluenzaA__ADJ40444
MKAILVVLLYTFATANADTLCIGYHANNSTDTVDTVLKKNVTVTHSVNLLEDKHNGKLCKLRGVAPLHLGKCNIAGWILGNPECESLSTASSWSYIVETSSSDNGTCYPGDFIDYEELREQLSSVSSFERFEIFPKTSSWPNHDSNKGVTAACPHAGAKSFYKNLIWLVKKGNSYPKLSKSYINDKGKEVLVLWGIHHPSTSADQQSLYQNADAYVFVGTSRYSKKFKPEIAIRPKVRDQEGRMNYYWTLVEPGDKITFEATGNLVVPRYAFAMERNAGSGIIISDTPVHDCNTTCQTPKGAINTSLPFQNIHPITIGKCPKYVKSTKLRLATGLRNVPSIQSRGLFGAIAGFIEGGWTGMVDGWYGYHHQNEQGSGYAADLKSTQNAIDEITNKVNSVIEKMNTQFTAVGKEFNHLEKRIENLNKKVDDGFLDIWTYNAELLVLLENERTLDYHDSNVKNLYEKVRSQLKNNAKEIGNGCFEFYHKCDNTCMESVKNGTYDYPKYSEEAKLNREEIDGVKLESTRIYQILAIYSTVASSLVLVVSLGAISFWMCSNGSLQCRICI

SEQ ID NO: 5154 - protein, 566 aa, Artificial Sequence
  derived and/or modified protein sequence (wt) from hemagglutinin__InfluenzaA__ADJ40454
MKAILVVLLYTFATANADTLCIGYHANNSTDTVDTVLEKNVTVTHSVNLLEDKHNGKLCKLRGVAPLHLGKCNIAGWILGNPECESLSTASSWSYIVETSSSDNGTCYPGDFIDYEELREQLSSVSSFERFEIFPKTSSWPNHDSNKGVTAACPHAGAKSFYKNLIWLVKKGNSYPKLSKSYINDKGKEVLVLWGIHHPSTSADQQSLYQNADAYVFVGTSRYSKKFKPEIAIRPKVRNQEGRMNYYWTLVEPGDKITFEATGNLVVPRYAFAMERNAGSGIIISDTPVHDCNTTCQTPKGAINTSLPFQNIHPITIGKCPKYVKSTKLRLATGLRNIPSIQSRGLFGAIAGFIEGGWTGMVDGWYGYHHQNEQGSGYAADLKSTQNAIDKITNKVNSVIEKMNTQFTAVGKEFNHLEKRIENLNKKVDDGFLDIWTYNAELLVLLENERTLDYHDSNVKNLYEKVRSQLKNNAKEIGNGCFEFYHKCDNTCMESVKNGTYDYPKYSEEAKLNREEIDGVELESTRIYQILAIYSTVASSLVLVVSLGAISFWMCSNGSLQCRICI

SEQ ID NO: 5155 - protein, 566 aa, Artificial Sequence
  derived and/or modified protein sequence (wt) from hemagglutinin__InfluenzaA__ADJ40464
MKAILVVLLYTFATANTDTLCIGYHANNSTDTVDTVLEKNVTVTHSVNLLEDKHNGKLCKLRGVAPLHLGKCNIAGWILGNPECESLSTASSWSYIVETSSSDNGTCYPGDFIDYEELREQLSSVSSFERFEIFPKTSSWPNHDSNKGVTAACPHAGAKSFYKNLIWLVKKGNSYPKLSKSYINDKGKEVLVLWGIHHPSTSADQQSLYQNADAYVFVGTSRYSKKFKPEIAIRPKVRDQEGRMNYYWTLVEPGDKITFEATGNLVVPRYAFAMERNAGSGIIISDTPVHDCNTTCQTPKGAINTSLPFQNIHPITIGKCPKYVKSTKLRLATGLRNVPSIQSRGLFGAIAGFIEGGWTGMVDGWYGYHHQNEQGSGYAADLKSTQNAIDEITNKVNSVIEKMNTQFTAVGKEFNHLEKRIENLNKKVDDGFLDIWTYNAELLILLENERTLDYHDSNVKNLYEKVRSQLKNNAKEIGNGCFEFYHKCDNTCMESVKNGTYDYPKYSEEAKLNREEIDGVKLESTRIYQILAIYSTVASSLVLVVSLGAISFWMCSNGSLQCRICI

SEQ ID NO: 5156 - protein, 566 aa, Artificial Sequence
  derived and/or modified protein sequence (wt) from hemagglutinin__InfluenzaA__ADJ40474
MKAILVVLLYTFATANADTLCIGYHANNSTDTVDTVLEKNVTVTHSVNLLEDKHNGKLCKLRGVAPLHLGKCNIAGWILGNPECESLSTASSWSYIVETSSSDNGTCYPGDFIDYEELREQLSSVSSFERFEIFPKTSSWPNHDSNKGVTAACPHAGAKSFYKNLIWLVKKGNSYPKLSKSYINDKGKEVLVLWGIHHPSTSADQQSLYQNADAYVFVGTSRYSKKFKPEIAIRPKVREQEGRMNYYWTLVEPGDKITFEATGNLVVPRYAFAMERNAGSGIIISDTPVHDCNTTCQTPKGAINTSLPFQNIHPITIGKCPKYVKSTKLRLATGLRNVPSIQSRGLFGAIAGFIEGGWTGMVDGWYGYHHQNEQGSGYAADLKSTQNAIDEITNKVNSVIEKMNTQFTAVGKEFNHLEKRIENLNKKVDDGFLDIWTYNAELLVLLENERTLDYHDSNVKNLYEKVRRQLKNNAKEIGNGCFEFYHKCDNTCMESVKNGTYDYPKYSEEAKLNREEIDGVKLESTRIYQILAIYSTVASSLVLVVSLGAISFWMCSNGSLQCRICI

SEQ ID NO: 5157 - protein, 566 aa, Artificial Sequence
  derived and/or modified protein sequence (wt) from hemagglutinin__InfluenzaA__ADJ40494
MKAILVVLLYTFATANADTLCIGYHANNSTDTVDTVLEKNVTVTHSVDLLEDKHNGKLCKLRGVAPLHLGKCNIAGWILGNPECESLSTASSWSYIVETSSSDNGTCYPGDFIDYEELREQLSSVSSFERFEIFPKTSSWPNHDSNKGVTAACPHAGAKSFYKTLIWLVKKGNSYPKLSKSYINDKGKEVLVLWGIHHPSTSADQQSLYQNADAYVFVGTSRYSKKFKPEIAIRPKVRDQEGRMNYYWTLVEPGDKITFEATGNLVVPRYAFAMERNAGSGIIISDTPVHDCNTTCQTPKGAINTSLPFQNIHPITIGKCPKYVKSTKLRLATGLRNVPSIQSRGLFGAIAGFIEGGWTGMVDGWYGYHHQNEQGSGYAADLKSTQNAIDEITNKVNSVIEKMNTQFTAVGKEFNHLEKRIENLNKKVDDGFLDIWTYNAELLVLLENERTLDYHDSNVKNLYEKVRSQLKNNAKEIGNGCFEFYHKCDNTCMESVKNGTYDYPKYSEEAKLNREEIDGVKLESTRIYQILAIYSTVASSLVLVVSLGAISFWMCSNGSLQCRICI

SEQ ID NO: 5158 - protein, 566 aa, Artificial Sequence
  derived and/or modified protein sequence (wt) from hemagglutinin__InfluenzaA__ADJ40514
MKAVLVVLLYTFATTNADTLCIGYHANNSTDTVDTVLEKNVTVTHSVNLLEDKHNGKLCKLRGVAPLHLGKCNIAGWILGNPECESLSTASSWSYIVETSSSDNGTCYPGDFIDYEELREQLSSVSSFERFEIFPKTSSWPNHDSNKGVTAACPHAGAKSFYKNLIWLVKKGNSYPKLSKSYINDKGKEVLVLWGIHHPSTSADQQSLYQNADAYVFVGTSRYSKKFKPEIAIRPKVRNQEGRMNYYWTLVEPGDKITFEATGNLVVPRYAFAMERNAGSGIIISDTPVHDCNTTCQTPKGAINTSLPFQNIHPITIGKCPKYVKSTKLRLATGLRNVPSIQSRGLFGAIAGFIEGGWTGMVDGWYGYHHQNEQGSGYAADLKSTQNAIDEITNKVNSVIEKMNTQFTAVGKEFNHLEKRIENLNKKVDDGFLDIWTYNAELLVLLENERTLDYHDSNVKNLYEKVRSQLKNNAKEIGNGCFEFYHKCDNTCMESVKNGTYDYPKYSEEAKLNREEIDGVKLESTRIYQILAIYSTVASSLVLVVSLGAISFWMCSNGSLQCRICI

SEQ ID NO: 5159 - protein, 566 aa, Artificial Sequence; identical to SEQ ID NO: 2669
  derived and/or modified protein sequence (wt) from hemagglutinin__InfluenzaA__ADJ40524

SEQ ID NO: 5160 - protein, 566 aa, Artificial Sequence; identical to SEQ ID NO: 3022
  derived and/or modified protein sequence (wt) from hemagglutinin__InfluenzaA__ADJ40534

SEQ ID NO: 5161 - protein, 566 aa, Artificial Sequence
  derived and/or modified protein sequence (wt) from hemagglutinin__InfluenzaA__ADJ40554
MKAILVVLLYTFATANADTLCIGYHANNSTDTVDTVLEKNVTVTHSVNLLEDKHNGKLCKLRGVAPLHLGKCNIAGWILGNPECESLSTASSWSYIVETSSSDNGTCYPGDFIDYEELREQLSSVSSFERFEIFPNTSSWPNHDSNKGVTAACPHAGAKSFYKNLIWLVKKGNSYPKLSKSYINDKGKEVLVLWGIHHPSTSADQQSLYQNADAYVFVGTSRYSKKFKPEIAIRPKVRDQEGRMNYYWTLVEPGDKITFEATGNLVVPRYAFAMERNAGSGIIISDTPVHDCNTTCQTPKGAINTSLPFQNIHPITIGKCPKYVKSTKLRLATGLRNVPSIQSRGLFGAIAGFIEGGWTGMVDGWYGYHHQNEQGSGYAADLKSTQNAIDEITNKVNSVIEKMNTQFTAVGKEFNHLEKRIENLNKKVDDGFLDIWTYNAELLVLLENERTLDYHDSNVKNLYEKVRSQLKNNAKEIGNGCFEFYHKCDNTCMESVKNGTYDYPKYSEEAKLNREEIDGVKLESTRIYQILAIYSTVASSLVLVVSLGAISFWMCSNGSLQCRICI

SEQ ID NO: 5162 - protein, 566 aa, Artificial Sequence; identical to SEQ ID NO: 2669
  derived and/or modified protein sequence (wt) from hemagglutinin__InfluenzaA__ADJ40564

SEQ ID NO: 5163 - protein, 566 aa, Artificial Sequence; identical to SEQ ID NO: 2669
  derived and/or modified protein sequence (wt) from hemagglutinin__InfluenzaA__ADJ40574

SEQ ID NO: 5164 - protein, 566 aa, Artificial Sequence; identical to SEQ ID NO: 4089
  derived and/or modified protein sequence (wt) from hemagglutinin__InfluenzaA__ADJ40584

SEQ ID NO: 5165 - protein, 566 aa, Artificial Sequence; identical to SEQ ID NO: 2669
  derived and/or modified protein sequence (wt) from hemagglutinin__InfluenzaA__ADJ40594

SEQ ID NO: 5166 - protein, 566 aa, Artificial Sequence; identical to SEQ ID NO: 3238
  derived and/or modified protein sequence (wt) from hemagglutinin__InfluenzaA__ADJ40604

SEQ ID NO: 5167 - protein, 566 aa, Artificial Sequence; identical to SEQ ID NO: 3238
  derived and/or modified protein sequence (wt) from hemagglutinin__InfluenzaA__ADJ40614

SEQ ID NO: 5168 - protein, 566 aa, Artificial Sequence; identical to SEQ ID NO: 2669
  derived and/or modified protein sequence (wt) from hemagglutinin__InfluenzaA__ADJ40634

SEQ ID NO: 5169 - protein, 566 aa, Artificial Sequence; identical to SEQ ID NO: 2669
  derived and/or modified protein sequence (wt) from hemagglutinin__InfluenzaA__ADJ40644

SEQ ID NO: 5170 - protein, 566 aa, Artificial Sequence; identical to SEQ ID NO: 2669
  derived and/or modified protein sequence (wt) from hemagglutinin__InfluenzaA__ADJ40654

SEQ ID NO: 5171 - protein, 566 aa, Artificial Sequence; identical to SEQ ID NO: 2669
  derived and/or modified protein sequence (wt) from hemagglutinin__InfluenzaA__ADJ40664

SEQ ID NO: 5172 - protein, 566 aa, Artificial Sequence; identical to SEQ ID NO: 2669
  derived and/or modified protein sequence (wt) from hemagglutinin__InfluenzaA__ADJ40674

SEQ ID NO: 5173 - protein, 566 aa, Artificial Sequence
  derived and/or modified protein sequence (wt) from hemagglutinin__InfluenzaA__ADJ41816
MKTIIALSYMFCLVFAQNLPGNDNSTATLCLGHHAVPNGTLVKTITNDQIEVTNATELVQSSSTGRICDSPHRILDGKNCTLIDALLGDPHCDGFQNEKWDLFVERSKAFSNCYPYDVPDYASLRSLVASSGTLEFINEGFNWTGVTQSGGSCTCKRGSNDSFFSRLNWLYESESKYPVLNVTMPNNGKFDKLYIWGIHHPSTDKEQTNLYIRASGRVTVSTKRSQQTVIPNIGSRPWVRGLSSRISIYWTIVKPGDILLISSTGNLIAPRGYFKIRTGKSSIMRSDAPIGTCSSECITPNGSIPNDKPFQNVNKITYGACPRYVKQNTLKLATGMRNVPEKQTRGIFGAIAGFIENGWEGMVDGWYGFRHQNSEGTGQAADLKSTQAAIDQINGKLNRVIEKTNEKFHQIEKEFSEVEGRIQDLEKYVEDTKIDLWSYNAELLVALENQHTIDLTDSEMNKLFEKTRKQLRENAEDMGNGCFKIYHKCDNACIGSIRNGTYDHDVYRDEALNNRFQIKGVELKSGYKDWILWISFAISCFLLCVVLLGFIMWACQKGNIRCNICI

SEQ ID NO: 5174 - protein, 566 aa, Artificial Sequence; identical to SEQ ID NO: 2669
  derived and/or modified protein sequence (wt) from hemagglutinin__InfluenzaA__ADJ56640

SEQ ID NO: 5175 - protein, 566 aa, Artificial Sequence; identical to SEQ ID NO: 3467
  derived and/or modified protein sequence (wt) from hemagglutinin__InfluenzaA__ADJ56650

SEQ ID NO: 5176 - protein, 566 aa, Artificial Sequence; identical to SEQ ID NO: 2760
  derived and/or modified protein sequence (wt) from hemagglutinin__InfluenzaA__ADJ67983

SEQ ID NO: 5177 - protein, 566 aa, Artificial Sequence; identical to SEQ ID NO: 2760
  derived and/or modified protein sequence (wt) from hemagglutinin__InfluenzaA__ADJ67984

SEQ ID NO: 5178 - protein, 566 aa, Artificial Sequence; identical to SEQ ID NO: 2760
  derived and/or modified protein sequence (wt) from hemagglutinin__InfluenzaA__ADJ67985

SEQ ID NO: 5179 - protein, 566 aa, Artificial Sequence
  derived and/or modified protein sequence (wt) from hemagglutinin__InfluenzaA__ADJ80241
MKAILVVLLYTFATANADTLCIGYHANNSTDTVDTVLEKNVTVTHSVNLLEDKHNGKLCKLRGVAPLHLGKCNIAGWILGNPECESLSTASSWSYIVETSSSDNGTCYPGDFIDYEELREQLSSVSSFERFEIFPKTSSWPNHDSNKGVTAACPHAGAKSFYKNLIWLVKKGNSYPKLSKSYINDKGKEVLVLWGIHHPSTSADQQSLYQNADAYVFVGTSRYSKKFKPEIAIRPKVRNQEGRMNYYWTLVEPGDKITFEATGNLVVPRYAFAMERNAGSGIIISDTPVHDCNTTCQTPKGAINTSLPFQNIHPITIGKCPKYVKSTKLRLATGLRNVPSIQSRGLFGAIAGFIEGGWTGMVDGWYGYHHQNEQGSGYAADLKSTQNAIDKITNKVNSVIEKMNTQFTAVGKEFNHLEKRIENLNKKVDDGFLDIWTYNAELLVLLENERTLDYHDSNVKNLYEKVRSQLKNNAKEIGNGCFEFYHKCDNTCMESVKNGTYDYPKYSEEAKLNREEIDGVKLESTRIYQILAIYSTVASSLVLVVSLGAISFWMCSNGSLQCRICI

SEQ ID NO: 5180 - protein, 566 aa, Artificial Sequence
  derived and/or modified protein sequence (wt) from hemagglutinin__InfluenzaA__ADJ80242
MKAILVVLLYTFATANADTLCIGYHANNSTDTVDTVLEKNVTVTHSVNLLEDKHNGKLCKLRGVAPLHLGKCNIAGWILGNPECESLSTASSWSYIVETSSSDNGTCYPGDFIDYEELREQLSSVSSFERFEIFPKTSSWPNHDSNKGVTAACPHAGAKSFYKNLIWLVKKGNSYPKLSKSYINDKGKEVLVLWGIHHPSTSADQQSLYQNADAYVFVGTSRYSKKFKPEIAIRPKVRDQEGRMNYYWTLVEPGDKITFEATGNLVVPRYAFAMERNAGSGIIISDTPVHDCNTTCQTPKGAINTSLPFQNIHPITIGKCPKYVKSTKLRLATGLRNVPSIQSRGLFGAIAGFIEGGWTGMVDGWYGYHHQNEQGSGYAADLKSTQNAIDEITNKVNSVIEKMNTQFTAVGKEFNHLEKRIENLNKKVDDGFLDIWTYNAELLVLLENERTLDYHDSNVKNLYEKVRSQLKNNAKEIGNGCFEFYHKCDNTCMESVKNGTYDYPKYSEEAKLNREEIDGVKLESTRIYQILAIYSTAASSLVLVVSLGAISFWMCSNGSLQCRICI

SEQ ID NO: 5181 - protein, 566 aa, Artificial Sequence; identical to SEQ ID NO: 4221
  derived and/or modified protein sequence (wt) from hemagglutinin__InfluenzaA__ADJ80243

SEQ ID NO: 5182 - protein, 566 aa, Artificial Sequence; identical to SEQ ID NO: 2669
  derived and/or modified protein sequence (wt) from hemagglutinin__InfluenzaA__ADJ80634

SEQ ID NO: 5183 - protein, 566 aa, Artificial Sequence; identical to SEQ ID NO: 4671
  derived and/or modified protein sequence (wt) from hemagglutinin__InfluenzaA__ADJ80644

SEQ ID NO: 5184 - protein, 566 aa, Artificial Sequence; identical to SEQ ID NO: 4671
  derived and/or modified protein sequence (wt) from hemagglutinin__InfluenzaA__ADJ80654

SEQ ID NO: 5185 - protein, 566 aa, Artificial Sequence; identical to SEQ ID NO: 3833
  derived and/or modified protein sequence (wt) from hemagglutinin__InfluenzaA__ADJ80674

SEQ ID NO: 5186 - protein, 566 aa, Artificial Sequence; identical to SEQ ID NO: 3833
  derived and/or modified protein sequence (wt) from hemagglutinin__InfluenzaA__ADJ80684

SEQ ID NO: 5187 - protein, 566 aa, Artificial Sequence
  derived and/or modified protein sequence (wt) from hemagglutinin__InfluenzaA__ADJ80694
MKAILVVLLYTFATANADTLCIGYHANNSTDTVDTVLEKNVTVTHSVNILEDNHNGKLCKLRGVAPLHLGKCNIAGWILGNPECESLSTASSWSYIVETSSSDNGTCYPGDFIDYEELREQLSSVSSFERFEIFPKTSSWPNHDSNKGVTAACPHAGAKSFYKNLIWLVKKGNSYPKLSKSYINDKGKEVLVLWGIHHPSTSADQQSLYQNADAYVFVGSSRYSKKFKPEIAIRPKVRDQEGRMNYYWTLVEPGDKITFEATGNLVVPRYAFAMERNAGSGIIISDTPVHDCNTTCQTPKGAINTSLPFQNIHPITIGKCPKYVKSTKLRLATGLRNVPSIQSRGLFGAIAGFIEGGWTGMVDGWYGYHHQNEQGSGYAADLKSTQNAIDEITNKVNSVIEKMNTQFTAVGKEFNHLEKRIENLNKKVDDGFLDIWTYNAELLVLLENERTLDYHDSNVKNLYEKVRSQLKNNAKEVGNGCFEFYHKCDNTCMESVKNGTYDYPKYSEEAKLNREEIDGVKLESTRIYQILAIYSTAASSLVLVVSLGAISFWMCSNGSLQCRICI

SEQ ID NO: 5188 - protein, 566 aa, Artificial Sequence; identical to SEQ ID NO: 3833
  derived and/or modified protein sequence (wt) from hemagglutinin__InfluenzaA__ADJ80704

SEQ ID NO: 5189 - protein, 566 aa, Artificial Sequence
  derived and/or modified protein sequence (wt) from hemagglutinin__InfluenzaA__ADJ80714
MKAILVVLLYTFATANADTLCIGYHANNSTDTVDTVLEKNVTVTHSVNLLEDKHNGKLCKLRGAAPLHLGKCNIAGWILGNPECESLSTASSWSYIVETSSSDNGTCYPGDFIDYEELREQLSSVSSFERFEIFPKTSSWPNHDSNKGVTAACPHAGAKSFYKNLIWLVKKGNSYPKLSKSYINDKGKEVLVLWGIHHPSTSADQQSLYQNADAYVFVGTSRYSKKFKPEIAIRPKVRDQEGRMNYYWTLVEPGDKITFEATGNLVVPRYAFAMERNAGSGIIISDTPVHDCNTTCQTPKGAINTSLPFQNIHPITIGKCPKYVKSTKLRLATGLRNVPSIQSRGLFGAIAGFIEGGWTGMVDGWYGYHHQNEQGSGYAADLKSTQNAIDKITNKVNSVIEKMNTQFTAVGKEFNHLEKRIENLNKKVDDGFLDIWTYNAELLVLLENERTLDYHDSNVKNLYEKVRSQLKNNAKEIGNGCFEFYHKCDNTCMESVKNGTYDYPKYSEEAKLNREEIDGVKLESTRIYQILAIYSTVASSLVLVVSLGAISFWMCSNGSLQCRICI

SEQ ID NO: 5190 - protein, 566 aa, Artificial Sequence; identical to SEQ ID NO: 2669
  derived and/or modified protein sequence (wt) from hemagglutinin__InfluenzaA__ADJ80724

SEQ ID NO: 5191 - protein, 566 aa, Artificial Sequence; identical to SEQ ID NO: 3833
  derived and/or modified protein sequence (wt) from hemagglutinin__InfluenzaA__ADJ80734

SEQ ID NO: 5192 - protein, 566 aa, Artificial Sequence; identical to SEQ ID NO: 3833
  derived and/or modified protein sequence (wt) from hemagglutinin__InfluenzaA__ADJ80744

SEQ ID NO: 5193 - protein, 566 aa, Artificial Sequence; identical to SEQ ID NO: 3833
  derived and/or modified protein sequence (wt) from hemagglutinin__InfluenzaA__ADJ80754

SEQ ID NO: 5194 - protein, 566 aa, Artificial Sequence
  derived and/or modified protein sequence (wt) from hemagglutinin__InfluenzaA__ADJ80774
MKAILVVLLYTFATANADTLCIGYHANNSTDTVDTVLEKNVTVTHSVNILEDKHNGKLCKLRGVAPLHLGKCNIAGWILGNPECESLSTANSWSYIVETSSSDNGTCYPGDFIDYEELREQLSSVSSFERFEIFPKTSSWPNHDSNKGVTAACPHAGAKSFYKNLIWLVKKGNSYPKLSKSYINDKGKEVLVLWGIHHPSTSADQQSLYQNADAYVFVGSSRYSKKFKPEIAIRPKVRDQEGRMNYYWTLVEPGDKITFEATGNLVVPRYAFAMERNAGSGIIISDTPVHDCNTTCQTPKGAINTSLPFQNIHPITIGKCPKYVKSTKLRLATGLRNVPSIQSRGLFGAIAGFIEGGWTGMVDGWYGYHHQNEQGSGYAADLKSTQNAIDEITNKVNSVIEKMNTQFTAVGKEFNHLEKRIENLNKKVDDGFLDIWTYNAELLVLLENERTLDYHDSNVKNLYEKVRSQLKNNAKEVGNGCFEFYHKCDNTCMESVKNGTYDYPKYSEEAKLNREEIDGVKLESTRIYQILAIYSTAASSLVLVVSLGAISFWMCSNGSLQCRICI

SEQ ID NO: 5195 - protein, 566 aa, Artificial Sequence
  derived and/or modified protein sequence (wt) from hemagglutinin__InfluenzaA__ADJ80784
MKAILVVLLYTFATANADTLCIGYHANNSTDTVDTVLEKNVTVTHSVNLLEDKHNGKLCKLRGVAPLHLGKCNIAGWILGNPECESLSTASSWSYIVETSSSDNGTCYPGDFIDYEELREQLSSVSSFERFEIFPKTSSWPNHDSNKGVTAACPHAGAKSFYKNLIWLVKKGNSYPKLSKSYINDKGKEVLVLWGIHHPSTSADQQSLYQNADAYVFVGTSRYSKKFKPEIAIRPKVRDQEGRMNYYWTLVEPGDKITFEATGNLVVPRYAFAMERNAGSGIIISDTPVHDCNTTCQTPKGAINTSLPFHNIHPITIGKCPKYVKSTKLRLATGLRNVPSIQSRGLFGAIAGFIEGGWTGMVDGWYGYHHQNEQGSGYAADLKSTQNAIDKITNKVNSVIEKMNTQFTAVGKEFNHLEKRIENLNKKVDDGFLDIWTYNAELLVLLENERTLDYHDSNVKNLYEKVRSQLKNNAKEIGNGCFEFYHKCDNTCMESVKNGTYDYPKYSEEAKLNREEIDGVKLESTRIYQILAIYSTVASSLVLVVSLGAISFWMCSNGSLQCRICI

SEQ ID NO: 5196 - protein, 566 aa, Artificial Sequence; identical to SEQ ID NO: 3833
  derived and/or modified protein sequence (wt) from hemagglutinin__InfluenzaA__ADJ80794

SEQ ID NO: 5197 - protein, 566 aa, Artificial Sequence; identical to SEQ ID NO: 4671
  derived and/or modified protein sequence (wt) from hemagglutinin__InfluenzaA__ADJ80804

SEQ ID NO: 5198 - protein, 566 aa, Artificial Sequence
  derived and/or modified protein sequence (wt) from hemagglutinin__InfluenzaA__ADJ80814
MKAILVVLLYTFATANADTLCIGYHANNSTDTVDTVLEKNVTVTHSVNLLEDKHNGKLCKLRGVAPLHLGKCNIAGWILGNPECESLSTASSWSYIVETSSSDNGTCYPGDFIDYEELREQLSSVSSFERFEIFPKTSSWPNHDSNKGVTAACPRAGAKSFYKNLIWLVKKGNSYPKLSKSYINDKGKEVLVLWGIHHPSTSADQQSLYQNADAYVFVGTSRYSKKFKPEIAIRPKVRDQEGRMNYYWTLVEPGDKITFEATGNLVVPRYAFAIERNAGSGIIISDTPVHDCNTTCQTPKGAINTSLPFQNIHPITIGKCPKYVKSTKLRLATGLRNVPSIQSRGLFGAIAGFIEGGWTGMVDGWYGYHHQNEQGSGYAADLKSTQNAIDKITNKVNSVIEKMNTQFTAVGKEFNHLEKRIENLNKKVDDGFLDIWTYNAELLVLLENERTLDYHDSNVKNLYEKVRSQLKNNAKEIGNGCFEFYHKCDNTCMESVKNGTYDYPKYSEEAKLNREEIDGVKLESTRIYQILAIYSTVASSLVLVVSLGAISFWMCSNGSLQCRICI

SEQ ID NO: 5199 - protein, 566 aa, Artificial Sequence
  derived and/or modified protein sequence (wt) from hemagglutinin__InfluenzaA__ADJ80834
MKAILVVLLYTFATANADTLCIGYHANNSTDTVDTVLEKNVTVTHSVNLLEDKHNGKLCKLRGVAPLHLGKCNIAGWILGNPECESLSTASSWSYIVETSSSDNGTCYPGDFIDYEELREQLSSVSSFERFEIFPKTSSWPNHDSNKGVTAACPHAGAKSFYKNLIWLVKKGNSYPKLSKSYINDKGKEVLVLWGIHHPSTSTDQQSLYQNADAYVFVGTSRYSKKFKPEIAIRPKVRDQEGRMNYYWTLVEPGDKITFEATGNLVVPRYAFAMERNSGSGIIISDTPVHYCNTTCQTPKGAINTSLPFQNIHPITIGKCPKYVKSTKLRLATGLRNVPSIQSRGLFGAIAGFIEGGWTGMVDGWYGYHHQNEQGSGYAADLKSTQNAIDEITNKVNSVIEKMNTQFTAVGKEFNHLEKRIENLNKKVDDGFLDIWTYNAELLVLLENERTLDYHDSNVKNLYEKVRSQLKNNAKEIGNGCFEFYHKCDNTCMESVKNGTYDYPKYSEEAKLNREEIDGVKLESTRIYQILAIYSTVASSLVLVVSLGAISFWMCSNGSLQCRICI

SEQ ID NO: 5200 - protein, 566 aa, Artificial Sequence; identical to SEQ ID NO: 4871
  derived and/or modified protein sequence (wt) from hemagglutinin__InfluenzaA__ADJ80848

SEQ ID NO: 5201 - protein, 566 aa, Artificial Sequence
  derived and/or modified protein sequence (wt) from hemagglutinin__InfluenzaA__ADJ80858
MKTILVVLLYTFATANADTLCIGYHANNSTDTVDTVLEKNVTVTHSVNLLEDKHNGKLCKLRGVAPLHLGKCNIAGWILGNPECESLSTASSWSYIVETSSSDNGTCYPGDFIDYEELREQLSSVSSFERFEIFPKTSSWPNHDSNKGVTAACPHAGAKSFYKNLIWLVKKGNSYPKLSKSYINDKGKEVLVLWGIHHPSTSADQQSLYQNADAYVFVGTSRYSKKFKPEIAIRPKVRDQEGRMNYYWTLVEPGDKITFEATGNLVVPRYAFAMERNAGSGIIISDTPVHDCNTTCQTPKGAINTSLPFQNIHPITIGKCPKYVKSTKLRLATGLRNVPSIQSRGLFGAIAGFIEGGWTGMVDGWYGYHHQNEQGSGYAADLKSTQNAIDKITNKVNSVIEKMNTQFTAVGKEFNHLEKRIENLNKKVDDGFLDIWTYNAELLVLLENERTLDYHDSNVKNLYEKVRSQLKNNAKEIGNGCFEFYHKCDNTCMESVKNGTYDYPKYSEEAKLNREEIDGVKLESTRIYQILAIYSTVASSLVLVVSLGAISFWMCSNGSLQCRICI

SEQ ID NO: 5202 - protein, 566 aa, Artificial Sequence
  derived and/or modified protein sequence (wt) from hemagglutinin__InfluenzaA__ADJ80868
MKAILVVLLYTFATANADTLCIGYHANNSTDTVDTVLEKNVTVTHSVNLLEDKHNGKLCKLRGVAPLHLGKCNIAGWILGNPECESLSTASSWSYIVETSSSDNGTCYPGDFIDYEELREQLSSVSSFERFEIFPKTSSWPNHDSNKGVTAACPNAGAKSFYKNLIWLVKKGNSYPKLSKSYINDKGKEVLVLWGIHHPSTSADQQSLYQNADAYVFVGTSRYSKKFKPEIAIRPKVRDQEGRMNYYWTLVEPGGKITFEATGNLVVPRYAFAMERNAGSGIIISDTPVHDCNTTCQTPKGAINTSLPFQNIHPITIGKCPKYVKSTKLRLATGLRNVPSIQSRGLFGAIAGFIEGGWTGMVDGWYGYHHQNEQGSGYAADLKSTQNAIDKITNKVNSVIEKMNTQFTAVGKEFNHLEKRIENLNKKVDDGFLDIWTYNAELLVLLENERTLDYHDSNVKNLYEKVRSQLKNNAKEIGNGCFEFYHKCDNTCMESVKNGTYDYPKYSEEAKLNREEIDGVKLESTRIYQILAIYSTVASSLVLVVSLGAISFWMCSNGSLQCRICI

SEQ ID NO: 5203 - protein, 566 aa, Artificial Sequence; identical to SEQ ID NO: 3833
  derived and/or modified protein sequence (wt) from hemagglutinin__InfluenzaA__ADJ80883

SEQ ID NO: 5204 - protein, 566 aa, Artificial Sequence; identical to SEQ ID NO: 3833
  derived and/or modified protein sequence (wt) from hemagglutinin__InfluenzaA__ADJ80893

SEQ ID NO: 5205 - protein, 566 aa, Artificial Sequence; identical to SEQ ID NO: 3833
  derived and/or modified protein sequence (wt) from hemagglutinin__InfluenzaA__ADJ80910

SEQ ID NO: 5206 - protein, 566 aa, Artificial Sequence; identical to SEQ ID NO: 2669
  derived and/or modified protein sequence (wt) from hemagglutinin__InfluenzaA__ADJ80927

SEQ ID NO: 5207 - protein, 566 aa, Artificial Sequence
  derived and/or modified protein sequence (wt) from hemagglutinin__InfluenzaA__ADJ80937
MKAILVVLLYTFATANADTLCIGYHANNSTDTVDTVLEKNVTVTHSVNLLEDKHNGKLCKLRGVAPLHLGKCNIAGWILGNPECESLSTASSWSYIVETSSSDNGTCYPGDFIDYEELREQLSSVSSFERFEIFPKTSSWPNHDSNKGVTAACPHAGAKSFYKNLIWLVKKGNSYPKLSKSYINDKGKEVLVLWGIHHPSTSADQQSLYQNADAYAFVGTSRYSKKFKPEIAIRPKVRDQEGRMNYYWTLVEPGDKITFEATGNLVVPRYAFAMERNAGSGIIISDTPVHNCNTTCQTPKGAINTSLPFQNIHPITIGKCPKYVKSTKLRLATGLRNVPSIQSRGLFGAIAGFIEGGWTGMVDGWYGYHHQNEQGSGYAADLKSTQNAIDEITNKVNSVIEKMNTQFTAVGKEFNHLEKRIENLNKKVDDGFLDIWTYNAELLVLLENERTLDYHDSNVKSLYEKVRSQLKNNAKEIGNGCFEFYHKCDNTCMESVKNGTYDYPKYSEEAKLNREEIDGVKLESTRIYQILAIYSTVASSLVLVVSLGAISFWMCSNGSLQCRICI

SEQ ID NO: 5208 - protein, 566 aa, Artificial Sequence; identical to SEQ ID NO: 3833
  derived and/or modified protein sequence (wt) from hemagglutinin__InfluenzaA__ADJ80947

SEQ ID NO: 5209 - protein, 566 aa, Artificial Sequence; identical to SEQ ID NO: 3833
  derived and/or modified protein sequence (wt) from hemagglutinin__InfluenzaA__ADJ80967

SEQ ID NO: 5210 - protein, 566 aa, Artificial Sequence; identical to SEQ ID NO: 3833
  derived and/or modified protein sequence (wt) from hemagglutinin__InfluenzaA__ADJ80977

SEQ ID NO: 5211 - protein, 566 aa, Artificial Sequence
  derived and/or modified protein sequence (wt) from hemagglutinin__InfluenzaA__ADJ80993
MKAILVVLLYTFATANADTLCIGYHANNSTDTVDTVLEKNVTVTHSVNLLEDKHNGKLCKLRGVAPLHLGKCNIAGWILGNPECESLSTASSWSYIVETSSSDNGTCYPGDFIDYEELREQLSSVSSFERFEIFPKTSSWPNHDSNKGVTAACPNAGAKSFYKNLIWLVKKGNSYPKLSKSYINDKGKEVLVLWGIHHPSTSADQQSLYQNADAYVFVGTSRYSKKFKPEIAIRPKVRDQEGRMNYYWTLVEPGDKITFEATGNLVVPRYAFAMERNAGSGIIISDTPVHDCNTTCQTPKGAINTSLPFQNIHPITIGKCPKYVKSTKLRLATGLRNVPSIQSRGLFGAIAGFIEGGWTGMVDGWYGYHHQNEQGSGYAADLKSTQNAIDKITNKVNSVIEKMNTQFTAVGKEFNHLEKRIENLNKKVDDGFLDIWTYNAELLVLLENERTLDYHDSNVKNLYEKVRSQLKNNAKEIGNGCFEFYHKCDNTCMESVKNGTYDYPKYSEEAKLNREEIDGVKLESTRIYQILAIYSTVASSLVLVVSLGAISFWMCSNGSLQCRICI

SEQ ID NO: 5212 - protein, 566 aa, Artificial Sequence
  derived and/or modified protein sequence (wt) from hemagglutinin__InfluenzaA__ADJ81003
MKAILVVLLYTFATANADTLCIGYHANNSTDTVDTVLEKNVTVTHSVNLLEDKHNGKLCKLRGVAPLHLGKCNIAGWILGNPECESLSTASSWSYIVETSSSDNGTCYPGDFIDYEELREQLSSVSSFERFEIFPKTSSWPNHDSNKGVTAACPHAGAKSFYKNLIWLVKKGNSYPKLSKSYINDKGKEVLVLWGIHHPSTSADQQSLYQNADAYVFVGTSRYSKKFKPEIAIRPKVRDQEGRMNYYWTLVEPGDKITFEATGNLVVPRYAFAMERNAGSGIIISDTPVHDCNTTCQTPKGAINTSLPFQNIHPITIGKCPKYVKSTKLRLATGLRNVPSIQSRGLFGAIAGFIEGGWTGMVDGWYGYHHQNEQGSGYAADLKSTQNAIDKITNKVNSVIEKMNTQFTAVGKEFNHLEKRIENLNKKVDDGFLDIWTYNAELLVLLENERTLDYHDSNVKNLYEKVRSQLKNNAKEIGNGCFEFYHKCDNTCMESVKNGTYDYPKYSEEAKLNREKIDGVKLESTRIYQILAIYSTVASSLVLVVSLGAISFWMCSNGSLQCRICI

SEQ ID NO: 5213 - protein, 566 aa, Artificial Sequence; identical to SEQ ID NO: 4871
  derived and/or modified protein sequence (wt) from hemagglutinin__InfluenzaA__ADJ81013

SEQ ID NO: 5214 - protein, 566 aa, Artificial Sequence
  derived and/or modified protein sequence (wt) from hemagglutinin__InfluenzaA__ADJ81023
MKAILVVLLYTFATANADTLCIGYHANNSTDTVDTVLEKNVTVTHSVNLLEDKHNGKLCKLRGVAPLHLGKCNIAGWILGNPECESLSTASSWSYIVETSSSDNGTCYPGDFIDYEELREQLSSVSSFERFEMFPKTSSWPNHDSNKGVTAACPHAGAKSFYKNLIWLVKKGNSYPKLNKSYINDKGKEVLVLWGIHHPSTSADQQSLYQNADAYVFVGTSRYSKKFKPEIAIRPKVRDQEGRMNYYWTLVEPGDKITFEATGNLVVPRYAFAMERNAGSGIIISDTPVHDCNTTCQTPKGAINTSLPFQNIHPITIGKCPKYVKSTKLRLATGLRNVPSIQSRGLFGAIAGFIEGGWTGMVDGWYGYHHQNEQGSGYAADLKSTQNAIDEITNKVNSVIEKMNTQFTAVGKEFNHLEKRIENLNKKVDDGFLDIWTYNAELLVLLENERTLDYHDSNVKNLYEKVRSQLKNNAKEIGNGCFEFYHKCDNTCMESVKNGTYDYPKYSEEAKLNREEIDGVKLESTRIYQILAIYSTVASSLVLVVSLGAISFWMCSNGSLQCRICI

SEQ ID NO: 5215 - protein, 566 aa, Artificial Sequence; identical to SEQ ID NO: 3833
  derived and/or modified protein sequence (wt) from hemagglutinin__InfluenzaA__ADJ81033

SEQ ID NO: 5216 - protein, 566 aa, Artificial Sequence; identical to SEQ ID NO: 2669
  derived and/or modified protein sequence (wt) from hemagglutinin__InfluenzaA__ADJ81043

SEQ ID NO: 5217 - protein, 566 aa, Artificial Sequence
  derived and/or modified protein sequence (wt) from hemagglutinin__InfluenzaA__ADJ81053
MKAILVVLLYTFTTANADTLCIGYHANNSTDTVDTVLEKNVTVTHSVNLLEDKHNGKLCKLRGVAPLHLGKCNIAGWILGNPECESLSTASSWSYIVETSSSDNGTCYPGDFIDYEELREQLSSVSSFERFEIFPKTSSWPNHDSNKGVTAACPHAGAKSFYKNLIWLVKKGNSYPKLSKSYINDKGKEVLVLWGIHHPSTSADQQSLYQNADAYVFVGTSRYSKKFKPEIAIRPKVRDQEGRMNYYWTLVEPGDKITFEATGNLVVPRYAFAMERNAGSGIIISDTPVHDCNTTCQTPKGAINTSLPFQNIHPITIGKCPKYVKSTKLRLATGLRNVPSIQSRGLFGAIAGFIEGGWTGMVDGWYGYHHQNEQGSGYAADLKSTQNAIDKITNKVNSVIEKMNTQFTAVGKEFNHLEKRIENLNKKVDDGFLDIWTYNAELLVLLENERTLDYHDSNVKNLYEKVRSQLKNNAKEIGNGCFEFYHKCDNTCMESVKNGTYDYPKYSEEAKLNREEIDGVKLESTRIYQILAIYSTVASSLVLVVSLGAISFWMCSNGSLQCRICI

SEQ ID NO: 5218 - protein, 566 aa, Artificial Sequence; identical to SEQ ID NO: 3833
  derived and/or modified protein sequence (wt) from hemagglutinin__InfluenzaA__ADJ81063

SEQ ID NO: 5219 - protein, 566 aa, Artificial Sequence; identical to SEQ ID NO: 3613
  derived and/or modified protein sequence (wt) from hemagglutinin__InfluenzaA__ADJ84772

SEQ ID NO: 5220 - protein, 566 aa, Artificial Sequence
  derived and/or modified protein sequence (wt) from hemagglutinin__InfluenzaA__ADJ88782
MKTIIALSYMLCLVFAQKLPGNDNSTATLCLGHHAVPNGTIVKTITNDQIEVTNATELVQSSSTGEICDSPHQILDGENCTLIDALLGDPQCDGFQNKKWDLFVERSKAYSNCYPYDVPDYASLRSLIASSGTLEFNNESFNWTGVTQNGTSSACIRRSNNSFFSRLNWLTHLKFKYPALNVTMPNNEQFDKLYIWGVHHPGTDNDQIFLYAQASGRITVSTKRSQQTVIPNIGSRPRVRNIPSRISIYWTIVKPGDILLINSTGNLIAPRGYFKIRSGKSSIMRSDAPIGKCNSECITPNGSIPNDKPFQNVNRITYGACPRYVKQNTLKLATGMRNVPEKQTRGIFGAIAGFIENGWEGMVDGWYGFRHQNSEGRGQAADLKSTQAAIDQINGKLNRLIGKTNEKFHQIEKEFSEVEGRIQDLEKYVEDTKIDLWSYNAELLVALENQHTIDLTDSEMNKLFEKTKKQLGENAEDMGNGCFKIYHKCDNACIGSIRNGTYDHDVYRDEALNNRFQIKGVELKSGYKDWILWISFAISCFLLCVALLGFIMWACQKGNIRCNICI

SEQ ID NO: 5221 - protein, 566 aa, Artificial Sequence
  derived and/or modified protein sequence (wt) from hemagglutinin__InfluenzaA__ADK21733
MKAILVVLLYTFATANADTLCIGYHANNSTDTVDTVLEKNVTVTHSVNLLEDKHNGKLCKLRGVAPLHLGKCNIAGWILGNPECESLSTASSWSYIVETSSSDNGTCYPGDFIDYEELREQLSSVSSFERFEIFPKTSSWPNHDSNKGVTAACPHAGAKSFYKNLIWLVKKGNSYPKLSKSYINDKGKEVLVLWGIHHPSTSTDQQSLYQNADAYVFVGTSRYSKKFKPEIAIRPKVRDQEGRMNYYWTLVEPGDKITFEATGNLVVPRYAFAMERNAGSGIIISDTPAHDCNTTCQTPKGAINTSLPFQNIHPITIGKCPKYVKSTKLRLATGLRNVPSIQSRGLFGAIAGFIEGGWTGMVDGWYGYHHQNEQGSGYAADLKSTQNAIDKITNKVNSVIEKMNTQFTAVGKEFNHLEKRIENLNKKVDDGFLDIWTYNAELLVLLENERTLDYHDSNVKNLYEKVRSQLKNNAKEIGNGCFEFYHKCDNTCMESVKNGTYDYPKYSEEAKLNREEIDGVKLESTRIYQILAIYSTVASSLVLVVSLGAISFWMCSNGSLQCRICI

SEQ ID NO: 5222 - protein, 566 aa, Artificial Sequence
  derived and/or modified protein sequence (wt) from hemagglutinin__InfluenzaA__ADK21743
MKAILVVLLYTFATANADTLCIGYHANNSTDTVDTVLEKNVTVTHSVNLLEDKHNGKLCKLRGVAPLHLGKCNIAGWILGNPECESLSTASSWSYIVETSSSDNGTCYPGDFIDYEELREQLSSVSSFERFEIFPKTSSWPNHDSNKGVTAACPHAGAKSFYKNLIWLVKKGNSYPKISNSYINDKGKEVLVLWGIHHPSTSADQQSLYQNADAYVFVGTSRYSKKFKPEIAIRPKVRDQEGRMNYYWTLVEPGDKITFEATGNLVVPRYAFAMERNAGSGIIISDTPAHDCNTTCQTPKGAINTSLPFQNIHPITIGKCPKYVKSTKLRLATGLRNVPSIQSRGLFGAIAGFIEGGWTGMVDGWYGYHHQNEQGSGYAADLKSTQNAIDEITNKVNSVIEKMNTQFTAVGKEFNHLEKRIENLNKKVDDGFLDIWTYNAELLVLLENERTLDYHDSNVKNLYEKVRSQLKNNAKEIGNGCFEFYHKCDNTCMESVKNGTYDYPKYSEEAKLNREEIDGVKLESTRIYQILAIYSTVASSLVLVVSLGAISFWMCSNGSLQCRICI

SEQ ID NO: 5223 - protein, 566 aa, Artificial Sequence
  derived and/or modified protein sequence (wt) from hemagglutinin__InfluenzaA__ADK21753
MKAILVVLLYTFATANADTLCIGYHANNSTDTVDTVLEKNVTVTHSVNLLEDKHNGKLCKLRGVAPLHLGKCNIAGWILGNPECESLSTASSWSYIVETSSSDNGTCYPGDFIDYEELREQLSSVSSFERFEIFPKTSSWPNHDSNKGVTAACPHAGAKSFYKNLIWLVKKGNSYPKLSKSYINDKGKEVLVLWGIHHPSTSADQQSLYQNADAYVFVGTSRYSKKFKPEIAIRPKVRDQEGRMNYYWTLVEPGDKITFEATGNLVVPRYAFAMEGNAGSGIIISDTPVHDCNTTCQTPKGAINTSLPFQNIHPITIGKCPKYVKSTKLRLATGLRNVPSIQSRGLFGAIAGFIEGGWTGMVDGWYGYHHQNEQGSGYAADLKSTQNAIDKITNKVNSVIEKMNTQFTAVGKEFNHLEKRIENLNKKVDDGFLDIWTYNAELLVLLENERTLDYHDSNVKNLYEKVRSQLKNNAKEIGNGCFEFYHKCDNTCMESVKNGTYDYPKYSEEAKLNREEIDGVKLESTRIYQILAIYSTVASSLVLVVSLGAISFWMCSNGSLQCRICI

SEQ ID NO: 5224 - protein, 566 aa, Artificial Sequence
  derived and/or modified protein sequence (wt) from hemagglutinin__InfluenzaA__ADK21763
MKAILVVLLYTFATANADTLCIGYHANNSTDTVDTVLEKNVTVTHSVNLLEDKHNGKLCKLRGVAPLHLGKCNIAGWILGNPECESLSTASSWSYIVETSSSDNGTCYPGDFIDYEELREQLSSVSSFERFEIFPKTSSWPNHDSNKGVTAACPHAGAKSFYKNLIWLVKKGNSYPKLSKSYINDKGKEVLVLWGIHHPSTSADQQSLYQNADAYVFVGTSKYSKKFKPEIAIRPKVRDQEGRMNYYWTLVEPGDKITFEATGNLVVPRYAFAMERNAGSGIIISDTPVHDCNTTCQTPKGAINTSLPFQNIHPITIGKCPKYVKSTKLRLATGLRNVPSIQSRGLFGAIAGFIEGGWTGMVDGWYGYHHQNEQGSGYAADLKSTQNAIDEITNKVNSVIEKMNTQFTAVGKEFNHLEKRIENLNKKVDDGFLDIWTYNAELLVLLENERTLDYHDSNVKNLYEKVRSQLKNNAKEIGNGCFEFYHKCDNTCMESVKNGTYDYPKYSEEAKLNREEIDGVKLESTRIYQILAIYSTVASSLVLVVSLGAISFWMCSNGSLQCRICI

SEQ ID NO: 5225 - protein, 566 aa, Artificial Sequence; identical to SEQ ID NO: 3833
  derived and/or modified protein sequence (wt) from hemagglutinin__InfluenzaA__ADK21773

SEQ ID NO: 5226 - protein, 566 aa, Artificial Sequence; identical to SEQ ID NO: 3833
  derived and/or modified protein sequence (wt) from hemagglutinin__InfluenzaA__ADK21783

SEQ ID NO: 5227 - protein, 566 aa, Artificial Sequence; identical to SEQ ID NO: 2669
  derived and/or modified protein sequence (wt) from hemagglutinin__InfluenzaA__ADK21813

SEQ ID NO: 5228 - protein, 566 aa, Artificial Sequence; identical to SEQ ID NO: 4089
  derived and/or modified protein sequence (wt) from hemagglutinin__InfluenzaA__ADK21823

SEQ ID NO: 5229 - protein, 566 aa, Artificial Sequence
  derived and/or modified protein sequence (wt) from hemagglutinin__InfluenzaA__ADK21833
MKAILVVLLYTFATANADTLCIGYHANNSTDTVDTVLEKNVTVTHSVNLLEDKHNGKLCKLRGVAPLHLGKCNIAGWILGNPECESLSTASSWSYIVETSSSDNGTCYPGDFIDYEELREQLSSVSSFERFEIFPKTSSWPNHDSNKGVTAACPHAGAKSFYKNLIWLVKKGNSYPKLSKSYINDKGKEVLVLWGIHHPSTSADQQSLYQNADAYVFVGTSRYSKKFKPEIAIRPKVRDQEGRMNYYWTLVEPGDKITFEATGNLVVPRYAFAMERNAGSGIIISDTPVRDCNTTCQTPKGAINTSLPFQNIHPITIGKCPKYVKSTKLRLATGLRNVPSIQSRGLFGAIAGFIEGGWTGMVDGWYGYHHQNEQGSGYAADLKSTQNAIDEITNKVNSVIEKMNTQFTAVGKEFNHLEKRIENLNKKVDDGFLDIWTYNAELLVLLENERTLDYHDSNVKNLYEKVRSQLKNNAKEIGNGCFEFYHKCDNTCMESVKNGTYDYPKYSEEAKLNREEIDGVKLESTRIYQILAIYSTVASSLVLVVSLGAISFWMCSNGSLQCRICI

SEQ ID NO: 5230 - protein, 566 aa, Artificial Sequence; identical to SEQ ID NO: 3833
  derived and/or modified protein sequence (wt) from hemagglutinin__InfluenzaA__ADK21843

SEQ ID NO: 5231 - protein, 566 aa, Artificial Sequence; identical to SEQ ID NO: 3022
  derived and/or modified protein sequence (wt) from hemagglutinin__InfluenzaA__ADK21853

SEQ ID NO: 5232 - protein, 566 aa, Artificial Sequence; identical to SEQ ID NO: 4318
  derived and/or modified protein sequence (wt) from hemagglutinin__InfluenzaA__ADK21863

SEQ ID NO: 5233 - protein, 566 aa, Artificial Sequence; identical to SEQ ID NO: 3116
  derived and/or modified protein sequence (wt) from hemagglutinin__InfluenzaA__ADK21873

SEQ ID NO: 5234 - protein, 566 aa, Artificial Sequence
  derived and/or modified protein sequence (wt) from hemagglutinin__InfluenzaA__ADK21883
MKAILVVLLYTFATANADTLCIGYHANNSTDTVDTVLEKNVTVTHSVNLLEDKHNGKLCKLRGVAPLHLGKCNIAGWILGNPECESLSTASSWSYIVETSSSDNGTCYPGDFIDYEELREQLSSVSSFERFEIFPKTSSWPNHDSNKGVTAACPHAGAKSFYKNLIWLVKKGNSYPKLSKSYINDKGKEVLVLWGIHHPSTSADQQSLYQNADAYVFVGTSRYSKKFKPEIAIRPKVRDQEGRMNYYWTLVEPGDKITFEATGNLVVPKYAFAMERNAGSGIIISDTPVHDCNTTCQTPKGAINTSLPFQNIHPITIGKCPKYVKSTKLRLATGLRNIPSIQSRGLFGAIAGFIEGGWTGMVDGWYGYHHQNEQGSGYAADLKSTQNAIDEITNKVNSVIEKMNTQFTAVGKEFNHLEKRIENLNKKVDDGFLDIWTYNAELLVLLENERTLDYHDSNVKNLYEKVRSQLKNNAKEIGNGCFEFYHKCDNTCMESVKNGTYDYPKYSEEAKLNREEIDGVKLESTRIYQILAIYSTVASSLVLVVSLGAISFWMCSNGSLQCRICI

SEQ ID NO: 5235 - protein, 566 aa, Artificial Sequence; identical to SEQ ID NO: 2669
  derived and/or modified protein sequence (wt) from hemagglutinin__InfluenzaA__ADK21893

SEQ ID NO: 5236 - protein, 566 aa, Artificial Sequence; identical to SEQ ID NO: 4266
  derived and/or modified protein sequence (wt) from hemagglutinin__InfluenzaA__ADK21903

SEQ ID NO: 5237 - protein, 566 aa, Artificial Sequence; identical to SEQ ID NO: 4379
  derived and/or modified protein sequence (wt) from hemagglutinin__InfluenzaA__ADK21913

SEQ ID NO: 5238 - protein, 566 aa, Artificial Sequence
  derived and/or modified protein sequence (wt) from hemagglutinin__InfluenzaA__ADK21923
MKAILVVLLYTFATANADTLCIGYHANNSTDTVDTVLEKNVTVTHSVNILEDKHNGKLCKLRGVAPLHLGKCNIAGWILGNPECESLSTASSWSYIVETSSSDNGTCYPGDFIDYEELREQLSSVSSFERFEIFPKTSSWPNHDSNKGVTAACPHAGAKSFYKNLIWLVKKGNSYPKLSKSYINDKGKEVLVLWGIHHPSTSADQQSLYQNADAYVFVGTSRYSKKFKPEIAIRPKVRDQEGRMNYYWTLVEPGDKITFEATGNLVVPRYAFAMERNAGSGIIISDTPVHDCNTTCQTPKGAINTSLPFQNIHPITIGKCPKYVKSTKLRLATGLRNVPSIQSRGLFGAIAGFIEGGWTGMVDGWYGYHHQNEQGSGYAADLKSTQNAIDEITNKVNSVIEKMNTQFTAVGKEFNHLEKRIENLNKKVDDGFLDIWTYNAELLVLLENERTLDYHDSNVKNLYEKARSQLKNNAKEIGNGCFEFYHKCDNTCMESVKNGTYDYPKYSEEAKLNREKIDGVKLESTRIYQILAIYSTVASTLVLVVSLGAISFWMCSNGSLQCRICI

SEQ ID NO: 5239 - protein, 566 aa, Artificial Sequence
  derived and/or modified protein sequence (wt) from hemagglutinin__InfluenzaA__ADK21933
MKAILVVLLYTFATANADTLCIGYHANNSTDTVDTVLEKNVTVTHSVDLLEDKHNGKLCKLRGVAPLHLGKCNIAGWILGNPECESLSTASSWSYIVETSSSDNGTCYPGDFIDYEELREQLSSVSSFERFEIFPKTSSWPNHDSNKGVTAACPNAGAKSFYKNLIWLVKKGNSYPKLSKSYINDKGKEVLVLWGIHHPSTSADQQSLYQNADAYVFVGTSRYSKKFKPEIAIRPKVRDQEGRMNYYWTLVEPGDKITFEATGNLVVPRYAFAMERNAGSGIIISDTPVHDCNTTCQTPKGAINTSLPFQNIHPITIGKCPKYVKSTKLRLATGLRNVPSIQSRGLFGAIAGFIEGGWTGMVDGWYGYHHQNEQGSGYAADLKSTQNAIDEITNKVNSVIEKMNTQFTAVGKEFNHLEKRIENLNKKVDDGFLDIWTYNAELLVLLENERTLDYHDSNVKNLYEKVRSQLKNNAKEIGNGCFEFYHKCDNTCMESVKNGTYDYPKYSEEAKLNREEIDGVKLESTRIYQILAIYSTVASSLVLVVSLGAISFWMCSNGSLQCRICI

SEQ ID NO: 5240 - protein, 566 aa, Artificial Sequence; identical to SEQ ID NO: 2669
  derived and/or modified protein sequence (wt) from hemagglutinin__InfluenzaA__ADK21943

SEQ ID NO: 5241 - protein, 566 aa, Artificial Sequence
  derived and/or modified protein sequence (wt) from hemagglutinin__InfluenzaA__ADK21953
MKAILVVLLYTFATANADTLCIGYHANNSTDTVDTVLEKNVTVTHSVNLLEDKHNGKLCKLRGVAPLHLGKCNIAGWILGNPECESLSTASSWSYIVETSSSDNGTCYPGDFIDHEELREQLSSVSSFERFEIFPKTSSWPNHDSNKGVTAACPHAGAKSFYKNLIWLVKKGNSYPKLSKSYINDKGKEVLVLWAIHHPSTSADQQSLYQNADAYVFVGTSRYSKKFKPEIAIRPKVRDQEGRMNYYWTLVEPGDKITFEATGNLVVPRYAFAMERNAGSGIIISDTPVHDCNTTCQTPKGAINTSLPFQNIHPITIGKCPKYVKSTKLRLATGLRNVPSIQSRGLFGAIAGFIEGGWTGMVDGWYGYHHQNEQGSGYAADLKSTQNAIDEITNKVNSVIEKMNTQFTAVGKEFNHLEKRIENLNKKVDDGFLDIWTYNAELLVLLENERTLDYHDSNVKNLYEKVRSQLKNNAKEIGNGCFEFYHKCDNTCMESVKNGTYDYPKYSEEAKLNREEIDGVKLESTRIYQILAIYSTVASSLVLVVSLGAISFWMCSNGSLQCRICI

SEQ ID NO: 5242 - protein, 566 aa, Artificial Sequence; identical to SEQ ID NO: 4856
  derived and/or modified protein sequence (wt) from hemagglutinin__InfluenzaA__ADK32390

SEQ ID NO: 5243 - protein, 566 aa, Artificial Sequence; identical to SEQ ID NO: 4856
  derived and/or modified protein sequence (wt) from hemagglutinin__InfluenzaA__ADK32400

SEQ ID NO: 5244 - protein, 566 aa, Artificial Sequence
  derived and/or modified protein sequence (wt) from hemagglutinin__InfluenzaA__ADK32420
MKAILVVLLYTFATANADTLCIGYHANNSTDTVDTVLEKNVTVTHSVNLLEDKHNGKLCKLRGVAPLHLGKCNIAGWILGNPECESLSTASSWSYIVETSSSDNGTCYPGDFIDYEELREQLSSVSSFERFEIFPKTSSWPNHDSNKGVTAACPHAGAKSFYKNLIWLVKKGNSYPKLSKSYINDKGKEVLVLWGIHHPSTSADQQSLYQNADAYVFVGTSRYSKKFKPEIAIRPKVREQEGRMNYYWTLVEPGDKITFEATGNLVVPRYAFAMERNAGSGIIISDTPVHDCNTTCQTPKGAINTSLPFQNIHSITIGKCPKYVKSTKLRLATGLRNVPSIQSRGLFGAIAGFIEGGWTGMVDGWYGYHHQNEQGSGYAADLKSTQNAIDEITNKVNSVIEKMNTQFTAVGKEFNHLEKRIENLNKKVDDGFLDIWTYNAELLVLLENERTLDYHDSNVKNLYEKVRNQLKNNAKEIGNGCFEFYHKCDNTCMESVKNGTYDYPKYSEEAKLNREEIDGVKLESTRIYQILAIYSTVASSLVLVVSLGAISFWMCSNGSLQCRICI

SEQ ID NO: 5245 - protein, 566 aa, Artificial Sequence; identical to SEQ ID NO: 4221
  derived and/or modified protein sequence (wt) from hemagglutinin__InfluenzaA__ADK32430

SEQ ID NO: 5246 - protein, 566 aa, Artificial Sequence
  derived and/or modified protein sequence (wt) from hemagglutinin__InfluenzaA__ADK32440
MKAILVVLLYTFATANADTLCIGYHANNSTDTVDTVLEKNVTVTHSVNLLEDKHNGKLCKLRGVAPLHLGKCNIAGWILGNPECESLSTASSWSYIVETSSSDNGTCYPGDFIDYEELREQLSSVSSFERFEIFPKTSSWPNHDSNKGVTAACPHAGAKSFYKNLIWLVKKGNSYPKLSKSYINDKGKEVLVLWGIHHPSTSADQQSLYQNADAYVFVGTSRYSKKFKPEIAIRPKVRDQEGRMNYYWTLVEPGDKITFEATGNLVVPRYAFAMERNAGSGIIISDTPVHDCNTTCQTPKGAINTSLPFQNIHPITIGKCPKYVKSTKLRLATGLRNVPSIQSRGLFGAIAGFIEGGWTGMVDGWYGYHHQNEQGSGYAADLKSTQNAIDGITNKVNSVIEKMNTQFTAVGKEFNHLEKRIENLNKKVDDGFLDIWTYNAELLVLLENERTLDYHDSNVKNLYEKVRSQLKNNAKEIGNGCFEFYHKCDNTCMESVKNGTYDYPKYSEEAKLNREEIDGVKLESTRIYQILAIYSTVASSLVLVVSLGAISFWMCSNGSLQCRICI

SEQ ID NO: 5247 - protein, 566 aa, Artificial Sequence
  derived and/or modified protein sequence (wt) from hemagglutinin__InfluenzaA__ADK32450
MKAILVVLLYTFATANADTLCIGYHANNSTDTVDTVLEKNVTVTHSVNILEDKHNGKLCKLRGVAPLHLGKCNIAGWILGNPECESLSTASSWSYIVETSSSDNGTCYPGDFIDYEELREQLSSVSSFERFEIFPKTSSWPNHDSNKGVTAACPHAGAKSFYKNLIWLVKKGNSYPKLSKSYINDKGKEVLVLWGIHHPSTSADQQSLYQNADAYVFVGSSRYSKKFKPEIAIRPKVRDQEGRMNYYWTLVEPGDKITFEATGNLVVPRYAFAMERNAGSGIIISDAPVHDCNTTCQTPKGAINTSLPFQNIHPITIGKCPKYVKSTKLRLATGLRNVPSIQSRGLFGAIAGFIEGGWTGMVDGWYGYHHQNEQGSGYAADLKSTQNAIDEITNKVNSVIEKMNTQFTAVGKEFNHLEKRIENLNKKVDDGFLDIWTYNAELLVLLENERTLDYHDSNVKNLYEKVRSQLKNNAKEVGNGCFEFYHKCDNTCMESVKNGTYDYPKYSEEAKLNREEIDGVKLESTRIYQILAIYSTAASSLVLVVSLGAISFWMCSNGSLQCRICI

SEQ ID NO: 5248 - protein, 566 aa, Artificial Sequence
  derived and/or modified protein sequence (wt) from hemagglutinin__InfluenzaA__ADK32460
MKAILVVLLYTFATANADTLCIGYHANNSTDTVDTVLEKNVTVTHSVNLLEDKHNGKLCKLRGVAPLHLGKCNIAGWILGNPECESLSTASSWSYIVETSSSDNGTCYPGDFIDYEELREQLSSVSSFERFEIFPKTSSWPNHDSNKGVTAACPHAGAKSFYKNLIWLVKKGNSYPKLSKSYINDKGKEVLVLWGIHHPSTSADQQSLYQNADAYAFVGTSRYSKKFKPEIAIRPKVRDQEGRMNYYWTLVEPGDKITFEATGNLVVPRYAFAMERNAGSGIIISDTPVHDCNTTCQTPKGAINTSLPFQNIHPITIGKCPKYVKSTKLRLATGLRNVPSIQSRGLFGAIAGFIEGGWTGMVDGWYGYHHQNEQGSGYAADLKSTQNAIDEITNKVNSVIEKMNTQFTAVGKEFNHLEKRIENLNKKVDDGFLDIWTYNAELLVLLENERTLDYHDSNVKNLYEKVRSQLKNNAKEIGNGCFEFYHKCDNTCMESVKNGTYDYPKYSEEAKLNREEIDGVKLESTRIYQILAIYSTVASSLVLVVSLGAISFWMCSNGSLQCRICI

SEQ ID NO: 5249 - protein, 566 aa, Artificial Sequence; identical to SEQ ID NO: 3833
  derived and/or modified protein sequence (wt) from hemagglutinin__InfluenzaA__ADK32470

SEQ ID NO: 5250 - protein, 566 aa, Artificial Sequence
  derived and/or modified protein sequence (wt) from hemagglutinin__InfluenzaA__ADK32480
MKAILVVLLYTFATANADTLCIGYHANNSTDTVDTVLEKNVTVTHSVNLLEDKHNGKLCKLRGVAPLHLGKCNIAGWILGNPECESLSTASSWSYIVETSSSDNGTCYPGDFIDYEELREQLSSVSSFERFEIFPKTSSWPNHDSNKGVTAACPHAGAKSFYKNLIWLVKKGNSYPKLSKSYINDKGKEVLVLWGIHHPSTSADQQSLYQNADAYVFVGTSRYSKKFKPEIAIRPKVRDQEGRMNYYWTLVEPGDKITFEATGNLVVPRYAFAMERNAGSGIIISDTPAHDCNTTCQTPKGAINTSLPFQNIHPITIGKCPKYVKSTKLRLATGLRNVPSIQSRGLFGAIAGFIEGGWTGMVDGWYGYHHQNEQGSGYAADLKSTQNAIDKITNKVNSVIEKMNTQFTAVGKEFNHLEKRIENLNKKVDDGFLDIWTYNAELLVLLENERTLDYHDSNVKNLYEKVRSQLKNNAKEIGNGCFEFYHKCDNTCMESVKNGTYDYPKYSEEAKLNREEIDGVKLESTRIYQILAIYSTVASSLVLVVSLGAISFWMCSNGSLQCRICI

SEQ ID NO: 5251 - protein, 566 aa, Artificial Sequence; identical to SEQ ID NO: 3833
  derived and/or modified protein sequence (wt) from hemagglutinin__InfluenzaA__ADK32490

SEQ ID NO: 5252 - protein, 566 aa, Artificial Sequence; identical to SEQ ID NO: 3833
  derived and/or modified protein sequence (wt) from hemagglutinin__InfluenzaA__ADK32502

SEQ ID NO: 5253 - protein, 566 aa, Artificial Sequence; identical to SEQ ID NO: 4305
  derived and/or modified protein sequence (wt) from hemagglutinin__InfluenzaA__ADK32637

SEQ ID NO: 5254 - protein, 566 aa, Artificial Sequence; identical to SEQ ID NO: 3833
  derived and/or modified protein sequence (wt) from hemagglutinin__InfluenzaA__ADK32647

SEQ ID NO: 5255 - protein, 566 aa, Artificial Sequence; identical to SEQ ID NO: 3997
  derived and/or modified protein sequence (wt) from hemagglutinin__InfluenzaA__ADK32657

SEQ ID NO: 5256 - protein, 566 aa, Artificial Sequence; identical to SEQ ID NO: 4221
  derived and/or modified protein sequence (wt) from hemagglutinin__InfluenzaA__ADK32677

SEQ ID NO: 5257 - protein, 566 aa, Artificial Sequence
  derived and/or modified protein sequence (wt) from hemagglutinin__InfluenzaA__ADK32687
MKAILVVLLYTFATANADTLCIGYHANNSTDTVDTVLEKNVTVTHSVNLLEDKHNGKLCKLRGVAPLHLGKCNIAGWILGNPECESLSTASSWSYIVETSSSDNGTCYPGDFIDYEELREQLSSVSSFERFEIFPKTSSWPNHDSNKGVTAACPHAGAKNFYKNLIWLVKKGNSYPKLSKSYINDKGKEVLVLWGIHHPSTSADQQSLYQNADAYVFVGTSRYSKKFKPEIAIRPKVRDQEGRMNYYWTLVEPGDKITFEATGNLVVPRYAFAMERNAGSGIIISDTPVHDCNTTCQTPKGAINTSLPFQNIHPITIGKCPKYVKSTKLRLATGLRNVPSIQSRGLFGAIAGFIEGGWTGMVDGWYGYHHQNEQGSGYAADLKSTQNAIDKITNKVNSVIEKMNTQFTAVGKEFNHLEKRIENLNKKVDDGFLDIWTYNAELLVLLENERTLDYHDSNVKNLYEKVRSQLKNNAKEIGNGCFEFYHKCDNTCMESVKNGTYDYPKYSEEAKLNREEIDGVKLESTRIYQILAIYSTVASSLVLVVSLGAISFWMCSNGSLQCRICI

SEQ ID NO: 5258 - protein, 566 aa, Artificial Sequence; identical to SEQ ID NO: 4460
  derived and/or modified protein sequence (wt) from hemagglutinin__InfluenzaA__ADK32697

SEQ ID NO: 5259 - protein, 566 aa, Artificial Sequence; identical to SEQ ID NO: 3833
  derived and/or modified protein sequence (wt) from hemagglutinin__InfluenzaA__ADK32776

SEQ ID NO: 5260 - protein, 566 aa, Artificial Sequence; identical to SEQ ID NO: 4221
  derived and/or modified protein sequence (wt) from hemagglutinin__InfluenzaA__ADK33621

SEQ ID NO: 5261 - protein, 566 aa, Artificial Sequence
  derived and/or modified protein sequence (wt) from hemagglutinin__InfluenzaA__ADK33631
MKAILVVLLYTFATANADTLCIGYHANNSTDTVDTVLEKNVTVTHSVNLLEVKHNGKLCKLRGVAPLHLGKCNIAGWILGNPECESLSTASSWSYIVETSSSDNGTCYPGDFINYEELREQLSSVSSFERFEIFPKTSSWPNHDSNKGVTAACPHAGAKSFYKNLIWLVKKGNSYPKLSKSYINDKGKEVLVLWGIHHPSTSADQQSLYQNADAYVFVGTSRYSKKFKPEIAIRPKVRDQEGRMNYYWTLVEPGDKITFEATGNLVVPRYAFAMERNAGSGIIISDTPVHDCNTTCQTPKGAINTSLPFQNIHPITIGKCPKYVKSTKLRLATGLRNVPSIQSRGLFGAIAGFIEGGWTGMVDGWYGYHHQNEQGSGYAADLKSTQNAIDKITNKVNSVIEKMNTQFTAVGKEFNHLEKRIENLNKKVDDGFLDIWTYNAELLVLLENERTLDYHDSNVKNLYEKVRSQLKNNAKEIGNGCFEFYHKCDNTCMESVKNGTYDYPKYSEEAKLNREEIDGVKLESTRIYQILAIYSTVASSLVLVVSLGAISFWMCSNGSLQCRICI

SEQ ID NO: 5262 - protein, 566 aa, Artificial Sequence; identical to SEQ ID NO: 4221
  derived and/or modified protein sequence (wt) from hemagglutinin__InfluenzaA__ADK33641

SEQ ID NO: 5263 - protein, 566 aa, Artificial Sequence; identical to SEQ ID NO: 3833
  derived and/or modified protein sequence (wt) from hemagglutinin__InfluenzaA__ADK33651

SEQ ID NO: 5264 - protein, 566 aa, Artificial Sequence; identical to SEQ ID NO: 3833
  derived and/or modified protein sequence (wt) from hemagglutinin__InfluenzaA__ADK33661

SEQ ID NO: 5265 - protein, 566 aa, Artificial Sequence; identical to SEQ ID NO: 3833
  derived and/or modified protein sequence (wt) from hemagglutinin__InfluenzaA__ADK33671

SEQ ID NO: 5266 - protein, 566 aa, Artificial Sequence
  derived and/or modified protein sequence (wt) from hemagglutinin__InfluenzaA__ADK33681
MKAILVVLLYTFATANADTLCIGYHANNSTDTVDTVLEKNVTVTHSVNLLEDKHNGKLCKLRGVAPLHLGKCNIAGWILGNPECESLSTASSWSYIVETSSSDNGTCYPGDFIDYEELREQLSSVSSFERFEIFPKTSSWPNHDSNKGVTAACPHAGAKSFYKNLIWLVKKGNSYPKLSKSYINDKGKEVLVLWGIHHPSTSADQQSLYQNADAYVFVGTSRYSKKFKPEIAIRPKVRDQEGRMNYYWTLVEPGDKITFEATGNLVVPRYAFAMERNAGSGIIISDTPVHDCNTTCQTPKGAINTSLPFQNIHPITIGKCPKYVKSTKLRLATGLRNVPSIQSRGLFGAIAGFIEGGWTGMVDGWYGYHHQNEQGSGYAADLKSTQNAIDEITNKVNSVIEKMNTQFTAVGKEFNHLEKRIENLNKKVDDGFLDIWTYNAELLVLLENERTLDYHDSNVKKLYEKVRSQLKNNAKEIGNGCFEFYHKCDNTCMESVKNGTYDYPKYSEEAKLNREEIDGVKLESTRIYQILAIYSTVASSLVLVVSLGAISFWMCSNGSLQCRICI

SEQ ID NO: 5267 - protein, 566 aa, Artificial Sequence; identical to SEQ ID NO: 4282
  derived and/or modified protein sequence (wt) from hemagglutinin__InfluenzaA__ADK33691

SEQ ID NO: 5268 - protein, 566 aa, Artificial Sequence
  derived and/or modified protein sequence (wt) from hemagglutinin__InfluenzaA__ADK33701
MKAILVVLLYTFATANADTLCIGYHANNSTDTVDTVLEKNVTVTHSVNLLEDKHNGKLCKLRGVAPLHLGKCNIAGWILGNPECESLSTASSWSYIVETSSSDNGTCYPGDFIDYEELREQLSSVSSFERFEIFPKTSSWPNHDSNKGVTAACPHAGAKSFYKNLIWLVKKGNSYPKLSKSYINDKGKEVLVLWGIHHPSTSADQQSLYQNADAYVFVGTSRYSKKFKPEIAIRPKVRDQEGRMNYYWTLVEPGDKITFEATGNLVVPRYAFAMERNAGSGIIISDTPVHDCNTTCQTPKGAINTSLPFQNIHPITIGKCPKYVKSTKLRLATGLRNVPSIQSRGLFGAIAGFIEGGWTGMVDGWYGYHHQNEQGSGYAADLKSTQNAIDKITNKVNSVIEKMNTQFTAVGKEFNHLEKRIENLNKKVDDGFLDIWTYNAELLVLLENERTLDYHDSNVKNLYEKVRSQLKNNAKEIGNGCFEFYHKCDNTCMESVKNGTYDYPKYSEEAKLNREEIDGVKLESTRVYQILAIYSTVASSLVLVVSLGAISFWMCSNGSLQCRICI

SEQ ID NO: 5269 - protein, 566 aa, Artificial Sequence
  derived and/or modified protein sequence (wt) from hemagglutinin__InfluenzaA__ADK33711
MKAILVVLLYTFATANADTLCIGYHANNSTDTVDTVLEKNVTVTHSVNLLEDKHNGKLCKLRGVAPLHLGKCNIAGWILGNPECESLSTASSWSYIVETSSSDNGTCYPGDFIDYEELREQLSSVSSFERFEIFPKTSSWPNHDSNKGVTAACPHAGAKSFYKNLIWLVKKGNSYPKLSKSYINDKGKEILVLWGIHHPSTSADQQSLYQNADAYVFVGTSRYSKKFKPEIAIRPKVRDQEGRMNYYWTLVEPGDKITFEATGNLVVPRYAFAMERNAGSGIIISDTPVHDCNTTCQTPKGAINTSLPFQNIHPITIGKCPKYVKSTKLRLATGLRNIPSIQSRGLFGAIAGFIEGGWTGMVDGWYGYHHQNEQGSGYAADLKSTQNAIDEITNKVNSVIEKMNTQFTAVGKEFNHLEKRIENLNKKVDDGFLDIWTYNAELLVLLENERTLDYHDSNVKNLYEKVRSQLKNNAKEIGNGCFEFYHKCDNTCMESVKNGTYDYPKYSEEAKLNREEIDGVKLESTRIYQILAIYSTVASSLVLVVSLGAISFWMCSNGSLQCRICI

SEQ ID NO: 5270 - protein, 566 aa, Artificial Sequence
  derived and/or modified protein sequence (wt) from hemagglutinin__InfluenzaA__ADK33721
MKAILVVLLYTFVTANADTLCIGYHANNSTDTVDTVLEKNVTVTHSVNLLEDKHNGKLCKLRGVAPLHLGKCNIAGWILGNPECESLSTASSWSYIVETSSSDNGTCYPGDFIDYEELREQLSSVSSFERFEIFPKTSSWPNHDSNKGVTAACPHAGAKSFYKNLIWLVKKGNSYPKLSKSYINDKGKEVLVLWGIHHPSTSADQQSLYQNADAYVFVGTSRYSKKFKPEIAIRPKVRDQEGRMNYYWTLVEPGDKITFEATGNLVVPRYAFAMERNAGSGIIISDTPVHDCNTTCQTPKGAINTSLPFQNIHPITIGKCPKYVKSTKLRLATGLRNVPSIQSRGLFGAIAGFIEGGWTGMVDGWYGYHHQNEQGSGYAADLKSTQHAIDEITNKVNSVIEKMNTQFTAVGKEFNHLEKRIENLNKKVDDGFLDIWTYNAELLVLLENERTLDYHDSNVKNLYEKVRSQLKNNAKEIGNGCFEFYHKCDNTCMESVKNGTYDYPKYSEEAKLNREEIDGVKLESTRIYQILAIYSTVASSLVLVVSLGAISFWMCSNGSLQCRICI

SEQ ID NO: 5271 - protein, 566 aa, Artificial Sequence
  derived and/or modified protein sequence (wt) from hemagglutinin__InfluenzaA__ADK33731
MKATLVVLLYTFATANADTLCIGYHANNSTDTVDTVLEKNVTVTHSVNLLEDKHNGKLCKLRGVAPLHLGKCNIAGWILGNPECESLSTASSWSYIVETSSSGNGTCYPGDFIDYEELREQLSSVSSFERFEIFPKTSSWPNHDSNKGVTAACPHAGAKSFYKNLIWLVKKGNSYPKLSKSYINDKGKEVLVLWGIHHPSTSADQQSLYQNADAYAFVGTSRYSKKFKPEIAIRPKVRDQEGRMNYYWTLVEPGDKITFEATGNLLVPRYAFAMERNAGSGIIISDTPVHDCNTTCQTPKGAINTSLPFQNIHPITIGKCPKYVKSTKLRLATGLRNVPSIQSRGLFGAIAGFIEGGWTGMVDGWYGYHHQNEQGSGYAADLKSTQNAIDEITNKVNSVIEKMNTQFTAVGKEFNHLEKRIENLNKKVDDGFLDIWTYNAELLVLLENERTLDYHDSNVKNLYEKVRSQLKNNAKEIGNGCFEFYHKCDNTCMESVKNGTYDYPKYSEEAKLNREEIDGVKLESTRIYQILAIYSTVASSLVLVVSLGAISFWMCSNGSLQCRICI

SEQ ID NO: 5272 - protein, 566 aa, Artificial Sequence; identical to SEQ ID NO: 4836
  derived and/or modified protein sequence (wt) from hemagglutinin__InfluenzaA__ADK33741

SEQ ID NO: 5273 - protein, 566 aa, Artificial Sequence; identical to SEQ ID NO: 2669
  derived and/or modified protein sequence (wt) from hemagglutinin__InfluenzaA__ADK33751

SEQ ID NO: 5274 - protein, 566 aa, Artificial Sequence
  derived and/or modified protein sequence (wt) from hemagglutinin__InfluenzaA__ADK33761
MKAILVVLLYTFATANADTLCIGYHANNSTDTVDTVLEKNVTVTHSVNLLEDKHNGKLCKLRGVAPLHLGKCNIAGWILGNPECESLSTASSWSYIVETSSSDNGTCYPGDFIDYEELREQLSSVSSFERFEIFPKTSSWPNHDSNKGVTAACPHAGAKSFYKNLIWLVKKGNSYPKLSKSYINDKGKEVLVLWGIHHPSTSADQQSLYQNADAYVFVGTSRYSKKFKPEIAIRPKVRDQEGRMNYYWTLVEPGDKITFEATGNLVVPRYAFAMERNAGSGIIISDTPVHDCNTTCQTPKGAINTSLPFQNIHPITIGKCPKYVKSTKLSLATGLRNVPSIQSRGLFGAIAGFIEGGWTGMVDGWYGYHHQNEQGSGYAADLKSTQNAIDEITNKVNSVIEKMNTQFTAVGKEFNHLEKRIENLNKKVDDGFLDIWTYNAELLVLLENERTLDYHDSNVKNLYEKVRSQLKNNAKEIGNGCFEFYHKCDNTCMESVKNGTYDYPKYSEEAKLNREEIDGVKLESTRIYQILAIYSTVASSLVLVVSLGAISFWMCSNGSLQCRICI

SEQ ID NO: 5275 - protein, 566 aa, Artificial Sequence; identical to SEQ ID NO: 3833
  derived and/or modified protein sequence (wt) from hemagglutinin__InfluenzaA__ADK33771

SEQ ID NO: 5276 - protein, 566 aa, Artificial Sequence; identical to SEQ ID NO: 3833
  derived and/or modified protein sequence (wt) from hemagglutinin__InfluenzaA__ADK33781

SEQ ID NO: 5277 - protein, 566 aa, Artificial Sequence; identical to SEQ ID NO: 3770
  derived and/or modified protein sequence (wt) from hemagglutinin__InfluenzaA__ADK33791

SEQ ID NO: 5278 - protein, 566 aa, Artificial Sequence; identical to SEQ ID NO: 5268
  derived and/or modified protein sequence (wt) from hemagglutinin__InfluenzaA__ADK33801

(The sequence listing continues in the following parts.)
